United States Patent Application Publication US 2014/0057251 A1 - sequence listing, part 187

SEQ ID NO: 382487 - DNA, 1490 bp, Cannabis indica
aggggagtttcagaagttgggtgagttagttaggatgtgatgtcagagttagtttttctgttatgttagtttgtgtctgtaactaatattattcttgtactgtcatgtatatataaagggccatattgtactgttccattcattcaatgaaaattctcttgaatcatttctttcttctctttctttttctttactttctattgaaaacgaaatattttttaataaaataattaaaaaactttattaatctctttaatggaattacaatattgagctgacaaaaaatgttccaagataaactctcttctcagctacattatcaccaacgtttcctttcatagacttcacctatttaaaactaatttttttagagaaacataacaactgattaggcaaatagagtttcaccattacaaagacacaagagagcaaactctaaacaaagctctaaaaacttgcaactacaacagctactcttaacatgtaatttaaaactaatttataagccatgtccagcaagtagagcaataaagccaataatatttttcaaaacaattgctgaatttcacaatgctttacctgagacacggaacaaatcttattgacattttatttaagtttttatgaaaaaaaaaacagataattattttttaaccaaaaaaaaaactattagtttgatacaataatttatcctttttaatttgattgaattcaacaattgaattccttccttgactgactaactcaactatattatagctataaaacagtaactcagctatactgtataacatcgagcagccatattatataacaataattaggctataaaacagtaagtcagctattttagagctacataacgtgcagtaagttaaaaaattgcaaaatatatataactttattaaaaactatttttactattaaatgttatcattttttgatgatctgcatatctaaacgtcccaaactaatcatcaaattctccttgagatccttccttattcttcttcagttagcctcattgacctctatcattaacactcacctaagagacattttcactatcatcatcactactacctcttttatctcttaatcagagaaatcactttccattttccttacagcaacggtaagatttcaaatcccttttactacacttatatgtacttctaactcactaatttctcacatcataattagtagattcactactgtgtattttctagctatatcaatctaaaatcaaaatttgcttgatggtgttttctttacacccaattcttggagatccaacactccaaatttaatagggaaatttgattttttgattttctatacttagaaaatcttaaatttttttccctaaatacatacttaataatattagtaatatatgaccacattcctaatatcccacaaatacccctcccatttgaaaaaaatcaaaaactgaaatcatcattgcctcatcccgaacctctctc

SEQ ID NO: 382488 - DNA, 2028 bp, Cannabis indica
accatttctttctttatttcttgttaattttgttcatatcctcttctctattttcttattctcacaatatttttgtcttctatacgccaagactctaatttttgctatcttttgccatcattttctttagtaatttgttgtttatgcattacatgcatttttaacgtaagaatcatatactatttcaaagttgaaaaaaatacaattccattcttttgatcgcaatcttttgaatcatccatcacatttttaaattatgattatttttatgaaatgtaaagagtaattttaccaaaaaaataaaaaattaaacataatttcaatcaaatgttgtataggaatacacaaattttgagcaaattagggtatggcaatagatgcacccttttggtaattcttagctctcttttgttatatttttgaggaatccagtgataatagtatttacttgtgtgtttgcccctgcagccaagaattgatagtaaacattcaagatggttacacttgcggattcgtccatccactttaccatcggtggacctttcaaaatctggggtgagtggacaaaccaagacaaaggctttggttgacgggagatggactttagcatttaaagacgaagaatcatgtaagtgtgccttgtctatgattcttgaggagatgagtgttcaagttgaggaggtagagagaagactaaaacctttactagacattaaaactaacagtgtacataattcaaatgaacccgaatctgagtcttcatatacaacaccttccaattcattgtaagtgttaaaagagaaaaaaaaatagtgtgctatactagtggggtggcgatagtatattatgtgcagtcacccttctgtatattgttcagtgcatcttagttgagtagattagcatgtcagctatttatttccattcttttgtatactagatttccttccttggcctgatttataagtttgatcagtcttcctcacattctttaataggtgtaaccctaggctttttcttcctttgatttataagatgtgacaatgttgtatatttgagctgatttcatggtaaaggaaagccttggtgcatcattttgtcaatctgagtaagtgtagtcttaattttgattatcattttatattatgagacattttgtggttaaaaataatcttaatgttttcctatttttggataaagagtcattggtctttgctgtctaactctaatttatgttagtttggaggttataaattggatcacaattggaaaaaaatgaaaaggagaatctcgctaatgaacacgatttcatcatttcaatttattttttacccactagttggttataaaacaatttaagcttgaagcatagttgcatcaggcatcagttggtatagaatttttttcgaattggttctatttgttttggagtttttagggctttcttcattaaaagtaatgatatgtgcatttttttttaataaaatggtgaaatttttttaactaatcatttttatctagatccaaaacgttactggtgtaatgttatcatcacttgtacaaaggaaagggcaaatagtaatttctccccttggtcttgtaaagttgtcttctgattttttcgtgtgaccaaaatctccaatgaatatgtttgtttttggtaaaaatcttttaactattctacctaataagtcatcactaatacaaagaaaatggcaaatagtaatttctccccttggtcttgtaaagttctaatttttttctgaccaaaaatctccaatgaatatgtttttggcaaaaatctctttatactacctaagacctattgtaaatgtatctttggttgtattttttttttttttcttaaagtgtgttgtagtaatttctagtgtcggtgtccatttgtagagagttttagcaaaacaattatattacgagaataatgtattagattaatattaggtataatacatagttatattcttaatttttatttttgttagtatatatttttaattaaataattagttt

SEQ ID NO: 382489 - DNA, 1674 bp, Cannabis indica
tagtgttagttagagagctgttttgtctgttagaaatcagttagaggtagttagttagcttttccttgctcaatgtatatataagtacctactctgtattttactacagtaataaataaaacagagtatcattttcttcttcttgttgttattttcgattctctcttctcaagttaatatggtatcagagccacccgattggtgagctctttgcttccgcttctttgtctcgatttccttccttggttctgtcatggcgcgaggaggaagtactcaagctcgcagcaatgtcagacaaagtgttgaagaatcaaattgtttttctgctcttgatgaaaatggtagatttcctatgaatgatccacagagtccgtattatctctcaaatgccgataatgcttcttcatctctcgttcctaagattcttactggtgctgataactacagttcgtggaaaagatcaatgatggtggcattacttgctaggaacaaggtgaagttcatcaatggcaagcttctagctctcgatgaggatgatgaagactatgatgcttggatcaggtgtaatagtcttgttatttcgtggatcttgaattctgtatctcctaccatagcagacagcatcatgtatgttgaagatgcttctcagatctagtctgaattgtaggagagattccatcagaaaaacgcacctcgcgttttttaagtcaagagatctatgcagactttgacatagggatctaatgatgttacttcgtattacacttgtcttaagggattgtgggatttattgtaggaatatagaccacagccgatttgcacttgtggtgctatgaagatcatacaagaatatcaagatgaagataaggttcttgaatttctaattggtcttaatgagtcatatctcaatgctagatctcaaatcttgctctaggatcttttaccaaatgttaacaaagcatatgcttgcataattcaagaagaaaagtaaagaggaatcattattcctcaatctgaatcttcaaagtcccctggtgaaagttcaggtcaatttgcaggcagtagtcaaggaaatcgaggcaataatcgcactgataatcgatctgataacaagtacattcgatatgataatcgaccagtttgctctcactgtggtgttcctggacataccattgctaaatgttatagagtccatgggtatccacctagtcatagactatatggaaggtttcctaaataagttcctaaaggaggaaatcaaaatgatcgatcatcagctaacctagcaacagacaatgacaacaatgagggaatgactgaggaacaaaatctggcagctcaatgtcaaaggcttatggctatactggcacaaaaaatgtaggaaaattctcagcaatctcaacagcctcagcaaagtgatcaacctgttgtgtcaaatttttctggtaatgtcaatctcatctaggggtgttcattggatcacatccaatggatttggacccatccgatccaatccaattatttattggatattggatttttccatccgatccaatccaattgaattgagtcatccaatccgatccgatccaatggatgtattggattggatcggttccatccattggatgctttaactagttttattagattggattggatccatccaataaa

SEQ ID NO: 382490 - DNA, 9972 bp, Cannabis indica
ttgggcagtagcaggtgagacaggtgaggtcttgggaattcctcatgttcttgtgtgttatcattttgtttattcaatatcaaatatcaggtcttcttcgctatttttattgtcttctattctcaaatccctctatgattttgtctattatctctggtgaatattgaatggaccctagtagggttttacaaaaaaaaaaacaaacttaacaactttatatacttgcaagaaagttgaagcaacatctgccactcatcagagatccaatgtatcaacatccagtaatctttctcatttctctcaatctaagtgaccttattttcctaaactaaagaggttttgtcaaaaccatgcatatataacatatatatttataagttgcttaatctgttagcaaaagttattacacaccctaataatttaattcaacatcagaaacaaattgtaaagttaaaccaaacccacacgtcatttccgtcttatttctctacttgattaatatttcaaggaaaaaaaataatagaaaagttgacattgttccgtagtcagtattagcaatggtgaacttacataatatgccgcccagtggcaaacctcgtgcttcaattctgcgtctaatttcctcagtaactcgtaaagcagcctctgatgcaataccaaaagttgaataaaaaaggatgaaaatttgtagtgagcaataaaatggaaagcatttaccttcaagatgatctccggaggtatacaattgacaagtagctcatagattttaagccgaacctgataaagcctaaaaaaaaatatatgtgtttaacttgttagagtttaaagtatttctatagaaccccaattaattgttcagaatgaatattaattggtgaaagagacaacatataagatttctttaaccacaaatgaatcctatatgatatctttttgtatatacataactgtatgctgctcattaacaaaataattattacaggattaacaaaataagaccctttcagaaaaataaaaaataaaataaaattatttggcatcacaagttgaataggaaattcagtgttttcgtttcattacaaattaattgacttaaatttgtattcacatcattagttcaaattccctgaaactttgtttactagttctgtggagagcttcagagcataaaagacaaaagacatcacagaacagaaaaggcaccaaacaagataaaaattaaaatatatatatattatattcatatgttcaaaacccactctggctcaagaggacagcacaaatggtcaggcttgcaatttactcctacaaggttaaggttgaagaccctcctaagcaactacatagcaattgctacagttttctgatctccaaataaatatactacagttacacaagcgagaagccctaatttctgggtgaaaaaagaaggcctacgctaggagaatttacaattctaaaattcattaaaatcttattctaaaattttccataactagcatgacagtatcatatctgaccaagagtataatgagggaaacccttgtctatatactaaacccgctaaacccacactgaaaatttctgagaacaataataaactacgctatggaaagaacactgcttcaatcatacaaaaaggccccaattgttccctttcagaggaaaaaccccttcaaggggaaaaaaagtaatctcttcagcaagacttataaaaactaagaaattgttggtagtgtttgaaaccaattcaaaacatttgatagcacctcaatctgaaccatatagcttgttccaaaaaaaaaaacacagtgctatttgtaagaagatatcaatgaaacagagcaaaatgctaagtaacaaatttcaaaacccaaaagaacaaggtatgctccaaaatctaaataggaaaaataacaacagaccccttcaattcaaagaaaacatgggacaagtaaatctttaacatactttttctttacttttcttgaaatccatgggtacctgggccctaccccaactatcccacagggaatacccctctgtcaggtcccaggagacaaaagggtcttaatgtggcggctgggatttgaacttgagagctctgccttagtcagaccctactcgaggaacttgggggcatttctctaatatacttttccctcaagaagacaattcttttctcattcttttctgattgaccttgagctcactaagctaaaaggaacaacaaaagttccatctgaattgacgtacttacaacatttgttacatgccatttaggatggacaaaccatttctcttgcctgtttgtgtgcatatatactggaaacctacacattatccatacacactagaggaggctaggaagagagagaattcctatcaacacgttacacatgcaactcaaccaggaggacaaaaaaagaataccagtgataaatatctaaaatatcaagagctagagccagaacattcaaataggttacataccatccttttcgaggacatttgtatatgaaagtaacaaaattgcaaaaaaaaaaaaataattaatcaagaaaatagtgtacaaatataacatatttaaacatgtatgaattgcttatacatatgtggatgcttgacaactgactgcatgagtaaaaatttgtcatattgattcagttcaacgaaactatatggaaaagtaccaaagtaagcagataacattgagagaagcataaaaagaaaccttttcgggctttgctctttcattatgtcagatgcaatttcagaaatatattcctcccaatccattggtggtattgtttggttacttgtgaaaggatatctgaataaacatgtccacaatacaaatttccaatcatagaattagctaatcagaattgtaggctaaatgaattgaaatgagtatgtcatggagcttaactgttgaacacggcaagtttcaaatgacaatatggctctccttaaacttcgattcgatttttcagctaaacgagcagcaaatccagatggaatgtgcaggccttcttttttaccaatgaactcaagtaccttaacaatctgtcatatgaaatgaattaaaatatatatatatatttatatatatacatatatgcacatggtgagctgtaagttaaagtctcaatcaatagagcatacagcaaatttaggtaaaattagatagtcaatatgagcaaatgttatcctagaaattaacctaaatgagaaattgtgtatagcaattggcaaacactttgggatgttaagtggatccctagcttataaaataaaatatttaggagtacttttaggctacgtttggtgaaagggaaaatagcatggatggagaatttaagaaagatgtagaatacgatggagggatagaatagtacttctctatgttgtttggtatcagaagtgaagaaggaagggtggagaaaaagtcaattgttaaaacagccatattgtcctttttgtaataaccttttaaaagatgacattaaatagattttgattttgtctttttcttagatccctaaaacattagagggaatgaaatttgaaaagtccaatattttttatgacaaattatgtccagctatgtctagggtcattagttgttatatctggagtttattatttagtcattgtacacgtcagcgtcagcgtatgttttaggccaaatctattacgattgtttgttatctggtattttcctaattcagctaggtataaatatcagaatcttttactattccactcttttcgttcttgtgttcttgcaagtcaaagctcagaactttgttaatggtgattcaaggttttgaatatgacctacagtcgatgagtgtgagataaagggagtccagtcatatcctcgcaaacaaatctgaaggtgttcaggtcttagatttcgttgaagggatttcaacgatcaagaagcaaggggatcttgctaagtttgccaagggatttgtcatttggaataattgcttactagaagggattttgcgatttgtacgaactggttattgtaaacttgaaaatcatatagtgaagttacttactctgcttcggggaacccaagcaatactcgactgaaatttatttttagtatcaggagcagcttgtaaattccactgtgtttagattgttttagctttatcttttactctctaaatattataatcaaattgaatcaacaaacaaaattacaattgataattgaactcggtaactataacaacttaagtctttcatttggtatcagagccagatcccaaaattagccatgtgaatgtatccttggaatgccaaataaaggagatgagcctcagtaatctcatgatgtgatccgtagatgtgctctagtagacaggcggtgtgctctggaggacaaaacctgagaaaagagcaagaactctcgagatagagtggacagatggaagatcgtttgagagacaagatgatctttcgtttgagggaaggattgttgggtgtgcaactaaagtcccacattggctaaaaatgagaaagatcatgagtatatataagaatgggcaatatcttcattggttgagaccttttggaaaggtgcctaaaaacaaattccgtgagggcttgggctcaaagcagttggattgaacatttggacccaaaaaacctacccgcccgcaaaactcagccaacccgaacccgaaaacccgaaaaaatgggttttaaaaaatatagttcgagttcgggtgtaacttgaaatcttttcggccaggttcaagtttgtataaagtgacacgaaaaaacaggttagactcgaacccgcccaaaaacccaaaaatattaataataaaaaaccaaaaatattaataataataattatttttttatttttttataaggcaacttaactttcagatgtaaaaacaaaaaaaaaactaattgtctaactctaacctacctaacacccacccaatcgtccccctacccccgaccggccaccccccacccccaactcccagcccccacccaaccacgacgtcgacaaccaccacccagccttccccttccgtccctctgcttcagcgagacaccaccggcactacacgtacacgcaagtatgtacctttttttattttttttcttctatctttttgtttttaatttgttcgatcggtgtccctcctcttcagttcagttcgttctcccttggcagtcagtcggcgtgttccctttgaaaatggtaaataaatatatattatatatatgttttttctaaaattatatgataaaataatatatatttgttttgtatgtgatttgtgggtaatgtattgagtgacagtgagtatgtatgtgatttttgttagtgttgaattgttttgttatttttcatatattatgtgtgtgtatttattttttcaaaattaatatatattagtgttaaattgttaatgtgttatttttgatttgtgagcgtgtggtataataagttatatatatatattttatttatatatattttgtttgaaaattatgattgttggtttgatgaatttgtgatttgtaagttatatatatatatattatatttatatttattttgaaaattatatatatatatttgtttgaaaaaacgatgattatttattgtgaatttataatatgtaacagtgtgttagtgtattattttatgtatattatatttatttatatttattttgaaaaatatgaattattgaattgtgacttgttgtaaacttgtgagttgtgtatgtttattatgttattattttgaaaaattagattgaatttgtgtataaaagattgttgaaaaatgttgttatatgtgtgagtatatgatatattagataatagattatgttgaaaaatattgttatatttgtgagtgacatattatgttattttatatatataaaatcttagaggagtttgaatatcttagatattcatttatggtgaaataagttctgcgaataaatgtactgcggtcggatgggtgaaaatttttaaattgttaattattgttttataattgttattattgtatgtgtttgctcatttttaggatatggaattggatcgagaaaatgaaactgttccttcctcccaaccgccacaacaacctaccgatgatgatggaggtagtaaaaaaaggaaagctgctaaaccccctcgagctcccaaatccagatctgaaatatggagcaatatcaagaaattacccaaacctaaaaacgaagacgaccccaagtgtaggtgtaattattgtggtgctgagttaaaatgtcatcctacaaagcacgggactacttcttcgtggaatcactgtaagcaagtatgtgagaagagtccttataaggatgatgaaaataaacagaagactttaagttttgggggaataagagcctaattgcgatagcatataaaaaagaagcgtgcaaagttactttatgcaaatatttggtactggatgatttgtcgtataaacatgtcaagggggagagtttcaaagaatttgttaggaccttacaacctaggtttgagatctcttctaggatgactatctttagagatgttttaaaggcttttgaagagaagaaaaagttaaaagatattttgaaggatcgaaggatctcaatatccactgatacatagacaagtattcaggatatcaattatatggttatcacagcacattggattgattctaatattaattattaaaaaagaatcagtaacttttgtcaagttgttgatcacatggggaagaccataggcacagaaatccagtgctgtttgcaatagtggggaattaccaagttgtttactattacagtagacaaggcctcttcaaatgatgtggtcatttaatatttgagggatattttcagataaaaggaaaagatgagaaattcaaacatatgagatgttgtgctcatatcattaacctaattgtcggtgaaggtttaaaggagataatctactcaattgctgccatcaagaatgttgtgagatatgttaggtcttcccttgctaggcttaaaactttcaaagaatttgtcaccaaagtaggtgttccaacgagaggactccttacgttagatgtcctaacaaggttgaatttaacatttctcatgctcacttgtgctgtcagatttacgcaagtgtttcagttcatatttgacgaagatttaaattacaactactttgatgaatttgacaaaatggggagaaaaaggcggggccacctatgaaaagggattgggagtatgctttagttttcattaaatttctagagaggttttatcaggtgacattaaggttcagtggctcaacctatgttactgcaaacaagtattttgttgaaataagtgagatgcaacaaaaattgtacatgatggtaagagataatataggagaccccttgttgaaggaaatggtgaataagtatgacaagtactaggaagatgttgacaattgtaacgaggcactttttactgccttagttctttaccttagaaacaagctcaattacctcaaacattcttcttttggtacttttcatgatgcagaaacaaccattgaaatggtgagcaagattgaacatacacttcgtgagttgtttgatttgtattgtggtgctatgggattcatccactatcttagaagagcagtcacctttgcctgtgactcaaacaactcctcattctcatgatcagtcttagtttaagttaatcttctatgttgatgtctagtctaggcctaatgagtaggaaaaagagctatgttgctactgagcatcgtgaattcatcaaaatatccaatcctgtcaagcatcgctcgagatattttagcaactcctctcaccactatagcttctgaggcagctttctccatgggagtcggattttagatccttctaggagcatattcagtccgacaacagttgaagctctaatatgcttgaaaaattggtggagatcaacccatcattgtgagagagtactatgatgatccagatgaggtcgagctacagtcagaagatatttttaagaatggtattttattacactttggtttagttttctaataataattcaatttacaatcattttatactaatgttttaatttttaatttacaagttgcaaagaagaccgataatagaggtggtgcagctgttgctacttctactactactagctcacagggctcaacttccatctccgccacacactctagtactactccggcaacttcatcctattctacaccaagagtttgatttcagattttgttagacaatctagtgtgatttgtttatgtgtttcttgtttagttttggtttggactttgatagtttaatactttgatttgattatatgtttgttgtttgttttgtttagactttgtttggactatggactttcttttttagattatggatattattttggtttgtttaataatggattaagattattagattactttcttagaaattttaataagtttagaagagtgaaggataagtaataaatatttcttattatatagaaattacaaatattgtattgtaaaaaggcaaaataacaaggtttttttaaagtggaaacaaataggttgctgaaatttgaatacttttatgaaaaaaattgtaaaaaactgatatttttcaaaaaaagaaaaaaagactcaaccaatctgaaacctagttccaacccaaccggacctggaccaacccgcacccgacccaactgaactcaagacctgaaaacccggccacacaaacgggtgggtttcggattatagcttttgtacacccaaacccaaaacccgttaacactcacccgatgtacacccctacaaagcggacaatatcataccaatgtggagatccatggtgtctaacgtgctaactaaatttatgagtttggagggagaccctctcccttcctctctccctcttgccaaacaagggatttgttttacaaaacaaaacaacacaaattgtattattcaataaaggagaaataatacgaagtgcggagatggcaagaaaacaagcaacccaaaaattaaaacaataaaataaaaaaatgagaaaatttctgccaacaaataaacagaaaagaaaagaaaactggctgattctacactaagagaaggtaaatccattcaatagagaaatccataaaacaaaattacaaaatactctgccaattccaagcaagatcttagaaaaaaatgtctttgaactctttcactttgaggagccacatagcaatccatattctgataatctcccacaacaactccacaaattctttatcttataaattcttcaactctccagcaacaaagcccaccaaatagccatttctaccacctaccaaaaacgacttcctccttttgccaccttttatatccataaacaatatgtctatgcaatggagaggcatgacccattccatactaaattccttcagggcataaaactcattccgtactaaattccttcaggacattaaaccaaatctccagtgaaaaagaacaatggaggaataattgatcattactctcttcattacacatacacaacacaccaccttggggaaaagcaagatagggtcttcttttttgcatcacttcatgcttatacgacttagggacaacgaagatcttagccttacttggaaagggactctatccatacaaaattacgatgaggttataaaacatgtcatttttaaaccatgggagactccataatgttcaagaggatcttcgattgaaaataattactatgactgatacttttccactactttgtaaaaaaaattacataattatatatatatatttctttatatattaaaagtgcctatctaacagtttttcttggtttaacagaatatactttaaaaataaaagaatattctgtta

SEQ ID NO: 382491 - DNA, 2110 bp, Cannabis indica
  modified_base (1909)..(1909): a, c, t, g, unknown or other
gatactatcatcagcgaagagtagaagagaaataatcaacctagacctatcacaagggattcccccaacaaattattatcagattccctgtttaccaaatccctgaagccttcagcacataatcaaaacaaggcgacatgggatcaccctgaaaaaggccccttccaggaagaatagtaccataaatgtcaccattaaaagaatagagtattccacaaagaaaatgcactctatcaccttaccaattcaactctcatgaaagtctaacttctgcataatgtgagccaaaaaagaccattccacctgatcataaattttagacatatcaagtttaatagcactcatgtcatcgtgtttttttttttttaagtgtattaatacacttaaaaccaataaagacattgtcaatgatcaatctacaaggtaagaaagtactttgctcaaaggataacgcctgagagaacttttctcattctattagtcttttttttttatttaagcgtttatatattacaatcatatttacttggaactcgaacacaggacctccaagatacacacacccacctatggccacttgagctagcctcaagtggtttattagtcattatcttagtaataattttataaattgccttagtaataatttttatattattatttttataatatcaaattttcttacttcattctcattctcatttatattatttatatttttatatttttattcattctaactaaacttaaccttggtactttagaataaaacagtctttagatgataaaaatagtagtatttggctaaaaaaagccttctttacagatttgaaaaatagaaaacataaacttaattaattaatggggagcaacctatataagctttaattcttaaaattaatatttcctaaccctagagaatatattttttttcctaactaaatcctaccataattgctaaacctaaaattttgttaaaaaaaaccacccatttgcatggctctgcatgcctagcctagccttcaatctctaaggcgataccttctgagccctaacttggctcctacagctataaaatcaagacaactataacatcatcaacattatatttacataattaattactttcccctttttgatctaattaatactatatgcacttattctaataaatatatatacacttttttgtctatatttcttgtttctaatttagtgaataattataaatcaattaatataaaatctcttctttttatagatttcatttcctcaagattgttagggagaccatcaaaggagataccagctcttaagttggtcaaaacactttggaagcgatttctaatacatcataattacgattatgatagagtttcaggatttataaattacagtgtctttaattttttgactgaagcagcttaccaaggaaattttgaattcttagtaggatttaagtttatacccagaagcaatttgggccaaagattatgaaactaaatatacaattattcaccatgcaattgtagaacgccatgtgagaatatttaaattgatacatgagattggaatagcaagaagtgtgataaattcttttgaagatgatgaagatggaaacaatttattgcatcttgctgccaaattaccctctcaatcaagacttaatgccgtctcgggagcagctctacaaatgcgacaagaaatcttgtggtttaaggtacaaaatatgcttaacttttatataaatatatatatgtatatatattaatatatatgagagaattttatagtttaacttttattatatatatatgagagaattttatagtatgagttttaacttttatataaattgactacaaaatatattaccattttataaaatatcacttttaaattttttaangataacataagaatgatataatttaggctaattaggattgcctcttgaacttttacatgtacccaatcatgccccctgaatttgtaaagtcgttaaaaatgctcctgaactattgaaattattagatttaaggactttttccaattttagtaaaaaagtctaacatggataaaagttaagaggtcataatttagtacatgt

SEQ ID NO: 382492 - DNA, 2030 bp, Cannabis indica
attttgggcggtcaagaaccccaacagagagcatgtttgacagtcatgtgaggattatctgtaaattataaatttctcgataaaatagataagaaataaagaaaagacagacagaaaaaaaagaagaggccacacaaaaagaaaaaagaagaaagagagagagagagtaacaacggaatcaattaccgtaaatggtaatgacaaaagccattaaaccagcagcaaattttaagcaggttacaggaccatacttggaaagaggaatgccaaacaatgatgctccagctatctgcaacaacctctgtgtaaatccatgaactgaatattcttatacaacaattttcataaagaaagaaagtattcctatagaacaggtataggtaccatatcagttaagaatgccttgattttaagtaacaggaaaaataagaattataatctcttacttcattaaaaaatgcatgcaagaccaataggtctattgactccgaagatttcaaagaagaattcaagttaaaggcaaactcattttggaagagaacaagaagtctacgaggtaaaggtattgtaatggaataagcataaatattatatcttaaaagaaataaggataactcagaggcactacctgcacaaaccaatcggttccattgcaacccccaaagctacaccagatagcctctcaacagccccagctagaatgagtgcaacaaaccaaggctgatgaagcataaataatcattgttgcagctgcctgacagggacaaaaatgttggccaagtatgagagcaatgataaatcataatatagcatgaagctaagattcattgaactagttacctggacaacatttaagcaattatatgcaggtactcttggaaaataatccagaaacttcccaactaaagggcctccaatgattatttcaagctgttaaaacatggagaaaacctgttagatagtatattctccttccccctttcttatatgagcaatttcacattattataaatatcagaccttggtgaagaaacccatgattgccaccagcagaaggcttggatgtatcattgcaattacagaaagccaagcaaaattccaaagttgttccaccaaatttccaaacaaacagctagcgtacaaagctgaaaaatacatatttctttgtcaaaaatgactccaaatgtaaaaatttattgtcataatccagtttattgatcgatataaacagcctataaagttagcataaaataaagactaaatcaatatgtagtatatatagtcagatattcagatttcataataagcaagaaaaagaaaaattcaaaattgtgtatttcctgattttattcagaattcataacatatatatacaattcttaaatggtgttaattaatatacatatgtatcatgaataagaattgagtatttcgtactcctaatccataatgaaaaattggccctgcatattttcataagcactacacaactgaattcacagttcacaccataacaaaataaatatattcttatttagaaaaggagggtaaagatttaccatgcttagtgtcacgggctcaccttttcaggcagcggaatacccatgcggcaccttgacttcactaagccaaggtcagccttccaaccatccgagtaacaatgggtctgatgatggataaaaaaatagaccattgagaaatgagaatagacacagagaatgtaggactcgagtgagactcgagtcggcacttggagaaagaaagggaatcgttcgacactagagatttggatgcgctgactgagccggctgctgggatgggaactcgcaggaggagacgattgtgttgagaatcatgaggtttcatcattcttgaaccgtaatcagagtggacatgatcactatctgtataaatgcggatcggataagatcacttgcccgcaagggatatggctctgatactatgttgagaatgagtgaagtagcccatcaattctctaccatttattttatgtgggacaatgtccacaa

SEQ ID NO: 382493 - DNA, 1203 bp, Cannabis indica
aaaaaaaagagtactttttttttttgaaaattctacttttttttctttcttataactaaataaaaacaatgcatgtcattttttagataggaatattcgtttcacattatatacaacattgaaaaataaaaaagtgccaaacatataaggaggaacatccaaaaacttgaataaatttacataaacttttatataagtgccaaacatatagtgatacattttattacctttacatgctttttgaagtgcttcagcatcttccacggcagaatcgtagtgcagaggagcaataagagtagaagaagtagccatttgatatattattataaatctattaataattaaataatatattatagattactacacaaaaatgtgtgtatttataaccccaaacccaacccaatacataaacttagattttaacgccaccacttcacgtttaccatcatcatctttggaccgttacttacttcacatgtcacttgtgtatgtaaatattcaaattatattttctatagtcaagctattatttttaattaatggctaattacgatttttgcctcttgaattttgacatgtactaaatcatgtttcctgaacttttaaggctattgaaaatgtcccctgaactattgagattgttggatttaaggacttttgtctaattttatttaattttactatttcaataattgtttatgtactaaactatgttccccagattttgatatctaccaaatcatgtccttcgaactttgacatgcattaaattatgccccctgaactttcatccatgttagacttttttactaaaattagaaaaaaaagtctttaaatccaataatctcaataattcagggaatattttcaatgacttaaaaattcaaggcatgatttggtatatgttaaagttcaaatagtaaaaatcctaattagtcttaactaattactatatgatatataattaagtacttcacatggtaaatagtgtggtgggtattgtcgttttctatttgcatggtggacacgtgtcacattgaatggtatctggtttttatttttttcatatcttcgctggattttcatttatttcaaaaaaagccagaatacagtaggcaaagcgtattattctatacagtgtattctttttttccttttatatttctaataatttcttcttttactaaagactattctaca

SEQ ID NO: 382494 - DNA, 661 bp, Cannabis indica
gggggggggggagtctccggcccatacaaactttagatttttctagatttatttgctgccatgataatcttgtgtatcgttgaaggatttgtttcatggtatcacacttcgcttcccgcccatccaagaacacaaaattatcgtcaacaaaaaataaatgggacactttcactccatttcgcccaaaccgcacccatttatacttccagcccgctcagccgcatgaataaggcaagagaggccttccgaataaataaaaaaaaaggtatggggacaccgaatcaccttggagaagaccccgggtaggttgatagttcccgatctgttccccattaataagaacagaaatggagacactggttacacaacgcatgatcttctcaatccatccctccacatagcccaatcccttcatcgtggttatcaagaagccccactcgacccgatcatacgccttcaacatgtctagctttaaggccaatttcctaccatttccaaacctctttgtcttcatacaatggaggctctcgaaaccgatgatagcgttatcttggattaaccgacctcccacaaaggcgctttgctcttccaaaatagcttggtggaggctattcttcatatggttttgtctaaagtaaatatgaaatgtcacaataatatt

SEQ ID NO: 382495 - DNA, 1528 bp, Cannabis indica
tgcagacaatgcaatgagagtatctatggtgttggacaccatatctaatacaagtgtgaagcccacataagaattttaaattgtaataaaaaatttctaacgtaaccttgtgaaagcaaatcacatgtttgatcatttgagctatctctcttgcataatttgaatccatttataatatcaaaattaaattcaaaatacacttttgacatagtcttatagcaatgctcgagaatccgtttatagtattgcccggtgcttaataacactgatgccttataacaatgttttaaattcgtttaatagttacacaaaaacacagtatttagttagtaatactaacctcggtatcagcaggaatatagtggcctcctaattgagtatcttcatgagcataacgcaaaggaatgatcggaactggagaatgtttcctcaaagtttcatggaaaacagccatcaagtatggaagcttggacaaactatcctctgttagtttttccaatccacaaagctctacaatttctctgtagagacgatcctgtatttgttcggacataacataacataacgtaacataatacaaaatattagagttaatttaagtgatgtatgaagattattattaagaatgagtaatgaaaaacgacctgtcgttttggatctttagcgatttcatacatagcccattctgctgcaaccaatgcagtgtctgatgtctctatgattacttcccatagcaacatactgatttggtcctctgtcagtgtttttgcttctgacagcaaataatctatgtagcaatttagttcctgtatgtagtttcatgtcataatcattagaccaaacctatgtaaacattattaaactgtaggggtatgattattggaagtctatgttcttgatttacaatgattatcttttgttgaataccaatttttgtattttgttgtaatcttttttttcggcattagtacttaatgtttgtagaaacaatgattttgttacagtttctccgttaaatgctgattcaacggaaaattgagtcaacatttaacaacactaatgaaacagcaataacaaaattattgttttactataacattaagtatttatgccgcaaaaaaaaaatgagtatattgaagttttaatataataaaaacaaacctctccagaagcaagtcgcgttttttgctcttgaataagggctttcatcactacttttcttcgaaaaatcattctttcgattttattttcgatcttcttattgggaatccatttaagataggggaagaaatctctccaatccacctcaatggctccctccatttgatcaatcactaaaactttgaatatatcttcctttgacaaatgctcacttaactcctccacatataatgactgttcaatgtccttccccaaggcctggaaaccaagtgacattaatagtttatatataatgggagaataataacaataataaagtttttttggagttagataattcagtttttgagggtggaaaagattagcc

SEQ ID NO: 382496 - DNA, 2380 bp, Cannabis indica
gatatcaactaacccccatttcatcacccattttgaagcactctgcagtagtctttccagaagctttagcctgaaatattaaaaatttatatgaagtttcacaaataagccaaaagacttttctagggactaggggtgttctttttgatgtgggtccaataactaatattgtgcatgctatacctgagtcacaaacttctgccatctctttgacatatctttaaaatactgtggagaggttataccattagcctcttcacctaatatccgagagtcaatctttttgttactctttccattttcgaatatccgcacagcttcaataacggctcttctttgttgtgcatgcccatatattaagaaatctgatgtgcgctcaatcctggaatataaaatctacttagtcagcatagttcaaggttccaatataaatattttgacagagacaagaaaagaaaaactaaagtaatatacactgaatggaagatgttaggaatgtttcatattacaattagcttagcagttgataataccaacataccgttgaaaggggtcataaatgtttacaggtttttagtagtattgaaaaagagaaatttaaatgcgaaaaaggtcagatgttctatatgattggtaaatactattagtactaatagtactataacgcaaattataaagtttcatacttttctgcatatgatcgacaaagctgcaaggaaaaagaatggaatgtgctgattgtaagttctttagctactgctttcccggccacttttccaatacgttctctcatctcagaagctgctgctgtagtaaaagtcattgccaaaatatttgatggactaattctctgatatgtatcaaagaaaaatgaggataaaagtaggagtaagcataaaaaacaaaccccaaagataaccatagaaaaaattcctaaacaacaagaaaaaataacagagcaaaggtcttataacaagaggaaaaaatggtaattaagtggcaatacctcgtgaagcagcataagaactctcccaaccatcgttgaagtctgacattgtcaaagaaaatttcaagtcaaaaactaaagaatatttatcttcatagacatagaacgaaagatttatatacctttccacttccggggccagcagcaatcattaaaggcttagaaatttcacagcaagcagcttcacgttgcctgtcatttaaagacaacatatatttcgaaaactcacttggcatgcttccaatttttatgctctgtgtattagacaacccgttttcttctttgcattccccaatcccatcatttccaaatccaaaaatacccatattttccaactccacagagctggcattaggatcaccaacaccatcacccttaccatcactatgctcactagtgacaatagaattggaacttgggtctgaccttccagttctttccatggatttctgctcacacaaggcatcaatttcttccaaaatggactcatcaaaatcatcatcatcgtcatcaactccacttataaaactagtaacagaaaaagaatccgtagatgacttcggacatgccgattgtttcaaaggggttgtaaacgaattcacttcacacacatttcctaaagaaacatctttactccgactaacacttatatgtttttcatggccaataaacgaagaggtgtgaccagcaaaacggggcggcgtattcaccggaatgtcggcaagaggaactctattgatagtgctgaaacccctaattggggtctccatgccttcgttttcatcccagactctacaaacataaaatcatttttattgacaaaaagaaccattaaataaataaataaagaacagttcaagaaagagttgtgttctaagattttgagtaagagaaagttagttactttttgcaaagaggggataaagtggcgtcgtttcgagggcgtttacgagaaaggagagctttggcggctctgaaattgcgggtaattctggctctttgctccggcgtaatggtcgatgatgatgatgatgatccaccgccgctccacatctccacattccaacctcttttccctcccaactcccaactcccaactcaactctcttctgctttcattcaaatattgggcttcttccttcagcccaatttcttttttaataatgacattatttcacaaatacacacaaattacaaaaaataaattgtatagaattttaaatatttttataattatatatttatcttttgatatattttataggaaaattctacaatgcacccccttaaaatggatatattcatgcactcatatctgttttagcatccgaaataattttttagttaaattttttcttatggtcatgtacgtta

SEQ ID NO: 382497 - DNA, 3419 bp, Cannabis indica
tatattcatatatctgcaccatgaaatatatgtgtgcataatatagtatatatactatatattgtgcccatatataaatgtatgtaaagatatatagcagcagattcaaccagcaaaattatcgatttctgtattaattactatgatcaactcattgatcatatgatgatcagttttatgaagaattaaaactataataaaatgacaacatacataagagaaaagacaactcattttgctagggttagtttcaaaaaatgcttctatatatatataattatgtatgttttataataacatagtgatttgtcaagtactcttgatcttggcatataattcaacctatatatttataaattaatgtatgtatttaaacagcagcaaaacgattcctacaatattatcatatcatcttcatataaattaaacaagcaccaattcattcatttcaagatcatttaatatataccatgtagtgatgatgatctgctggtttttttttcttcctgaaatatatcataaatttaattgttttttctaaaaaaaataagtaatatgctaataaaaacataatgtaattaagtatatatgtgttgaggaccaatgcagcacattcaccaatacctaataattaataaaatattaattattccactcttgagaaaaacccttgcttttagctttagatttaacactctataccgtacgaaaaaccaaaaaacacaccaaattatatcccattttacacatccaagaaaagatttaaataaattttaacattatttgtatataactatataagtttttgttgattaatatatgcctattatataataatgatgataaaataatgaaaataccacaaagtttggtcatgatcaagataatatatatttatatatatataaacagttggtctaaaaatagaatctcgttacagaataaaacaaaaacaatatatatacaaataatagtttcatttgttgatctcataatcgaaactctactatactaattaaaccaagaaagtaattaaaggaaaaaaaatgaagaaagctagagtagtttgattaatttccaccatgaacatatatgtatttcatcaagaatctaattaaaaaaaggaaactactacaacatcaacaaacaataatatcagaaaaattaaaaaagaggaagaaatatataaatatttttatatatatatataacactggataataatattaattttctgaccttttttcttcttcctcttcctcttcataatattatagcagcaaagagacccattttcgtcattacatatataatccttaattaatttcctcaaatcgatgataatcccattttttctacataataataattattattattattagctcatctcaaaacggcgtcgtacgaccacctgagtttccaccccaaccatccaccggcaactgaacattttgcatattcaacggtaaattaaagaaaggaagccctgaagatgggtctggaaaagggttattattactattccccgaaaccccaccaccaccaccacctccaccgccgccgccgctaccacccgatccttcaggagccgccggagtctgcatttgaagctgagcctccgcctcttcatccaacggcaacctttcataagccacgttagtaaaagacgaagcaataacgataacaggtccagccgccgtgagttcaccgacgacgtttccaccgacgacctgtccttgccctccggccaagaaaatagtcaagctagtagccccgggaggagccggcggcggtagaaaagaacctgaaagagagagtatctcgaatcttccgtgaagtgttacgacggctccggctgcagccggttgacggagagttacattggttacagtaccgcttccgcttaaaatacagatccctctttgacggcggcgcgcgtaggtggcgactgagtcgaatacatcgcagccgttggttatttccaagatgtgggccctaagagtgttggcactctctcgtgttattatgactggtggtttgggcttgtttttggacccaggtggtcttcctctgggcctgcggcccactaagtcatgatctgggtttccagtaatgagttctaatccacctcctcctccaactccgccgcttcctccgtcgtcttggtggtggtcggaagagaattgatcggtgtggagattcaagtgtcgttgtaattgttgtggttgattattattattattattattattgtgatgatgatgaagatggtgttggtgttgaacgtagcgagaagctgtgcctaaatccaaaccagccatggatatagatattacaataaagaaaaaaaaaaagaacaaaacagaaaacaaggaaaaaatatattaattgtatatatttatatatatatgtatataataaaaaagattgttattttatggaagtagtgggggattagaatagagggttttctttttgggttataaaaatgaaaagaggaaaggaagatgaagaagaggggtttgagttcagagaaaaggaaagagaagagagaaaagaatggtgagaagaagagagagaggagacaagactcaaaacgcagtcatttctctcacacgaaaagtttaaataatataagttttttttttaattataatttattattattattgttatttgtctaaagtattgttatcggacatcaataatatgtattatttttaatgggtggcgtcttataattggttagtagtattttttacaaaatacttttttaaattgtattagactgaatatttaattacaccaataacaatataaaaccagacaccattaatacttttttaccacatatttattttttaatatttgatttcttgatatgaggaagaactagtgagaaagaaaggccaatggtttgaactttgaatgagaatgaatgaatactcaatttggagcgtgaacttaacgcgacttaggttttcttatttattaaattatgataatatatttatgtctttcttgtaactcttatattatgttttttttttaatttaatgttgttatatttatataattattttagtgtcataagaatcagtaatgtctattcatgtttgtgtgtatatatactatattttagtgtatgaaatgcattatgtttccaagaaaattaacattttaatttgaatatatatttatttcttttggtgcatatatgacaacccacaagattttcctaattttaatagaaaaaaaatcattaataattaagtttaaaagatagagaggcgaacttttaaaaacggttataagtgtgctagtaataatatagtaatctaatatagtcttacctcaacttatccaaaatacacttaagctataaataaataattaattatataattatatatata

SEQ ID NO: 382498 - DNA, 1762 bp, Cannabis indica
gtttgctgctaataactaggcagaaaatttctcgtttctccaatttaagttattattagcggcagcgggccccatcgctattaaaattaaaaactgttatccatgttttcagatgtaggacacgcgacatgaacaaagagggacagcttcaagccatcacaagccaagttctcctaattaaaatggatcacgaagaatctctcggaatttgggaatagatcaagaccgaaggatacacggaagtttgtcctgccttactgtgccatctaggatatggaaggcttatatctatttgggatctggagatgactaggttcgaggtgtgcctaagcgatgcttgtaagattagtcgaaggacttatcacaaacactgaccgcccaaaagaaattggacgtctaccatgcaaaaagacctagatcgtgtagcgacggttatacattttctgacacaggatcagatcttgtcccttgtgtcagaccatgatagtgcagacatcctacatgtcttttttcctgacagttagtccaggcattttctttacacgtgacacatgtccattacacacaagggtccccattgtacaactgcctctttaaacaagcaaaaaccttctttgtgaccaaataatcagctctttacatgtattttatcccaatagtgggcttatttcaataaaccctaggcaggtcgtgggcatgtccatgcacgctttttatcctataaatacccttatatttccatacgaaggggggattcaaaacaagatagccgaagctttgtcgaatttactataagctttcttcttcttctgcaagagaaacaagaagggtcgagttagggtttctaagaaaccctactgtaaacacattatacaagcctcttaaggccaatagactgaatcatggactaaggctcactaatgcctaaaccacgtaaaaatccttatcttctttattattttattctaattatttcttaagctctttttattagagtccgaaaactcgataaatatttgggttctttcattgagagttatagaaagactaaatccacggtgctactacaacattggtattcatttgaaaaatagtcacgaagaagactccttaaggcaacctaaacatcgtcatcagagatgtaaacctcctctctctctccagaacacgcttagctgagcaatgtgagagaaggggatacatcgaaagctaacctctgagagggcgacatagaccaactccataaacaagttgaaaaagaccgcgaggctgaaggtgatgaggaaggtgacaatggatatgtcaaagacaggtacaataaagatgggtatcattatgaccaagaccctaaggtggcttgagtataaaaagcagttgcatgagacccaagaaaagttggcccgtcaagagaagatttctcaaaagacagagaaaataatggctcacctccaagctaagtttggagatcaagaagaagaaggttctgaagatgatccttcagtggaatgtgctagtggagacaacacgaaaaaccctgccaacgctgaaatctcagctcttgcaaaggacaatgggaaggtgaaggtgggtgacccacaaaacccaacagctcctgtacctcctaggaaaagcgtgaatccatccaaaacagacctttgttgggattttatgccctaaataaaacccattacaatctaatctgatttgttatcaataaaagattagaagtcatttatgtttgcatgttgttttcatgtttgtg

SEQ ID NO: 382499 - DNA, 4040 bp, Cannabis indica
aaattctgtgattggtcgggccatcgaagtaataaactaaaatcctctattttcttcagcaataacaccagtgatgggatgagatttggtattaagcaggttcttggtctcatcacggcagttggtaacattagctacctaggactccctttgtttcaaaatcatcttaaagatgcagatttcaacatcattttggataacatagtctataagttgcatagatagaagttgaattccttgactaaagtaggtcgtgctactttgataaaattactggggcgttccttacctgtctatgcgatggaaacgactaagtaatttaagaaacttacctctaaaattgatggaatggttagggacttttggtggggttgcgagtcgggtaaccaaggcctctacttaaaggcttgggataagttgtgcctttctaagtctagaggtgagcttggatttaggaagactttagaaatgaatcagacctttctggctaaatggggttgggctctccttaccgaggatcaatctttttgctgcaagatcttgagtgctaagtacctaacaggcaaatcctttttgaagtgctcgtctagaaactttgactcgttctggaagaatgttgtgaagtagaaagaaatcctcttgaaaggagcctgtaaactcattttggatgggaaagatacaagcatttgggaagatccttgggttattcatgttcgggacttcatccctcatcccacaatcgatcgacctaaggggttggagaaagtagtggatttactaactaacaatggcaattgggatgtacccaaattccaaaacctttttgacctagagacaacaaataacatcatcaaaggtggtagacctggggactaaggcagtgataagtggatttggactaaagaaccatatgggctattctctaccagatctgcccaccttttataggccttgaatcgcgctcctcctagcaactttgctctagttttgtggaataaactttagaactctaaaattttggaatgccaaaaggttctctggtggagtattctctcaagtaccttgcctacccattatgtccttgctagaagaatacatattgacgaagcttcctattctatttgtggtgagggagaggaaataatggaatatcttttcctctatagtaatttgaggtcctccccctgggaggtgatgtccgttcaggactctggagcccgagtaagggatcgggtcaaattcttatggagcctaaaggataaaagagtggatgtataagagtgattcttgtatgcttcaattgttgtggaaacgatctggaaaacatgcaatgataaagttcataataactctatttgtaacattaaacactgtattaattctatttctatgtgttacgcagattatgcttattgtctgtttctttcgttagtgacattggagtctcctgtttggtctcccccgggaaaattgggtcaagatcaactgtgacgttaaagttggttgtgacttaatgtacgtggtggctatggctagagatacaaggagacagttttgtgggtggctactgaaaggctcaacttctctgacccacttattggagaagttgtggcctgtttattagccctagagttagtgatcctatggaagcatttgttcgtgatgatcgagagtgactctgagacaattatcaacacgttgaagataacttgtttcgtttggagtattggtaactatgcccttcaatgtaaacactctcaaatcttttgattagttgtaactttttatttatttctatactgtataatttcaaggctcatgatatggctaagtgggccttcgcccgagatgtaactggtataatcgatctatcttctataccacataacatattttataataaccatgaggtataattttattcattttaatacatctatgccttttattccaaaaaaaaaaaaaaaagaaagagtgaagtgaaacattccaagtttcaaggtatttttgttctattattatatcagtactaatgtaacaactataaactatagataatttctgtttttaataacgtcatcgaggtgtatgttgtaggtcaagaataattttatttaataagttagctgtttggcgatagtatctttaattattaccactttcccaaactttatatgacttgtgagcaaaggttaaacgtcgtcgttctttggtaattggtgtaaaacacatttgtgtatgttcacattctctgtatataaactcaataaataacccactaaattactatctcgaacactctgtttataacattatgggtattattcttccatgtcagatcctctgtcaaacccaaaaagactcatcagaagaatctgatcagtactcctcctccgctaataacactagtcaccttccctcagaatcatcaacctcttcttctactctctgctctcaacctagtcttccctctgttccatctctccaccaaaaccaggatcaaataaccttatcccaatactgcaacgtaatcacgctcaaaccctcaccatctaactcctcctacatctcctctctcatcctctccgggaagtttctgtacagtgcttcctccgacggtcaggttcgtctgtggaacctagactcagaaaagaattccaatatactttctctcccagaaaactatattgtcgccgccaccggaagctctgtcaagtcgattgttgtttcaggcgataaactcttcagtgctcatcaagaccacaagatccgagtatggaaagtcaatagcgttaaaggagaccaacaaaaacacgactacaaatgcatagccacgcttcccaccttaaacgaccgtttctcaactctgttttttgccaagaactacatcaaagtccaccgccacaagagccgcacgtgggtccatcacgtggacgccgtctcggcgctggttctctcccacgacaactcccttctctactcggcctcgtgggatcgatcattcaaaatctggagaaccaccgacttcaaatgcctcgagtccgtgagtaacgctcacgacgatgctattaatgacgttgcattgtcctatgacggccacgtgtacaccgggtcagccgataggaaaatcaaggtgtggaagagggtaaaggttgatggttcgtcgttgcgtatgaaacacacgctggaagccacgttggagaaacataagtcggccgtgaatgccctggctcttagctcgaacgggtcagttttgtattcgggcgcgtgtgatcgctcgatcctggtatgggaaagatcggacggtggtgatgatgaaatcggtgtggttgaaggtagaagaagtagtaatagtagtagtggggccatggtggtggtgggtgcactaagaggacattccaaggccatattgtgtttggcagtggtatcatctgatttggtatgcagtggttcggctgattacacagtcagagtttggaaaagatcaacatcaagcccagttgacaagagttacacctgtttggccgtgttggaaggtcatagacgaccagtcaaatgtttgaccgcttcacttgataataatagttcatgtctaatttcttcagatggtacttcttatttggtttatagtggaagtatggattgtgaaattaaggtatggagaatatggattcctaagagcaattagtgttcttgcgtggttattagattgcagtttaattaattcttacagagagagtgagagttgaatagtacaattttgttttctctagattaaatttcaaaccaactatagtaatgaccaatgataataattaataggtttacttaatcatacatgtcgggccctctggtttttcttttagcagtgaatatatatcatgagttcatatgaattggagtttcgcaattttatgacaaagttgacctttgaatttcttagttttgtagagcccgaaatatctatgtttggaatagcttttggccaacaaatatcacaaaatgatgataacaataatatgtggtttacaaaagaggtg

SEQ ID NO: 382500 - DNA, 3600 bp, Cannabis indica
tggtatgtaaagcttatatttcgagcattccaaaaatttatcctcgataggactattactctaacaattagtagatcatgtaactttgtgacccataatgtggctaagtgaacttttacctaccaaatatactgttgtattctgacctcatccgttccggagaacttgttgtgtaattaccgagaagtctaattattgtggttatttaatggatgaatacgctttaatttttttaaaaaaaaaaacaattggtattttcattgagagaagatgagtgacagagagcttcatgaattcgtgagatccacgttgaaatccatataattgcgtatagatcaatttcgatttacaacatcattctttttatttttttaaaaaaaagtcaataagttgacatgaacatcaagcttgtaagcactcttgtctttgaaattttttcttgattcattttgttcttttaaaaatccttcgtagaaagtggggcactaccaactttttttttttccaattagtgtacaccagtatgagtagcagacaaaatatattggtcactagagatataaaagaaagtccaaagctataagtagtagtaaactacatctttgagcaccttttctaaggcctttttttccaaatgataaaagtttaaagtgtcctcagtattaattgaggaaaagaaatagtatgaggccactacaaaaattcagaaataaaaaatgaaagagtaaaagaaattgatcccataaatatttaaaacaaattgtcaatattgaagcctggaaccagatgacaactcacaccaggaagattgtcataaaggcattgaaattcctgaaaagcagtgagaatcaaacgattagaaacttatcataacaaattagttaaccaataaactatgttttatagacttgttcaatttgatttaaaagaattgagaaaaagagccgtatctataggcacccagtgaaatggttacaataatataaataatgacaaataagagaaataacaacctaactaacctaaatgaatcaactatatatgtaacacagcatgaaacataagactagattatatagaatagaagaaattctaaattgactcacaccctcatagcatgttcgttcataatagatttattttcagttgcggtactatattacttactacatatagctcatttcctggaaagcctttctttccacaatgtttacatcaatgagctcattttcactttttttctacctcaaaagtttggaattggaggtgtcaaaataaacttgtttaatccactgggacaactttccaactatctgtgtaagtgctaaacggtcaaaggagattttacaatcgaattgtactattggtgcaaatacaagtgccaaagatgaacaaatggttttgatagacacctccaactttttacaactgaaataactttgattacgtgaataaaacatgaattatgacataaaaagattatagaaacctatgtaatacagatttataagttttgagatcaaagttgattaaacaaatgcttttcatagcctaattgtagcactagcaagcaagtgatgaaaaattgagccacaataaacagtaaccctttcctacttgttgtaatgaaatgaaaaacaaacatgggcttgagcttgacatggagattagagagaaaacaacattgttcttcttttaaactttgaccaaagcaagtaattaattcaatgttttttgatttggaattggaagaaattggcttattgtattacaaataaatttccaccacctaaaactaataaactccacaatgatatgtaactactagagttatagttggtcttttaactcttttccattcaagtcactctaaaaaatactcagtcttaccataatcactagctgaacttctattagtattagaatagagatcaactacccattattttcaactagtctagccaaaaacattttatgaagaatgaagaattaatcatcacttagctaagaataacccaaattaaaataagtctggaaaatcagatttcagtctctctttgttttttgcttttaaaaaagcactaaaggaagaagtaagtaatagacaaaccttgaggaaccaaaccccattgctgagaatctatggataagcttgatattaatcgtgctgaagccactgcactgtgcaacggcatcattgaactcaattccactggtaatctaaaccaaaccacacaatcaaaatcaacgaaattagaagagtatcatcacagtaaacaaacgaaaaaacacatgtagcaatattacaacagcttaaaatatgaattcattttccaatttcaatactcgaactgttcaggctttgaggctcaaaccttgaaattcgagaagtgcgtgtcaatttgggagaagagagctcggagagtagtgatctcttgttggtgttgatagttagagactgtaatcgagatgagagcctagacaaagctctcgtggacgccattgaggttggttgggtttgagcttttcttcttcttcttctttaggtctctttgggtttgggagattcagttctgaaagggttttagctgaaaacgacgaccaaattgccctccaaaacgacaccgtatctaaatgattctatttcgggtaaataccattttaaaaatgttgtgttgcaaaattcaccaattagactatatcttttgataaataataatttagacttttatattttcttaaaataatataaaataatatcctgactttcaaaataaatataatcagattacattttttatattccttagtcttagaaactgtcttcagcttaatatattaaaaaaattaaataaattgagttgagtttaaaaatacaaaatctaattgttcatttaacaaaacaaaagtcctactcaataatttttgttacacaagtcaaaactttttattaaattcacacaatacatttaaaagctgattttttctcacatttttacgaattttttattatttatttacatttgtacggatttttttacaaatctttacttgttatttttccagcaaaaatgttgctttcatgttattttttcgtcaaaacaacattatttgaaacaatggaaaaacaatactttgtattgttgtaaaaacaactatgttattttttcataacagcaacgtcaaagtataattttttattcagaaacaatggaaaaacaaaataaaaatgtaaaaaaaaaaaaaacaagcagatccgtaaaaatgtaaacttttttgacatttttctatatttatgaaatagtagtcccatccctttgctctagttgggccggtgaaaagaactgggccttaacaggcccaaacgacaagagaggaacttaacggagaattaccaaattgccactacagtcggagttcagggcttcaggcaacatttgcttttgcgatcagaaacaatctccaattcaattcagccatgaaaatttcagactctttgacttgaaattcagtatctttctcaaccaaaaactcgagcttaagctcttcttcctcagttatggcttctaagtcaacatcaacgtctccgtcatcttcatt

SEQ ID NO: 382501 - DNA, 842 bp, Cannabis indica
agagagagagagagcctatagtgatgaaacaagaacataaatgaaaggaagaagaggtgggttgggagcattaaaacagaccaagaaaaccaattcagtaaagaagaaagaaagtgatgacgatgatgatgagaggggtgtttgaatggtcatccttgaattcttaaattctgcatttaatagtgaattcaagatgagttaatgaaggcaggtagatagactactaacttgaactcatcccttccttcctttcaagccctctttaatatatatatttatttttcccttagatttcttcgtattaattatcaccatttttcaaatttggtggctacaagacaaaaataccctctaattttggaaaatatttttttatatgtccagactcattttgactattagcgataaaatagtttgtggtatttaagtcattagctgtgtagtctattttagggtccctgccaatttatatatatttggttagagaaatgctaaaaagcaacgcacaccggtgcctaatataataacttcacctcaattaagcatcaagtgctaatgtgatagtttttaagaaatatagctaattaattataagcagtcaccgctagtaagtttagctctggtatagatagattggatctgtgcttagggactacctaacccaaaagtccaataaaaaattctcttttaaaattaaacaatttttttttattaattttaaaaaatacttcattttcttttacataatggctaaattttttttgagaaaattagactctatatcttttttatattatccttttttatttttaccctctttttaaagcctatcatttttactt

SEQ ID NO: 382502 - DNA, 3617 bp, Cannabis indica
aatcatcacgcaaagtactttagcaaaaaaaaatcatcatgcaaagtataaaatacaaaacgtcacacaatagctaaaaataaactgaacagatgaactctaaacaagaaaattctgaagtaccaagagcaacatgaaatactatcagataaacagtgtcattcaaattcttcataaatcatatcagccaagtaaatcaatgacaatacctcatcattggtgacatgctcattgagaacagcatcaaaacaaaactcatgcttctccacataagcagtcaaatcgacctataaaatcatgacagaaatattaatcgtacaacaggaaatcaaacacaatataaatatgccagcaccaattcaacattatcttataaaatcgaaaaccataccttaaccttaggttcatggacagtcaaataagcattatcatatacatttacaatatcttcctctttccgagaaagctccttcttgtttaaaggtctttttcgtacctaaagcatgcaaagagatatttagatatacatatatatcacagaggtattctcatgaaaccttatcaaaatggctgtaagttcaaacttccaatgcaatatctgttatagcgaacataccactactttaatcttagccacattgttttctcttggggtctctttttcatttgtagaatatgaaacaggcacatctgcttctggttgtcccctttgctgagtgccagttgctgcattcaagtcattgtcaaatgctctagtgccactgggaacgaatggtgaaggctcaaaagattctggcataacatgctgcacaaaaatgaaacctttcaacagataataaagattaaatgaaaacacatccatgggaaaaatattttattgaacatatccttgtcatcacagcagttcaacatccaaacacagatcaaattctcaaaactgtgcgtagatagataacatcataaattgaactagcagaagagacctttcaacaaacaataaaagataaaatggaaacatatcctcgtcgtcacagccgttcaacatccaaacacaaaaaataaaattctcagaactgtatttagataagtagcatcaaaagtggaactggcagaagagagaaggaatccaaactcagatttccatgcatcctcaaagataaatgaacaagctccttcaacaaacaggataaaatcccaaaattggtttccttacaaacaagtcaagatagctataacaaaaataatttgcatggacgaaaaaaatacacctatcacacacaaaaccaattcagactaatgcaaaagtatctgaaccgagtatataaagcagaactttcaaaaatcccatcttacctcggttaagagttctgtatcgtccatagcatgaaggtccaacagcccagctccaaaatcccctcgaaagtctggagaataaaacccatcagacgcagacactccacctgaagtatgggcagtaggtgtataaggttcagaagcagattctccattgaaattgagatttctcattaacttgaaaagccgttgcttttcttcagctgactgtgctccataacccttcaataaaatcactcatttattatgtatttcatatagtaattctatgtggttagacttgacaggcaaaaagtcagtaaagacatttttgaaaataaaaacactttacgaacgaatacacagactaatacttcaatgtaaatcgaaatgtggatgatgacgaaaataattgataatacaacaaattagcacagaaaaatttacccaccgccagacgacatgtaacgtaaaattcaacgacgtgatcataggcataggtataaagactagtggtactacacaacaggtccgagttcgaatcccttcccccaatgttaaaaaaattaccatcatacaacaacatacatattggactttgtctggtttttttttctttagtaaaatttgcatgttgatcaaatgggcacataccgaccatttatgagtaaagtgaaagaaaaagttccgcgtactaaatttgaaaaaggtttaaagacatgagacaggaactaacctgcatcagaagattaggaaggagacgattgtcaatgccggtgttagccaatggagaggccagatgctgcaaccctgcggattgaagccatcgcgccatgaccgcatcgccagcgtcactagcggaacctgcattgtgcagcgagccaccaccggcaccggtgcctgggccggcatgatcatacagagcagcagccgccgccgcggcattgctctgctgcatctggccgcccatgtggcgctgcgaacgtctttggggagccaattttcaagatctaatatcaacaatcacttcacaaacaaacccccccccaaaaaaaaaaagtatctttttagtaaaatgaaaattcacatttattcatatccatcataaaaagaaaaccacgatctaaaaaaacaaggaatattactcacaatggagggaaaatcgaattcaaaacagaacatgaacacggattacaatctctcagaatctgcaacacagtattcagaatccaaaaattaaaaacgaacaacaaaagatcgaaaatgaaaaaatgttaaaaaagttcaacaatgaaatatataccaaatgaggaaaatgaaaataggataatcgagatctaagcgactgaaataacttctttaaaaattggaactgtgatcggatctaacaacatacgatgaatcggaaccctaacaatattttccgatgagaaagaaaaaggcaggaattttgatggctggggctccacggaagaggtgtgtatagtgctccttcatataataaagaaaacctttgtttgtgttgacaaaaaataaaactaaaaatcgattaaacatataagtcactgtaaatttggtaatattataattttcaaattaattaaacggccatttttaaatccttttgtaattactaatttgccctcgttcttcctctaattttctggtgcttatacggaccgtttcgaaacgtggtggtataaaatagtgagagtctttccgtttcgttgttaattcaagcgaaacggtaacttgtggacgtaaaaggctgctaacaatgttttgctttagctaaaaaagaatgtaacaatgttttgagtaaaaagccaaagggcgtgtttggttcccaagcttaaaagtgcttttcaatttattttttatgttaatttttctatttctactttttgtggaggcatttagcacaaagttttaatgatttttcaaaagaaaatttgataattctaaaagtttattgggaaaaaaattatgtttttaataaatcattaaattttattagtagtagctaaaataatagctcgcaattaatcgaccaagattagaattaaaaaaaataaattaaataatcagtcttctaattctcaaattgtttgacaaaaaaaattttgataaaattagatgaaaaaaattagacaacaatagaaactgttacagtaggttcgacctcgtaaactttgagtattatgtcaggtatgtaactgcactactaacaaccccttcactcaaaaaaaaaaaaacttgttattctcaaccactaacagcgattt

SEQ ID NO: 382503 - DNA, 1955 bp, Cannabis indica
taaaataaaattttaacttgattttagcaatggagacattttcaattatatatggaatcactcatagaaactcaaattttgtcattaaagaaccccttcaagctgttattacaaactgacaaagtatattaataggtatcaacttgttgattcaataggtatttttaatcacgtggcatatgttagctgtacagtttgataatgtcattagctggatatatgctactactaacccaaataatgattaacaaaaggtgcaaagaaaaagatattatagttatatatttattaaatttctggttcaaccaaagattttaattgagggatattatagaaagaaaaaacagatgtatatcatattatttattatcgtctacaaaccaaaactagctgacgtgacaatgaattagatattatattatattattagatacccacttgtaatttttcaggatacctcgttactagactacaaaataaaggcttaacagcttaattaatacataatatatatttatgtatgagtacatgaaacattaatatgggagagttgttgtttgtagtggtataattagagttaactagctatatgattcacttgcttattgagtgattaattaattgttaattattattattaaaaaagagaataatgattaacaagggacaaattaagttttaaagtttagacagaaataaaactgtacaagtcaagctcacaaagagacggttactcgaacgataaatcacaccgattacgaagatgacaaagtttaaaactcaacggaaaaagcagaagaacaaactctacaacaatggccaaaaaaataactaacaaagacactaagggccagtttgaaatagctatgctgcggaaaaaaacagttgtagctatactgtgagaaaaaaacagctgtagcaaaattgtagaaaaaatttgagttgagtatttagtaaataaaaatattaaagcgttgtgagtttttaagattctactataataatgagaatattataatctagtttattataatcataaatatctatataaaaaattatattatataatttttttttatatatttttaattattttttcttataatataaatttatacacatttgataaaaataatttataataatttaaattatatttttataacttgcagtttatagaaaattctaaattgatgtagtttgttgataaaaaaaatatatatatatatataaatatgaagtattttttaaagagattcttcataaattctttaataagttgtttttaactgcttaccaaacatttttttatcacagcttttttaaaaagtagcttttagttttttcaaaaattgtgctaaattagccctaaaaccaaaacagacaatgaaattgccaccaaacaagctacccctcactcaaatgaacacaaaatggagcaccaaaaccattccaaaactagttgaacatggacaaagaggcacaacgacatctatccgacaataacaatccacactcagcctcccatatgagttaaaacagaaaaggaaaatggtgcacctccctttaggattaacctattaggatttataagaacactcaagtaatatatattatcacatatctaaatatatacttaaaatattttaatatagaaaaccctaaattatattttatagaacttttgctaaagcaaagaagaaaaagataataacaagagcggaagcactaacctaaaactattattagagatttcacaaaggttatgatctttcaagaatatactatttgtctaaagtattttttctgatgggaaaggagagaatacatgaatcatagtgtttcttaaggaccactacctacttatagactcactatagaatgagttttaggtatttataatttgacccctcacaaattataaattaacctatgatatctacacataatttcaa

SEQ ID NO: 382504 - DNA, 1137 bp, Cannabis indica
aaattatcattttgaattttcggtgtaaaaatttcttatttctttgtatacatttaatagtagtgactgttaaaaaatttaattttgacaatcccttttaattgttatttttattgaaattcagtcatttgaataatttcaattcattatgctcaatcttaatgtgttctaaatacatttattaaaatacttttaatttatttaaatcatttctcatattttgttagttataatctatttcaataaaaaaaaattaatcagtgaatgtttatatgtttatttgtttaatttaactagagtattctaattaaatatttggtgtttctactgattccttaatgaatcattaattatacatgattgggatggaatctcacatctatgaatattttgaattattattcagaaactctaattaattatctttaatttctaagtttaacaatatagaatcaaaatcatattttaaatcattttaaacataagtggagaaacttttcataagttactattccaaatagttactttttataatttatttaaaataaataatcaaatattaaatttgattttagaattatactatgagcattgaagtcctatttagttaactttgcagataagtttgaaattaaataaatatttattagcaaataataaaaaattcaaaaataaattatttaaattaaaaaatctttaaatatgcaaatatgaattcaaaaaaaaatagatcaataataatttttttttcaaactttaaactaaaattggacttcttcattgctcttctaaaatcttttctcatcacgatttttgaagaagtttcacttccttgaataatcttccttggcaaagaacaattcattccaatatttcttacaaaccatatgagtgtaaatcatatttatctttctctctaatttcataactctatcaaaatgttcatcttgttagggtgagcatgttagcccaagatatgtttccaagaggaggggtgaattgaaaatttaaactaatttcagtaaattaaaacttttaacacaaaattaagcaattaacacttaatcaaataaaagtaagtaatatggcaagcaatatattataacaaataattaaacttgtaaagtaaagagttta

SEQ ID NO: 382505 - DNA, 2780 bp, Cannabis indica
aaaaaaataactttatactttatgacaacaaaataatcattatgatcatcaaacgtgattattttgttaatagtcaatgaattatggttttctttatgaaaaaaaaattgattattttactaataattttttaaaaacagaacaacttgtaataaaacagagtatatttgctgattcaaactgtatatatataaattttgttcgaaaaaaattatagatatcatttatgtaaaataaaattatataaagtgttattatctaatctattattattattaatattttttttccatttggaaaaaatactcttatttgtttatttttagttaaaacatggagataataatatataattaacgataatataaatttgttgagagagcataatatatatcatatacaatataaaatcacacaattttttatttaattgctagtgtaatttcatttttttgtgtttttattaatgttacagcaaatgattaattatatctagtttaacatgaaatttatttataagataatttaactatttttttttaattataggctgattttgaagatgcactttcaccaagctgggaaaatctaatgaatggtcatattaatctaaaagatgctgttaatggtaccataagttttcatgacaaagcaagaaacagagtttacaaactcaatgaccaaattgccaagctttttgttaggccaagaggttggcatttacccgaatctcacatcctcatagacggtgagccggccaccgcttgccttgtcgatttcggtctctactttttccacaattatgccccttttcgccgtggccaaggggcggggttcggccccttcttctatctccccaaaatggagcactcaaggtactaatatacaaaaccgagtttagggtttttttaagttaaaataattaaggtaataaatgttacaaccaaaaagttcattatttattctaagggcatgtttagataatctatgtgcatcaataccgagataagttttgagatgtttgtgttataattgtttgttttgttttggcagagaggcgaaaatatggaattgtgtgtttgagaaggcggagaaaatggtggggatcgaaaaagggagtattagggcaactgttttgattgagacacttccggctgcttttcaaatggatgaaatactctatgagttgagggatcactctgttgggttgaattgtggaagatgggattatatttttagttatgttaaaacctttcaaggtcatcccgatcgccttttgcccgatcggtttttggttggtatgggtcaacatttcatgaagagctactccgatcgcctcatttggacttgccataggcgcggtgtccacgccatgggcggtatggtatgtgaaaagtactaattttttgtttttattttttatttttaaattgagtaattaatgaaaattattcctaaatattttttttaatatatattaaaaaaaaaactctaaaatgcattttacgtatagtttttgttgtaactagaaatttttgaactaaaaattaattgaaaatagatttttcttttaaaaaaaatatgtgtcacattttaaaataattaagcaaaatttggattgtgtttattgtggaataataaaaataagtaatttattttacaaaatgtatcttttttttttgtaaaataggcagctcaaattccaataaaggatgacaaagaagccaatgaggcagcccttgatttggtaaagaaagacaagttaagagaagtgagagcagggcatgacgggacatgggcagcacacccgggactaatcccggcttgtatggaggttttcaacaacacaatgggcaattctccaaaccaaatcaagaccgcaaagcgtgaagaggctgcaaatctaactgaagaagacctcttgcaaaggccgagaggagttagaaccatggaaggtttaagactcaacactagggttggaatccaatacctagcagcatggctaactggctcgggctcagtgcctctctataacctaatggaagatgctgcaacagccgagattagtagggttcagaactggcaatggctcaagtatggagccgagttgaatggagatgggctcggtgttagggttaataaggagttgtttggtagagttgtggaagaagagatggctcgaatcgaaaaagaagttgggaaagagaagtacaagaagggaatgtataaagaggcttctaagatcttcactaggcaatgcactacctcaacacttgatgattttctcactcttgatgcctataacaatattgttgttcatcaccctaagttgacacaatctaggctttgaattttccctttccccttttaaattattattgtcgtttttaagttctcagtgtcgtttttttgcaaataatgaagtatgtgatgatatcatgaacttctattttaagaactaataatgagaaatctttagtgtattattattggcttaattaggctttgaatgaattacatactttcctatttaatgaactctttagttggtttaaaccatacattctacacattttttacttattactaaatttatatgaaaagttttagaataagaggattattaattttgaggatagtcacatccaaatgagaattttattgcatctaaacacgcttaactacagaattatgatataatctaatataatgacatatttactgataaataataaaaattaatgatacggtagttattccttacatttgtttactttatt

SEQ ID NO: 382506 - DNA, 1077 bp, Cannabis indica
agattgaaatgaagtttaatacctaaacaaaaaaataataacaaaatatgactaatctatgtttataacttataaataaaacccaaatcttaaatttgatccaaatcattgccaataatattattataccaaacactttgtttgggataagattgttacaccaataatataactatattttatataaaaataacattacattatattatattatttagggattttgtgagctagccctaatgatgtaaaacttcttgattcaccttcatagcaaacttgaggaattgagtctactttctgatcatttagttcattaatattactctcatatgaaactgaattgcaagcctctggtttagaagtctctttataagccttgcaaatgtaagccataaagtttatataatcctgcattatttaaatttatatatattattatgttagttaaaaaacaatatttatttttattaattatatatataaaatatagtatggaaagattactgacctcttgaattggtttattattgactatgacccatggaacgaatctatgtgcaggcttaagcatagctgtttcatttccatatctatgttcaatctatcaaaaccaacattattaacaaataattagttttggattgtgtattatattataaatacaagcaatatccaaactaaatggaatgtatccccttatgtatttgctgttatattattttataatataataataaagtagattaaaatgtgataaatatatgtgaataatatatattaagtgtatggtaaataaatgtgtaacctatgattttataacctacacttttgtaacctacatgttgtaacttggagaggagttacaatttgttgtcacttgtaactcatgtgttgatcacacattattagtgtaataaaagggttgttacacaatttgatgataggattcaaatggtatgaaatatagttgttacaaactatattaatactcatttatatgagagaaatgagtgttgtgtattttgaattccaagtgatcacctaaacattataaaaagaggtctttggtgctcattt

SEQ ID NO: 382507 - DNA, 1920 bp, Cannabis indica
aaaaaaaaaaaaaaaaatctcaagtagaaatgcaattatagcgatcaaaattctaaaagccaatcaaaacgcacttcctcacgaaattaaattgcacttgaccgcatttgattggttataaaagtagataactctatttatatcgaccatacccaatgcccgtcaagtcccccaattagggttttcagttcttggtcttccttgctcttttgacctccgataaaaaatcaacaaaacccttctccttgatccgatcatatcaccatgacagggaaggcgaagcccaagaagcacacagcgaaggagattgctgccaagattgatgcggcaaccaccaaccgcggcggcggaaaggctggcatggctgatcgcaccggcatcgagaaaggtggtcacgcaaaatacgagtgtccgcactgcaagacgaccgcacctgatttgaaatcgatgcagattcatcacgaggctcgacacccgaagcttccatacgaagaggacaagcttataaatcgtcacgcggcccttgccgtcgagacttctaagggtcgccctggtattcgtggtagcctcaagaagtaaatttgactgtatttgggtttatctataatcatgatattatgtcaacaaaagggtattcaatatatgggtatgagtaccgtggggtttagttgtttgggctattgggtttctctttgtttgtttctctggtatctctctttagctgttactagtaattgttaagaacaaagtccaaaaaggggtttggttaaatctttcccctttttgcaatttatggtcatctttcatgtatattataatcgttatccttttctatgaatatgacgatgactttgcagccgccggctcatcttatgccatatctggtgtttatttgtttatatagttcagtgtgtttcttgtgatgctgctgttatattttctctttcaaaatcactgaattgtgttttatcaagagagtagctttcttattgctttaaatgtatgattgtgttaactttgataattggtcaagttgtcctgtagtaacttgtgtttttggctcttcgagtctttcttagaataagattttcagatccatgtttatggtttagctacttgtgcgatcatggtcttacgtggttattttggattttcagatgtttcggaaggcctttgaatttgaaactgcaaatcctatgtgattatttttctagagaatcgtataatgttagcataagccttgcatgaataacctataattggggagctagttgagtattaaactattatatttaactaatatatgctctcattgtttgctataaggtaggaaacatcactggatcaaagaaacagcaaaatccagccaggaaatccctcgtatactaatgtttctgtttatgaaattggtatacttcataatataattatatagatatttgtatacatgcattgcatatattgcaaggtaaaaggctaggagaggggagagagagagagttagaggaaggaataaggatgatgagttaaaagagaagagagtagaatgacaattgacaaccactttaggatcgttattcaaaattgtaaagtaaaattgttagtttacagattgaagaggctaatatgatggtatagaaacttgtattgcattgtttagaatgttatgttagttcaggttttacaatagattgacatataaagatcttaaggtggcgtttagttggaggtaatgaaatagaatagaaaagaaaagaaacaactttcattcctgtttggttgcatattaaagtgaatgtcattccaatggaatgatctttctatcattttggtggaaaaacaattccattttaaaatggagaaaagaccattccaatacataatgagaaaaaatttaataatttttgtatcaattttttt

SEQ ID NO: 382508 - DNA, 5739 bp, Cannabis indica
aaatataaaaattggtatttttaaaatgtgcagtacggtgcagcttgaaccacatattaacaattcaaaacagcaaatcgcaccgcaccgcgcggtttagaaaaaattcaaatcgcgaacgcaccgcaaaaaatttcaaactgtatttttttgcggtacggtgtggtgcggggagtttgatgaatacccctaatgaatactataaaataatttaaaaacaaaaaaataccataaaattgcgtacttaaagatgtcatatttaacgaattttttttaaaaccataaattcttcataatttaaatcaagcccaatgagctgtccagattgtagaacatcacgtcggcccagtccagaaatcaaaatagtaagaagatagagagagagagaagaggggcctagctagaagcttccaaattcctcgtcctcagacataagcaataggggtcattttggtaaaattatcttccaaaccaaaccaaaccaaaccaaaccaagacaaaagaaagttgttttgacttttaactggtaataagtaagagtaaactcagttaaaaatgtttcatcttcacgaattactttgccctaaccacttcactcctttacattacttaccaccaaaaccaacaacacattacacaacacatctcatctctctaaaaagataacacacctgatctgatcgcatagtttcctccttcctccaatggcggagccgcaacctgagaaaaccctaactctatcccaggttcttttcttgttgtcctctttagtctggatggatccaatctaatttgattcattgctttctcttggtagtttttgttctatttagctttttcattcaatagtggcttgcttcaatcatagaaattctttcgtttttttttttaattattaattgggggttttagttttcgatctatctaaatgcggtcaagtgaggtgtacgccctaataagattttcaataatttttaagattcgttcgacgatgatcgtttcctttacctgctataatttataaatgaaatgtatcaaaatggttttagttaatgaagataatcagcctttgagtaagttaggcattcacgatagaaatagttgcatgcgagagaaaccaggtggatcatctgatcttcaaataggtcatcccgctatgaaaataaactcacgctatacttgaccataaattctgtcaattcaatttctgctatgaaaatatgcagattttactttaaatttctcagattttgtaaaattccattgtcagcgtgattgtcttaagttttttgctgttgaccatttaagcaaccattctccgctcctgtaatatctacaagtttttatcttctagagagtgaaagaactttttttttttttattaactgctgcttggttgtttcttttgttatattgagtttacaaggttgagaatgattttacctgtttctttgactcgcagcaatatgcattggagaaagaggacaaggtgggtgtggatacaaaacctgtggaagtaaaagaagttgaaaacacagtgaatgctacttctgaggaagtagtcgctgagagagatgaggaaccaccagctgcatcccccaaggaaagcactgaagttcctgctcctgctgctgaagaaagtagtgactctgccccttcagctgttgttggtggagaaagctctgaagccagtgctgatgcagctgaaaccagcaatgaaactgccgccgaggaaaacactgaaaatgctgaaaactcaagtgagcaagaagctgtagaagaagaggcaccggagattaaggttagttttgctataccctctattactgttatcattaaattaattttgttcactcagacaatcatgtgcatccgatactccttatgtgtttgaggtgttatttacttatacttatttgatgatcagcttgagacagcaccagcagatttccgtttccccactacaaatcaaacaaggcattgctttacccgatacatagagtatcatcggtaagactgctgcaagttcaaatggctgctgcctaattctttgagcttgtaggtgttttgtaagttgcttaggcaattcttgtatattgaaaagagtatttaattatttctttcctttttcacttttctaggtgcgtagctgcgaaaggtgaagatgcaccagagtgtgataagtttcagaaatattatcgttctctttgccctggtgaatgggtatgtatcttcttttgtccttacagccacttatattttttccttagcataatatgtaagaacctcactattattctgtcacgttggacattgttgttttgcttgtactgctcaaacattcaacttggatttaattggaatatctgttgcaaattttgatacattaattgactatttgtatacattatcacatcacaaacggaaatttttaattggctgattgaatttaaagacaaatccagggcaagaattacctctttactcaacccaatggtttcttatgtgtgccaggtcgagcgatggaatgagcaaagggagaacggaaccttcccaggtcctctatagacagtgactgtttaaaagtgccttgatttgccatgtcatctgcttttatgcccaagttgggtgttctggtagatgaacttctgtgatgagaattgaactctcagggaatttcttaaacaatgagctaataagaaatttggcttgtttttggatacagaatatttactgcttcataaaagtcatttatattgatattaaaatgaggaaagcctttcttatgacatttctctggcttacatgtgcaacagccatttgttatttttatagacaccacccctatttgctcttggggttttgttttgttaaaagtgtcttccaataaattaaagatgatgataggttttctgtgtagattaatcatgtgaaaaagctatcgtgcattgataatttctcttaacgtaaccaggacttcttaatatttgtttatggcatcacttctaatttgttttttttcctttcgttttcaaaaaataattctgaaggtgctgtcaggtaatgtttatttatttatttttttctgtgggtttctttaaaaactaaaatgaaaatatttttttatgtttagaattgtctggtaacagttttatagtaatgaatttgtttcgttcacccaagaattggaactgaaagctatgccccaagaatcaagttactagatagtaaagactcttaccattgctgatgggttcttaagtgtctctgagatgcaagagttcttcaaccgtggaaatagaagactcactctggctaatgtcgttacgagatcttcaacgacagtattagaagagtcctttgctggattggaatttcgtcgtgagttgcaagaggtcttcagcgattgtagaacactcatttgcaggatagaatattgtcgcgagatgcaagagttcttcaacaatagaagtcatttgttggattggaattttgttgtgagatgcaaaggttctttctgtagcagtagaagtctcattttgtaagattggaatcatcatgagatgcaagagttccggtagcagaagatatttgccgtattagattatcgttgtgagatgcaagagtttttcaacgatgataataaaggactccttcgtcagattggaatattgttgcgagatgcatgagatcttcaatgacgtgcaagactgaacttacagattggaatattgtcgtagatcaacattctcatcgttaacgtctttatgctttccatggagttgttcttgtcttttattatcataaaccgcggtgtcatcaatcactcctgaggcactcaacttttgccaacattcaatctttgcctcaaaaatcttatcaagtctgacttgttcaatcatattgtataggttgctaagtgagctacattttttttttctcttttcgtttcgccaatgatgatggcatcaacaatgttgttgcaaagggtctcaatgataatgttgtgaacaatggtgttgtgaagggtctaatgaagatggcgttaacattgtcgttgcagagggtctattgacatcgcaaaggataaattctttctagtgattgatttgagggcttatgatacgtttagttagaagttagaaggaataaaaatacaaaaatacaaataagaataagaataatagaagtgaaatagaattaattaaatatgcacataaaaatatatacattttttttcataatgcattagaatgacttttccacttatttttaaatggaataggtcattgaccaaaataataaaaaaataaaaaaaacatcattctattaaaataatatcccaacaatttaaaatcagtcaagaagaataaaataaaatttgattcttttacattctattactctcaattaagtgcacccttaggttgatcacttttgtatcatttctagtggttgactaagggtagttgttttccaaatttttggaaaaataaaaatgatgtaactgagcaaggccataaacaaatcggtaaattggaccaccaaactttaacacaatcaaaggagcgtgccaacttagcaaaagagtgtgctaaagaggtaggcatacgattacaatacaatgctcgaaggaagcactaacaagatccttacaatgagacccaatgtcttcaattatgaccccaaaagcatagttttcaaggatattttgtttgatggcgttgcacactctaatacaatctgattccaagatgatggaggtagtatctcaaccttttacagaggaggagaccctctctcacagccaatgcttcaacaacatgagattccaaaatcaaattgagaggaacaacaaagagaaccactctaatccctaacatgcttaaaattcaactaactttactttttttttttttgaaaagaactaactttacttttaaaataatatttatcactaaatatgtaaataaatattatttttcatagaaatacatgtaatttcacataaaaaaattatcaaaacacataaaatcaacatgtaaccatccaaatcacatccaaacaattaaaattattttaaattatatttctcgtgaaagtaaattgttactatgactttgaggccagttgttggaacatgtttattaggattttaatttactaacaaatatgtttgattagatatattataatctaacatcctgaaatatgaaattcataaaacgatgattaaaaacataaaaggaatagaatcctttcatttattgcagcagaaattagtgactcctttcgttcaattactctaaccattgattcccgttctttagcagggtattgccaagtgatgaacttaaattgcttccttaaactcgataagtgacagttctacacaatcttacacaaagatctgagtaccaccatgaatagtgtgggctaatactcaagtcattaatggaacaaaatttgagagagaataatatctatattttcgattataatagaaggcaatagagaaagctttttcttgttaagtttaggctagaatcacttagaatgacttatgttgacaatgctctcatctctttctatctatagacaacatgctacagttagattagatgaggtaggctagaacaaaaacaattgggcctaaaatccaagctatggccgaatacactaagtgtggtccatggatttgatttttgccactttatttcatttaatgaaacaatatgt

SEQ ID NO: 382509 - DNA, 1812 bp, Cannabis indica
aaaaaaaaaaaaaaactgtaaacacaccaatctaatcccaaaaaaaaaagttgaacgaaacaaaagtagaaaaaaaaaagagccgccaaatctaaaaattagagctaaataaaaaataaccggttgtgatttaaaaatagccagtcattaaaagggaaatagtattacattattaaggtataaaaggataataatgtatataagattcttgaaactatttttcttatagccaattaattttaaaataaaatattacaaattacaatgacatttctaataatacaacacaaataagcacatttttttatgattggattcacattaacatgtttaaataacttgagttttcacatgatttgcaaaaactatgaaacactcaaattttcaatacaagtttctattatatccttttgttataagggattttatcattaaaaaaggcaaggggtattctttaattagaaaaataaataaacacgatgcaaatttagatatcacataattgtatatatttttaatctattttttttaaaaaaaataaagtctatatactaatcaaattgtatttgaccattttggcatcactcacacaagccatcgtttctactggaaggtcaagcttagaccaattgaaaaataataccaaactctatgatatgagtttacatctttagacaatggcataatcgtattttacattaattattggtcacattttgaccaaaatttgttacttaccacaccatttaaaaataatttttctatagtatatcttttttttctctctcccaattctaataatttgatcaaagataatgttttttgaccattgattaaagatgaatttaaaattttgtgtaaatacaaaatagggttctggtagcatggtagcatgttcattttttttcctatcacattttataattaatatatatattatgtaaattttcttatactttacacacttttcacctaatatagttagtagaacacttgtataaaattatccaaaaatctaaacatgagtttgtcgataaaattttgtttttattaattagataaatgaaaatgattaatattataaaatgaaagggaataaaaaggatgggcagataactttatttaatttttaattataagtgaacaattttgtaatacagatttatggtgtaataataataataataataataataataataataataataataataataaacaacttgttatgtaaagatctttcaaaagattttaataaatgtaagttattagcaacttcaatcaaaccattaaaaaatcaatgacttggcataagttgtaaactataattaatttaagagaaatgttaaagggcactagtagtgcctagcaccctcctatgtgtcagtatcgctattagtctaaactaagtatcgggtcccatgtaatttaataaaatagtttttagggagtatcgctaaccaatcgcaacgtgacatgtcgagaaggtgctaagcaccactgatgccttataacaatactcttaatttaattataataaaaatgatacatatattaattaaattggaatattgaaatttgtttgtgttaggaactcaaaagggcacatgctctctccaacttcataactacttaactgcttttatttattttaatcaatttcttggcttctttattaggcaaccaatcaacccataaacatataattaataattagttcatgctagctaatcaatcattagtgtataagtacttaatttattaggtttatttttgaagaaaacgcaagtttttttttttcaaaaaaaa

SEQ ID NO: 382510 - DNA, 1967 bp, Cannabis indica
agtcatgtaaccaaacgaccatcatcaacaatgaaggcttacacgagtcaaagaagtgcatattcgactctaaaatctaaatagcacaacagaaactaaaccagaaatccttatactatttttacatgtgcgctgcacagagaaagataatatgcaagtttcattattaacgcacaactatcagaagcaaatctcacacaaatcatacattatacaatcctttttgtttatctgctattcaaatcatcagcagatgatagcatcaattcagagctccagctcaatgaaaccttgtcatttagtgggccaacttttttagatgttgaaatgttcgctgttttatccactgtctatcatatggcaagtatgcttgaactgagtgatcataactgcaaaaaaaaaaactatgaaaaatacacatatctaaggaacgattacgaataagcttgctgataggtaatcaataggatgaaaacgtttctcaaaattcattgcatagtgaatagaattgaggttttgaatgctgtgatgcaaagagagggatagaaagatacactagagcgctcatatctgcaagcccatcaatgaaattgtatagatctgcaatgtcataagatatgttcctaattgctggatttaattccttaagcttcctttcatatagtccacatacacctatacaaaatccaacagcaaaaaccacttttacttggtagtttaaacccagtacagtaccataaattcagatattgatgatgagattcattttgttgtgatccaataagaggacagtgatgacaaaggaatcaataaaaaaaaaaagctgatacaatacaactgttttcaagatttgatccccttacaactgttttcaagattttcaagattttcaagacaaaacaaaggagagtttacccttgaaaatcttgtaacaattttccaaaacaaagactactttgactaaaaacataccatctattgcttgactgatcgaatcataatccataaaagtccttgttgctctgttctgagaagtttgcatcaaaatgatagtatgcctgttagcctacataataaaattgataactttagtgaaacatgtaaatatatatatataagtggatgactacataacaaaaaaatctatggaaaacactgtaactgtactaatgttcattcattttataataattcaaagaaaaaataaaaccctaatttctaaaaagaaaaggagtcagagaaagtgagcaaaggggatcaaaattaaattgggagcgataaaaagatatcttagttaattaataccatatcctaaaaatgacccaaaaaatagattaccatgagaaagggtttagagaagagaaagcaaaaatggctggtggtggtgcgtttcaggtacgcgaggccgatgatgcgaagaaaagaaaagaaaagaaaagagaatagaagagaaagaccaagacttagaatagggcttagcttccaaggccaattacatgaagccacttcttactggggccaaccttttgaaaacatattcaataaattatacagtacttgttaaaatgtacacatcattttaaaatattaatttttaattttttatctcgtccacgtaagatttgtcgtgatatttttaaaatagtactctaacgataaacaactctaaaaatattgtctattataatctcacatataacattttaagagtaaaactatactagaacttagcatagcttttctaccattattgattttagattatgtggtcattaagatagggaaatttatatagtataccaacttttataatttttttacaaaaatactgcgaggcggtattttttacttttttactgtgtttttttataagtttcatactgcagtatactatgttaagttttcactggtgttctactagtattttactagtgttctactgttattttgagttgttctgctttgtg

SEQ ID NO: 382511 - DNA, 3090 bp, Cannabis indica
tctggaactcgtgttccttggaagagtagcaaaactaggagccatgccaaacgacggcgttttatcattcccatcaccagaagaacaatgctgatttagacccaacggttgtgcttgttccgaagctctccacatcttcaccgacttatccaaactaccactgtaaacaatccaccgcctctctcctccaccctcctcagccgtattattattattattattttccctctctttctcgacagccaaacactttactggtcccatatgaccagttaaaacagacaaacaaatgtggtccccacctttaacccttttccaaacacaaatacccatatcagccgagccactaaacaccaagcttccagccgtagccaaacacagcacagccaacttatgacccctcaaaacgccgccgtgtgataaagacttatctctctcccaatagttaacggctccgtctgatgacccacagtaaataaaagtcgcttcttgattaaccgttaaagccgtaacggcacactcttgttttaacagcgtttgagaaaagaagtgtttcgttcctttaccttgatattctctccgccacactttaacggttccgtcagctgagcctgtgaataccaaaccgtcgaaagccgttactaaagcgttaacggcgtcatcgtgagcttgaactgattctaagcatttgaaatcggagactttccagactttgaaggttttgtcccatgaagcagagtaaagaagagtaccatcttcgctcaaactaagacatgagattgcatcgaagtgtttaatccaaagaacgttacgatgtcttctaacctccacgtaattactcggtttcatcgaacattttatgtagtttttcaaagtgggcaaagtcccaactcgtttataattcggtgtgttcttattcgagactttccaaactctgatctttccatcttgatgaccggtaaagattctgtcacccgaaataactatggctttaaccaaaccactgtttgatttaaaaccagcgtattctctctggtttttccataccctgatgttcttgctatcggaaccggtgtacaacaagtcaccggcggcggccaatgaatatatgtgaccttcttctctgacgagagaacccataaggacgttggagaagttgtcatttcccggagatggattatggctgacgtgggttgaccaaggtgatttggcgtatggtgacatggagccggaagcttcgtcgtctacacctccggcggctgagtcaccaaatgggtcagttggaggacttgttaatggagtaccttcgttattatcacggtcgtcaaaatcttcagagttctttaatctaccgaatctttgtcctcggctactgaattcatctgtaaatatacgaccccctgttctcgacgagcttttcttcatcatattttatagcttcatcaaaaaaataataattatatataaatataatacatgtgcgtgtatttattatatatatatatataagtagtagctatggaagaagaaaggaataaagaagatttcttttttgtacgaaggaaaccgaaagggaaaaaacagagtcaatcgaagaggaagacagataataaaggaatgtttatttaaatttctttctttctatgaatattattattattattattattgccaaaaggaataagaattgaggaattttctatgatggttggtttgagagagagagttgaggaaagaaagaatggtaatggttgaagaaaagattatgtcctgtaatgttaaaatctatttttggtaattttctaaaataaaaacaaattctaaaatgttctaattggatgggttccttgtccggttgtaaacaaaacattcgttacgctgttgaaattaattgaaaaaaatgagtcacctttcagttgacttgttcaattaaacatctcttaattgtgtattaatgaaattaataatttgttaatttcatagactatataactattttacaagccaatattgcatggtgataaaatcagtcatagactcgtagtaatttaataaagtaattgtaaacttagaaatgtgattaagtaaaaagatattattaacttaggatataatgtttggttaccaataccatgcacttatttcttttatttaaatatacattttacttccacctatttatctagtcccctttcaatttttattttttttttaaaaaaaacaattttattaataacaattatctaaaataatacaatcagaattagaaaaatgagtcaaataattgtataattctaagatcgtttaataaaaaaattatattaaaaaaattatagcatcacagttaacctaaaaaatatttatattcaatttcatctaccgcttagaagacataacagtaaaaactgttgcagtaagttcattcaacctcctagcttgagcactcaattattgtacaaagtacgtaattgcactattaacaacccgtcaattgtagaaaacttattattcccaaccactaatagcaatttgatggcgagtcatcgaataacaaagaagaaccaacaacgaaataaaacaaaataaaaccatgtcacacagataaaactaaaacacttaaaaccatgtcacaaagacaagattgtaagaaactcaaaaccatatcacaaagagaagactaaaacactcaaaaccatgtcataaagacaaaactaatcatagtagcggaaatcgaatcacaatagcaaaacacaaccctgatcaagccgcacttatgtcttgagaaggtttgcgggcctagctaaaaaaaagacaacctccaataaatataaatttaagaacaaaaaactactaaagaatatgaattgttaaattcattgatttgtcccctttcaattcttaaaattcttgtcatgagatttttttggacaaaaatagtacattacaaaaaaaaaaaaccattacatgaggaaagacaaattctctagatcaggcctaacattaggtataagggctatgttcaaaaatatggaaaaaattattaaggttatgccactaaatatgacattatctaaccaaatcaaactaaaa

SEQ ID NO: 382512 - DNA, 1398 bp, Cannabis indica
catgaaaacatatatccctttcacaaagtcaacaacaacagccaatatgttgatcctttttctcatattgttttacctgctgctaacatcactgatacaagtgtaggagattttcctttagaagctgaagaaaaaggggaatataatgacatctctcaagacaacaaatctcccccaccagagtttacttccccttcaacaacagaacaaaatgttgctacagcagaccacccccccccccaaattcagcaacaagaacccaacaatgtgctgaggtgaaccagtcatgttacaagacaaccagcctatctctgtgactatgattgccactgcgttatttaggatgaaacttctacccctcatcctttaaataaatttttatcttatgattggttatctactgcttacaaaactttcattcttgcttaaacaactcactttgaaccatcaaattacaatcaagctgctcaacaccgtctctggaatcaagcaatacaacgtgaactattttctcttctcaagaataagacctggacctatgttcgccttcctccaaacaaaacagccataggctgtcatttgatatacgagattaaatacaatagtgacggatctattgaacgatgcaaggcgcatctagttgctaaaggatacactaagcagaaagctctggacttcttcgatacattctcaacaatacctaaaatggtcacattcaaactccagcttgccatagtcactatcaagcaatggaacaccctgcaaattgatgtggataaaactttcctcaacggagaccttaataaagaagtctagatggaactccctaaacgactcaatctaccaaattccatagagtcaaacttcaacttagtttgcaaactcaacaaatcaatctatggcctgaatcagacttcgagaaaatggtatcgcaagctctcgactgccatactgcaagaaggtttcactcaatcgaaggcggactacactctatttactaggggccacaatgattcttttgttgccttgttagtttatgtttacgacatcatcttgacaggacgaaatgtttcactcctacagtagatacaagaaaacctgaaccgaaaattctccataaaaacattggagaatctcaagtattttcttggatttgagaaagctcaagccgtggaaggattggttctaacaatatactttaaatttgcttgaagacaatggtttctctggtagcaaaccagccaaaactcccatggatcccaagatcactcctaccagcactataatcgtgctgtaggaccggcactatgttcgtgccgctatgacagcatcaatagcatccaaaagtataattggccatgatatcactcttaaccagtacgatgcctgtactgctga

SEQ ID NO: 382513 - DNA, 4789 bp, Cannabis indica
cccctcaaactttgatatgtactaaataatgccccttgaactttcatctatgttagaatttttttactaaaattaaaaaaaaattcttaaatctaacaatcttaatagttcagggggaatttttaacggcaaaaaaaattcaggagaatttctcaagttgttctctcgggtctcaccttttctcttttagttttttcatattcggcatcaagacgcctctggaggtctacagtagaccaactatcttcggggaaaattcatccaccctatcgccctggttaaaagaatcactaaggtagattttctttcccttaggttttggtacttttgtacaaggcctttctgtgcaaccttaccttgtggagcagaaggacatctcagtctagaggcattggtggccttttgcgtctgtaagggctggttggtcgtgttcataatttacttaagagacaacgtgtaatgtccctgtttcaagttttgattgagtttttctctacagatttatagctcttatacacgagtacgttactttggctgctttttagactgacgactagctttatagaccaatacaagtatttttcatgtgtttgttcttactcacacgttttttaggaggtcacctatcctaaaattatctcaggtcaagcatgatttaatctaataattattaaaatttaattttgatcatccaatctagtaattaaattaaattaaattgaatcgatttaactaaattgaattaaattagaagttgtctattcttactcaaaatacaaataaattcatggttgtaacttgaaatttgctcttgggttgagataagttgggcctcagtgtagatgatgacacattggacataaagatataaatgagactggaaatttgggtccacaggaatccttaaaatatcttatggagaatgtatatgtggtaattattgggttgggagatagagacaacgtaattaaattttaaaataaatagaatttattcacaaattattattattattattagtcacatgtctctcaaattttcttatttggcagtttgtttgttaatgctattgcttacttacatcaacatagtgtgccaagtcatatcatcatcgacaaaaaatatcaagcattttgtttgtggcataacttgaaagtaataataggacataaattctattattcaataatagagcgtggatgtgatatgtgattatgatagatatattttagtaattttatatttttttcacataacaaagaatcccacgcttaactctctcttcccaatattaaaaagaagtgtgaatgttatattatatattaatttttgtaattgtttcattatgaattctttcttatttatatttataatgtaaatgtaacaagaagaattaactaactagttattgctatttgaatttatttttcttttttaaacaaagctatttgaatttattaatattttgaattaacaaaaatttttttacactatatcaaaattatgcttatataaaaaaaaattaaattactcacttatattataaatatatgagaaattaatgataattaataaatcataaaattatattaaattttcaaagttttaataactattctactaattgttttcgcattaataaaacaattttaatattgcaaagtgttaatttaatattgccataaaaaaaaataaaggattaagtgtataaaaataaaaacataaaaaaaaatttgccgccaactattcaaaaaaactatttaatatagcatgcttagagtttttcttttgtatgttatctttttaaaatattagcggacaaaactacttaattttttggtttgtatcacttagccctataaactaattttttgacgataaaacttacttaacctccattctatttttctatatttacacttttgttggaacgctgctgttaaatgccaatgtgtattgctaatgtatacacaaatatacacatggcatgcaggaccaaccctgagtaataattttgtgtgtgtgttatatctaaagtaaagtaagtattattgggtctctttttacaaaatttataaataccatttttttttcaatgcaaaaaagtatactatataaaaattttaggccatggatttaggtgggccctaggcacagacctaagcagccttagcccttgatccacatgttaatatttagaaaataaactatagaggcacttagcttcatcacctactcttgccacttgcattttaatatttagaaaataaattacagaggcacttagtgtcatcacttactcttgccacttgcattttaatatttagaaaataaattatagaggcacttagcgtcatcacttacccttgccacttgcatcatctgatcgtatttggataggtgggtcctagggtctatccagccatcatacaactctatctatggtattttaaatttttcggatagtgtggctataatgatccgttttttgcatggctttggatatgtttgtcttccgagtctgaaaggcccccaccttgtttttggaccaacttggtaagagcagtaatatgctcttccagtcttttggtgtcactgtccggaagatcgcatctacgaaccttatcgttcagatgattcctcaggcagttccctcagggtctcaccttttctcctttgactttttcatatttggcatcaagacacctctagaggtctatagtagaccaactgtctttggggaaaattcctccatcccatcgtcatggttaatggaatcacgagggcgatttttccttcccttaggctttgatactttcgtactaggccttttgtgcgcaactttgccttgtggagcagaagggcatccaagcccgaaggtgttggtggtcttctgtgtttgtaagggctggttagtcgtgttcacatttttcttaggaggcaaagtgtatattcctgcttcaagtttttattgggctttccctcatagatttatggattttatatacgagtatgtcactctggctgttttttgaactgataactgcccctgttttcagcgtgttttgtccttactcgtatattttttcaggaggtcactctggctgaaattgctacaggtcaagtttcatccaattagaaactaacttttatcatttaatttaatttaattgtaattaaatattaaattttttataattaaattagattggattgattcagtttaactaaattagaaaattaaattggattaaattggatgttgtgcactgtcactccaaatacaaataaattcatggttgttacttgaaattcgctagtgggttgagataagatgggtatgtgtagatgatgacacatgtgacatatcattgatagaagggaaaacatgagtaataactgtaatatcttcatgtgctttggacataaagatatagacaataaattgaactggaaatttgggtccacatgattttatgctaaaatccttaaaatatcttctggagaatgtatatgtggtaattattgggttgggagatagagacaacgtacttaaattttaaaatagatagaatttattcacataaattaaattattattagtgcatatgtctcccagaaaaaatatacacgctttttttttaaaaaaaaaatatgtctctcaaagttttcttatttggcagtttatttgttgatgcttacttacatcaacatagtgtgccaagtcacattatcatccacaaaaatatcaagcacttgaaagtaaaaatattataataggacaaaatttctatttattcagttattaagtgtggatgttatatgttatatgtggttataagtatattctaatggttccatattttctctcacaaagaaattttaagctaacaaaaaaacaattttacactgtatttattatataaaaaatatttaaattaaactcacttatattataaatatatgagaaatttaattatattttatttaatgattatttataaatcatataaaattatattaaattttcaaaattttagtaactattctactaattattttcgtattaattaataaaaatattttaatactgtaaagtgttaatttttctaattattttatatttaataatatcaacttttgattaattttttattataaatatatattattagttttcaaaatatacattaaaattaaaaaaaaaaaacatatatataataattgataaatttacataaggaaatatattcatttactaccatattttttcacgaaaaacatatttagtatcttatgttttcaataatatttatttggtactttatattttgaaattatacatattttgtaccctaaagtaaaatataataaatataatttcattgatttgaccaaacaattttttgttatatgtaattaaataattaaatttaaatttagaatttataaaattgaagatagtttgattgtattgataagatttttcaaccacttgaggctagctcaagtggccataggtgggtgtgtgagtgttggaggtcatggatgattttaaaacatagagtatcaggataccaaaacttactaaatgtatatacacccttttaaactataattatcatcactataattactaatatctcacttatagctgttagtctgtcattttcttctaaataacttgatatttagttagaccaatgcaccccttaaaaggaatgtattaatacacccttcacttatttcggcattcagaaagaaaaaaattagtctaattttttttcat

SEQ ID NO: 382514 - DNA, 1093 bp, Cannabis indica
ccttaaaatataatcttctttgttacatatatcattttagaattaaaacaagaatttttgcttgaggacattcttttaattatttacattaattaaaagagcaataaatatcactttagcaaaaataaaacaagagtaattattaaactaatgggtgatagagcatattggcgggttgagagttccactcacagcaggtttgacatttttgcactcagaagacattgacccttgagtcccattatacttcaaattaatatcagaaacgacgacgttctggcaaggcattccaccactacacaccaattttatagctaatggtgtagaagaagtaccccttattctcttaaaacttacattactgattttaacattggaaggaagtttggccttgcaaccattaaagggacaatattcttggtcaatcaacactgggttgccaacattctccattgtaatgtcttcaaaatgtaggtctgatgctgctcctggtttggaatcaggccaagttttgattcgaaccccattttgtgtgttctttaatgtgcaactcttgacgtaaacacctttgacaggctcctcatctttgtactttcctaaactaccgatgctgatgccgtggccaggtccgcatgtgacattagtgattgtgatttggttgcttccatccccaatagagatacaatcatctccagtttcgattgtggtgttggtgatcttgatgttgcttgattttccaatgtggattccatcggtgttgaggctcttttcgggtgccaagacatggaagtgttggaaggtcatgttcttgcatccaataaggttgacatgaaactgtttgctgtctttgcttgtaatgtcttcgattatggagttggtcacaaagttgaaccttaaattctgtttattatatatttgcaaataatgttaaataaaaacaaagaaattgtttatacaggaaactacactctataccttttttatatggccctcttttatttttaccttcttttttaaaatctgtcatttttacccccttttttaaatattgtaccaattttgcccatctcacttcaagatactctccatgtga

SEQ ID NO: 382515 - DNA, 811 bp, Cannabis indica
acaccagtttctgatatgagaaacccaataaaagtgctgaaaacccaccaattgaagaaagagagtttttgtgccttttcttttggttcaaactcatcaaattgtccagcaccaagggttgatatattaggctttgttccaccatttcctattgcaattatatatagtgccaaataaaacatacccactttcatagatgagtcttctgatgatcttaaagctcttaatgaaaccactagtgttagcaagatcattccctatatgtatatacacacacatttcaagttagaaaacagagtaaaaaaaagagaaaggtaacaagttacttttaaggtaattaaatgagtaattagttacctttttcacatataattttggtaaactattcaaaacccaaaatttgattagatgagaagattaattaccaagagataaattgttgagccaatgagaaaagtccagaattgacctaagtaagcatcagcaacataagcacctaatattggggtcatccatacagttccactccaattagtgacattatttgatgcttttacagtcccttgatgaagctctcttgttaagtaaatacactagatttgctgcaattccttggtatgccaaatctctcaaaaatttcatacactacataaccaaaaaaaataaaacacatatatcaaaaccccacatttaaattctttttttatagcatatatatatatatatatacatataataacagttattaagttaattaattaacatacctataatgaaggaacaagccttccattttccagtttttgacctt

SEQ ID NO: 382516 - DNA, 1036 bp, Cannabis indica
ctccatttgacactaggcgaaacgcatgcacacactttgaatcaaaaacaaactatatatatatatacatatatgtatatgcatatacgcagtttctccacactgaaatgggttcctcgaagaaaatggatgaaaattcggaaatacagaaacctgttcgacaaaatgcctcaacaaaaaagcatctcaaccctaaacccgcaaaagaccggcacactaagatcgacggccgagactgcaggatccgcctcccggcgacttgcgcggcgcgtgtgtttcagctaacacgtgagctgggtcacaaaactgaaggccagaccatcgcgtggctgttggagcatgccggtgcatcggttaatgtgacagggacggaggagaaggatggtgtttcaagcgcaaaagatgttcctagtgacaatattgagagtagtttggtaaagaatgagagcagtgggttttcgagggctcaacaagcgccgaatttcgagattgatcatcttttgagcaactttgattttgagatgggtattctgcaaccgctgttgatggccgaagccaaggacgaagagactcgtgagaacatcaccaaaatgtaaacagtccacataataattttccaaactctagaagtgagttttttttttttttaggaaaatctgaacaattaatttgtatgttgggatatgctttgttaaaaaagaattgttatgtgggagtgggatatcttttctaatgactggaggttttattttgtatggtttttgagaaataacattacaaatcacctgtcctatttagtatttttcctatttcactcctgttccgaccaattatgttttgccacatcatttaaaatgccaccaataccaaatagatattgaacaaactaagatgctgctaactcagtttgttttcttttatttattaaaataatcattaatttgaataaagatttttctattgaaaaatggtatatcttaatatataaaagcaatctaaatatgacacatcaatttatttgagagtattttaagga

SEQ ID NO: 382517 - DNA, 2612 bp, Cannabis indica
atgttgttgcacacatggtctacaaagttatcccacatagtaagtgcaactgtctggaacctgaaagaagaaaagacataaatgaaataaagttgaatgtaatgaattaattttagtattttagtagaataaatcagagagcaaaatgtaaagactcacttttcattgatgagaattacatcctgaactattgatgttgtaccagaaggtgtttgaacctgtcgttttactcccatgtctattgctatagccaaaatgcctgacaaaagaaaaaagaaatagaatttgcatgaaataatggtattgttttaaaaattgtatgaaatcaaatgtatgttcacatgtataaatatacaaaagttaatgaatattgtactaatttcagattcaagatccatgtaggtctggagtttgtcaaaagatataaatttatatcttgaaaataatagagcattgtgattttctttgagctcttctacttttgttttcccatttatagtctattggacatctccagcaacttttctatactgaagtttagtatgcttcacagttgcattcgagattaagtatgtttttgatacttccatcgtgtcttgaaaatgtagaatatttgcttcatagatcgttgcttgcacttggttcccctatatttttatgagagataaaaaaagttacatagtagaatttcgtaggaaaaacaacacaatgtgaaaaaccaaatgattttttcatatgaagaaaataaaatatgaaaagcaaaaaaaaagttatcacatgaacaaaacaaattagagagagtgataatatacttgtggatcaataagtgtcatattcatgtatttggttggactatgtattgctatttttgtatttgatttttcagcaacaataactttggcagttcaattcatttctccaagagaaatctctggtataagtttataaagttctgccattgcaaattttttcctgcaacatatatcaatatagtttacatagaaaatataaactatataacattgagatttttttgaaaaaaataacataagttagaaaatatttatacattctgttttgaagacaagttttctctggacaagtataggagagttcaggcttttttcggggagaaatctaaaagggtgtagagttcaacctatggatatgaatgtgtgcatgaaacttaagtgaaatgtgatttatataatgtgaataaagcaaatttttttgattaagaaaaaagaaaaaaaaataataatgatgattgtaaatagttacagttaagtcaacgatatgtattgacatgatttgaagtgacactaactaaaaaaattgaaaaaataaaacaattatttatatttaagagaaaaaaattatatacaaaacttatcactaacaaatgaattattattttatatatttgtattttgaaatctgataagataaaaagtggatttagtaaaaagaggtatggggcaaaaatcttattactgttttgcatgaaaagtggtaaagtaaaaagagtggttggaaaagaaaagtatggtgattggatttgttttttttttccctgaaaaccagaatagaagaaaagtatggtgattaggataagagtaagggcaaaagattttacagcaagtgcaatttggaagattttttttaaagttagtatacatatctttacttgaaccaaaatacttttaacaatttataattctagttgaaatataactaagaatagtaacaattttttatatagttgaagttttgggtgaataataaatttattggttaggatgtaggatctagaatatatataaaggattttatatattaaaagtaagatgtaaggatatatgtagaatgtacgatatatatgtatatcctgtataaaaaaatatatataatgataaaatgactaagttaaaaagttgaaacttaagaatattgattaataacatacatctttaccaaattactaattgatattcctagaaagcaacaaatcaatatatatcataaatctaaaaaaataaaaagaacttacatacatgactatttagggttgatttcctcgtctttctatgctaccatcacaatatattttcaaatctccaccaattgagaaaacttgacttgttacccaaatatttttaaatttaaaccagctgataacaatgattaataattatttagaaatcccttataaagtctcctcagccaatttatagtatatcatgagcaatatacaataaataagtataatcaatgtgcaattggtacaaaattaaagatactcacaataagtgtgcaagggattccaataaagtctaaattattatatgacctgccatgaaaagagctcagcgaagcttatgaagaaaaaagaatataatagttaataaggaactatcaagctacactaaaataatttctacttgaaaactataagattgaaactaaaatttagagtgtattaatctaaaagatatctacaaatataaatgggcatagtacttacatggttgccgaaaagattaataaaaataatagtacagtagaacctctatttaagaatactctattcaagaataacctctaatttgtta

SEQ ID NO: 382518 - DNA, 4638 bp, Cannabis indica
aaaatcctaattagccattatgtaaatttactttgtttttatgacttttttttgtttgtttttcgactctagatagtttaatttatggcttcataagaaaatttgaaacttaatacttaattaaaaatatatataacttttttaaacattatgtttagcaaagttaggaggaatatattaatccaaatctttatatattataaaattatactcttaaaaaatgcccttttctagcatagttgaaaagtattttcacaattgattaaattattgggagtttactaacaggaagcaaggaattttatagttgcacttaaagctaacaaaatgtgatgttgaagctcttcttaagagtcaatatgaaattgttgtcacgctaaaccaactattgttgaagcctctcttatcctaatcgaaaaaggctgaaaagtactctcactgagcaatttgtctcaagagtcggatgttgtcctaatattaactttttaaatttgacaatgttattacttgagatattttttaatgacacatcattgcaaatgcaaagcaacttttccacattcttattgctcccaaattctaattacaacaacaataggccaaagtgtttgctgctctcttctttatgttcattcgttactaccaatacaaacatactaaaacaaccctgaataattaaaataatgaatcaaattaattcactttcaatcaaaagttgtttatcaaatttggctacctacttttggcgaatatctactatcaactaataagcatacccaatcccataataataataataataagtgggttcttatttggtaatctataaaatgattaattatgtctgccctagtttcatcccattattttttttccctttctttccaattttattggatagaagttaattaataaaacattacaaaagagctaggtggaatgagtatcaaaggcaaaccctaatgatgtggaggaaattgctctataccaccctttacataaattcttatatggtttcataccatcatgactcattatccccactcatctctcatatcactataaaatagatataaaatgtgcttctttttctaaatcctctatagattgtctaactttatatagatatattatttatatataaaatgggtgtttgattgaattcgagccatgcctttttctttcaatgaactcatcttttacctttattcgggtttaatcttatgacttggaataacacgtattattccattttgcacaaaaaggcaccattcatcatcaaatcaatgaaatcatcattcactaactagcatcaattttcctttgtattaaagaaaacaatttaatcttcaaaggggaaaaagaaagcacgcagcttcaaatatagcaaagtgtcactctcatgatctcagcatcttaggttctctttcaacttaatcaataagaagaaaatatctatttgaatgattcataaaaattaaataaataacctactgaatgaaagttgggaagtcaactaaccctctctctctgttatataaatatatagatattgatagattagaataaattttaaaaaatatactaactagaatctattacccagaagaatttatattgtatttaaaaggaaaagaatctttcaaccgatggacccgtttgatattagattccacaccctaccacatgctcagcagcatggtgtcccactccttcctattcttttttggattttactttagttttgtcaccatctttcacttattattattattccattaaatgcctatcaattttaattggttactataaatacttaaaggtcttcattagtgtcattgtgaatcacatttaattgatctaagcttaatacttagatagtcagatggtggctccaccaatatatatatatctatatatatatatatatatatatatatacctcttttcagtgaagggttgagattcatctatgcaaaactctaataaattgtaattcaccattgttagtcttacggtgattcctaccagtgttttaaatataagttaggacgctttgacacggcaacagtttgaaaggcacgtgttttcgatattaattggacaattttttttttttatagaaaatagttgttattattaaacaagtttacaataagagtataaataggtggagtaataacttccaaccaagaacaagtctcattcacccttaatgcaaacttagcaagaccatgggccgcttcatttggaggacatttgacatgtgaaacataccctgataacctcaaccattaaatctgaaaaagatgaatttgaatttaagggagctttcaatgcacttgccaccatgagtgcatctgtctcaattcgcataattggtatttgttgttgaatagccccattaagactgtgaaagagtgatttggcttctatttcatgggatttaaagttacctacaattgacattgacaaagcaatcactacatatccgttagcatctctaataacaaatatccgttagcatctctaataacagccccaacaccagtggtacttgttgaggaattgacaaccgcatccacattgagtttaagcgcgcttggagttggtggagatcacggtgttgatgatgcagtagttgtacattgctggtgcgaagctgctggtgcagatgtagaagcaacaagcttgtattgctggtgtgtagttgttggtgcagaaatagccgaagtagtagatttttgttgagcagctcaaaaattctaaataaacagtggcaaaagtagctaaatccttgcaactcttgctttacaactatgtaccactttgttacgttcagtccaaatagcccacattgtacaaaaaatttgttctatctccaatttggtgtaggttgctgaaagttgtaacaagtagtctccattacgcatcgatgtacacgcgttccaattgagcatatagttttgagctccccaaacagcttagcatatttgcagctaaaaagagcatgtcccgttgattcccaagcttgtctacaaatggagcaagtggaatcagtaatgatctttcttcgaacaagtaaagtagccacaagtagagcatcatgaatgacacgccacgtaaagatcttgactttttgtggaatttgtagggaccaaaagaatttcccccatgacaagaatgacgaggagctagagccaaggtcttcgtcttcaagggaagttgcaagatttaaccactttgtaacgtatatatttccgaattagaaaatttttatttatatacatacaaaatgtgaacaaatatgtaattatatatttttatacaattttataaatatttataattttaattttagaattgcttttaacttattgttttttaaaaataaatacataaaaataaatatataaatataaaaattaatatttatattttaatatattactaaaataatatctttattaaaatttagttcgaaattaaaaaaatatacaagcacatttacaaattttgtttatatttataaataaagtatatatatttattaaatatgtaattagtattattaatatttataatgatatattaatctagtatgtttattatcataataaatataatttatttattaaaaaatcataacaattttaaaaagagcaatttgtagtataaatacttaagtttaattctcaattctaaataaatactttagtttaatttttagcggtaataatccctaagttatatttctgtaacactgtaggtatttaaccgttaaatattaagtcattatccacgtattattttcttattggtatatttaaacaaatttttaaaaaaattaaaaatttaatgacttggaccaatcaaagattgtcacgtggcaatttacttaacacttaataattaaatacctacagaagttctagaattataacttaagtattattactgccaaaaattaaacttagttatttatttacaattgggtgttaaatttaggtatttataacgcaaattacacttttaaaagtaaaacacttaagtttatttatttatttaaataaacgcaattttttttgtttattaaaaggtcataaataatttaaaatgtaacacttatgcttattagttattgaaaaatgtgtttaaaaaaataaacggaactatagttaaatgtgacattatgtataaacactatgttcatattattattgataatgtttattaagtatcaatctaacatatttgttatgataatatttgtgatgatatgttttgtccttctgatcaagtttgtgatgatatgttgatatagtgtgttcattaaaatttaaatacaaatttataaatacaatatgtatatttattatttatttttttatatatgtttttatgtttatcatttattttttataattattaaaatgtataataaattatatataaattcttatcacatataatgtaattaagtagtataaaatatataaaattctaaatttcctaaaatatatagaaaattgggcgtcaaataaaacacaacatgattgagtaaagcacgatacaataaaataatcatttcattttttttataatttaatgataataataatatttagaaatttttac

SEQ ID NO: 382519 - DNA, 2673 bp, Cannabis indica
aattaaattatcttcttgatcttttaatttgtcgtgcattaatgagtagaaataataattaatacattagtttttttttttacaaataatatttttgttttgttagctttagttctagatttgcattttatttatttatgaccaatatccaaaagtttttatgcctgaccaaaattatattgctatagtaataactttatttatttctagataatacatttattatttaaatagtaataatttttagagagaaaaaagtcacatgtaaaagtcttgcttgacaattctgaaaaatctgagacggtcttgaaataaactaattaagttgagttgtactaatgaatacacagttaaaagtaaattgtgatttaagggaataattacttactttgagcaccaccaaggcgatttacacattccacaaatcggtgatgaagatcttgagtccatttcagtcgttgttttccactactttttattatcccacttacattttcgcaagataattcagaagaattgaaaacagtttgatctgctgatgagtagtactgcttttgatctttctgctgtgagtaacaagtctccaccttctgattatcttcttcatggactctcttgttaattattataaaacaaatatcaatttaataaataaatcaacatatttaattcataatgcatgtattatatatatatacataaaagaataacaattaatgtttttcttacttgatgatgactgctattattaataatgttagcttcatcatcgtggtcagtagaagattggaaaaatgggatttggaatgagctgcacatctcgagcaactcagagaaaagaggaacaacattaccattataattaataatgcaattctgatgatgacttatttgttgggttgatctgaatccatctcttgatctctaccttctaataattttttttttttagatattgtaagctaggatctgtagtttctcatctccaaacattattttatttttattatacatgattatgatagcacctttttgtgtaacttcgaaaaagttttggaatatataatgcttatacattacaaaatgaaaatatatggtgttaagatgataagtactagcaagctttcatcattatactagaatatgatatagtataagtgctacatggcaaggaaatctagcgtggcaagctagggaaggactgcattctttaaatgaaaatcagaaaaatgacaacattatgagttaaggatgatggtcatgatatacatatatagtgggaatccataaataatgacaacacttttttagggtttgaatttgtgggatcactatgtatagtttaaaataattttggttacaatatattattccccacaaatataacttagataggaatagtagtatttttgtcgttttcttttatttaaaatagtttttgagacaacattaaataaaataaaatagttgtttgagagatcatggactttatattatacaatctatatatttatctaatttttaaatctcaaccggtaatgtgatactcttataattgtgtcatgacccaattgtcttaagctgtgataatatattcataacttggatgattaaatgtcacactttaatttttctactacaaaaaatattacttttagttataacatatatattgtaactaaaaagtctctaactaaaggtattaatcacaataattacaatttattgtgactaaaatgtatttttagtcacaactaagtgttgtgactaaaactaaatttgtaacaacttgtatctaaatattatatttcaataagtaattttttattgtgactaaaagctacatttagtcacaaaaaatttatataaaattatcactaaaagtagttatttttcatagtgctctaggaagatattacttataaatgatcctttaatgtgtatattacaaaataaatagaatagctcctatatctataaagtaaatattagtgataaaataaggaccactcattaatataaaataacaataatatcctcacagttatgtagtcaccgtaataagtcaatagataccacaataatatctagcatccattactcttcatatctaactagtacatagcaactttaagtcattcagaccatccattcaagtttaaatacaagattagtttttaatggaaagcttcataaataggataagactaaactaataacaatttttttttcctcaacgataccatcctagcatcaagctgagttcttagaataggagaaaatatgaggtgagattataaagtccagtaaaaaaataactaatatcaaaagaccctttatttaaagaaaaattcctgcatggttagcttttaaagtaaaacaactcatcaccattatcaaaatatataaacaaaatagagagaccacacataattacaaaatcaagcttcaaatgcatatcacactgtccactagactcctagctcttaataccaatcataaagaatgacatcctaacctgggtagtcgcgaaccacaaaatattagggctcgtattcaactcactttctgtacaaattctaggtcttacacctacatgtgagtgcatacctgcagatctacctatgatgacatagagactaggtcgtgaaataataatatgcacctaaacat

SEQ ID NO: 382520 - DNA, 1038 bp, Cannabis indica
atgtatattgttatataaaaaaattacaatttctctatatacaaataaaaaataagaaatatctcacctaaaatttaatctgagtcttataagatatatatatatgatcattaattaaaattgtatggatggtttgattatacatgttattatttggtctaattttaaaatagaatactaatagttttcttataccatgcattatattaaattaagctaggctagttttctttgcatatagaactattaattaatacttatatatatttttaggaaaaattacacaaattaccttaaaattgtacattttttaaaaaaaaaaaattacgatttttttttctttatatttttacagattagtgattttttaaaggaaaaataatgttgttttcatgtgactgcctatgaaaataacgtgtaaacaacaattttttttaaagcaacctaaaaacaacagtctataaaaaaattccataaaatgtaaaaaaaaaaaaatcagaatttcataaaaacgtaaattttttgttatttttgagtatttttgaattaatcacatatttttatgcatgcagggagaatcctatacaaggcaattaaataagttgaagaaagaagtgacaagaatggtccttggactggaaattaactctttagccctacttgagctaattgatacattgcaaaggcttggaatatcttaccattttaagaatgaaataaacactattttgaagaaaaaatacactgataattatattaacaataatattattattactaaccctaattataataatttatatgccattgctctcgaatttaggcttctacgccaacatggctatacagtacctcaaggtacaatgatgagaataatcttttaagtagaaatatcatttttatctttaattaaaatatctatttatatgatgatatgaattgtacttgtagtatgcatatcatcattatggtgccgtttggtaacacttttgttttttaatttttaatcacaaaatgaaagtaaaatttttgttttaa

SEQ ID NO: 382521 - DNA, 2156 bp, Cannabis indica
attataacgatccgcgtcacgatttctctcttgtgtttcattcgtagatcaaatactatcgacggtcaagaaaacgtttcagtcttcacacggatcacaattctcagccgtcgattaaaagtatcatcctacggctaaaattggatcgcgaaatgcttggctccaattctcgcctctatatatacgccacaaaacacaatcccgcttcatctcatcttaaaatattgaacgtactgtttggctgtggagaaaatctctgagaaaatgtcaggaagaggcaagggaggtaaaggcttgggaaagggaggagccaagaggcacaggaaggttctgagggataatatccagggaatcactaagcctgccattcgaagactcgctcgtaggggaggtgtgaagcgtatcagtggccttatctatgaggaaactagaggagttctcaagatcttcttggaaaatgttattcgtgacgctgttacttacacagagcacgctcggagaaagacggtcaccgccatggatgtagtttacgctttgaagaggcaaggtcgcaccctttacggtttcggtggttaattctcataacaatatgtacaatcaatcagtttcttttagggtttttaggttttcttttcctttttgggtctttgacttagatttgttatctctcatgatctgatgatttgatcttcagtgtaatttgagtttcgcttcattaaattgtgattgtgaggaaataaatcgaaattatcttgggccttttaaatttgtaatttctcattaactgattttcgatctaatatgaatctcgtttctttaaattgttaatgtgaccaagtgaattaaaattttattgaattgtatcgtaaaaagaatactacggagttgcaatgaagttgagatttgaagaatgttttcactgttgcatatatttttgaggttggaattagacacgaaatggtaggcacgaagtaccaatactacgggttgtggtaatattgattgtataagttggacactgaattatttaaagttttttgatgcaatgaattattcaaagttattcgaccatttttatcatcttatttgttgaatctgtaggtttctttttagtaggtgtttatcaataatcattcaaccttttgcattttgaacgtattttatttaattattaatttaaataatgtagttataggtgtattgccattttgtttttcaacaacgaagttacaacacattaattaagagaaaataaatccatgaaaatttactatacgtttgagcagttttaaagttttaaaattaatcttgtaatttctttgaagtatttatgagattaaatttatcttacatttgacgtctaatttttcatctccaataccttaatttctttctttcatccattttaacttgactaattagtaatttttctcatcgaattttgacatgtcctaaattctaacatggtttaaaatgaaagtgaatgaaacattaaaattgaatgaaattagacaaaagttcttaaatttaacaatttcaataattcggaagaaattttaatggaaaaaattcagggacatgatttagtacatgtcaaagttcgggggaaaaattactaattaatcctttaataatgtattttttttgtttacatagtatagaattgtaataaagatgttattaacaataaaaatgaagagcacgtaaatgattttttttttattccgtcaacactatctcataatattaattcaagggaaatgaaagtagtttgtttttggaaagaaaaagaagattaaaagtactttatgtagcgtctcgtattagcgatattcatattctataaaagttatttttttaagttataaaaatagtgcctcatgattttatttttttctttaaatatactgttttttacagaacaacagtgaaacacaatcgtatttttgaaaataaaaatattttataaaaaattccacagaataaaaaagtgagaaattttaatataaaaacttaaaaattaggtttctttagtaacacttttttaattagttttctgtttttaaaattgaaaaagtgaaaatattttttaaaaatatgttctttaaaactgtttttacttttcaattttttaatcgagaatcaaaattttaaaa

SEQ ID NO: 382522 - DNA, 1834 bp, Cannabis indica
aattgccatgatgatggtacaactgaaattccacaagtccaaatatctgatcctaagcctaaggtgaccattggtgctggaaaacctaataaacctgtcggaccatgtgggctcaaaccctgccaacctaaaaaaaagccatgcaatcctagatacagcaagggatgccaaccatgatgaagtccaaaattaattagtagctatatatatatattcatgaataaaaacatatatgtatatgtacatgcatattttacatatatgcatgtatatacatacatggtgttgtgtattttataagttttcaaagggctttttattttgtgctgcagtgtatgtgtgtatcgatctagtgtgtagtgtcttcctatgacatgcactatactacaacgtacttaaaatattgtctgaaataaaagattgttgatctagcatttcttagaaatttttacaacaacgtacggaagatataacaaagaaattaaaaaactctatattgcaataaagtatacaaggactaatataagatacactactaaaaaattagaatttcttaaatttttttaacagtcgggtatagtatccttgaccgtctctaagaccgatgcatattcgacttttacaaaacttagtagaattggcgtcggtagaaaaatgtcagtaaatttttttctcgatactcaaaaaccatcgacaatactaggtaattggtatggtttttcacagatgcctatactatacggctatatactataactgacagtggaaaacaaaaagttttgggtttacagtgacagttttatttagatgttgcattgcagaatagagaaaaaaaatgcaaaatttctattattttttccctgcattattgcttgtacatttttacattttttacaattttatatagagtaattggtgacaaaaacctcttatatttatctttttatacaattaaccccattttattttgtttttaattgtaaaacttccattaaatttggttttgtttgcaaatttaatattctgctcatctctccgttatgtgcatatatatatatatatgtggcattctcaagttatttatttgcttatgtgtcatgattttggtttaggtgtaattttattagaaataaaaattaatttgcccaaacaaataaattaattaaatctaaatataattaaaattttataatcacttaaaaaaattaaacttgaaaaaagaattaaataaaccctccttcatttactcagttgttcttcttttcattgtcgatttagcaacctaaaaatactctactggaatgccgacgatgacaaacagggaagaccacgccttcactggaatgtcgaaggtgcggggagaaatgacgattctcataattaccgcaagtttgtatttgtagaagttggttttttaatgatgtttgggttttttttctggtttgtgcaaaggggtctacttttatagggatttagttttgggcagtgagtagtgtgtaggggtctgctttggactgaagtatgcctaacatttttttcgatatgacgtgttgcgattagttaacgatatttcttaaaaattattatattaaactatataaactcaatatttaattggaccaataataatattgatatataaaaaggtgttacctaggaatgcacattttccccatggggatgggcctcgcggggacccgcccttaatggggcggggattaaattttatccccgaatgttaaacgggacagggacggggatgatactccccgccccgacggggacccgtttaatttattaattattttttatttaatattttatatttatatat

SEQ ID NO: 382523 - DNA, 821 bp, Cannabis indica
aaaatccaaaagaataaatagtaaaaacaacaaattaattggttttccctataagcaaaatcaattgatcattgatgttcaatccaaaacaagcattgaaatttactttcttttagttttatgccaagggacaatgaagattgaacaacaacaacactacatatcagtcataaatgatccttattctttatgatgagcaaagtagcttaaaatcagtgttcattgcccatatacaaaacaaaaaaagatcaacgtaacgacgatgattgtggttcacaaccagtaatgtgagtctgcaaaagataattcaatgaaaaccctagaaaatccattagaatttggtagcaaaaagaagaagaaaaacacagaaaataaaaataaaaatagcagctttatgatattgatatgagtaaaagaagagaaaaagagtgaatgcagtagtggagagaaaagggtattgatttgatagtgttagcagtgaaatttagagagaaagccatacttgtacggatcagttctgaaactgagaagagcgatatgagttgctttgctttggctgaagcgcgaaatggttagtcagtgcagttttatagaacagtgcgctatactccccctgcgcattttagtaatttcagtaaaaaagagagaagattttttttatacactataagtaattttttattttatataaaatttaggtgcttctagaatacacctcactaagggctcgtttggaacgccgtattaggtcgtattgtattgtattgtattatattaaattgtattttatgcaatatttttatgtaaaactatgtgtggta

SEQ ID NO: 382524 - DNA, 1945 bp, Cannabis indica
ttttttttcttttaattttttcaagataaaagattgttgaaaatttctataatgtagtaatgtatttttattggtttttgaattttgaaaaataaaattaatttttttttatcattgtttatattgtagttatttaaaataaattgtaaaattttgagaaattaaaaaaaaaaaataacacgctgaaaataagattcgaacaatctatttcgctcacgtataaaataaaataatcacgtgtgtaatagaatgcgagctaccgtctatttggcgtgtggagagagatcagcgacaactcagagctacgttagacagtcgaacaagcaagaatgcacctacaactgcctaatgaaaatgaacttgggccttgagttattgaacctatatttttcgcattcttttattttttttaattatattttggcttattcttttccttttttcaattttacaactttctcattttctttttcttctcttttaataaaataccacaataatttttaattcttacaaaattaataataaatgaaatttaaattaaatattttcaacataaaaaatatttcattaatttcattaaaataaatttaaatttaatttattttaaactttaaaaccactaaatatgtatttttaaccattaatcacctagggaagggaccaaattctaaaaacccctgacaactctcttaagatccacctatctgctctctgatcatcgattcttggaactctcactgtggcattcagagaataaccattcagagaataacttaatgttatccatgattttggattagtgacacatgtattttaaaggcctaaaattaactaatatgagcccaatgaagttaatagatcgacccacaatagagtcaaattaccactgtagatctacacgaaagtccaactcatagacaggataaagtcgacgctattagtcttggaaggaccatttctccataaaatgaaaggtccattaaaatgcatccagataccttcatgggactaatttgaaatgggcaactgaagagacatccgaaaagcatcctacttggcatcctccagacacagggtcccaccaagtcagagatttgtcccttgcgtcatacttgaggagtgcgcgcaagaacacgtacggatgaccgtaatatcataaattaggtcttatctaaccggtccaaactcaatataaattgtattttatcccatcaatgggcctagttataagggttggaaaatcatttcacaatttaagggctaaagattagggttcttaaactttggcaagagcactcttgtgtaagaatattttatagcttttccagcttaataatattaattgcagactaagactcattaacgccctaattacctaaaaattcttgttgcatgtctttaatttatttctttttaagcttaatctatttcttaatcagtttctaatagtctctacgaactgttccctagaagtcatagccctactcaccaaaatagaattttgtcaacaagtcttctaaaatcacttacagagacacactaaagagatttctactaaagatctcacccgttgtaaccacttaaatatgttcgtgacaacataactttagtgttcttgagtattgattaataaaataacaaatggactagcccattacaaccacatcaaaggaatgaaccacaataataattccatgtctgattctattttttttattaaaccggtttatttccaaaaatcatatagtccgagtctaatcgttagagttctatcatcttcttaaatcaattgatagaaaactacgtcaacaacaccaattattataattctatgatttttgaataggtggataaggggtggattcacatataagcgagatggggcagtcgctcccactgaaaaaaaaaatcgggaaaaaaatatatatgcattttagttagt

SEQ ID NO: 382525 - DNA, 2547 bp, Cannabis indica
ttttttttttttttatttctcttcacatagtcacaataatattatacacgacagacagacacagatttgcatgtagccatgttatatatctaacttgtctttttcataattcctctctctctaacccaatatatataattctaccctaatatattcttccactagtggaggaggaccccatataatttcattcgctttatttttcgattttaaactctctctaacaactcttgcttcatcatctacctatttatgattggagaaattaactaattaacaaccaatatatatattttaactttcatagacaaataggttataattaagaaaattttataggagcctatttgataatttttttttctcttttacagtatttatgaaaaaaaatttaatttattttttcatacataattagtttataatatagaaaaacaatcagtacaataaagtaattaaatattattttatcgtaaaatatttataattttttaaaaattgagagtaattaatactaattaataactacaacttacaaaataaaaaaaaattattaaactaaaaaatcccccaaacaccaaatctgataaaaaaaaatatactcatgaaacaatccaaacaacatattaagaggggaactataaaattactcagcctatatattcactctttgaaattatgaatatgtaatgattaacgtttgtccaccttcacataaaatatatgtatatataaatataagcactatactagctatagctaataattaatggatttcaactatgtatatatattgtggctcatttcatagaacatttatagtacaacactctaatttataattaaatatgattgcttagtttacataaggtagtcaatctatatcctatatattcttaactacgaaggaagggagaaaaaagtatagtcttgtttttatttaaaagtaaatgtatatatatgtatctaagcctatatagctagttatttacatatatatatatatattgattaattaagcagaatattgaactaatcgattatatctatctctagatctattgatgatcatatataatgaattggaattggaccacatgcaattaaagtggaatacagtacagctatatatttcccttacctgtacttagtcgaccctatctattatatatagctcaattcatgataatatttatattacatatatatagttcaaatcaatctttcaacaaactgaaatatttgtcctttatttatcattccattgatcttttggtgaccacaatatatacttaattttttctgttgtattttatatactaattagtaattatatcataaggccggccaattaagcttttgattatataaactatactatagaataaccaaattatagtttcagatactagtcaatgccatgaaatgtctaaaccaataaaaaaacatggataaagtgttttagctatatagggaatatatatctctctagaattaatacattgaaagaagaaaaaatggatggttctaaatcctaaacattccctattcacagtgtggggtcctctcatatataaaccccttaaatttcatactcaatacatattggagatttttatatatttatttatatatgtatggttcacatggtgacaaagcaaaggaatgacaagatgatcttttccactatacccaaaaaaaaaaaaaattaaaaaaaaaaggaatggacaagatcattcttgcatgactataatagatcatgcccccttggacaaaggttgcatgtgactttgtgcctattgggtttacagagagaacttacaaaagtatatgtaagtgataattgaggcctagctaggcagagagaatttcatacagacatccctaaaggaccccactacacttaacccctagggctatacatatataatatatcttaatttgttctttcgtttaattattaattaatgacttcaaaattttgtgttgcccaagattaaagatttgcttctgcgtatatatagcatttctatgcactacagtacagtctatgcatatgtaatttttatagtaaattatattttgggaattgatgtgtttggatttctaactaacttttggaattaatctgaaaagtataattatatgcgcataaaatatataatatatgagtaatatgtactgtgctaaaatattatttttaaaaccctaacatgactgagtgtatatattttgatgcatatatgtgtcactcataatattattagatatataaataacacgtagattataatcttttggtacacgtaataaattaaatttcacaaatacttaagaaaagtactataaataaaattggaaattaaattaggggttttcctgaaaaattatgagtcataatatatttaagagcattgctattaaacacgtgtctagcatcttttcgacaagtcttattgtgattggctagtaatattttctaaaaactattatattaaattatatgagacccgatacttaattagaccgatagcgatattaacacat

SEQ ID NO: 382526 - DNA, 1145 bp, Cannabis indica
gatcaaattcatcttcttgatttcaatgcagttcattatccatcctagcaacgggtccgaaacaccatgaaattggagcgcttctttgataaactcccaattcattttgtcgtacaccttctccatgtcaagcttgatcatcataaaacctttagagccatttctccttgccatggaatggacgatctccttctcaaccgaagtgttttctgagatcgatcgacccttgacaaaagccatctgagtcggggaaatgagcatgggcagaacatgtcgcagccgcaacgctagaatttttgaaatgcacttatatgcaacattacatagagcgatggggcgatagtcattgaccgtagacggattctcctttttgggaatcagaacaaggttcgtgtcatttatgaatggagggactctagatgtctgaaagaagtgtgctatcatcttcaagaattccggtcgaatggtctcccagtgagatcgaaagaaagccacaggaaggccatcaggcccaggcgccttgtcaattcccatcgagcaaagagctttaaaaatttcatcttcagttgggatggtatttaaatcactatctaaacaacaatctgatttgaggtgaagccactcctcaagcctgagggcagtccgcggttttgatatggagaaagtgttggaaaatttatcaataaattgttttgcaatatctgctatctggtccagcacattacccgactcatcactcagaatttgaatgtaattttgccgtcttcgagttaccgtggacgccataaagaatttcattgctctgtctccatctttcaaccaagaaactctcgatttctgtcgccaaaaaatttcctcccgcgccagtgcttcatttagcgtttttctggcctccgagtgcgcttcctcactgggggcttgagactcttcaacacctttcaaatttgcacgggcttcctcgatttggacagaaagttttctgaactgaaccttgttccatttagaaagttggtcttttgtatgtttcatctttcggtacatgttcaccattgggtccgggtggtttagtacttgccatgcgtttctaaccacccagaagactctaggatctcgttcccacataacagttggaaattattttacca

SEQ ID NO: 382527 - DNA, 1904 bp, Cannabis indica
aaatacaagtatattttatcatttgacaaaatacaggatctaaaataatattaccctttaaaaattataaaaaattattttaaaatttattagtttggaagttgacagttaatggtggtaaatgaataacagttaagtagtttgaaaagttttaccactaaaattgaaatttataaagttaaatgtaaaaaataatagtttggagagtttaaccgtcaaaattttatatatatatatatatatatatatataaatatatataaccccaagaaacaaaataatctgccttttttatttcagttttcagttaatagttgatcttgacccttgatacgatatgatctaaaggtgagagtaagtttaaataaacaaaacaatctaacctaattaataatctctttttatatattgtcattttcttatgtatctctttcttttttgtctttctcttaattatttattttaattttgtatgtacttttcattttcaacatgctaatttaggtaacatgcataaggcacgtaccccacttcatgataaaaaaaataaatgaaaaggtggcaatattagggttgtaaccatttcagctttattatattataccaagattgcaatatgttatcccctacaaaaaattagaaataaaaatgtcatattattaacaaatgcaaatattatacttgttgaaagcaaataggtacatgcatatgtataataataattaaaaaaaaaaaacatttatctatagtatattttcttaattaatttctattttcatatttaccttcaattataatgaaataattttaaaatatatatggctttgagaaagaaaagaaaatatataagtgcttttttatttttaatttttctagcaattttttaaatttattttttcattaatttgatgcaacatgcaataactcaaataggccaataaaataaaatgtacttaatctgttatataattattgaaattaactcatggaaaaacaaatgggatgtgattaggttatgaacagtaaacttttttgacattaaattcttttctgctaaaaacaaaatttaattataccacccttgatgtaatctaattctaaaagctgataattattaattgttgtgatttgaacataattataactataattaaatttttgtctgccacgtaatagtaatattaattagtggaaaactatcaaaagttactttataaattaatatattggcccatgattatgagctctttgaaattattaactttgaatagaaagcaaatgtataggtcaattaatcatacaattactaaagctaattactttaaaattcattacgtgtgtgtttagaaaaaaattgtttcattattaataaacaattaatgtgatttctagagacatagtaattaattacactactcctaatattttaaaatacaaaatgtgttttgctcaaaaaaaatatatatatataaaaggtgtttgaatatcagtactaattaaatattaattatgattttcatgtttggtgaaaaagatatagtaattatacaaaagaaataatgtaacaattaattatttaaaatttataatatttcgtaattatcaaacaatttaacactccaaacctagcaattatactcaactcaactctaataacgggtgattttcaaaatgctttctaaaactcttttaaatagtattgtaaataaaaatgaaaattaatcatgtatacttatttataagtgcttataacatttcaaacctaacaattacactcaattctaattaaaagttatcttcgaaatttatctaaagaaaaaaaaaaaatggcggcaatgattgggtcttgcttcgagggtctgggtgaaggtggggcagcaagggcgatgcatgtgagacaacgg

SEQ ID NO: 382528 - DNA, 1698 bp, Cannabis indica
aaaaaaaaaaaagaattgtaatcacaagggacaagtctaaaaggatggttatgttatctcaaaaaaaggtatgttcagaaaatcctgaagaaatttggttttgaagactgcatatcaatttttacaccaattggtcaacagtttagattatcaaacacacaagctccctccaaccaagatgaagaagcttacatggagaaaataccctacaatatctaagagaaacatcaaatttggagtcagtatatggatccaatcccaacagtactgcagttgtaagatatgttgacttaataaattactatccgcatatctcattttaaattgtatatcaatcatcaaaccctgtttatatatacacacatgctctttaggcagttttcataatcaaactctgtataaactccaataatcaactaagatgtaatgaatagtataacaactagatcagtgaaacttggtctcatttaacatactgaatcataaattaatgtaataataaacacatagataataagactaggcatatatagtgtcaattaagaagtacatgttgcaaatgatcatgctttgcgcaaaataagccgcctctctctcttgtactcaacttcatctctttggtgcatgattataagagctcttctcacctgtgaaaaatattcaattaacacaacagaaaaatgtacctaaaggcttaaaagatcgaagaaccaaattagaaatttctaacatgacacttacagtagactcgttcattcccattctagcaagctcatcaatcagcttcctctctgatatgtggttcccaatgcctattcttctctttatctgagtttctgcttgctgtttagcgggaaataaataaattaattttaataattattggaaaagcaagagaattataatactaactgcacaaaatatataaagacctttatttcatttgccatttcggcagtaagattaatttgttgatttattccagactttgcagcatccattgttgaaactgtaaaaagtcttaaagcttcttgtacattttcttcagtagccacatgagacctgaaatcaaagttaatgtcattatcatgttatataaattacaagaacagtctttaccctatttcatgagtatccaaagtctaaacactaggttgaaaacttggattgctaaattttttttttttgtaagatggattattgaataaaattaactacactgaattattataacttggagtatctaatcatcaaaacaacaagcccataatataaagttatgaatagcacttacagtttcatttttgcaagtgattcactcaatcttacaatagcttcaagctgcctcactgttatagggattgctgaaccctcgccagtttcatttgcctgccgtctcatgtcctataaagaaaacccattaaaagtggactgattatggaggcatgcatactgaatacgttatgtttgtgaatggtaacggtgagcagttggctagtaattttaaaccaatttccttgaacattgtacaagtgagatctaagaatacctgtctgattttaacataattattttgtagcaaggtggatgcagaatctgataaccggggatgacatccagttcgacaatattgtatgtacctacaagattgcaataaagagtaaaaagaactcacaagtattaggaagaaaatattgt

SEQ ID NO: 382529 - DNA, 1354 bp, Cannabis indica
agaaagaatagagatcttgattctgcatctatcaacctcgcaaactccaactttcgatctcgaaacaactctgggcagtcaggaaacaatcaatggaatccatatgcaaataatcgatatggtggaaactcaaatgtccctccatacagaccaccaataccagggggaagaggcaataacttcaattcttttggctcaactggaaacacaaacaattcgaatcgtggctcaaatcaaagcaacaacaaagttatttgccagatatgttctcgggctggacactatgcctcaaagtgttaccaaagattcaatccttccttcccaggttttggatcacaaagtcaagggcacccctcagctatgttagccactgcagaaactgtaaatgacgagtcttggtaccctgactctggggcaactcaccactgcacttctaatgaagacaatcttgcccagaaaaccgaatgtcaagcaaatgagcaagtgtacatgggagatggtaatggtctgcctgtgcaaaatataggtaaaactcaaattttggcttcagataaatctacaatacttactctaaataatttgttgcatgtacctcaaattacaaagaatttgataagtgtatcttaattttctgctgacaatggtgtttactttgagtttcacccaaatttctgtcttgttaaggatcaagtgacacagaaggtgctgctgcagggttcacttgaagctggtctgtatgtgttccaatcattgaatctacctactgtacccaacaaaaaccaagcctgcaatctccatgttcctctaaaggctgcctgcaataatatgcagatttttccttctttaaattcatgtaacactgttcaaactgtaacctcttcaaacaatgattcattgtttcatttgtggcattctaggctaggacatcctgctgccaagactgtcaaacatgtattgaacagctgtaacattcacaatattaataaaacacaatctgatttttgttcagcctgttgcttgggaaagatccataaatttccttttcctaactcagacaccgtatatactcaaccactacaattaatccacacagacctatggggaccatcacccatgatctcttcaaatggatactattattatgttcatttcactgatgctttctctagattcacttgggtctatctacttaaaaataaatctgatgcaattcagacctttatcaacaacaagaaacaagaaaaaaaaattcgacctaccaattaaaaatctccaatccgattggggaggagaatttcaagcattcacctcatatctgttgaacatggcattcatcatcgcttttcatgcccca

SEQ ID NO: 382530 - DNA, 1047 bp, Cannabis indica
cttctaacacttagtcaaaatactaagtgttgctccctctccaaacacttagcaaaaataacaagtgttgctccctctcctaatacttttccaaattaccatgtgttgctccctctccacaaacttagcgaaacaatcaagtgttgttccctctcttagctaaatcaacaagtgttgttccctctcccaacatttagccaaattttctactgtgacttcctcattgtaagtataggttgtaatggaaaggatacaaaagggaaatacaaccaagggtgagttcgttcaaactagcacgcctccgaaaaagcctagagagaggaggttattgtacaacaaatacaacaagtacaagtagtggtaacaccatttgtctcactcttggtagaagctgacatccgaccaacaatcctccactacccatctgacaggctgaccctcatggtacaatcaaaactttgtcctcttatttttgggaccatttatatttcagagcaattagagctcaagtatgaaagcctcatttgaacacccataaaggggtttaaaattcattacttgtaaaagagctctaacactcaatacaacagtattttactccagtgatgactgagttttcctaatttttcttatgcttttcaacctcagctctttgtaattgattttctaactaatgtttggttgatgagttcttaccgtcaacagtttggtgttgtctgtgagaaaaagaaaatttcttgagtattaaccgaccaccttacgtagacattcacaatatctcaaaaagaagggactttactcaaattacaacaagttggccaccatcttaagaaaacgtccaccttccatcgccggagcagattaaatagagaataaccaaagtatgaaccaccaagccaatgctcaatgagctccccgctccactcactccctatgcgccaagggagctccctactcccgttactccccactccccacacgcaccaaagggagcttgttatagtgagatttctctcacctagaaactcgagactagactcctattta

SEQ ID NO: 382531 - DNA, 3391 bp, Cannabis indica
cagtcatcaccttcatctaacaaaggccattcacctttaatcaattgtaagtgcttataaacacagctaactaaataaaatcctgatgtttcttttacctaaaaccactcgtccaccattgctgtatcactcaattggatagataaatcaagtctctatctttggcgttaaacaggtcattcacaatttcaatgtcccaagtattcgtatcaatagccattcacgaagacacactttttccctcaagacttggatgggaggaggagacataagggttattcgaatcgggcaaccacgaaacacataaaacactgacattgaaaccacaccgaatcgatcatctagcccctacctaaaccagttcctgagcctcaaaatgctatgccaaataaaattaggattttgtcctaaagtagcagttaataagctaccattaggataatacttcgctttaaaaatcttactcaccagagaaatgtcatttgacaacaaatgccatccctgtttgcctagaaaaagaaagattatagtctcaaagatctctaaagccaagaccaccaacatttttatgtcaacaaagtcgcttctaactgatccaactaacacctttgctagatgaattggattgagtcttccaccaaaatttagacatcattcctttaagatccaagcatatttctttagttaataagaagacactcatagtgtaacttggaagagcttgagcgataaatcttattagaacttccttacccacttttgacagaaaatgactctcccaattgaaaattctcttcttcattttatctttaagaaagcttaaaattgcatttttattatgtcccatgatgcaaggcaagcccaaatataagctattttcagaagcctccaccattcccaatagttcacacaagcgggaccgtgtagccacttgtgtattattactgaagaaaatcaaagattttgtaaaatttactttttgacccgaagccgcctcataagtatgaagaaggtgtaagacattggtagcttcctcttcattggccttacagtacgcataactatcgtcagcgaacaacatgtgtgaaataaccagagcacctctagctactttgcagcttgttaatcgacgattttgttcataaaacttcaacaaggacgataacctttctgcacaaattagaaagagataatgagataatggatctccttgtctcaagcctctattgggaatgataggacccataggatgtccaatgagtcaccttgtaactgacagtactcacacaacacataatcaaagaaccaaccttctgtcaaacccattcaaatcaataaagcttcaataaaaggccattcaactctatcgtaatcctttctcatgtcaagttttagagccatttaaccatccttcccaactctctttcttttcaaccattgcataatttcaaatgagaccataatgttatccgaaatcaaacgcacatgtaagaatgcactttgagcatcagaaataaccactgacaaaacaaattttaatctattggccaacactttagagatgactttataaagtacattacaaaggaaaataggccgaaactgggatacgactttagcccgcaaaggctctgcccatacgtgtcagactacggacccagtaaccaggcttttgtaggtacaatgttagaggttgttcccacgacacgctatcgtacagagcatgtgtgtctcatcgtacctgaccaaatgatccaatggctaggataagggaaattcaaaaaggaaaagcactgggacgacacgcttaggaagtccaacccgtatgatctgacacccttaaattccatatgggaaaaatgccacctaccaatccaatggtcgaatttcgcccaaggatgatcaatccatactagcacaagaagagaagttggcctataaaggcccctaaaaagcacgagagaaaataagactttttctagagagagagatcccttctttttggggcttaactcattcttcaccattttgggcaaacacatttgtattaaaccaggcaatattatacctaaaaaatttcagaatattcctactaagctttctcttcttcaagaggaacaagggggaaagagttcgaatccattgtatttttatttgtataaatagttactggctgatgtgcccaataaaatggactcatggactaaggatcattaactcctgaaccacgtaaaaatctcttatttgttatcttgctatttattctaatgttcctttcttaagctctaaaaatatttagttgccaaaaaactcagtaaacattttggtgctttcattaagagctgaagaaagaaagaaccatgcacggtggtcatcgacgcaagcctatagaaagaagggcccgtacaaagaaagaagaaggaaggctgcttgtcttcctgtcagggtccggtcaaaaattaggatggtctcggttaggggtattgttgagattgaaggccaataccctcgatcgcccaaagaaagtgcagaagatgaacgcatacggtctaaaaacactcaccgtactcatgctcgcccttataagctcagatatggccagctaactccctaagggaacaaccagcctggcgcccccaggttcaggctcccatcgtccattaaggtataactacgcagacacaatagagtgcaagagtggttagggctaggtagagaggataagacccaatgcgattatgatgactaactcacgaagggtcaataaatgtaatgaatctatccagcttgtgactctggtgtcggtgatgacgcaaggactagatccattgccaatggctccttcccttaactttttgctacgtcactaagtcaatcgaagattgacattgtgagatcatgttgtcatagcagttgagaagagaccattagtatcgccaacgcccgttgggtttccagtcaagcctgacgtggtactgctagttgaagggcattgctagggcaaacccattttggcaaagttcgatgataggaatctctgtcattacgatgtaactacaaccctagagttacattaaagaaagtaactcttgccactaaaagcccgttctctactggaatagcattcatcctattggaggcccaagtctttgccttaaaagatgctaagtgccttgcaatccgtcggaggaatcagactacccaggaggttctggggttcatgcacgcgtcttttgagccttcttggagctcgttagatgcgtgtgtgtcgcttttcatgcctgaaagataacttggggtacgacacatcttcaaccctctttcttggaaggaaggactacttgaagtttgtcacacgcccagtgatgtttcaccctttgatcttttcaag

SEQ ID NO: 382532 - DNA, 1896 bp, Cannabis indica
cttccaaagaagttctgtcgccaattggaattcatgatggcaaatttttggtggggctctagtactaataaatccaaaatccactggaaaaaatggaatttattatgccaagccaaagccgaaggaggtatgggttttcgttctttaatccattttaatcaagctctcttagccaagcaagcttggagaattttggaagatcctcactctcttttagctagagttctgaaggctcgctattttaaaaatgggaattttctcactgcctctaagggttcattgccttctctcacttggcaaagcatctgtgatggtcgcgatctcttgattaaaggtttaaggtggaaaatagggaatggaaattctgtcaaatgtgctacagatccttggttgcctggaaatacttctttccgtccttatactttctgtggtgatgtcgattttacagttgcacattaaatctctccagatcggcagtgggatcaactgttattgggacaacattttggccaaatagatattgaccgaattaactctctttcgatcagtcctaactcaagagaggatcggttgatttggcaccatactgattttggttcttactttatgaagtcaggctaccatttggctgtgcaattggataaaattaatgagtcctctgcctctgatcttaatcatggctggtggaatcggttgtgggctctcaaattgcctaagaaagtcaaaatgttcgcctggcgggttattaatgatgctcttcctacacaggtcaatcttatgcatcgtaaaatctctactgtggcctcttgctccctttgtcattgcccgcgtgaatcttctggtcatgccctttttttctgcaccagagcacagcaagtgtggtcccgtgcccatgtttttagcccgactcctttgatctctagaatgaatggctttgagatcttctcctccattgctccagtgcaacagaatgatgttttggctaaaattctttgcctcatgtggtgcatttggacagaacgcaataaggaaattcatggctctaagcccaaaccagttggggtaatctgctcttttgctgatatgtatgtccagcaatttttattggccaatgcaaagcaggtttccatggtttctagctgcaataatagtgataatgcatctggttcaaccactcggagtagtcatcctcaagcttctggtgtttctactggtgtatgggtgctgcctccagctggagcatataaacttaatgttgatgctgcgtttaatgatgaaggttcggtcattggtattgaggctgttgtgcgtgactattttggcgatgttgtaggtgccttagtcaaacccttgtttggctgttattctgtccgtgagatggaggctactgctcttctccatagtctgcaatgggcacatcaacttgggatgcagatcgattatattgaaaccgattccctcattgttgcaaatgctcttaataaacatcttcagaggggttatgtttctaatttctatgatcttattgctgacatatctcttttattgtcctcttttcctagagttctagtttttcatgtaaagcgtgatgccaataaagcggctcacggtttagctagattttctcttcgattggataataattgttcttggttggaggaaataccatctccaatccactctgttattgttatggattctattcaataataataatagaacacttaaaaaaaaaaaaatcacattaaatattaattaatctaataattaataataataaaaaaactcaactcaaataccacatttttctctttttttttttactatatatttttaaccatattaaatattagttaatcaatagctaattagaaaaagaaaaaaaaaaaaaaaaaa

SEQ ID NO: 382533 - DNA, 905 bp, Cannabis indica
ttccctatttgttttttttttttgtttttttttttttccatttattttaacatttttttataattaaaaataagaatattgtttataataaattatataagtttaattaatttataaagataatatgttaataatggtgcagctgaagcacttggattaagtgtaccacctccattcaattccattaacattagcagttacaccaatactgaaggtctcaactatgcctcttctatgtctggaattcttgacgatacaggcactgctatgtttgtaagaataaattaattaacattatcttccttatataatattgtatataaataaataattattatttctaactattaataataatatattatttgtttaatgtgataattaatcagccaggtattacaaccttaaggggacaaattgagatgttcaaaaagacagtgagagaacagttaagaaaagttttaaagaagaagaatggagaagaagtgaagagacacttgtccaaatccatagttttagtagtctcaggtgtcaatgactttgctctcaatcttcttaggaacgaaagaatggatcgtcgttccatcgatcatgatgccttttcacaagatcttcttcaaaaatatgctcatcttttaatggtaattaattaacaaaatttgattacttaattaaactccaatatattactacaagaaatgtcacttttcccagcgcacatttgtagtggttaacatttaatttttaccagtacatttacgcgatggtaaaaatcatttttgtcagttcttttcattttgtgctggcaaccaacgttgatttgccaaccccttttactaacacatcaaaagtaaattatattttaccagcgcaataccaaatttttgtcaaaacaaaaatgtgct

SEQ ID NO: 382534 - DNA, 4607 bp, Cannabis indica
acatcatatcatataaatagatatagtttgtttttttatttgaataaatagacagaattagtatagcatattattattgtatgatatggggagttggggcgtatatcatatggcatgtcatgggaagcaaatacttaaaagggaaatacaaagaaaattagccctcctctttgcccaccactctctctctctctctttctctctctctctcacctgctcaagatatggaaatcgccacatgatttcacacacccccacagaggaaaaaggcaccattgctgacatcacctgtatctcttctccggattttcttgggtcccacctttcctctccttttctcactttcatccaagactttcttttcctcctcttgtttattttctcagacattttatttttactataatgctatatgtatgctatggtctttttttttttatgtatgtataaaatagatattgtatattatatatatataataaaaaaacccaccacccccactaccatctccacccttctccatcacccaaccaaaaaaataatattcttttgagctattagtttatttaatttttttgatttatttattggtttattgccttgcttgccccttaattcaaaaatcaatttggaaaatttgcaagatttgggaggaaatctggtcggatcttgctttgtgggattgtggtttttggtgggtcttttatttcaatacaaaagcctctctctttttcttccttctacctcctcctacttgcaatagtttttgtccaaaaccaaaaccaaaacaaatagatatataacaaagacagagagaaaaataagaaaactttttgtctccaaccatcaaaaaaaaaagggaattcttcttctttcagctgcttcttctatcttttatattgtattatttgcattgagcttattgaattctcagttgggtgagaaatacacaatgggaatggccactacagagtcccagtatcatgttctagctgtggatgatagccttattgatagaaaactaattgagaggctactcaaaacctcatcatatcaaggtaactatatatacatataattctatataatcaagctattgttcaaaaagaaaagaaagaaataatagtttttgtttttgtttttttttatggcaattgttttttctttttatttttatttttttttcatctttaattaatgtggtctagttatataattatatatgtatattttggtttctgtattttgattgcaatgcgctcttgtgttttccatgacagttactacagttgattctggtagtaaagcattagagtttctggggtttcatgaagatgaccaaagcaatccagatacatcttctatttctccaaatagtcaggtaggtactgtgatttgtttattgtcccccaaatgtcacagattctcaattttgctctctcttttttagccacttttccattattttaactgtgttttctgataaatgtttggttttttgtggttttacaggatgtggaagtgaatcttattattacagattactgtatgccaggcatgacaggctatgatctgttaaagaaaatcaaggtatcttatttttcaccctattcatatacataattacctaccatgaaaaaagtatttacataacctttcatgcgtctggtacaagacttttctttccaaatctaaactattgagcggttgaaaattttgtctttttgggtgcttgtctgaccacttggctttaaaatatctggtgaaaatctctttgggaatattttcttacctacttttccaccagaaggaaaattatagcttcttccttgtttagattatcattttcatttatttgttgtcatcacactagatcctttgagaaaacattcatgaagtaattgatttctttttctcttttctattcttggtatttataagaatcttttctgatactttaggaatcttcatatctgaaaaacattccagtagtgatcatgtcatctgagaatgtgccttcaaggatcaacaggtaaaattttgagtgaaagcaaagaaataattataaagaaaaaaactttgattaatttggatttttgggtttggattctgattattattgttgggtatgtatgattgattattatagatgtttagaagaaggagcagaagagttttttttaaagccagtacaattagcagacgtgaaaaaactaaaacctcatttgatgaaaaacaagttgaaagatcaagaagttgataaaccagaggaaatccaagaaaacccagaagaaaatttagtgaaacaagaatttctgtcagagaaaattcatctgcaaccagaaactcaacaacaacaacaattgacaaataataacaagagaaaagtcatggaagaaaccctttcacctgatagaactagaccaagatacaatggtattgccactgtggtttgatgattaatctttttaaagtttacaccttttcacctcaacattgtaattttcatcactttttttttttttatctttttctttttataatcactgctggtttatatactggctaaataggaatgtagagagggatcagagagttttttcatgtacactgttttacatggaaatctttcattcaaaattttgttgtgctaataatataacattaaaatcaatgtaactatcttaactgtgattagtgtatgttttagcctcgtagagcttagattatgcggaaaaaaaatgtttatccatttctgataataaagaattgtaaaaatgcaaactttttataactacaaaaatataagaggcctacaaccagagttttattaggctcttctcacaactttcacatacaaggagtcaaaccagcgtttgttcttttttcttttgttgactttataaatttccattattaattttatttatatttttaagagaaacatttaatttgcatcgttgtatgcacatgattacttatgtattatgtatcagagacagctttgtggagtggtatagtacacagtatacaaattaacaataagaagtactattatttattgaagggaatcacttaattgtagttgtaagacaaatggaactctataaaaaatgacttggaatatgttaaattaatggttgttgaatacatgtagcgaaagtatgaagaaaaaactacaaaattatcttaaaagaaaagatacacgcaaacatataatatattcttattaagttttttaatatacccatatcacaatataagattttcggatctccaaatagatataaatatattttattaggattacgataactataactataatgataatgatgaataaataaaatgaaacgaatcaaattgaaatagtttctttcctagtaaacgtgcacatgaaattgttgtcgagttcaatgtacttagattgctataaaccaaattggttggtactcttaggattttaattgccgatttcattaaaataagttttagtttttagattaaaaaacaaaagatatgtaaaagtatatcatttattttcttgtagagaaaatagctggagaaatggtctccaaaggctctatatctgattatagagcagtctacagtaatcaccaagtttggtgtagctacaatagaacaactttattcatatatataattgtaatctaatattattcatttaaagaaaaaattattataaatatcttttttgttttaaaaaaaataatttattcatcaactttgaatcaacaaatactcaaataataataataataataataataataataaatataaaaagcacaaccataaattaaattttagttgtataattagcatattaattctagtgttacctgacatttgacaaaatgggactatagttaaacacaaagacaagccttttagtgagcccgtcagcgagcctcatggccaccttctcacctagcgaggctcatggccactcactttcctattaaaaaatattagggacttttttaataatatatttaaaattaattttattttcagaaatacctttaagaaaattatttgtgcaactaccaatgtgtcacgtcagcatacataccaaaattcataacaattaccgaaaatagaaaaaattagaaaattttcgtttccagaaagttttgctttttgggagttttaaaaaaaataaccatttagtagtttttgatgtgaataaaatatcaattagttactctttcattaaaatatttattttggaatttttacacatatataaataattaaataatcatattaatatgtgagaaacaactattttcctatctccgaaaaagaggactaatattaaaaataacttttttattttttttttatattttgttaataaaaaataataaaacttcaagcttaataatattcaacatattaagtaatattataaattattgtaatttttttattatattgtatttaaaatttaccatatagtatactaataaaatattgtgtggtaacaatttttaaataaaattaaaaaaaaatagtaacctatgaaatcagctatttatgtaagatatgtttatgttactttttaataacttttctatatt

SEQ ID NO: 382535 - DNA, 1552 bp, Cannabis indica
taaatatatatacattacactatacctatatccctttcttcagtcacgcgttcattacattgtaattccttccaactttcaaggacgattgattatctaggtaagtggttttattagtattactagatagtttttcgggggggcggaatagtatttattattctttattattattatgatgtacttataatcaaactattctttcattatgaagttttatgatcaatcatttgagccatagattcatagtaactacttatatatggtcaattagtataatttcaatgttgtaaaatatgtaataattgcacaatatatataagcataaaatgaagcaaatcatgatcatcaaacatcactatatatgtgttcctaattatttcaagaatttaaccaagaaagcatatgtaagaaagtcaagaaacttaattaatcttcttttccgtttcatttttcgaattggtgattgttaataattaggaataataaataatcaagaaaagtactcaaccattgacatggagtgcactaagaaggcaacggagacagtgacaagcatggcatatcaaacatggccgatgataactgaatcgattgagaaaatagagaagaagcttgatcaaaataacgaccaagaatggaatcaagaggaccaaatgaaagcatccttgtaagtacatatgtatagatatatattttatgctttaattaatattgttaatacggacttagctaaattcatcaaaatatgtaataagatctctcttatatctatatatttatatataggccagtaatttgttgcttggctacattgtaacttcacatgtgcagagctgtaaataaaatcttcttggcaacaccctacgtagaaatttgggagaaattgacaaaaggacttcatacgaaatatgcgaaagttttgataaataggcttatgaaaaaggtgagctaatcttcttttttatatatagtttgtgtttgtatgatactttattcatttatttttccattcgtatttctcagtttatatatataaagagataatttttattttctttaattaactttaagtttttttatttaggtgattccttcattggagcagaagagaacttccaagttattgtttcaccaaattttggaagaatggtcattatttgacacttacacgagaaatgtattgataattttcatgcctgttgaggaaatgggacgtaatcctatggtcttagattttaatcctttgccattacgtgtattcgcaaaactcctcttctgtagcagggtaatatgctaatttactattaataattacatatgtgaatgctctacttctagctatatatatatatataagtatatatcattatctattgcacactttcgtcattaacaataatattaattgattaaatcctcaggtctggaccgaatttcaccatgaaattgacaatctattacctgaaatggtaaaaattatgtcactctataattacttaattaaatttgctatatgcatgacctttagggggtgtttggaatggattaa

SEQ ID NO: 382536 - DNA, 857 bp, Cannabis indica
atactaagtgtaatttcctctttctataatgaacatctactactactactaaagtactaataatgcctagttcaaagtatcatcaaatcatatacatcattttgtttgaaaaagatatttaatataataaacaaaccagtgactatgaatggtattcctcttaataatgaataccaaaagataataatgaatagtgttatatgaactatttggtgaaacttttctttaatgaatcaattatttacaaagaaaatatgtttggagttgaactatcatgaattgattgtgatgatatacatttttgaatatgggggttaaaaacacattttttgtccccatatcttagttgaaaattttgctttctttactttattgtattttgaataatctttttctcttttttgttattggtgaatggtgatgatattattaagagagtggagcttgaataataaggtatcccaagtaaagcaagcaagttgagagctctggtattatgttttcgaaggtgagacctctgctactagtggaacttgacatcatatctctatatatatacatatgattactataggctttactttacatttatatataattatatttctatatttaatgtgtgtttagaagtaatgtgtgggtagtaataatttaaaggctaattaggatttttgttctctgaattttgatatataccaaattatgcttcttgaatttttaaggtcattaaaaatgccccctgaactattaagattgttggatttaatgacttttttccaattttagtaaaaaagtctaacatggatgaaagttcaggggccataatttagtacatgtcaaagttcgagggacataat

SEQ ID NO: 382537 - DNA, 4296 bp, Cannabis indica
cttgtatttatccaaaacatttcttgtcccattgaatgtcttctattctagtcaaattcaatttcatgtaaacttatatttatttattattattttgtctaaaaaaatgaaaagaaaaacgtgatttttattggaaaaaaaaaagaaaatttacacaatatacttaaaaacgaaaaaaatttaatattttttacgattttttttatttatattttacggatttatatttttcaaatatttttttatgttgttcaacattatattatattttcgcaatgtaaaaataataattgttttaaaataatttaaaaataaattaaaatatctgtgaaaatatatatatagaaaaaaaaaaaaaaaaaaaagagtcaaaattttgtaaaattagaatgtttttttatttttgtagtattttagtaaataaatccaaaaaaaaaaaaaaaaagtgagttgaaatataggattacataattaattacccaaaacatatagagtcaatgaaaatgtgtaaaatcaaatttgtttttcctttttcccttctgaaaagaaaaaataaataactagatttgaaatgattagtatgattgtgttgctgtcatttgccatatattttatgtttttctttttctattttctttttttaaaaaaaaaaaaataaaaaagcctacttgcttagttgtatggggtcttgttcacatgcaagaaaaaaaatacaattgcaagagagacacacatagtataccttattatttttttttttaatgaaaagtacaattcataagatattaattaaatatgaaattattattattattattatccaatggggttttagatgagtatttttttgattgggagagagtttttgagctttataaacaaactattaataaaatggcatattccaattttgggtaagaatcataataagattgaaatggcattttaaattaaattgtcaattttggtagctagaaattaaaacatttcaaaaaattgagaatgtataaatatatagtaatgatatgtgcatataaaatataaaataaaatgatgtccgtgactgtggtttctagccaataatcaaatttgattaagaagaaatctaaaattttaaaaattacaaccatattactaagtgttgttgtattttagttcatattttgtgcacaaatctttacttatatatataaatgtaattttattattagcaaactcaaaattgacattttcaacaaaaaaaaacgacatttactaaaaaaaataaaagagtaatttgcggcataatacttaagtttaacttttaattgtaaataaatatctaagtttaatttttcacgataataatacctaagttataattttgaaacttttgtaggtacttactgttaagtgttaagtaaatagtcacgtgacaattattgattggtctaagttattaaatttttattaaaaaaaattaatttaaataaaccaataaaaaattacacgtggatattgactacttaatatttaatggtcaggtacctacagagttctaaaaatataactctagtattattaccgccaaaaattaaatttaagtatatatttgcaactgaaagttaaactagtatttctatcacaaattactcaaaataaaataataactaaaaatgatcaaaaattgactaatattattggacccaatatactaagaatgataagaattaaagtagaggtatttgttaaaatgaataaaataatccaactttcttaaatataccacaatgtgaaatatattttccaaaaatgccatttattctgttttataaacagggtaggcccaaactaattggaggttttgggccaaaattttcaattgggcttctttccaatagttttgtttagtacatagtagtaaaaatctaatatgttatttttgaaaaaaataattgggtagtcgttttacactctcatttctaaaatatttttcttattatgaaattatgtttttttttaatatcattaaaaaatatgtatgaagagatacaagaaagagatccaaaaggaaaaacctctatattaatattacttttttttttctacacaaactcataatccaattaatgtataatagtgccttttataatagttttttatacataatattttacaaaatgtcctttttcaggacaattaaaatgtcatttttgtcaaataatcatcaaataatattattttgtcaaaattacatttaacaaaataaaatatttattttcactaatcatatcaacgattacgtgaattacttttaaatctcaatcatcccaacttcttacgaatgtgccgtaagaacagatatccagacagtaagtaatcgatcgatcaatattattattcagtgatctattgatcgatcgatataattaattagtgatgaacatatacatattgtttagaataataaatttataattaattaattaaataaataattttttgagagcataatagagaagttgattccaagtgtcttgaactcctgcaatgcaccaatgtttacaatcaacaagtccataagtgttgaatttactaggatgaccatcttttctaagctttgacaaagttgttatgtcaagtaaatgaattggcttcttcatttgattcaaaacttctttcaacacaagtgatggtggtgaagaatctttagggtacaatgttccattgtttgttaatattataggctctttttctccttcacaatttgttccttcacttttattccactctctcccactacaataataataataataaattattttaacaaatttaaaaaaattatgatattgtgtcaatatatataagaaaaaaattaataaagaaaaatgaagtgaatcatgtgtatatgttagtgaacttaaaatatgtaagttttaattacaaaaaaaaaaaaaataaggtttttgattagggataacattgaaaatttttacactataatggttgcaacaaaaattaagagatatttgcagtataaagtttgaatttgtaattggtattagcctaatgatatttttagcagcataaatactcaatgttagtgaaattgtaattttatcattacaaaccccataagtatcttaaatttgtaaccagatttaatttttaaatttgttgaaaggagattttgaagtaattgataatttgatatcataagtttttgtctaaatttaatgatttagtatttggtacttacatgtgttgtttataaaacgtattgatgaaattagatgaaattattattttgctaacattgagtactcaagatttaaatacggtacttatgctacattttttttaaaaaaaataaatattaaaatatctatcctgtcaaaattaaaattaggttttgaggtgtaacatgcataaatttaattagatatgttgttaatattctaaaaaaaatatattagtgaagaaagaagttaatatatcatacttgtaatgagatggactcaatgcttgaaatatgactttagtcttggttgtgttgacagatgatcaacccattggcccatgttgttaaagcctttctatatgcttctatttgatccatactcttcactgtttgattaccatcttcaatatgatcaaatctgcattaataattggaaacaaaattaatataataataattagtactttaaaactattatatacaaaataaactaaaatgtatcttacaaaaaaaatggacctaatattaaaatgtagtaatattaatatgtcacactcttgtagtatttagtagctatgctcagggttaaattttggttaaagcgaattaggcctgcacttattttttcttcgaaaaaacaaacaatttttgttgtaattttcaaaattactacatgtttaatttttttaataaaggatccaataatatagtttttttattaaggtccaccctatttcagaatcgacttatacccttgcatttttccttattcatgatcgaatccgtacacatccaaccaacttaaactagttttagaaggtgttttctattttcggcacttaggtcaaacaattggttttttcctttttaaaaagaaattgaaagactagattaagcttaattattggatagcctctcatgataataactaataacaaaaataaaaattttgattctaagaaaatatatatatattagatagatgttacataccaagtcacgtatgttaattttattttagttttagttttttttaatatcataattttaaaattaataatatttaatgtagt

SEQ ID NO: 382538 - DNA, 3632 bp, Cannabis indica
ggtgaggagcatgggcaagagggacaacaacagcaacgtcaacatcaacagcctgcacctcaaagacaagttgctgtaagaagatttcaaattgcatttcagctggatttgttgcttattctgaagttggcagctgtaatctttttgtttaaccaagatggatcaagacaaaggcttattgtacttgtgttttttgcttcacttgtctatctgtgagttttcgacttcgtttcaaaacagtgtctataattcttaccctttttaatttgaggtttctaatgggttgaacttctgacctccatcaaggcattcatcatcatatgatctacatgatacatattgatttgccatataataattttcctaaaagctgatattaaagacatacagtggaagcttaactgtttagacgaacaacgttgcagatatcaaactggagctcttacaccactgatacgatggctttcacaaggtatgcatagggcagctgctcatcctccgaggccccctccagtcagggctgataattttctacctcctggaaggcagggacctgaaaatgctgcttttgcaggtagatttttaattttgttttgatatgttggaaagtttcttaggaaaattgtgcttatactaggaatttctaaatacaatgattatttgtgttaattttgttttgatatgttgcatagttctttaggaaaatggtaattattctaaggatttcttaatacaatgaatatatgtgtagacattcaagacacttgctactattggaaaacggaaataactaattttagtagttttaagaattttttatactatttcatcaggttcatgaatagtgctagtgattcaatgtcttgaattgggtcctcacattgctagagtgatatatagatcagtttagttttgttccggcctggcgtatagaatgtcatgtctacttctcaattcattgttagcattatgaaattatttactggaagagatcaccaatttcagctaggcaccccaatttgctcggttattatgaattccaatttttgatatcacaataaaaagtggttcgtgtggtaactttttgcagagggacagcctggaattgagcttaggaatgtgcttggagacaatgcagatcaagtggtggaaaatgagaatgtagcagcagaacctgaggctgcggctggcaatgggggtaaccagtggtggggaattgtgaaggaaattcagatgattgtttttggcttcatcacttcacttctcccaggtttccataacatagattaagattatatacatggtgattaacaggttttattacattaactgaactgactgactcagaatctgttaagtgttacatgatgagttaattttaatcatagatataccttgatgtattgtgcgataaggttcagctttttttcggtggaattttgagagtgaagatgggttatgtccatgtatttctgtatgcgtttggtagaattcgacaattttacttggggtgctttagttagaggtaataaaataaaaatggaatcaatttttatttcattttttgcatttggaggtaataaaataaaataaaattaattttaatttcattcttcttttggttagaggtaataaaacaaaatggttgtatattaaagtattatttcagtgattggttttacaattttggtggaaattctatatagaaatgaaggtaattttttttttttcatacatattaaattttattttattttatttttattaatattaagattgtgttcttatttcttccaactaaacgtatctttccagtgttcattctaatcttatttattgatgggatctaataaaagggtcaacgacgagccagaacactagtactagtagtagttgcaattgcaaattatttagcataaacaattaccgaagattaagcaggatgaaataattagaaatttatgacttaaaaatagacaaaataaaatagaagttaaaagtatataacattcaaaatttgacaaatctttgcttttgtcttgactgtataagagtcgtattatattaaataataaataaaactatgtttggataaaataatttattatattaattattacaaccaaaatttttaatacaatgtatgttgtattattttacgccttttttatttttacatttctaaacatttttttttttttggcatttttacgaaatcttattttatatagaaacctctattgcaactagtgatgcaacctaaatcgcaataaaaaatcgtataaaaactcctattgcaactagcgctgcaaccactttagaaacccaaactgtaaatttaaaaaaaaaaataagttaaaaaaacagtatataggataattcccctattatttaatagataacaaatagtccatattaacttgtattataatatttacaaaggattcgaggtcaacaacaatctccaattcggacctgggacctaaatctgaactcagaccccgacacgaacccgaaccaggactcgaaatcagacctggacccaaacacggaccagaccccgacccatgatcaagacccagattaaataatactaatgaaatacaatacaacacaatattaatataagtcaataccaaatatagtattatattaaataatactaatataataccatacaacacaatctaatacaatacaatacggcgtaccaaacgagcccataataaactatagtatattgaaaggacaacatcactaactatagattttagcgcaaaatacatgatataagttgatgctgtaatgtgaaagcatcagaaataggtccttccacaataaatcccttaaaaaagcaaataacaggtccattacatagtacatacatataagataacaaggaaaagcaacaacaatcaagctcgaggatgttaatatatacatgtgattgatgttattcaccaaccactcataaacaccataaataatagcagcaaggttagatctcattgaacatggccaatttacaactggaagggggctaataaaagcgatttctccccagtccaatgtaccgataccacgatggctgtgcagcattctattctcgcttgccattgcttcaaatcccaatgttctgttctttcaatcttttaaatgatccagagctaagcgagctgcaaatacaaacctaagaatagttaaaagagagccaaaagtaataagcatgccacacagacatggtagaatagaaatttagagaggcaattctaggagtgaaaactgaagattaacacattcatgcatcaatctgtaagtagaaaaggcagaaaataaacatatattgcataagaaggtcaatcaatgatcctcatttcaaaatggtctaaaattcgattctgggttagagtgttcaagctacaatcatgttaaaaccaagtatgatctcaattcaatttgaattctaaaatattgtcgggtagtagaactaattttagattatattgcatcaaaaagtataaaataattttggcgtacagaagtcgggacatcgcctaattatcaaacaccaatatataaagacaagaaagtaagctgaagaaattacaaaacatatatctgaaagctatcgg

SEQ ID NO: 382539 - DNA, 2264 bp, Cannabis indica
aaaaaaaaaaactaacaagacagcatttagattcacatttagaagtccatcactcaccaacataaaaactaccaaaactgatcccaaaatatgcaacaagactctcaagaaatgaagattgatatggcgtaaactgtcaagaaatgattatagatagaagagcagctatgatgccaagaatctacttgcgttccaccaactgaagagtgaataatcgcaaggctctaaaatacgctgctatcaaccaaaaatataagagtacaaaggaatatcctggctaatattcagattaggtcaccaattaccaacatcagcaacaatgttggatgagtatagttacaaaacaacagatatcttcattaagccagtggaactacttgctttccaccaatttgaagaatgaacacccttgttttcacattctatgtactataatgaaaaatcatgctatagaaaaacatacagctttaagttctggatcttaacccaaatatttccagtttccacttaactccagaaaatgaatatccaacataattctcgagaaaatattacaaaaataacagtcctaatgtatgaagagattacatgatacaagaatttgcaatttttcttttaaacccatagagcaatgatgaaagacaacgaaaaaaaaaatacaagaaagtcacataaagttatactcactcctaatctgtaggacccaaaagtgaatatgacagcatttgcatcctccaccatctgatctgtatagcctctttggcgagttaacagcttcacccaatcctttacaatctgtgtcacagtgattagcgaatcacaaccattattcaaacaattaaagacatcacataccaaaagaatatgtaaaaaaagaacaaataaataataagatgaaagtaaagagcattagaaatgattgtaaaaccttactatatcacaaactaattaatgcgtagacactgttagtttactttggacaacagaaaatcatttaggcttcatcactgtggctattcagctagacctatcattcatcatctatgcacaacagttaccaaggaaaaacattgaaaaataatctacttaaaaagaaaatcctaaaaacaaacaaaaactgaaatcaaaaatagaatatggataaaagcgtgtcagcatcataaaagacgtttactgaacaggaaacttcaaacaaaagacagacttttctaaattcactaacaggaaaagggggatagggttggtaatgcctaaaataacaagatatcacaataccgacttagattttgttaactttagaaataacgttataaaataccgtagattaaatattacaaaaacaaaaaataaattaataataaacgaaagtagtattcattacctccgcaatgcgaccaagaacctcctctctcctagcagcttcttcttggctctcgtaaagccccgaattgatcaagaactacaaatttcactcaataaacatgatttgcttaaaatgctaaactgaagaaacaaatccctaagatttgaaatcggagaaagaagtaccttttccaaataatcattccgatgaagatccgcgtcggtgggacccgccacagagattgggttcgtgatgccgtactttttggtcggcgatgatgatccattcggattcggtgaaccaaccatctcagttgcttcagaagtaaaaccctaagagcaaaggtagagtctaaagtcggtatctagagattctgatttcaaatcataggaattgaggatgaattaacgctgaaactgaaagaccactcactcactctcccacaaacgctgtagatattcagatccaaacccctaatttcgcaaggagagacgagggtgatcaaaaccaagtttgcaggagagaaagagcgagggggaggaggggaaaataggggagagagagagatgagaaagaaagatcgagagaaaccaagttggaaagattttttttattatttttcgattcgatttattcttttttccagcaatcaatttattgagagagttagatccagctaagcttagatatttgtttttccttttcttttcttatttatttattttttaaaatcaaaggatggctttaaagtacttttgtagacttaaaacacacttaggaagtctttggtaaatttgattagtactttcactaagaaggtgaaaagttatgaaattgtgaagttattttaagtttaggtaaatagtagcataagtacctaaagttttgagtttataagcgg

SEQ ID NO: 382540 - DNA, 1236 bp, Cannabis indica
ttttcttttttaatctctaactaaatgttgatttggtttgttttaataggttagatggggaaatcttctgattagaatactgaacaaatataggaagaaattgtccttccgagttcagtggcgcccactttatgatactctgatacacacacatttcaccaggtaagtttaatgtttctatcttctttttttctccagtcatgtaaaattagttaatatgcatataatatataatatactatattgtatgtaaatggtgcaggaataccggtccagaaggttggagactgagacaacgacattttgagatgattacatcccttgttcggtcttgtcggaggttcttcccactgggtgctgcatctgagatatggtctgagtttaggtaattgcttcaaggctcaaaaattgtcaatcaccaatgaattcatgatgtttagtgatttgctactcacatttttgacaatgtatcttataaaaacaaatatgcaggtctttattggagaatccatggcataattcatcatttgagggatccgggtttgtgagactctttcttcctacaaacgaggacaaccaagacttcttttcagagtaaggagcatataccattcgaactcttcctcttcaaaactttagcctgaagtgttaaggaaaatattaattttcaaatttgcattgcagggatatagttaaagagtgtatagatatgtgggaatctataccgaattgtcaattttggaatagtcagtgggcagccattatagctcgcgtcataaagaattacaaatttatcgattgggagtctttcttacccattcttttcaatagatacttaaacatgttcgaggtaataattcacacctaaattttgcttgtagtttatgcaatttctatccttcaaatcttctcaacatcatttttcgttttaggtcccagtggcaaatggaagtgggtcataccctttctcggtggatgttccccggaacacaaggtttttgttctccaataaaacaatgaccccagcaaaggccattgctaagtcaattgtaagattcctacaatgcagatgattttctgtccacgagacgattctcggtatattataatgtgttcttaatggaagtgcaggtttatttgttgaaacccggtggatcaacacaggaacacttcgagaaattggtcaacctcttagaacagtttgtatacttacatgttattaatatatactttttt

SEQ ID NO: 382541 - DNA, 2812 bp, Cannabis indica
taaggacattgcttagattgtcatatcgttattagggtgtaattaagtatcgggtaccgcatgcccatgctaatgcacaatagcaatgcccatgtcatgtttattatttcaatatgtgtgttaactgttctaatgatactgctgattaaattcttgatttctcatcctagtttgaatgtaatggtttctcttctttcaatcagctgaatgtgaagaaacgttagaatgttactgtcacacagtctgtaacttttttctagcttctgattcacatattattgaaaatgagtttatacggtttcaactttcaactttactctgatagtacaaaagtaattcttcctggaatggggttggtagatttgtttccattgtgcttgtatccctgtttatattgctgatatgcaagtgtcataacataagcattattctgcagtttcgagaaactttgatccggttgggacccttttacatcaaggttagtcattatctttgggtgaaattatgtgaatatttatatattacaagatacaattattttttatcatcagtttttcaatcactttcaaaacctacttgcattgttggggattattcatgttccttctagaatgttgtattctgttatgtatatgtcatgattgattgctctcaaactatgtgatcgaattttgtcagaatcaagattattcttccatttaatcgaaaatacacattcacacctgggtaaaaggcataattactgctccaatcactgattatttctcattgtttaagatcttgattggtcagctagttgtctatttaaactttatcttttagttactagcatttatcattttttttttcatttctccatgtgaaatcttatttttctttgattcatttgacaatgagagaacctctaggtttgataaagacagcgatgtaaagataatggaatgagttctagtttggttgatttattaagaagtatttaatctctgttcttttgttattattattcaaagttacatggttaaccaatgtcatttgaattacagcttgggcaagctctgagcacgaggcctgatatactaccaactatatattgcaatgagcttgctaagctacaggttgctggattgttttatctctacttgctttagatgtttatgattctttgtacttttatattcttacactatgaagtttttctccactgccaggatcaaataccgccatttcctactcgtactgcaattaaatccatagaaacacaatttggtgttccaatttctgaaatttttgctgacataagtgcaaagcccattgcagcagcatcgttagggcaggtctataaaggttagagagtggttttggaaattaaaacacactatgctctctggactgacttgcaaggatacctccttacctttggacaatttcagctgatctctatattttgttttggagaatgcaagctaaatggtttatgttgttacttcaagttttgcagctcacctgcacactggagagctagttgctgtcaaggttcaaaggcctggtatgacacttctattgacccttgatgccttgttatttcatatgattggtggccaaatgaagcgttttgccaaggcccgcaaagatctattagtagcagtaaatgagatggtgagcctattccatctttatttttattaggttgggtttggctacttctatttagatgagcttatgatgcatatttgtttcctatgaggaatattcttctatttatgaatactagttatgttggctctgtttatagcatcagatgcatgtgtgaagctgaaagtcaatatgattatgtcctatgtttattcctaattgccttaattgttttcatcatagaagtgagagaagattagtgttgtaggtccacactttttgttttgtgtgttagttttaagtagaatttctcacaaatgtactgagtggactgtttatttccctctttttattctttcttagttaacttaagaatcttgctcatgaatgtttcttggtttctattgataaacaggtaagacatatgtttgatgaaattgattacattcaagaggcaacaaatgctgagcgatttgcttctttatacggtttatacccttgtaagttcttatgtcactaatattgtatttgttcatttgattttcggtatagttttattaattccattaacctaatgaatctgaaaaaatataactaatgcaacgaactcactaacatagtcatagatggagttgaccaattactaaaacatcatttcttcaagatatgtgcttaacgtttctatcttaaagaggctagaatatcttttatctacttctcttgtgtggacttacttttttctcatgtccaacttatgctttcttattcctactgttctaggttgcttatttttctttaggatgttttaggaaagaaattaatgatgatagttttcttttgttttaaagagaaaaaatgtctgtactttccatgctagaactttaattgaagcagctttttctactttcactgagtttactctcaaatgcaagccatgcatgctaagaccatctccaatggaagattgaaaagttaagctatattttacaacacaaaaaatagttttgtgacattttcacatcaacttttactattgtgttttaatgtataattgtaaatcttgatgtaaaatttactatgttatttaatggtcacttaataatttattgaaaattataaaataacaataataatgtaaagataaatataaaatttaataataataatgcaagtcatttaa

SEQ ID NO: 382542 - DNA, 965 bp, Cannabis indica
aaaaataaaataaaattattaaatcaaatgggtacacgtcaaccaccccttatgtatgtattgcacgtgggggctctcttagcttgacattccacaatgtttaattaaagagttattgttgggaataagaaggagagttcagtttactcaaaattatgtaacaacaaaatttaaataacaattactaaatagaatcataaaatgcgatttgatttatttatttatttttagtagaactgagagttcataatacgatttgatttatttatttaaaatttaaaatctcatttttaatgagtccaaaacatttcaattcatggtcggtgtacaagcttttaagcaactgtccaagccaaccaagcttcctacagattttataataaatattattaataatattaataactccaaatttttcctagaattgcttaaataaatattattttttttttgtaactcttgaagtaaccaatttaagattcgatcttgaaagaaaatacatatatagatacaatgtatcaattagtgattaggttaaggccaagttttaattcaagccaactcaattgaccaagtgggacccaaaaatcaacttaggtaaattgttgggtcccaagtggtgttgagcttaatgatgatatttttgcaactttatattttgagaggtaggtatgtaaataataataataataataataataataaaggctattttcttgtcaatgttcatggctgagcatcttatttatttttagtaggtatttttgtcttgctgagttaatttcaccacatttcaatcaaaaaaacaaaataaataagtgccatttttcaagacttttttttagagaatgaatcatttaataaatgaaaccttaggtattaagagggttataggattatatataaatttttgtttagaggcaacaatgtaatcctaagaacatcacatttttttttaaaaaaaa

SEQ ID NO: 382543 - DNA, 1166 bp, Cannabis indica
gagagagagagagagggcgtgctgagattagtgaattgattcacagcatcaaggagagacccaggttctcaaaacctgtggaatcgtgtactgtttggctatcttaatttcaataaaatttcccttttcttcatctttgctactagtttgttctacaatttagctactgttctattggaaactaagctacaggtctggttcttatcattatcacgcccaaattataatccaaatctaacaaaataaaccatttcaacttttcaaataaaccaagcagattgttagaagttagacaacatttgatcattaaaaagtaagaatttttattccacgtgaatctttaaagagtcaatatcatcaaaaccaatcatttctattaaaatactcaagaattcaaatttcaaatatctatatatcaacttacaatcaacaacagatgcaacaaaaaattattctgaaccaaacttggagtactcgatccacatattcaacaatcagataaaccgaaattcgaaacaagaacaaattaaaagagcgattaacgaacctccgtcccggtgatggagattgccgttgtcggaagggagcgaggtctgtgaagcgcgagagttggagattccagaggctagggctttggcttgggtctgaaaccctgaagccagggtttttttggataatagagcacggagcgccatgggtatggaaatcgaagctctgtgaagaagaaaggaaagcgaaaattgtaaaacaagggaatgaagaggtattacttatatatgcgggtgaccaaggctatgctaccgtcacagctggttaccatatatgtaatgaaaatttttatggagcatttttttttttaggctaattagcaattttttctctgaacttttacatataccaaataatgcccctaaattttattggccgttaaaaattccccctaaactattgagattgttaaatttaaggacttttgtctaatttcattcaattttactgttttaggtactaaatcatgctcctcaaactttgatatctaccaaatcatgctccttagactttgatatctaccaaatcatgcccctcaaacttttatatgtattaaatcatgccccctgaactttcatccataatagaattttttactaaaattagataaaagtcct

SEQ ID NO: 382544 - DNA, 2108 bp, Cannabis indica
cttaagaaaattaccatagtcattagatgaagattaagaactataataacaaataaattccctagatccagtgatcatgaaaaggtcaaaggtatttaagggagacatgtccccaatctggatggctcaccctatcaaaattggtgacaactattgggcaatttcgaagtaagaacggttacaacttaattgaatgtggtgctcgggataccaactatcaaacatatgggctatgcgatctacacaattccaaatgtaaaaattgtactggctatccttaaatttaactaagttagtacgctcgactcaaagtacaataggagaccatccaaagagaccaaagttattaacttgggaggcatcttcttcagcttcctgaggggttatactcctcaaatagtgggagtgagccacgtaatccccgtcttcttcgttgacaaggactgaaacttgttgccagtcagagtatttggggactttgaagttttaggtagactggttgctactgaggaggttgtaggtcttcaggttgtcctcttgtagtaagaattcagccgcttgcaacccaaaggggagaccgagaagaatcctatgtcttctttcaaattctggagtcgcaatgggcctccttgtaactattgtcaatataacataaatgaaataagtaaatgcctacaattattaagttgaaaactcaaaaccaagtttttgagataaggcaaaaacttacatattatacgaaatacagttatgttgataggggcgagaccggttgtccaaaagaatttgtccttgaattcagtcttattaggcaatctcacaatgatcctttgatcattggtgtgggtcttgagataatagaaaccacttgctcctacacttccttgtaggacatgccttcacatattagaaatacaaaatttctagtggggttggacactcccacttcaagatttgatataaaactttcaaattggccaatattctgtaagaatttggtatcagttgaaagggagcaatgcctaagtaattgcataactccttttagtagtctttgagaggaagtactgctccaaatcttatgtgttcgaggccccaagcgcctatcctagacggctcgcttgtactacaaccttcctcttgatttacacgttcaagaggaaagcgactggattctcctggcgcaacaaacctaactcgacattcttgcccatacttgatgccacatgactttagtacctctccaacataagctcctacgtatctaactttagactcaatgagctctgcctcgaaggtagcggtggggacttgaggggtcttggattttggagcttttgaggccatgatctcaaaatctaaggcacctggtgaaaaagcaacagtgactagaggtaaagacaaaggtctcgctaaaggaatattagttaaattttagggtttaggccaagtagcttctcgcaaaaaatggtgtttaccctcagctatttcttgcaaaaatcgtctagagagactggaattttcatcttgattggttttaataagatgatttctaatcctttcatcatttaatttgagaatggtttttggtaaatctattgttgacttcgcttttagccaacgacaatgagtcaaggactaagcaattgaataatacaattaaaagagaaccaaaacgataaaataaaaagaacaacagattttaaagaggttcagccccgtgagcgtggtaatagcctactccccttggattgtattaacttaagagaaggaacaaagtattcttcctctttgaaagctcttacaattgatctctgagtaattctcttagatcactattttctctctagaatctctctctctgaagtaattattttgatccctttcatagtgaggctaggtcattatttatagaggcttaatgcatgacggatggtttctcttttgcttacaatgcataaaatatgaaattacaatgattacatgattataatacacaaaataggaaactagaataggttgccatatttctctaacccaatcccacgattgtagggattgtcttcgtgtctgtacataacaagatcattctgaagtaattatctctt

SEQ ID NO: 382545 - DNA, 1766 bp, Cannabis indica
taataataatagaaatatattttgttggtaagaaaaataataatagaaagatatttttaatatgtgtaataagtttaaatttaaattgcaatattaaaaaaaattatattatataagtacatttaatataagataaaagatgaaaaatatatgtatagtgggtttaaatttaaattgtaatgttttagaaaaagaactatatttttgttatacagtcacatttaatataataataaatattatatatttaaaatgaataaatatatattaaaaaataatatttatgatgtggagaaaaaataaaaaaaaaattaatgtatggtgtaatgtaaaaatttaaaataaaataaaaaataaaatactattttaaaaactcaaaccgtaaattttttttaaaaaaattaatatataaataaaaaaattaatatataaagtaattcacttatattttaaatggtagctagagtagaagctctttcttttctctcccctttcatttccctctgaagtaaaataagtcaacctatataattaatataatttctatttagcatatcatatgggaaatttgttatacatatctttctcaatccaatagagaaagatattatatatacatatatgtattatggctccactatcttttaaaatttattgctcctaaatcttgctcttcctatagggcctatacacatgtgacatacatcatgtaaatatgtattgaatgaattttggtatgaaatattcttttgtgatgttataaaactatattttatgttgaatgtagatactctaagctcggattaatgtaagctataagttttaataattaataaccgttaaatcaactaaattatgaactaaaaataaaagtaacgtttggttggaggtaataaaataagaataaaataaaaaaaaaaaaacaattttcatttcattcatttgtttgattgtatttaaaattattggaatactattctgatggaatcgtcttttcgtcattttggtagaatgactattctattttgaaatggaagaaaagaccattccaatgcaagatttgaaaaaatttagtaattttttatcaatttttttatgcatttgaaattttattccattccattcttatttctatattttcattcattccaaccaaacaccaccttagttcatatattttaatgtaaaaatgaaatgagaagagattgaatgggattaaaacaaaaatattgtggcataaaattgagcaacaatacaagacactaactcaaaacacaccaatttcgtggatatagaaaggggaatgaaatgttattaattctaactaattactacaacaaaggcacgtgatatggcacgtgtttcaacgtattattttacatgatctttaatttagtacaacaacaacaacaatttcacaggaatctaggaaaataaaaataagagataataattaaaataatactatctattttcttgtctgccttttgcttccattattgcatattataattaattgagtagacagaggagttcaaatacaaaccaaattttacatctcattttcttttagctacgtggattttagtactaaattatattttacaatgtttttacaacataaatatatttaaatttatgcaaaaaaaaaaaaaattgtaaaatagagttaaaaccagactcaaaccatatgaaatactagttatataatatatatatttatttatagggatatgattttgtcccgtgatgtactttcacggaat

SEQ ID NO: 382546 - DNA, 2102 bp, Cannabis indica
ttgtaaaagttattaattggactattttattttgttaaatgataaaatggaccctgtatttttcaaaatgaaaaaaataggatcctgagcttaatttttaacaaattttttaaaaatataatcaacttgaaaacaattcttaacacgaacgaatacaaaaaatataaacaattttgtcataacacgtttagattggattattattaaattttatttggataaaaaatcagttcaagatcctatttgtaccattttaaaaaaatacaaggtctattttattatttaacaaaataaaaaaatctaattggtaactttcgcaaaacataaaattcaaaatgatatttagtcttttttttttttttataggtaatcatatatatatacatcagatacatataaatgatatggtcaaaattcaaagctttagtacgtatatgtaagaatcatgttttctaactatcaattaatcatgtaatattgactcaaagcattaataaagaaggaaaaataattttaaatattaaggtccataatgtagttggtaaggataagcacatatacaagtttcgtttactggtcttttcagaaaaaagcattgactgaaattaaaattgttataataaggtttaaagaccattgatttctgatcttaccttaaaacatagcaaaaagagagtttataatcttgtaataagggagttaaattaatcttcacttcagtatatagtttaattatttctatttattcttatctaattatcaaaggggtcaaaattactcaattaaaagaatctgaggtgatctatcaactcaactcaagtagttgtttgattttgatgtgtaattaatatcttatcattccctagcaatatagttagctatagctagacacaataaacaggtacagttccacaatatctgtttccatttcaatcaacaataattaaagttgcctgacaaaatttcatttccaaaatccttcttcagagtcaagtaattaaccatcaaagccttgtcttttactcattcaaatcttttcatgaaaaaataggaatcttacagcaaattatataattaatcattagttaaataactgaaagtaatatatagatcgaacttccaatgacataaagttagtaataatataaatttatatgatatctcaattatttaacacacctactaacatggaaatatctattaattgtgctctttataatagaggggtctaaaacacaatcagtcaaactaccccctcaaccttttgcatgtacacatctagctagctttaaataaagtatattatatgatatggaaacaacaatttcctacaataatatagaaaacaatttgataatattaattcgtgatcatttatctatacaagatcatatattgtttggtgtatttatttttctaataccataacttgtatttatttaatggttctaatttattggtcatagaaaacaaaatatctaaccctaaatttgattattaatatattatggtgtttctcaaacaccaaaaaagaaaacaaaacaaaatactaaaagaaaacaaaactaaaagaagaatcataaagccaatgttgaatggcaacaaattgaatactaattaactatttgctcttttggagggacaagtcgttcctaatagttcatgcctaaaaatactattagaggcgacaaaaaaaatcgtctctaattaggggtgattgttgttcctaatataattgacaaatatctgacgttacttttaagtctcctaaaactcttgaaagttgctcctaaaaaaatatgccaaaaatcaaattttgacttttaaaagtggcctctattgttttttaaataaacaaaatataatattataaatatttatatattatttatcaaaaaacaattagaataatactatttaatagttacatttttattgtaaccatcatggttacattttttttacttataatagcatgttagaatcaattaattataattatttattttcttaaaataattaggaaaaaaactagaaaaatacaaaaatggaaaaaaaaaaattataaaagtactatgggtcggcccattaaacatttatac

SEQ ID NO: 382547 - DNA, 1687 bp, Cannabis indica
gagagagagagatgttttttaactgaaaaggaagatagattggcatcaaattattttaggaaataattttagatataggataaagttttaagcatatttaataactctaattttttatgtttgacaaactattacaaagaaaataagtgtattaattaataatattttgtaactaatataattaaaccacattcttacaaaacactacttcattaaactatgtttttcgcataaggtttggtggaactttggccaactaactataaatatatacaatgaaaaaggagtattgtaggttgttttaagtagtcatctcaattagtataatggtctttatgaccctaaatgacagttaatggtctctgtgactctatactatgattgatctttttgtgatgtttgggttcatggctacgatgatggcggatagtactgttgatgagattgtgcaatttactgataaattgggaatggattaggaagaagactaggaagtgaacgaagaacaagtgactgagtttggggagaagtcattgattggaagaattgtatcaaaataaagcatgactccggggctgtttagaacgatttttaccaggatgtggaaatcagttggggaatggaaagtgaagattatggatgaagataaagagcatacctacttttgattgtcttttcatagcggaagtgatgcaaaaagaatacttgagaagaacccttggcttttcaatgggggagtgctagtacttgaagaatggccaagtagtggacaatggagagatgcgagattggataaagcttctatttgggttaagatgaggggttttcctcttaaagctttgacagttaataatgttaagcgactaggaagcatggcgggggtgtcgaagatactgtttggaataatccacaacagattttccttaataggtatgttcgtgtgaagaatggcttttcgatccagggtgaggttttcgttgggagatatattccagtggatggtggtagacggtgggttcaattcaaattcgataaattaccactactctgttttaagtgtggctattggggacatgatcagattggttgcagaaaggaattggcagtggaggttagtataacaggcagtcatgtcccgaaatacggagcgtggttaaggcatgatgatccgattccgaactgttttgttgcttacgatcagagtatggctcgacaaagagaagatcgcttaaatgagtctgacgaagtgccaatggtggagggggctcgatggaaggagctgagcagggcggaggattgggaagtaagtaaggccacgatttccatttcatagcagttttttgggagacagcagttagagaaagatgtggttgaaggagtaagtcgtgggaaggaagtcattggtcattcctctgttaacaagtcaaaaggtaaagtggacattgtgaatggaatgggtccaattaagagtgggatagattccactaaaagcccacatgttgttcatactacacaagttgaaactaagtgtattgggccgaaggatattgggcttagtaattcaaagaagcatttgcgaagggcatctgttatagctgatagtgttgggttttgtgccctaaataaaacccatttcaacataatcagatttacttattaataaagatcagaaataacattttatgtt

SEQ ID NO: 382548 - DNA, 911 bp, Cannabis indica
atgattacgacatgatatgatgtacactctattcatgaaaagccccaccaatcttggagtattaggtgcaataaaaaatgatgaccatccataaattaaataaatgattttatttcatatggtgggtcatattttgttcaaaattaatataagtaaagatttcattacaaggatttccttaattttaaatgtcgtttagaatttataagatacgcattattaattaataatgcactaaaccaaataagattcttctaggatataaaaaaaagtatatataaccatgtacatagtattagtatttatatgtttattaatataatcctgtacgtagtaaattagctaaatcttattatttgtctttttcagaagagactgttggggtcaaacaacttagatatgcaattttacttttcttttttagtcaaaactaaaccattttctttatattctcatataaacgaggctggtccataaaaataaaataataaaagctgataacagttttagctaccatatataactattaattagatgtgaataaaactcaatctggttgaataattaattgatgcatcacaatgaatggtgctaaattattttcaaagacaagtatacaaaatttatgttgttaagcatttataaacacaactaatatttgtcaccatcatcaaagttcttaaattttattagctgagaagaaacttcttagctatatcaaatgagactaactaattcccctttaaagaaagactaataaattattccatttctgacaaatataatgtatatatacacacagtattccattaattgattatcctttatgaaatgagtggcctaaaaaaagaatattaaacaaataaaaaaataaaactatttggttaaactcaccagtcaccatttgtaaa

SEQ ID NO: 382549 - DNA, 2698 bp, Cannabis indica
attacttaacaactatggggtaggcaaatctggacagttgggaaacccccaaaccaagtttgattacaattagaggggagagccaaattggtagaaaaaaaatgaacaactttgttacaagacttcttaacatgagaaacaaaagagacacttgaaaagtttggacaaatgaaggttgtctaaaaaagactaatggtgaatattgtaaatctaagctcaaatcatgactgagtctatttcactgaatttatagagcagtgactaatacatagggctcatatacagctctcaacaaataattgaattgtaaggaatagtctaacaatgatatcttaatgattgcaaatatttgctcgggtaaatgttggtacagaattcaacacatatctgttatgcagagagaatgtaaagggcgacatcagggcaatccaagtagcagggcattaaagagaaatatttttgtttctcaacatgccccctcaaacgaaatggagaggttctcactccaagtttgttgacaagacaattaaactgtgacatcccctttgtaaggcaatctgttaactgatcatgagaggagatgtatttgatctcaagttccttgttcaaaatcttgtctcagacaaaatgaacattgatctcaatgtgtttagttcgagcatgaaacataggatttgatacaagtgagcttccactgacattgtcacaccaggtgattgccggttgagttagagggaagttcagttctttcagtaacgattctacccaagatatctcagcagcaacatgcgccaaagcacgatattctgactcggtactcgatcttgagacgattgattgtttctttgaagaccaagagatcaatgtttcgcctaagaactcacaataccctgatgttgagcgtctatcatctgggcagtagaccccatctgcatcaaaaaaccatgtcaaacttagtttatcacaataagtgatgtgtagcccaagattcatcgtacccttcaaatatctgagaaccctctttgcaccactccaatgtacttatatgggagctagtaggaattggcttagcttatttacaacataagctatgtttagtcgagtgtggcgcaaattttgcaaatctcctataatactcctatagacagtgggattatacattgattcaccatcagttaaagacataggtttaccagctgtgattggagtggggcatggctttacgtgtgtcaggtcagctttcttcaatggctcttcaatgtatttggtttgcgtcaagtatagccctatggagtcacgatacacttcaatgctgataaagaaatggagtggtcctaggtccttgagtgcttcattgagcaatgaggccttttacgttcttagtgtcattacctgttacaataatatcatccacatatattaagacaaggattataatctttttcgagttaaagaagaatagagaagtatcagattttgaatttttgaattttcactccaacaaggtgctctttaatttatcaaaccagactctaggggccttttcaaaccatacaatgacttgtttagtttgcaaaacaaagtgctcctttcctttctcttaaaaccccaaaggtttgtgccatgtaaacatcttctttcaagacaccatttagaaaagcgtttttgatatcgagttaccttatgtcctaatttcttaataacatggttgtaggtttctccaaaatccatctcaggtcattggtgaaattctttttccactaaacgagccttgaacctctaaaatgaaccatcaacatattgtatttttcgcgaaacacccacttatttctcactaggttgtagtgcgaagaaggaggcacaagaacccaagtccaagttttattacgttttaaggcaattatttagtattcattgtgccattccaacctttgtgcaaaatagcttcttgaacacttgtaagttctttatgtgccgaagcaaattgagtttcactgagcagggttcatggcttgaaaattcctacttttcctcttgtaatcattggatgagtagattgatatggagtaggtggtgtaggcatgggttcaggttcaatttcaagtgttgcattatatatcatcatgaccatgatcagaaaaattgttagaagagaccaaattccccatttgaacctaaagccaaaacaacggtatcaatagaaaacgaggtcatagggttgtggggtgatacatgaagtaaaggagaggctgaccgaggaggtgatggagaatggcctgcaactggaagagatggaggaatagaaggtactgcaacatctgaggaaggtggagaagagagtgtaggtgcaaggagagttgaccatgaagaattatgaattatatcagattgtggagattggtaattgttcaaaaagtcagatttaaagggaaattcaagtttgttaaaaacaacattttgaaataaattcaacaatttggactaagacacttgtaccctttctttaccttttaatttcaaaacactccataaccatttagtccataatctcattgtgggtcacctccaagatgtaatttccacccttgattgtcatggtcaatcatggggtccatcctaacttgttggaactttgataaatgttttaattgttgggttttgtgccctaaataaaaccctttacaatctaattagttat

SEQ ID NO: 382550 - DNA, 1966 bp, Cannabis indica
cattccctttgatctgagaatgtacagactcaaatcataaaaatggggaagccgttaactggacaaaaaccaaaaaaaaaaagtttagataatagggtttacaatattaacgacatgaataggatttagtccttatacttgaagatgtttttttcatggcttatctttgacattgaggtgtcaaagactaaaaatctctttaatctttttctgcacacacataagcttctttttacaggaggaaattgtttcatttttattatatatatattttatataatatgatcttgtatctaatcaaattggagaacatttttgaaatgttattattaacatgtaagagtatctactgagattgaggtctcagcttaaacttttaatgagcaagatatcttgttcagtttcggcaaaaaatgtaactcgtaaacccttaattagtgattgtgttgtttgtgccatgttccaacaaacaaaagcattttatctacagttattaatttttagtatatgttgacctagaggtttcaaatttattgtttgcagttagaaaaaaataataataataaaaaaattgttgcatttgcaacaattatcccaaattttcctttttttttttttttttaaatttttgcttaacctcaaatttcgttttgagtagaagatttgtcttttaaaataattttaaaaaatagaatgagtgatttaaaccatatatcctgcatttcgtgtatactagtatactaatgatcaaaacgaagctaatggttccatttcaaaatgaagttctatggaaggaaaaagatgattgaattttcttacaggaaagaatttactaataatagtaataaagactttgtcaagaaaacaataagtaatatagattaacaccatttttttttaaaatgaaattcggggttagagtggcaatttgtgttggtgtgttgtgtttgaatcatgttgaggttttaaatttattgaaaaactactaacccgaacacgacttttggcacgaaaaaatttataaaacatgactcagaataaattttgtgtcatgtcgaacttgtaaaatgttgtgttgtgttcatgtcgtattggtaagttgtaagttaaattgtttttttagtcagtgacggagctagaatttcaattcagtgaaggcttaaatatattttttttaagagcttgaataaaaattgaatcaaatgatttatttttattttaagaaaattaaaaaaaattgaaatgatataaaaaaacatgttaaatagagagttatatatgtacttagaaaaaaaaaagtattaattgttttttgaattcggtgttaaattttagtggcattaatgaaattggataggagatagtgagggcttaatatacaaagcaagtgagggtttagtatttacatttatagtaaacaaaaatttaaataaagctaactaacgtacatgtaatataaaagttttttaatttgagtgaggggttaagcctacacggtggcttaagtccctccgtccctgtttttagtgttgtgtttaaatatattttagattgttgacacgactcgtaatacaaaaagtttataaaacacaaacatggcccgaatataatttttggattgtatcgaattcgtaaaatttcgaatcatgtttgtgtcaaacccaagagttgtaacctaaattgccaccaagatagaatttaaatacctcgaaaaaatctacaaaccatcgatgtaagattcatacacatacaaaaaggacaagagtcttcataacaagaattttagaaatctgtaattgtaaaattaaaaaaatttatttggtcttcagaagtcattctttatcaattgttggttttccaaaattaaaatattgtgaatttatggcttctttgtttcttcctatctcaagcttaccctaatacgaattttttttttttgtagggtaaccgatacaggttaaaataa

SEQ ID NO: 382551 - DNA, 1890 bp, Cannabis indica
aatgaatctatccaagagaaaaaaaactatatacatatataaagcaatgttagaaagaacatgctagtaaaagcatcttgattacaggctttgttgttttcttgctgtaatgagttctaatatagagtgctttgagtttttattatgccagtacagtgaccttgcagaagcagaacgtgcttcagttctagagaaatttaggcaagcaacagtgagatggaaccaaaatgctactgctgaagcaggagaggacactgatagtgggaaagatgagcgaaagtcttatatgattgttgtaactgatgcatgtcttccacttctttcttctggagagtcacctattgctgctcatgttctgataaattacgagttaccaactaagaaggtagagaaaccattcttcctccagcactctgtgcatgatattgtttgtgtgcgtatatgctaatggcttttactgttttgcatacatattttactctttccttagggacttctctgcagtttggtattatactcaattgactaagtagtcctgggtatgtaactagtctaaaagactaaaaactggttgactgattttgcatttctccgaaaaagcttgagacgcttttcttctcatatgcagtatcttactttgcagttcctataatcattgggttacagaggtaacctcattgctaaatcagtaactggggaaccattgtaagcatttcatggtttctccccatgtttgacttttttattattgtcatcttggacacacatcagattcaggacataccacgagaagggatttactattttttattgatttttctcatgtttagaaattttgctgttacctgtaaattatccggttttggcttacaactcctaggtttcttaaagctatccatcatatattcttggagttgatgtcccttcatctatctaatatgatatctatgagcacataacggcatcccttatagctttcccgtgttctaatgtgccggcttcctttcacttcgttgtttgtacaggagacatacatgagacgcatgacaacttgtttggcaacaggtttccctttactgctgttattttgtcaggtgtagatgctatgtaattttgctatgttgaaataactcaatacaaaaaatacagatggtatcgtaatcaatatggttgtcggtggtgaagtagtaactctcaaaagcattgaagatggcagcaacctacttatagctgagatgcccataaatgtaagtttgttcctctcttaatgtttgacttgagcactcaacgagtcactcagggagtgaggagttgagttattttttgacattgcttatcatatttgcagatttacgagatactctgaagaaacattgaactttttgacaagtcaaatgacatctcagaataacacttgaaaccacatatttcctgtgatggttgaatcatgtctgtgtgattgaagcttttctagtagtttaaactaagcattttatttattctagtcagatgcagatttgtgtacatcttgtttcttccttaacgtgaacaaaacaagaaacgatcgaacgattctcatatggtttagatatgtaatgtaccattgaaaatttagatgggaaatgaaggccaaagcttcatgagtaaattaattgcaagtgctgacaaatgttagcacctacgtattccaatttctctctctctctctctctctctctctctctcggggtacaagagttcagtcacagactcacagtgcaagcccaaagagaattctaagttttgtgtctaatgaattaagggctcgtttggaacgctgtattaggtagtattgtattgtattgtattatattgaattacattttatgcaatattgttatgtaaaactat

SEQ ID NO: 382552 - DNA, 2378 bp, Cannabis indica
agttataatttttcaatttcggatggggttgggatggcagcatgcctaatctgccatcaaaaatttgtcctctttgagggccctcttcatgattttagagacctcaacgaccatattttccttatcctttgggtagacataatcaaggatccagctgctgatgttattgacactttggaacttggctatgagttcgtgttcatagagtagtttggtggtgaccaggccttccaccataagatctttgtccgagatggagcggtacaaagcaaattttttcttcaactcctcactctctggagtttgaagcataggtgctgccataagcaaaaagagatctcatcagttacaagtttaaaaaggaaaggagtgtcacatagaaaaaagcaaaaagaagtctataactgggattttgaagtccaaggaggggtctggcagtctctttaatgtgaagcccttagagaaaaactaatacaatcggaggtcaggagaacacaaggagaagttggtagggcaacgaacctcaggatatgtctttagcttgtaaaaccctaatttttctttgtttgtgtgtaaaggttggggtttcacgacataaacaatatctcctttgggtatgtaacctaaagcttctgcatcttacacataacataccaccatggaaaaagcttataagatggaggaatgaattggaacggagatatcccaattttactgaaagctctacgaagtaagtctttaggggcaggtgtgccccattaaaaatactagcccatctctaagcgttgaacctgttagtactccagaggcgtactcctatacgactaacaacctactccatactagtccaggaatgttacggactcctgcttttgtggacaagttttccatcatcccgtatgccatacatttattagtattttggtccatttcctagacagaatccttataaacaattgggaatggagatggggctttccccttgctctttgccttagctttccatgctttccgcctttggtggagctttgggggtaggttcttatggaccccgcgggtacctcaattcttacatcctcaatattcatagtttcaagattaaactcatcattgaggtcaatcactggaaaagaaaagaaagaaaagaaattaaataccttatatattaaggatggcaagggtattagggagaacctctcctaaaatttctcagagaggtcccctctagacccatcacctggaaacatctcccttgtaggatgccacctccaaatactaggtcagtaacccacaaaaaactgccaaacaaggagaaactaagtaataatccacttggaagccttaatgactcccaatggataaatagagaacaacccaaactcacaaaagtaatcagtgcaaggttgaagctttcgaaccaacctacccagagaccacaagcatacttatgggaagaccatcttagtcctagtcagtttcataactaataacctattaaactctcatcctaacagtcacatgcacagttaatccataacacaacttgaacaaaaatatctaccctagtgtgaaatcaaaatgttcaacagagtttggaaacttacttgtattgtgatctgaagagggaggatgtcatggtaatcggcttaagaatcatataccctgttgatcacttggttgaatcttacctagacatcgaagtctttgcctggttaaaggtggatcataccaagatccaagggtgaggcacttggaaatatgctcgctcagatttccagaagatgtttatgtagagaatcaagctactcgtacatcaaatggctaatgagagattaaagattgaagtttttctaatttctaagaatgaaggttctagtgtaagtttgaaaatagaggaattttaaaagctcaaaaatgacaaaagaagaacaagggggattctgcacttatttatagtgaagaagatagctcgtgaaaattaaaattaaaggcctacatcaagttagcccaaaagcacaaaatgatccaatgactggggagtttaaaggactacatttaattctctttaaaaaaatcaaggcatctaatcatcatcattcgccttggactccatgtgcgttaaagagttgtcatgtcatcactctacaaccagttgggtttccctacaacaaacgcatttccacaggtgcatctcaccccatgattttgcagggtacatgacacatgtgcaccattaattgtttcacacaaagtgcttgagacctctaaactgccaggttccaaagagaggcttccacatcctcagaacttacccaagtgtccaagagtatgccctaacaatgcgaaaggagactgcaagcttccaccactcaagagtc

SEQ ID NO: 382553 - DNA, 1453 bp, Cannabis indica
ttttcttatagatatacaacactaactgatagcaattgatcccaaaaaataaatttatccaacttgcagaaaatgaaatcacaacagattttaccaactgcagattatataataaagtaggtgagaatatagtgagcaaattctttcaccattaataactaatctattgattataagaagggacaaccatgtacaatttgttatctggaatagaatctatttgtgggttttcgattaaacataaaagcagatcaaatataatttaaacaaaatagctaaatgggtacaatcaagttttgcattttgacagaatcagtgactaattggaccaaacctgtttctttgttagatgagctgagaactccttgtctctcaattctcttctttctatccttttttactctttccagaagctcttcatcatcatcagcctctagaatggcggcattagaattggagacacaattattaccagccaaaacgaagaaaaagctggttactaaactgattgaaaggtttctctttgacagaagtaaagagggtgatggtgattcactggctgccttggaaagaatcaaaagtctcttggcattatcattgtgaggataagataatgattgtgttctcaaaaggaaactagtggaagaagaggatgaagttgaagctaaagaggagagacgtgaagggatgaaggtgattgcagttgaaagaaaggctgttgttgccatttctaatctaaagtttcaatttttattttctttaaaattggttttctggtttattatttggtgggaaaaattagagccaaaggacaatttagaagtataaatttggataaggtcggaagattgtgctatctgatccagtcatttttctttttgttagataaaaaagtaaactcggacgagaatgggctattggccttattttacaaataataattttttaaacagattgtatacccactttactttatttgttttaatttatctttatttccatattctttaagatatacatacttttataaataatgtgtctattataccttttacataaatataaattatgtactacacttaagtgaaaggtaaggatatattagacaattcactcataaaagtgggtagattttaattgtataaaatataaaggtatttttgattaattaatacaaaaaagaggtattcctcaacttatcccttttttaaaagagagattataaaaatattataaaatgggaaaaaatttacaaaactattaggatatgaagatatttatatttttgttgtactaagtttataaaaatactgcgttaaagttttaaaattacaaaaatactgtgtttcaataaaataaaaagggaaatttcattatataaccttaaaaacatactcattattgttataaatattaataattatgtggatgtccaaatcttttatttattacc

SEQ ID NO: 382554 - DNA, 2526 bp, Cannabis indica
ttattattattttataagttacgcacttttttctacaagcttgtgataattaatttataaacgtggttagtttgtcaattaccaacatgagttattgtcgattttaaaaagcttgtcttttcctcattaaaaaaatggaagaatgagagaagttttgacataatctgcaagtggattgtgagtgaggtaatatatgattaatctggggatctacttttcacaaaaatatacaaagatgaatcaagatctctcagttcccacatgataaatcattttgtcattatctatctttaatttggagaacaatttacaaatatcgaatgataattttgattctattacatttttgtctcataaggaacctggaatgaatcgcggcaatgtctaattactctgttccttccaactttcatacacaccaaatcaaggatccattgttatctgagtgtacattggatgtttttttttttaaggaagaaatatacaaggatttagtgtcaatcatctacctcgaagtagtttcagagatccaatttagggtggccccaaccagaaacaaccaactttttcaacattaggaaataagaacaaaaacatcatttcattgacagtacaacaatctagtaaccaaaatgataaaccaaaaattcacaactccactagaaaatgatgattaaaagaaggtgttttcactcaaaacctaattgttcaggtatacatattagaattaaaatgatgatccctattctggctgcaccatgaatctttatcctcatgtatgtttatatctaagctaggcaatacacttttgagtagagacttaaccagggtaactgcaacaccaccaacttcaggccatccaacacaaagtgttcccttgatgctcttcatctggcatctagccaagagggctgcacccagcccatccactagacttcctgatggaagataatctaagcctttcagggcacggctatcactcggatctttcctttctagtgatgtcaccagcttgaaagcaaatggttcatcaggcaaaagcctgcctcgaaagttctggcgctgaatagaatcaaaaaccaataccctttcaggaataatctgttcactgatcaacaccttagcaacaaggtgagacctctcaacagcaacagggcactgaacagagacaacaagaactgagttgttcttgtcaccaatggcatagatgttgcaggacttgtctcgaagagaaggctcaatggaatttccagagaagggtatctcgggcagggtaagacttccaattagcaccttagaaggtagatggtggaaaacatagagcgaaggggaagacaaggcaatgatgagaagagttgggcgaagcggctcatttggcttaagattagaaaacaaaaggaatggagaaggaataggtggcaagggaggtgtaaagttatagagatcttcctcataaaaccttgagggtgggggaatatcagttaaaacatcttccatatctcctcacgttcacaaacaatatttgatgggtgactctgccaacttcaacaacaaaacattcatacgtttacatatcaatagagtgattattcaatacatgttatgaaaactccctctaaaatatacaaagcagcattcaacaacaaaaatcataaggcacatttgctaatcccaaatgggaaatgataagaatcaaaatttgagatatccctttacaattaaccaagaaaaaagggaaacttctcctaatcacacactatggccaaatacccatatcatacaattccccaaataagttaatgccaaagtgtagttaacaggtagttagctataaacccagtttattgtataacttcactatttgtattatttattgtatcgtagagtgcgataaaacaaaattctgggtccaaggatgtatataaatccagataatcgaagaaactgaactaaaaaaaatacgtaacgaagatactatttaatcttaaatctaaaatccaggttttgggttttcgctgaaacacaacagctgagctcatgtattcacttatgaaataataggttaaaggagacatatagcttacctcagacaattatcctttaaaggaggcagtgatggagaaagagagccagaggcggctacggaggtaggcagagagattgagttagcagcgatctgagagaaagacgggagagagagcgagtggttccttgcggggaattggggaaaagaaaaacaagacactcaaccaaatatttttttgccctaaactttactctctatggtgggaaaattaggacttaaaaaggctggtttggatcctcgtaggtagaagtgagcattttgactgggtttgacccggacctgacccgctcaacctgaaaattttaaaaattcgttctattcgggagggtcgagttcaacccagtataccatcggacgagttcgcaggttagtttttttagtcatcgagtttcgggttgaacccgaacctacccgccaatccagtcactttttattttttt

SEQ ID NO: 382555 - DNA, 8029 bp, Cannabis indica
attgcataataggttgaatcagaagttagaaattggccgaattactcctaggtttgattctaggttttatggtttttagaggggcaaattagtcattttgaggataggattttaattgtcctatatttttttggctgaaatgggaattatattaagtatattatttattttaaatttaagttttacaaaggataaacttagaaaatttaacaaaaatacaaaaatttcttctccttctttctccttattcaaaaccctaaggaccagcagacccaagggagtttcttcaccaattttgttcatcttcagctggtttagcaagagatggaggttgtccaagttttgaggtaagctttccttgtgtagtttaaggttttttttcaagttttgaattagttttgggtagggttttaggattttggaaatgaggtgctaaattgaggttagaacaagtttttaggcttaatttaggattatttaagtttgatttggttagaaactaagctgttagtgttgaattagaggaatttaagtttttgagcttaatttcatttgattatgctattttgatttaatggatgaattgttgtgaattggagcttggaatccattatatttatggtattggactgttctgggaggtttgagcatgtttggaggcaatttggttggatttttggagcaaaaccagagtttccttttttctgctgggaaattggttaaccagtttcacaggtatagtgaaaccagtcagccggttttgccagcaggggaaaccctaattttggcttcgaaactagttttgtttgaggagttttttaaagcttagattggggtatttagtgatgtttgagttagttcagatcagtggggagataggtttgttcggttacaggaattagggtttgttcctagagttttgactaagttatttatcgggttttgttgtcatgacataggactgggatcgtcaagcgtagttccactcaggtcgacccgcacacctgattactggactgaggtaagaaaatctttacacactattaagcatgttagataagaaacgattatgaacgttggtgcctcgatcatgatcgaggtaatagttgttattgttgtgactcgattatgaacgagggatagatacagtcattatcgttatgagtaattactcgtttgaaactacagataggtttcttacttatcggttgctttattgggcaacgatagtgacatatgaagttcatggataacaggtggtaagagtgctttatgaggcactgtgattggctcgtcttatagacgtttaattgattagcattgctaagtatttattgaatgatgagaatgttgttatgtcttattgtgattacttgcactttacattgcgtatgatttatcaacttttcttactgagtctttgtgactcacgggtgcttggtggtgcaggtaaagggaagggtaaagaggatcaaccatgagtaagaggttttccagtagtgtacatatcaaccacggtgcctcagccaccagtggataggatccacccttttggctgtattttgaattgtaactctttgatgtaaaactaatattgaaacagagtgtaaaagttttatacaggggatccccgtacttgacagtggttatattttataaaaactatgttttatctttaattaaaagtttttaatttcattgcacttttcttagattaataaattagcctataaataaatctgtaaaagcacacatgtggcgtcctgtgggatagggcgttacaacatggtattagagcaaccaatgtttaaagatcctaaagactggtttgatatgtacactggctgcgaagactcgttcgactcatggtatagtaagtgatagttgttagaatacttgctaattacttactggattacctatttcattgaaaagtgttagttattcgaaaagcataatagtgagcaatgtgtatgcgtatgtttggaaatgcttaatagcattgattataaattgagctgtactaaatgatggaaagttgtggtcgcaggtgtatagattatgcacccgaggagatctgataggggtaaccgcgagcttgctgggcttggggttggcggtgagggcgagaatcctccacctccaccaaattgggaaaagttatatgtcacgatgcaggagaccatctgatagcaaggtgatcaaattcgataactgagggagcagcaagctcagcctattctaaatcccaatcttgatcctccagtgcctcttgtagtgccacaggatgcgggaaatcagttagaaccattatatgagcgatttaggaagcaaaatcccccagtgtttgagggtcaggttgatccactcaaggcggagcaatggatgagcatgataacatctattttttatttcatgcgagttaagggtaatgattgggtctagtgggaaattgtgtcacagggtcatgacctgaataacatgacctgggatgctttccggaccttgttctatgagaaatactgcaataaatccatccgagctgcaaaggcagaaaaatttatacggttgacctagggcaatatgatggtgacagagtacgccaccaagttcgaccgactggaaaagtttgccatagatgaaatggctattgaggctactagaaaagctaaatttattcgtggattagaagagcacatcactcgagatgtgattgttgttgccaaacaacctgggtttttttacttatgctcaggtggttgagttggcccttgtggctaagggagcagatgattaaatccagaaaagaaatggtgcatgaagagattcatggaagcagacgtctggtgctagttttggtaagggtaataaccctagtgatcgcaagaaaatacctaatgatccgtcagctacagggtcgaataagaggtttcaaagaaagcaaggcttccttcatggtggaaacaaaaattgacagacctatccaaactgtccaaggtgtaagagacgccatcagagcgagtgtcaagctagggcctgctttcagtgtcgggtagtaggtcatctaaaaaagaaattgcccacagctactgcgaccacaacagaagaaagatgatacttttactcctgctcgggtattttctgtagcccaggcagaggctgattctggcccttccactgtgacaggtcagctttctatcggtggtactttattgatcgttttaattgattccggtgcgacaaattcctatatttcaagtagagtaattggaaatttacatagacctagcaatgtgttgccgagtgattatggtactttgctgcctacttgacaactggttattttcagcaagtgggttaggtcccttccagtgtcggtggaaggaagggaactatcagttgatctgattgaactaaatctagaagatattaatgtgatactggggatggactggctcgcaaaatataatgcaaccatcgattgtaaaggaaagatggtaacttttgagctagagggtgacgactcattcatatttctgggtaaggttcaaggatcccagataccattaatctcggcacttaaggcgagagattttctatgggatggatgtatcggtttcctagccagtttagtggatactacaaaagaaacaccaacggggccagaacatgttctagtggttcgagaatttctagatgtccttccaaaggagttattgggattaccaccgaagcgagaaactaattttgaaattgatttgataccgggggcagagcctgtatctaaagctccgtatagaatggcacctgcagagatgagagagctgaaagtttagttacagggaatgttggatttgaaattaattagaccgagtacctcaccttggggtgcaccagccttattcgtgaagaagaaggacgcaaccttacgaatgtatattgattaccgagagttaaacaaattgagagtaaagaacaagtatcttttgccaaggatagatgacttgtttgaccaatagcaaggaaatactgtcttctctaagatcgatctttgatctggttatcaccagttgaggattcgggaggaggatattcctaagacaacttttgtacccagtatggacactatgaatttctagtgatgtccttcaaattaacaaatgcttcgacaatattcatggatttaatgaactgagtgttgaaggactttttagataattttgtgattttcttcattgacgatatttaaatctactctgattcaaaagaggcacgcgagaaacatttttagatggtgttgtaacatctccaggagcataagctatatactaaattcaagaaatgtgagttctgattgccccaggtaagtttcttagggcatgtggtaaataaagatggtatcttggtggatccgatgaatattaaagttattagagattggcctcgacccaagtctgcaactgaggttagaagtttactgggattaggaggatactactaaagatttattgaagggtttctagaatttctacgcccttaatagaattgacgcgaaagtactgtaaatctgtttggactgataagtgtgagagtagttttcaggaattaaagtagaggttaattaccgctcccgtgttaaccttgccggttagtaacgagaagtttgtaatatattgtgacgtgtccaaacaggggttaggttgtgttctaatgcagtctgggaaagttattgcctatgcgtctaagcaattgaaggaatatgagcagaagtatcctgctcacaacattgaactggcaagagtcatttttgcactgaaagtttgacgccattatctgtatggaaaaaagtgtgaaatctataccgatcacaagagcctcaaatactttttcagtgagaatgacttaaacatgaggcagcggcaatggttagaagtggttaaagattatgactgcgaaatttgctaccaccttggaaaagcaaatatggtagcgaatgctctaagtcgaaagggtccaggacaagtttgtgaattgaagaagatttcaccgaagttggctgaggatatgaccagagcgggaattgagttcatggttgggaaacttgctaatataatgttgcagtctaatttgttagaaagaatcaagacaacccagcagagtgatcctgaactacaggagtacaaagaaaagcttgaagttgggtcagcgaaggacttttcgatttcatcagacggattactacatataagggcagggtttgtgtaccggctgacaaaagtattagacaggagattctagatgagttttctactgtttctatggaacaagattacagtcaaaatgactttccttttaaagatgctgttgacgtctcaaaaaaggggaaaaaggtgggctctggtgtacaggcccaccaatcattatgagtatcctcagttggaattacagtgggcttggaaacccatgggtcaaccaattcttagagaacatttgtgttcaaaagaagcccaatttttttttgtgtgtgtgtgaaataatttgcaataaagctgtagttgaacgtgttcaggcccgtttgggttatgaaggtagttcttcagttgattctcaaggaaggaaatgtgggcttgctctattatggaaagttgctgaagaggcccaattgctaagtttttatcataaccacattgatgtggaagtctctatccatggggatgataagtagcggctaacagggttttatggcgaacccaacagaagcctgcaaatgaacacttggaatcttttttgtactctggcgtctgaatcaaacctcccctggtgcgttattggcaatttcaacaacatatcttctccaaaggacaaaaaagggggtcgtccctatcctacttctctaataactgtttttcaaagtgtgatacatgattgtggattttatgaaatggagcttctccgatatcccttcacctgggagcgtgggtgtggtaccaatgattgtgtggagattaaacttgacaaacccatggttgcacttagctggatgtcagttttcaaagaagcttccctttcaatttcgggttctctttatcagattacactccaatttttttatatccttcttcctctcatggtaagatctttgtttatcgtttttgctatgagaatgcttgggctcatgaacctctttgtgcccagattgttaaagaatgttgggtagctaattcctaattcccttcccatgataaattgatgatttgttgctctaaacttgatgtgtggggaaggtctttaactggaaattttaaaaagcttatctctcaaagcaaaatttctttacatcatctgaaaatgattactgcttctgatacagctgctgagtttgctcgagaaaagaataactattttaaaattttggcccagcaagagctctattggaagcaacgttccaaataattctggttacatggtggtgataaaaatagcaaatacttccatgatgttgcaagtgcccgtaaggaatcaatcaaattcaaaagctttaaaattcagcaggagattggaagggtgagataacggccttgaaaaggtcatttttgattatttctcaaaactttatactgttggtactactaattgtgacaaggttgtgagtgatatcaattgttctattcttaactctaataatgaagaccttctgcagcctatatcccatgatgaagttaaatctgctctttttcaaatgcatcctgataaggcactaggccgtgacgtttttagccctagtttttactacgacattgggaaactgtaggttctgatgtggtccaactggtacaagatttctttcagtcaggttatcttccccctcatctcaatgatactaatttagttatggttcaaaagaagaagaactttaatggtgtgggagatctagggccaatagctctctgtaatgtcctctataaagtaattttaaaagttttggcaaattggatgtggggtttagtcaaccaggtcatctctgacactcaaagcacctttattcttggtaggctaattttttataatattatggtggtgtttgaagtaatgcattacctcaaacataaaacaaaaggcaagaaaggttttatggctctgaagcttgatatgagtgaggcctatgaccgtgttgaatggggctatttgcgggttgttatgcctcgtatgggctttatggatagatggattgacttggttctgcactgtgtcactacagtgcattacacagttatacatggtgatcatatcataggctctataatcccttccagaggtattcgacaaggtgacccgctctccacttacctttttattatgtgtgctaaaggactgtcatctcttattcgtaaatttgaagccaaccgtgtacttcaaggttgtcgggtggcccatagtgtgccttctattactcacatgctttttgttgacgacaactatcccttatgtcaagcttctgtgaatgctgctacaagtatgatgactctcctaaattcatttgaatcagcctctggtcaaaaggtgaatcaatataaatcaactattttctccagtcctaataatgctcttatcttacgatctcagatatgtgccattcttggcatgcccgaagcttcaaagggtagtccttaccttggtctgcaaacatctcttgggatcgtatggttgctcataagctggtggtatggatttccgtcatcttcatgattttaaccttgtcatgctagctaaacaagggtggagactgctttgtaacccctcctccttggctggtcgggtctataaggcaagatatttcccaaatttagacttcctctcagctcctttgggtccaaatctaagttttgtttggcgtagcatatgggctgctcatcaattgttcagttaggggctcaccgtattgttggtatagatgatgatgtcaatatcttaaaccatccttggttatgtggggctgaagatgtaacgccctaatgctaaggcacgctac

SEQ ID NO: 382556 - DNA, 1244 bp, Cannabis indica
taaaaaaataattttttaatctaataaatgcattccctttgatgatataatccacggtccatgtgattttcgtacccaccaaatttatatcatatatattaaacaacacaatatatacaatatagaagcaacaattttcttcccaacacaaataataataattaataaaaattaattaaaaaataagagcacaaatgtgacatgtgtggagatatttgtgtactttgtcatttggtttttaattatgttcataatataaacaactaaatcatgagatgagagattggtatatatattggaatatgctcaattattttttaaagctatggtactatggattagcattgaggaaatatatatattattagtatgatcaatatatcgatgtattaattataatttctcaccttactttactacttttaattatcaattattgttaattctaacaaaaattaattattacaatataattatattcagtaaaaattaaatattttcgcttcaaatatatctgtatatattataaattaattaattattagtcaattcgaaagtgagttatgataaagaagtgtttgtatatatatttatttgtagcttaactcattttctaaatacgtccacgtctcaagtctacaaaacatagatattttttatgtttatttttttttttttgctcatgaggataaatatatatatatttgataagtaattaatgtaaaagtatatatgtgtatatatagatatataaatcatgtgatatatatgtggttggtggataatcatgaaagagaaaacttgagcatatatactacataatatataatataaaaatgtattatattctatgccatatatattatatatactatacacatacatatatattataaattaataaatatgtatgtatatgattatatgagacctctccaatccaatcaaattgattttcttaaacaattttgagccatccattttgagagatttttggctttaataataacatgtgttcagaaatatatacacattaatttattataataattttcaaatgtatctttgtatatatggcatacaacatttattggggacccatatatattatatatgtctaataattgtaggatttatatggttttgaggtggagttttggcaacgttacatagtattttatgtagtgatatatatattaggtgattgttaattacgtgtcaagccacgtagtgttagttttatt

SEQ ID NO: 382557 - DNA, 4596 bp, Cannabis indica
aaaaaaaaaaaaaagaataatctcattaaatagctcttaaaaatgattgttaaattttttaaactattgaataatttttattttgttttttttttcctgttatttgtttactgaaaaataacaatgtgtttgatatatatttaatttttatttttattttaaaaattaacatttggtaatctttatttttatttaattgatgagagagaaagtaaatcaagagaaaatgaggtgagagaaaatgagctgaatactaactaaaagaataaaacatagaatagctagactctaattaaaaaaattatttgaataaaatttgaaaataactttaatgttatattgtaatagagtttacatgctacccaaaatgtacttccataaaaatatatttgaaatgtatgctatttttttttaccatatatatataccaaaaatactcccatttgaaaaatcaaatctatcatgactctctcattctctagctcttttgaaatccccaacaactgacgacgacactaccctgttagagtttatgacctaaaaaatctgcaaaaatatttctaattgttaaataagaattagatattttgatatatgcatgaatgttaaattattaacatttaatattgaataatttatatataaatatgaaaaaaaattcttaattcataaatgagactacgacttgtagctatacagagaaccaagatcacttagtcattaatactgtgaacaacatattaagttataaaatctttaatcaatgcttggtagtacagtttattgatgcccgttctttggtgcaagtaatctcggttcgaattactgatgtaggatgacatctaagtaaatgtgttatatataatagagactatatatgacaaggaccgttatgaataaagttatctttatcaaatttactatttactataatgacctaattcataccataatgatgatgaatagagatcggcctaaattctaagtaatcatgaactatgttattagtttttttattcactcgttacagtttcttagagaagatgattcttacaacatctattttgggaatctaataatgtggatgggtagaaacatgatctacaattatagaatcctaactttcttaaaggatcgaatgttgattccctttatatgttgattctagaactagaaagttgcgcgcacgtttagatgggatctaaattatacttccactagtaaattaatgctactaaaggataaatgaataattagaagggtaaaatagtaatttgatcaaaaataattacaaatcaacataaggagatttaatcactagaattgattatatccatgaacactgcagtaaaactcagtaaatataattctataactactaagagtttatttctatatttatagaggagtaatcatgaaattaataaacaaagattatttagtttatgagactcaataaataataaagtttattggagcttagaattataagtccatggaccccgaatcaccaccttaaaacaatatcaaaagtagagataaatagtagtataatgttattcggaaaaatctactttgaatttgtaaaatagtaattatttattttttgtaataaataaataatttttcaaaataattaaatagggaaaaagataaaagttgttaagataaaatttgtcaagcaaataattgttaagacaaaagttgtcaggacaaaagacaccatctttatctcaattaagacaaggtagactcgtacattaattaattaattaatttaattagataaatatttgaatttaaaaagttgttaaagacatttcaagttggttgagatattctgtcaagtggttgacagattccctcatcagaaatatcagtaactgaatacgattataaaagagtgagataatgagagaggaagagacaaagccaaagttagagttaaagagagcgatagaattttcaaatagaggcatttttggtataagatgaaagaatagcacaaatttaaaatgtgttttgtgggtgtacatttttggtccatgcacatcaattaagaatgtaaacccaaatttcccaagataaatgagtcgaattacgtgaaacgtgacataaacagaatatttaggtgaaaagttcaagatacgatctgtagggtaatctcatccatcaaggatcataatatttatgaactaagatacttcaatattctcatgctaaagaacttcaacatttccacaaagaattatccaatagcttaaaacattatgactgctaaagatacgactcaacaataatatgactgctcaaatacatcttaacgaaaaattaatctagtcaaatcccacctttttatttgattattgacagttatttattaatgaatcgtctatttaattgcatatgtaaaatatgggcattaaacccacttcttgtaatgtcctactaagatgagattgaataatcgctatgttatttttataaatagggttcaatctaagggaaaggaatgacaattgttagttaggaaaactttgctaaaaattgtaatcaatctcaagctccaaaaataatattaacttgtggattaagtaaatttaattacttgaaccacgtaaaattaaaaattctgtattctattatgatattttattaagtaatgacaattatattttaatttattaattcaaagtatttattattatactctcatttttagttgacaaaattttgactctaacatttaagaaaattttcacttttacatattaaactctcactaattgaatgttcatttattttgtattctaatctaattttttttattattatattaatgagttaatattcatttcaaatttagagtataaataatttattttaaatattaatatggataaaattttatttacaattttagtatttattactagattaagatttttattcctcaaactattaccactaccaaatttttctcattgaatttttttattctgttaaaagttcccttgaaatgcacaatgctaaaatataaaagctctattaagtttatctcacttggctaataaaatgctaatgtggccaatgtgtcattgtctgatcaatgccacatatacaatttaaaataatattctttttagtaattattaaataaaaataaactattttcaaattttcttattaattatttataagaaaatattcttaaattcattaattagtttttaaactacacatatgacccttatgtggctatgacttgatacagcatgcacatcattattgtgttaacctaagataaaacttaagaaaaattatatttcaacactatcaatagttcagaggatatttttaacgagtaaataaattcagagagtacgattgcgtagtacattacttcaaaaattgtcattcatgaccctcaaaatttgtcatgtccctttttcatgtcctcttaatatttaacaaaatattgagggatattaaaggagtatgttttatgtcctgcattattggtcatgaaaacaaagtcaagatgttaatagctagacgtgaaaaagtatccccgagtaaaattctttttcatatcttacattattaaatgtcaagtgtaataatttatatcgtattattataatattaaagaatctatatatttaataaatataaatcaataaatttaaataattctcaaaatttaaatttttatatataaaaaatattaattagaaattcatgaaaataacatatttttaaatttaactatccattgaaattatagtaaattttatacatcaaaatatatttacttatatatatttgaaaacataaattcattagcattatagaaccgaatttaattattacagattaattctacatatgaattataccaattgcattatacttcaaattcatacacaacaaaacaaataacatactaaaatacatgataaacagaataaattatacaaccgcttaacatcacagatcctaacattagcactataaatctcactatcaatgaatccacaactgcacgaatacgatcggcacaagatccgtcacctccaaccccatattagcaaaagtaaaagcaaacatagatggacccaaaaggttaaacatagtctaaatcgagcaataagagagattttatgagactagctatattttgcctttgtcgaacgatgttgtttgcattagtcaccaaccatcatcggcccctgttggtcacttcagttgggttgaaatcaccacagacatattcgacattgttcagtttgaacaagtaattggattcatgaagagtttctttattgtttagtcattgtctcatcatcattttcatttgggaaatcctagatattgcgggggtgttaacattgacaagcttccaatcaactctattcttcaggccgggaatgtattatatcaaatttgcttgggatgcaagtatgaatggtttactttagtaccattcatgggcgacgtagacactagtgaaaaaactattactttctgttctattatcgtttgtgtccaccacttgcacctaaaaataataacactataatccttcaagtaagt

SEQ ID NO: 382558 - DNA, 3249 bp, Cannabis indica
cagacatcttgttggtatgagtagcaagagtggttgaaggcaaaggcttggtgaaagcatcagctagttgtaagttgcttaagaccggtattaatcgaattgttgagttgttgattttgtcacgaatgaagtggcaatctaattcgatatgtttggtgcgttcgatggaaggtgggattgttggcgatgtgtatggccgagtgattgtcacagtaaatgaagactggggcatcttgatgtatttggaaatcttttaggagatattgaagccaagtgagttcactagttgtggcagcaagtgccctatattctgcttcagcagaacttttagaaattgtaggttgcttcttagttttccaagagattaaacaatctcctaggaagatacagaatccagtagtagatcttctagtaatgggacaagaggcccaatccgagtctgaaaatcctttgagatgaagagatgaatttctggggtataacagcccctgtccagggctccctttaaagtacctaagcagatgagaaataacctgcatatgtggagttctaggggcagacatgaactaacttaatgtgttaacaacataggtgatgtcaggtcttgacaaggtgaggtatagcaatttcccaatgagttgtctatatgcagatggatttgtcaagggctccccttgttgatcatctagcttggtcctaggatccatgggagtttttgctggtttgcatccaatataaccattatcttcaagaagttgcaatgatattgcctttgtgagaggaaaaggccatgagatgcatgagcaatttcgaagcccagaaagtacttgagctgtccgagggctttgagcttgaattgttgatgtagggtagcttgaagctggtgtaagacttcaatgttgggccatgtggtgacaatgtcatccacatatacaagtaaagcaataaaattgtcatctttgccacgggtgaagagagtgtaatctgcctttgattgtgtgaatccttgtatcaaggctgctgtgagtttcttgtaccattgtcgtgatgattgtcgaagctcgtagatagacttgtggagtttacatacgagattggtacctgtagaatcacagtcaggaatggttagccctggtggtaaagccatatagacctcttcattgagatccccatttaagaaagcgttgtttatatcaatttgtaaagtatgccactgttttattgtagatatggcaagtagcaatttgaaagtgactattttggccacaggagaaaaggtgtcaaagaaatcaagaccttcttattgcgtataatcttgagcaacaagcctggctttgaatctttcgaccgaaccatcactattgagtttaattttataaacccaacgacaaccaatgaccctcctattaggtggaagaggaactacactccaagttttgttatttctaagagctgtgagttcagcattcatagcatcaagccattgtttgaattgaatggcttgtttatatgtttgtggctccttcaaagtcaaagaagtgactgcaaggataaaagctttgtaagattcagttaatcttgcatatgaaaggtacttatttaaggcatgaggagtagaagaattgtcctgtattgtagaataacattcaaagtcacgtaaataggcaggtggccgtgaaattcttgtagttctgcaagggatcatgtcaggatctccaggtatatcttcctgcaaatttgtggtggttgctggtgtgttatctgtatcagcaacattgttattgatattttctgcacatgaattggaattagtgggatcagtagttatatgttgataatcctcaacaagtgtcttagatattgtgttagaaggtataacagtggtaatgaaagggtctatatcagcactattatcatttagtttgaggaaagtgaatatgtgttcgtgaaagaccacattcctggagatgaaaatttgcatattattaatataataaagacgatatcctttcaatccttgaggatatccaagaaaaacacatgtgcgtgctctaggatcaaactttgtcctatgagtagtgagagtggaagcaaaaaccaaacacccgaaggtccttagatgttgatagtcaggttgccttttgaataacaattcataaggagtcttgttttgcaaaatgggagatggcatgcgattaattaaaaaagcagctgtctgcattctccccaaaattttatgggtagatgtgcttgaaaatataaggcacgagcaacattgagcaagtcctggtgctttctttcagcaacagcattttgttcaggggtttcaacacaagtgaagtcatgcaaaattccatttttcaagaaaagatctttgaaagttagctcaggagcattatcagatctaaaggttttaatcatacaattaaattgattttggacataagatagaaattgaggaatgatatttaaagcatcagatttatgttttaaaagataaatccaagtaaatcgagagtggtcatccacaagagtaagaaagaatctaaaatttgaatgagaaggaacatggtaaggaccccaaatgtcacaatgcacaagatcaaaaattttgcaagcaaaattattattattgggaaaagaaagtctcttttgtttagccattggacacacataacaaggagagtctttatgtaaaacagaagtgttacaattgagcttatttcctaacaatttcaagtacttatcagataaatgccctagtctagcatgccaagtgtttgctgtaacagtaaaaattggagaagcatcaggtgttggatccagtatgtaaagtccatccttggattcacctctgtcaatcgtcctcttgttggttagatcctgcaagatgagtgtatcagttgtaaattctacctgagacaactgtctttggttaagcaacacacaaatataatgttatatttgaaatttggcacaaaaagaacatcctttagtgcaatatgttatgtgatagcaatagtaccactttgatgaacaaagacaaaatctccattaggtagtaataatcttgtaggagttatattgcatacacattgaaacaaacttatattagagcagatgtgcctggtggctcttgagtctaaaatccaggaactatgaattggtaatttaactatgttggacatgatgatactattgggttttatgccctaaataaaactccaattcaatgtaatccattttatt

SEQ ID NO: 382559 - DNA, 1160 bp, Cannabis indica
tgtcaaacaaaaaatcctaattaatgaaaaatttgtgtgatgattaagatacctttttggaacagtagtcatcggaacctgaagaggaagcctcggcaaggaggcgtggaacagttgtgaaaagggtctgaaagtgatgagtagttttagatgatgagtcatcttcgtcatcgctacaaggcagccactgcttggcatgttctttgcttatacatattttggcgatgcgggcttggaaaaccgtcagcagcagcgatatgaatcccaaaagcattaactctgcaaattaatacaaatatatcaataatattcattccaaggatgattgatccattcccacagagatacaagtaattaccttctttgaccttttgcaatgcttcgaacaggggcttttggttctttttcttcaaatactgcaatattatgagagatattaatattaataagactgaatgggtgaatattgaataacaagtataatatatacatgcctttccggtgtagtgaatgattctctcaacggttagagaaatgaagacgatgacagtacaaaccagagccacaacccaggtgggcgtgtactccaacgttgttccctcctctgtcatccttactttattctcttctctcttcttcactcctaatcttatttctatttcatttacatttacactaaaaagccaaaatcacttgcttgcctgtaaagctacaaacaaagccctgtctttctttctctgtttctttttttttctttcttttttaataataaaccagtcataaaatacatatacatattttatattgaatcaactcggactgcgaaagaaaaaagaagaagaagaacgcgtactggtattattaccacaaatacaataataatttggcctggtggtgggtaatgggttgactttgtaattaaaccaaaatcaatatttttacaaggtaattaatctctttggatttttcttttcgtttttagttactttctttctttatacattttattttacaaagatagtatctcctcatatttcatttcaagtaaccatatattaataattaattattagttagacaaaaaaaaaacatatcttaattattagtgtgtagagaatattagacactctgtctttgtggattgattgacaatgcaatga

SEQ ID NO: 382560 - DNA, 2836 bp, Cannabis indica
ggggtgacagtagtgtttggggcaaggatgggtgtaatcgttggtgtgggagtttaagtagaattagagtgttgaataacttgtggatgaggagtgtcaatgggattatggggaatgtaaggaaggggtaaatagtgaggaggtgtggagtgtgactgtggtgactcaggtgatggggaaaacaactttgagtaagggaagtcattttcatcaaatgacacactccgagctatatagactcggccagagggatggagacacttgtagcctttgtgggaggggctgtaacccaaaaagatacaagtgctggttttaaaattacatttttgtttgtgatatggtctaagtagggggaaacaggcacatccaaaaactttaagaaagctataatcaggtttcttaaagaacaacagttcaaatggggtgacatagttagccttttggacaggcaatcgatttattaggtaagtggcagtagtgaaggcatcccaccagtaaacaaggggtagctgagcttgtgcgagtaaagtaaggcccattttaagtcacatgcctgtgctttcgctcagcccgtccttgttgttgatgagtatcgggacatgggtgtctgaatataatgccaagttttgctaaaatgggtgcaaggggacgatattcacccccagtctgactggacatactttatttttgttgaaaaagacctttcaacatatgagttaaaatgtaggaaaatagtagaggtttcagacttagattttaggggaaagatccaagtatactttgtgtaatcatcaagaaaatgtatatagtatttgtatccctcatcagacacatggggtgatggaccccaaagttctgtgtgaattatttcaaagggagaagtagacttattctgagataaaggaaaatgtatttgatggagtttcccatattgacatgcatggcaaaatgaaggatcagtagtaggaacatgtaaatggtgtaaaattttattcaaaacaactttattggggtggcctaatcttttaggccacaaatttacaagaagttgattcttagagcaatgtctatgattacatttgtttacagactcaagaacactagcattatgagctgagtactggttggaagggggagactgagatttcttgaaggcagggacacgagtgggaatctggtataggccttctctaacagtgccctgaagaagaggcttcttcgttatctgatctttgacaaaacaagaatcaggggtgtattcaatgataacatcattatctttagtaaactgggaaatgcttatcaaattcttggtaatggatggaacatgaagaacatttttaagatgtaaaggtcggttagcagcaataatataagaaccaatattagaaatagggagtgtagagccgttacccactatgactttttgtttgcctttgtaggagctcctgtttgtaatctgggtagagtcagaagtcatatggttcgttgccccactatccatgtaccaagcactgtcttggactgtagaaggggaggcaatgtatgcctgggggtggccgtcagaggaagatgcattagagtcatctggtcctgtgtaactcacatcaaagcgtctatagcacttgattacagtatggcctgggcgtcacaagttggcaaatggcacgattgccattgttgtaacctctatctcgattggatggatttcccctgcctcggcctctattttgattggaaggccgtgagagggaggttcagaggacccatgttttttgaattgggcaagattagccatggggtgattaagctcaagaagtgaagtagattgagtgagttccagtcacatttcatgattttggagcatgtattgaacttcttaaagactttgatggtcacgagaagtgagattaaccacctaccaattcacattcagggccaacaccggcaagaaatgtacaagatcagttgatcttaatgtacaagatcagttgatcttcagagactgtgttactagcagcacgtaagccatcgacaaagcccttcatcttgagcatatatacatcaatagtcattaagcctttcttggtattctgtagtagagacataaggtggatcattcgtgcttttgatttggtattgaacaattgctccagtgtggttcagatcttagcagacgattcacaattgacaacatgaccaatcattgattcagagatagaagacataagccaagaaatcaggaattgatcaagcctcatccaacggacaaagtcaggattacgtacaatttttgtggatccctctatttcagggattcttggagctggacgaggaagacgatgaagaagaatatcttctaggtcacgtgctctaatggcgggaagaacttgggactgtaaaaaaaaatagttgttgtgatccaatcgaagaggaggtagaagaatagtcgtgggaacaccaaaaagttgagctaaaaagttgtcggaggtcgccatgaccgacttgctctgataccaagttgattttctaaacagagagaaagaacaaagtaaagttcttattattcaatcaataatgaatacaagagtgagaggcaagtatataggcctctcgatacagaacagaaaaggtaacaaccagcagtggacaagacaaagactctaactaacatgtaacaactttaactaattaactgtctagtcaccactatcatttacttccttaatatatatagggagttgatatagtacaatattgctattgggtactttagcactcttagacatgtcgtcttgtgattagctagcgatacttcttaaaaattattatatta

SEQ ID NO: 382561 - DNA, 1812 bp, Cannabis indica
acactttacgtataagggagagaggatcaattataacaaggaaagtaacattagaagagattctcgaaagccactaattagtaccgattagggttagggttggaccttaatgatcgaaagagggaatttaagtaaattttagatatgggttttagcaagttggtcaagattattgttaggcaggaatgagtagtggcaaatttatttgagatgtccaaattgcatgagaacatcactcgaggaaagttgagcttgattcgatgctataatggaatagttgatcaggtgacgtgtcattaagtggtatggtacgttgttatctactagaggactagttgttttcactagatgagattaatttccttatgagtatatataccaggcgttatagttattaccatataaatgatacaactattactctataaacccattgtagggttaatatagttttcttaattattaaacaataggagatattaatggattacttaattaagtaacagtgattattgattaccttatttaggtgaatatagtttgattaattgtcttattaggcaacaagttataactgagtgtgatattgagaatgaaattggttagataagtatacaattactagtgactacaagaagaaaatagagatgttataccagaaggatgaaactttagttgtctttttaggaaaggtgtatggatttcaaaaatccaatgttattcgcgtttaaggtgaaaaatttactacaagacgaacatattggttaagcagttagtgttggatgttacaaagaaaatacaaatagaacccgatgttggacatatgatatgcaaaaacacaaaaacattcatagaactaaattataccattgaagatcaagctttgagcttaaaaactcacactttgattcaaaccaattttaattgctctaactcactaaaacaagcaagaatttaacttaaaaactcacagaaagtacgtactttctaacttaaaaattcaatacaaaaccaattacccaaaaagcacatataaacctattgtttacttcataaaattcaaaagaaaaaggacttagagggataccttgagttttgctacagtttcccctcacttagaagctttcaaaaacacttaatttctgcaagaatttgaggagaaattataatctcctttgttcttgagtttggcagagagaaaactagttttggttttatgtatttcctttctagagatttctaccaaaaacatatattaaaactattatttaattaatatgaataaagttcatactaatcttgtatcccttgacctatatattacccttaccactaaaacataagtagttataatttctttcaaaaagttataatactcaaagggtaaaagggttattttctaaataattcacttaatctcacattttttaaatgcccaaaaaaattcttagtacctctaaattgttaaactatatcaatgtggcaaacatgcttaaaaaaaaaaaaaaataattaaatcacatgtaatacatgacacttttataactcaataaaatctctatataattaaaaaaactatatcatatttacctattttttttaataataaatcttatttctaatattgcacaaaatatatcattaataactatagggtccgtttgatacgcagggttagactggattggactgaagaggattagactaaactggacaagattgaattatgctgaaagtaatcctgtgtttagtttaagaatagattggactattttatttatttctttttagaaaaaaaactttaattaaaat

SEQ ID NO: 382562 - DNA, 2876 bp, Cannabis indica
ctatattacatatgtagtataataattaagctatatttagagttactttttgaactttaccgaggttttcgaaaattattaattagagttgtctatagtaattaatgaaagctaaagaatataatttttacgtggttgatacgttaataagtcttagtgcacgagtcacttttattaatgagtattttctcgcagcgagtccagaaaacgtctctcttcaatacatcttagggtattttaagctcataatggtggtaaaaaagtctccattgttgtacttgtatgaattatgctttgcacaattttacagacatgattatgggacatgattgcctattctttatgatgtgcttaggcttggtatacgcgttttgtgagactagacttgtctcttgccaataatttgatagctcataatgtatacgtcaaatgatgtatggtgcatcatgaaatcaggaaattatgggtttaaaccctcaagcacgtcttttcagagtaatgtgtatgatgttctttctcatgccgcattaaatgtgcttatagtaatttaatctcgagtagcatgccatgcttctcatgtccttctatctcttctccgagtcgagttcacttacggagaagaagagacaaaattattctcctcctaggggatccttccagaggtgactaatctctcaaaaaaaaattcaattaccaggctccggaggtggtttattatgacatgtcccgtagcgagggtcccactgccacatggcttactcttgaagtgccttgtattttgggaaaaattctagacaatatttaccccacaagtcctaatttataattttataaaatggagcttgcaacttaccacctgaagcactgacatcatgctcccgtaggcaacacacatgacaatctttaatgttattcagtatttttcctcaattttggtgaagtcgattcgattttcttgattttgatgctccatcaattgcaccatgtaagactggtacttgagtagtgtaaccatttgtttatactcatgactctgacaaattaatggccctaaccatcatgggggtttacacaagtttgaagtgagactgctggatgagtgacaattcaagtcaccccatgggtctataaatgtctttcatctctttctttttcaaattttcactttcacacttttcagaactcaaaccagcaaaaattttaagcactcctgattttcttctactttttctctgatgatatcaagctcagttttatcgtttttgtgcactagtacctgaaaccactcgagcttctcccatttgtaagtcattttctaggcgtaaatatatttttattactaacttttcttattggtgatcttttttcataaatacaacatttatattgtatgactgttatttgaagattttcctcgactgtcttcagtttatgtcttaggtcgtggcttccatgcctagggtttatagaacttgccacttttctttcccttcgcctcacgtactgtttcttcttgtgcatggtgcaattagcacttgatgcttggcatttgaaatttccaatttctaaacatgctagcatctagatgagctttcttctcagcggttagggaacccccattcttttttttttcacttagggctcgatgtggggactaactgctaagtatattcttatttttcatatgatcaaagttttgaggaatctacacgcacacgacttctacgctttcgaccaagaaatactcaaactttacttcgggacagacatgtcaaatcctaaagcccctctaaaactcatcatctcagcagcggcctcaggttgccccatcgtctctctgtgagtcataattcaaggttaggtcccagttctcaactatgttcattgagttactagatgggaggctgatgatctttattcctctctagggtgtgcacaccatctgaaaaagatcgtcaaagagattgagatcattcctcgagaacctggagtctttcatcatctggctcaataacctgagacccccaatcataactatgagggttcggggcttggagtcaggtgcatctcatgttcggtgtaagcttgccactctaaaactactttatcaattttttagttttcattagattatctccttatcaacttattctccaaggctatcatctgctatcgggccttggttatattttatgtttttaggagttggcctgctcccaacccgcacaaattttatactttgatgaactcgtgttcattccaaaaaagggggacagatttaaagatgatttttattcattacaacctcatccaaccaacgagacccaatccctttcaattaccaaaagattgtaaaggactgtcgtcaacgatttttcttctcctttggtttccgagctttcgagcgttcgaatctattgatttagttgacccaggtccctcctttgctgtggatggaccccactcatcttttcctcaaccatatcgcagtctttaactcgcttaccagtgaggagctcaacgttggaaatctagtgaccacaactataactgtcgaaggtttaagcttctacaaggccataagttggtcaaggacaccaaattttctaggattacttgtccaaatgcctgagacaaagaagctaaaaataattttattggcatactacatatatttaattattatttttatatattttaattgaatgatatacattatttattttaaatattatttaattagtgtctatttaattatacacaatgttagtatataattttattgtcatagtatatatattttaattgtgatatataatttggttagtatagtatacatatatattagtaatatatatttttattattattgttag

SEQ ID NO: 382563 - DNA, 1064 bp, Cannabis indica
aaaaaactatagtattcttaaattgttaagtttattttttttcctactattttatctaattatactctgagtaaaaatcgtacaaaataactacactctgctctgtttccggtcttatcattcattatctatattttttagaaaattaacacattttttgggcttatctttgttcattaaagtggaaattagaagtcaaaaaaataaaaaaaaaaaaaaaaagtggaaattagaagttcaaatccagtttaaactttcaaaggagcaaaaggtaactgctggctcaaggcatctaattaagggcttcacatggtgggtgggagccatatgttatctccatagtccattccagaggctatcgaaagctactccttttattttttccttcttccttttccctccttttcacctaatcaaagtggtgtccttattactggggtacgtggtccataaacaacttgagttttctcaattatattggcttctactaatgtcccttttttgtttttgttgttttctctaactctctctttaatttcccaagcattaattcaaattaaccaaataattaacccttggcatatataaattagtttctcagtaacttccgaatttgtttcacgaaaagaggatataaaagctgaataataaagttatcgtgctaggccacttggggaacttccatgacaagctcccaatccaaagtaagtactcttcaacaaaacgcatacaccactttgatcgaacactacttttacatgatgcggttgaaattaggtgttgacacgtgaatttaatcatacatagctttcactacttaagttacttttccactattaggctctcatttctacctacaatcaataaataaaagtaatttgaacacaacataaatcaattagacagtagttaaatacagctgaacattacttctctctctctctcttctctcatgttaatttttaggagaagtaattcgttgtctcaatctttaatgtcctaggcaataacacaattaggtctcttaattacattagggaaatttgattttctatacttagaaa

SEQ ID NO: 382564 - DNA, 2758 bp, Cannabis indica
gtcagagaagttgagcactttggtagccgcccacaagacagtctccgtgtaaaccctagccaaagccactacgcacatcgaatcgcaaccaactttaacatcacagttgattttgacccagtcttccaaaggaggggaccaaacaagaaactaaatttttttggagaaaaaaacaaacaagaaccataatctgcataacacatataaatagagttgatatattgtttaatattacatatagaattattgtgttctttgtcgttacgagctttccatatcctatctactacaattgaagcatataggaaaagcccttcgtccacacctctagtctttagattctacaggaattttgcccagtcccacacatgggctctagattccaaaactagaaaaacaccacatggagaagacctccaaaggtgaatggcaaagttacaatataggaaaagatgctctttcgtttcctctccctctccacagaacggacaagaaagttcctcaatatacaaccttctagccataaaagaacggataagcagggcgttaaagagaatgcttcaccgaagtaccttgtgactctccaaaattttcgaattccaaattttatttcatataacaggagcaacactgcaaggaggagcacaatttaaggcctggatcaaataggctgacttaatagagaatgctctctgaactttaatatctattaaattatgctctctgaactataacatgtatcaaattgtgctctctaaattttcactatgtcaaacttctttagaataaaaattttttaaatttaacaattttaatagctcgagagaatttttaatgacctaaaaagttcagaaaatataatctagtacatgttaaaatttaaagaacaaaaattcaaattaacttaaatttaaattgaaataagtaaaacctcaagaaacaatgtcctaaaaacattagataatgactaaataagcagttgggaggttttgtccactcatgtttctcataatttcctaccaaccatacctatttgacttctcaaaatttgattttacatgaaaaaaaaggacattgtttgattcaatgaactaattaatctaagctactattattttcattacaaataaaagcaaccccattatgtttctttgccttaggccaactagcaaggtagtcatggttattattatttacaaaagaaagagggtgtgtatttcatgagttattaatacaccataaatattttattacatctactttttttctccattgttgggagtgcccaaaaaatatattttcccacactaaaaaaataccgataattttttagtcacaatattttttttttgaattaaataaaatttttaatcacaataaaaagttacgtatgactaaaatataataatttgatataaattgttactaatttagttttaactaaaaatatatttagttacaacatatcatgatttttgtggctaatatttttagtcacggaccttttagtgacaacatataatttataattacttataattttttcacttttaattataaattttgtagtgatgaaaacttaaaagtaaaattttttataataacaaattatcaaaactatattattatgcaaaataactacaagaaaatagacattatataattaaaatatttttaactttttctattggatagtaataatatattaaaaaaataaaatatataattagaacactattgatatttaacaccttatatgttattaatataaataaatatcgagtctcatataaaaagtacttaaaaattataataagtgatatatcttgtcttaaaatattaggtatcttaaagtatcttataacaatactcataataaaatgtctttataatgactaaatgagttgggaggttactacttgagattaggcgtgttgaagattttgaatttgagcttcagattatgtattgtattttatgaacgcttaaataaataaaaaaatatataggaggttttgtccactcatgtttgtaatagttctcctaccaaccaaacctaatggccaaatttgattacatgacaaaaggacatgtttcatttaatgaactaattaatcatagctacttcatttcattacacatatgaaacaaacccattataaatgtttctttgtcttaggccaatggccaagtcatggctattatttatattaagaaataattctttttacataataatttaatcctagtaaaatagtaataagtgaaaatagataatttttttaaatctattttttcaagattgttaaaataaagtattttgtagcaaattatcaaaactatgatattatgcaaaataactccaagaaaataattagttaatatcattttggattatgtattttataaaaattattaattgagccttttgattttaattaaaaattaatgctgtattttttaaaatgacataaaatagtacactaaacttaatttttaataatttttttaatataaccattaaccaacttaaagataataacaaatatataaaatgtaacaatattattataacacttctagataaagttattatttttattttgacaaaaatatttaaaaaaaatataaaattcaatctatcatttaactaaacaaattgtacacatatttttgtaatggatagtaataatataggttatttagtaatttttcctctcgaactttgacatgctccaaatcatgtcctctgaacttt

SEQ ID NO: 382565 - DNA, 2137 bp, Cannabis indica
tttcttattttttttattttatttagtatattttaccaatcactaataaaggcataatatagttaaaacaaaaaaaaaaaaaaaaaaaaaggaacataacaaaataaagatgcattattttaaccaaaaaaaaaaaaaaaacatattttaatgattttgttgatattttagttagtcaacacttttatatatcggagtataattataataaatttgactaaacatactattagttacttttttttgttttttttttaagttaaaattaatagaaaatttataaaattaataacagatggtctaagggaagagatgatcgtgttattaaattggaatagtagtatataatagttgtgatttttttaagtgatggttgtatggtgatataagataatgattatatagaatgataattatggttcatggtttgggataagtaaaaggagttattgatttttgtaccaaaatgagagacttatggtttgtagaaaagggtaaataagctttattgatttggttcttggttacacttctacttaaaacttagtatttatagggagttaaggttggtggtgctacaagtttttaaatttttcttctctgttttacaattttaactttctaatacattctaaaacttttaattttcttagttgtacaataatttttctagatattctagataattctaatttaaacttttccaagagtgtttttgtgagattaagattccatattcttccttttaagatacttcgattctaaggaagtagtgcactaagcccaagttggtcatctcaaatttttttatcacgtcttctttaaacttctttatcgtcttctcactattgcctgtgtagatgagatcatccacatataaagagaattattagtgtatcatctgtaccttgtgtctagatgtatagtgttggctcactcttgctcctcctgaatccttgttcaatgaagtggctgctaattcagttatactaggctagttgagcttgctttgggagatataaagcctttttcaatctgaaaacttaatcttcttgccttgcaccacgaacccttaaggttgttccacatagatttcttcatccaaatagccattgagaaatgtcaacttaacattgagttgaaaacttccctttcttctgtgcagctagagctatcaaagctctgattgtatcgagagcaactggagaaaatggttcatcgtagtcgactttgtattgttgagagtatccttttgcagctaatattgctttgtacttttggatagagcgatctgcatttagctttatcttgtatactcacttcactcttatattatctttgtcttatagttgatctacaagctcccaagtatctttgtcttgtggtcgatctatagatttgtcttgtagagactcactagactcatatagtatctttgtctttttaatcaattttatctcatcattcataacatttctccatacttcttgttgttaagcttattcaaagctttttggctccttaagcactaagttacatgcctcatagatttcttatagtggtcttattttccttattggtgagtttggcagggattctatgacttgtgtcggttaattctctgtggtaggttgaattggaatttcattttgatcatattcttgtcttggcagcagagaaatgttgattgtctttctttcaacttcttatgtctcccaattgtatgcaccatttttgtcaaattttatatcttggctgattatgagtgttaactcagaaatctagactaagacttctaagtcacacccgcttgctagattgatgagaatgaaatagttgttaagtaattataagagagacaaaataaacttatactacttcacttcctgtatcgtgatagtaatggagctacgtctacttcaagttttatttatcacgagatggtattatagaaaaaagctaagtgtcaaagctccaatttcaagagagagaaactagagagagaagctctgaccttgtgggtagttttttgtatgtgaaaaataagctaagggagctctgctttcataggtgaaggaggcccacaaaataggaaaaaatacaagttggatatttttgaccatagatgatgatataa

SEQ ID NO: 382566 - DNA, 1679 bp, Cannabis indica
aaaaaaaaataactgtattttaagcttggccatactctgtttcagcaaaacaaaaagaaaagaaaaggaaaaattgtcttgctttgttggaaaatttatgctgaataggcaacattatagtttgtctttgtcaaaacatgcgttgaatatgtatattcaatatttgcatctgatgctgatagtcttctctccaatccatataattactttaagaaaaaataattagtcctcatctcatcatcaatataatatttaagaaacaatatatatccacattaactatggtccaactcttcaaatattgtgttctagaaaagtacctaaagtcttatatgtattgtcatttttcgactggtaataatatttttggttaagttagtagatatttagctcaaggtaaattctaagtacaatgaacattctactcatcaatgatcactttctccattgcacattttctattcataactagattttcgttgaactattattcaagcaaataaaagttaaaagaagaaaaaaaaaagtagaatgctggttgttaactgttttattttcttaattttgtaattaatataaactgtggctttacattaatcctctattcaagattgggagtatatgtggttgaatccgattctttagtagttgtatcggcatttgataatagacattcttatttcaatgagttggttcttgttagaaaatattacaagtttccactacatgctcttcgaatataagaataatttgtttaggtagataactttccttatttcttctataatcctttatgatattatttggtttttaataatatttgtcattactttcaaaatgtatatataataaattgtgacatatatatccttacataaagtatgtatatatattgtaacacataaattatatttaagataatcgttgatggaaaaattgatctatatttagcccataatataattttgtaatatttttacattaattgttattaatattaatgtaaaatttaatatataatgctcttttaataatttattgataataatacaaaagtaactatgtataaaacttaataataaaataacaacaataatagaagtcatagcaaataatcagtatcttaactaaactttaataatacaacattaaaaatgagatttttacgcttgatgtccttttttaccttttttttacatttttatttattctcagttatttaaacctttttacattttttatttttcaattttactttttcaaaagttcaataattacaaatatacctttaccatgcatatgtcatgttttatccattctaacaccccacctcctcaataactgccctattcttcttcttcttcttttttttttctctgtttctctttcctccgttcttcaacctccatagcccacgatcacccagtcgaagcccttacccacgttttttctcaacctcccatctatgccactatctccattttgttcgataatctctgtaagtttcctcccccattgtgttctcttcttctataaatgaccaccactagaagtggttcgaagtccccatctccagctaaaaaaattctaaaaattcaaagaaacctcctacaaattcatctaaagttgatcctaagatgggtttgaagcgcattgctaagaaagtaatgggtgatgtt

SEQ ID NO: 382567 - DNA, 2470 bp, Cannabis indica
gtagtcaatgtcacatgctcatcattacctattttagttacctaaaagctaaaatatttattctttttttttagctaggataatggcaaagatgacttactaagacatttttaaatttaaccacttcgggctagttcaagtggccataaatgagtgtgtgagtgttggaggtcctggcttcgagtcctagataaaacatgatgtaatatataaacgcttaaaatacaaaaaaaaaaaaaaaaacgcacttttaaatctattggattttctaagaattgattgttatgtgtcaatttaaatttgctaactgatccagtggtaaatacaagttgatcggtaaatttaactataaatttattgaccaacctatatccaccacatgaatcagaatagttagaatactcgagatgaataacaaagttctaataaaatttataattataatatttattgctcttaaaataattattttttaaccctattttataagataaatctctaaaaaatataaaagataggtataattttttttagctttaagaacaactccaatattaaaaaaaaattgagttacttatcagaataaatggacccatgtgagtccttatttaatttagtactaataaattctcttaatgtccattaagaaagtatagacttttttatgaaggcaccactaataaaaggaaatataattctatccaaataatgttattattattgatacatgatagtagtagattgttgcaatagatttttgtaaatggaaattaatgaataaaatggtgaaatagattgaggaggacggtgtcgttttgacaatattgtctcttcctctaatatatgattaattgatgggtcttgatgccactccaactcctccatgtggatttttgcttaacattctaaaaaccaagtcaccaaaccaataaataataaatacaaaacttaaaaataataaaagtaaataaatatatactaaaatacattgtctaatattttatttaattttatacgatacagtataattaaatatacaaattgtaaaatatcactactaatgctcgaatttaaatacataaatatatacaaagtacctttttttattattttttttattcaatgttaagtggatgacttatcatgtaatcatttagtatatcataaattaggagaattcatatcaattttaattttttgtgtttgaatttattatgacataatcatgaaacacttaacatacattttaacattgtaaattctaatttatctaagaccaaaatattcttcttttccttgatttttgtcaataaaactctactaagtaacaacttaaaattccaattgatcatattcttctatatagcatgcaaataaatatatattattttagtaatcttaaattctttgtgtatatttggtgtttctaaatgccatcctctcttgttaaatcatttgtttgtacattaataatatatcatgtattttttttttttgccatgaataatattatatatattttgatattagtatatataatttatttacgtagttattagaattatttatgaatttatgcaaatattctcaaacagcgtaagaatctctttaaaccaatatagctcatcacatattttgtaaaaccaaaagtcatgtagatatataaatttgtaaaaatatttttttaaaaaaaataaaaattaaattagatttaagaaattacttcatatattattttaaaaaaaaaaaaattatattttaagttgttccgataacttttatataaattttggttgcaagactaagtttttcaagaaaatattggattggatattttcttgccaattgaggaggacctttagtttagtacaaaagtcaataattgtgtttttatgtattaagtcttttgactttttatattatattaatataactaataataagattaattaataattaattaagtaattacctggtttggaattttgaaatgagtacattccttctaagttagaaccttctctaacatcactatcaccatcatcaagaataagcataatcttttgagcctgcaatcaaaatacaattagtgtcgttttatagtttttgtgtcgttttcttaaaattaaagctttgaatttttgtttgttaaccttctcagcagaaatattgtcgtatacattaacttctccattataaaacaatgtgatttgttgttgtgatttacttgaagatttctcaacaaacgacacacttgatttcattgcatcacaccttcaaaccaaaaaaaattaaatttataaacaaaatgataatagaacacaaactttaaccaattatcaatactcatttgtaaaaataaataaataaataaaaataaaaaaatcagagagacttgatcctcaaagggaattttaattttatatacttaaaaattaaaaaaatttattattaaaccaaaaatctaaac

SEQ ID NO: 382568 - DNA, 2476 bp, Cannabis indica
gaccccttcgagcaaaggcctcccccatcgtttagcttccttaaatcaatggtccagttctcataatcctcaagaccttctgtcatggaattactgtccattaaagctcgagcaagggcatcatcactcagaacatgcataactcttcctctacggttaacactctgttggacagagtaattatcattagcacgtcgtctaaggccttggtggttcaagatacgagtgtgggaatcattagtattagaacccacactgctgttatctatagacatagcaacagatcctccatcattgctagtttgcaagctcccaaaactatcaacagacatattggtcccttcatcgagcttataataaaacccttgggacaaatcacagtagttgttgtcctgattactcatacctataattccaggaaacttttgaccaccctccaacatttttttcttcttcttcttctgatatatttatataaatatataaacaacaaaaatcaaaaccaaaagctcttcaagagaatcccttatttcctcaacagcatcacagacttgaagttcaatcaaacccccaaaactctgcaaaaataaatccacaaaaccaattatttcctttctatatttagacaaatttcctaaaaatgttatttttcttattttcccctttaataaaaacaaaaatagaataatcccaacaataaaaattcaaatttttttaattcctgatacaaaacctaacgaacaacaaaaatattactccaaaatcaaaattccctttttttttacccaaaaaaaaaaaaaactaaaacaaagcctaaacttatccaaaaacaaattagaaacccaaatctacatccttaaaattccacagtacgaaaaataaaaatagaaagtaaaaaaacaaaaaaggatcggagttacgaaactgaagaaaacggaccttgatggagatgggtctggtgcgcgattccgataaacaagtcctcagaatctttcaaacacagcagctgaagagatcgagcttcaaagctaaggatttaaacgatttacacctcttcttcttcgtcttcttcttcctctttagtcttctaagtcttctggtcttcgtttacacattttcatctcctttctatttttccttttttatttatttatttatttattaattataatatatatttttctcctttttatttttctcgtttcgtatatttcgttttgggttttggatttttgtaatgaggagaagtaattatcacgtgtgacgcagtacaggattactactgtacaccccttgcgttatatccacgtgacctccacccccctacggtctttgaattgttggaatacgaaaaagtagagcttgcgtgtcgggtattacccaatcgaaatgtgacacgtcagctgtagggtagtagtagtgcttaagcacatttttgattctatttttatttagagagagaaagagagacaaccaaccagcagctccagttgactgaactagtcaagactattgggctcttagtcttttttctttttttttacataaataataataattagagaatttggtgtccatatcgctattagtgtaattaagtatcggattttatataacttaagaaaataatttttaaaaaatacatcactaattaatcatggagcgtcacttataaaagattttggacactattggtggtcaatagcaatgctctaataataataataattggtgttcagtacctttctcggtgtcatattgttattagtgtaattaagtatcgggactcatgttatttaagaaaataacttttagagaatatcgataacaaatcgtagagcgtcacctataaaaaacgtggggcatcactaatagccaatagcaatactctaaaaataattataaaagtgattctatgtactccttaaaaaaagaatgcactgatgcactctctacctatttcaacatctagaaaaatattagtgcatttttttttatattcgcatatgttatagttatttaagatattttataaaattttaaaaattttggaataacttacaatataaaaaataatgttcaaacaacctatttcacatgcatacaaaataaaatagtcacgcgtgcaacacactgtttgaattatattttttgtgtgttaaattttctaaagtatttaaaattttgtatgatgtcttaaataattataatgtagttgattaaaaaattaattcggatgccaaaatagatagagatacattaattacatcagtatattttttttatggagtgcattgtaaaaattttcattattatatgtttgacccttttctcctcaataaaaaaaattaagattaattataaaaaaattaaattcaaaattcatttcataaaaattccaaatttttgaatcaagttgggtagtgaggtagggtcatatggagtgtgtgaagactcaagaatgtaattaagcaat

SEQ ID NO: 382569 - DNA, 1420 bp, Cannabis indica
tttttttaatttcatttaattctaattataaccctagtagaaaccttataaataaatatgatatcatttaaattaaaaaaaaaaactcttgagtcacttttgtttgattaatagaatcaaagagagatctattatattttatagtaaatttcgagtttctcttattctatttctctttttttcgaatggtataagttttgactaattgctcacactttataaggtaatactcaggttagtaaagaatactgtgtagtcttttctcaagtactgaaggagaatttaggttcagttcttgatcataatctacaacagaaaggataaaaagttagagaactgaacaaaataagttaattaattctgttgcaaccaatacaaggatctctatatccctttatgtgatttacattattgttttgataattctatgtttaagatgttagattagtaataatcaacatactcgaataataaattaagatcctagtgaaatattttcaacaaatcatactataggtacaaacgttcgaattatgaatatacacatttcatacagttagtagacttatagtaactgagtgtatgggtactcagtaacaagttaaatattgtatttatatgtatgtttctcttatcgagtctgtcgacttacatatatgttattatgtgtaggtaagggaaaaataaaattgaacagtagtgagttgagagcttagtgaagattgtactatctgactgtccagatttgaagggttgcatctctcaagacaactgttgacacactttttgatactatctgattgtactatatgtcgtacgttagacgacacttttgatactttggaatgtaaaatgttttgtaactagatttaggaaccccgaattgtaaatgtttcttaaaatgtgtttatgtttagtaaagttttaattatcacgaaattttttattaaatgtatttttttttataaaatcctttaatttgcaaaggtcatcacaataattgaaaaaatataataacgttccttaaatattagggcattacattaatagaaaacacatgttataatacatacggaaaaaaaaaccctttaatatatacttctcatcaaataatatacttaattattttacaatcaaagttttatcttagatgatgcttcttgagctgtaaatatgattcagcctgacttggcacaacccacattcttgtgcctccaaaagaagtgggtggggatgtgttggcccgtgtaagttagtgaatcaggtcgggtcgagctgtagtaaaagtaaagaagcccagcatgactcaaatgggctcgtgcccatgccttgaatgggctagcctgtgggccgacccatttgctaatataaactaggaaaatttgcatggtatactaacttttgtcatttttttacaaaa

SEQ ID NO: 382570 - DNA, 1309 bp, Cannabis indica
aaaaaaattgttaaattttttctatattctaaacgaataagtagaaagaattattttctttctttcctatttcatttcattcatccaaccaaacacaataaatttgtctatcttattctaatagataacttttttattggctgcgtttcaaaaaggaatgtgcaattggattttagtgtaattcaatttactatgtttatttatctatagagataattggggtatccaaattacactctctaattattctcgtgacattctatgggtgtaatttttttttcttttaattaagaaaatttgatgtaattattactgtattataattactaaaactttgacactttaaatattaactaaattactaaacatattttggcaaacatgacaaaatgaattcatatataccactcatttccaaatttgtacttactaatattactataccatagtaattaaacgactctcgtaattacagaaacttcaaaacgcgccctcattcttcaaaaatacactaaaatccatttttttagtgtacctcacatttattattacacctaatctatttttttcctttatatatgttaatactttttaatacatattattgtctatattttctcacgttgacacgttgtacccaccaaagagagttcccaagaacactaaagagctagttgaagagaaatcaagtgtaaagatgttggaaagagatgctaaggagctaatccaagggttaagcaccaagaagggtaagtaggactcgagaagaaaatgtctaaatgttttttctcttatgatcatttcctgcaaagtctcatgctcttgacaccacaagctcgattgtccactagctaatacagcctaaaatggtgactaccacgtgtttttatcttcctacacttgacattgacaacatgagtttctacaaaagcaaaataattatgaggatacgtacttctgttatcttactctctcctacacttttctcatgagaggaaaaatcaaatgcctcctaaagtatccacatgaccactcaaggaggaagagaaagaagaggcctaactttacgtgcccttctactccaagataggtttatgggtattcacttttagctatatttttattttttttttttttgacgcggtgatcaaaatcacacatgattaacaaagcgacaatccataatcggcggcggcaccacctcgaaccaggatagctcatcgtctaaccgaagggcatgctttgccaagccatgagctgcagaatttcttatcgcaagccacatgggacaaaactgcccccggaaatt

SEQ ID NO: 382571 - DNA, 3573 bp, Cannabis indica
tgggtgggcgagacaaatccttacatgatctggatcaaatcagatcatagccggatcagatatgacccgacctattcacactcctaattataaaaataccatatattaataatctaacttcccttgtaaagtataggtcttaatttttcttttgaatattagtagggatgttcactaagaattatatatatttatatatttatatacgtattgtacttgataaaaataattgatttgtatattcacattcctcacctattttttattttatttttaaatgactctttctcgcaagtacagtactgtattatttttttaatttttataagatcatcatttaataaatttgattaggaaagaaattaatatattacttgtctttttatacatatacatataatacattacatgttaacatcaagagattggaaacatcaatatgataataagttaaattgttattttgatgaacaataacgacatatagtaattaataataacatattttaataaataatgtgcatttcttatttttttttcccttgtaaaagaaaaaactagataatatcgacaatgaactaaacaaagtatatgtatgcacattatacataatttatatatatattgcttatcgcatatatataattgataattattatatacctatatcaccatacacataatatatcatgtggtttaaatgaaacgaacaaatagataacatttttttagagtatatttctattaaacttttattagttaagttaagaaaaaaaaacatatattaaggtgcattcacattatggataaagaagacaagtaaagagtattagagttttatttgactaacctatcttatgaatatatacatatttttttttttcaaaaaaaaaaaaaagccatatagtaaaatggaaaatcaccttctttaatattattatactttcttttatttattttcactttaaattattctaaactattcattgagatcataattggagaccaccttaggtttgtatctttttttcttctctaaacataatcggagaccaccattctcgttctttgtattcccatttaaacccatatcgtaacccataagagaccaatattagagtacttctccatctttacaacctcatctaaattgatttcacaatcctaaatcagaagttcactattacaaaaaggagtattttcgtcagtttctagtgacacatatagtttttttgtcggtctacaaaactgacgtatataccatagtctcaaataattttttatttttcttaaatgacgcaaataacaattctcttcattttgaaaccaaccaaaaatatacaatattctttttaatattttgtgtcggtttgaaaatgatggaaaatcatttgtgccatataaaaactgacactaaaaacttataccgtcggtttttaaataacacacaagttgttgaaatatttttttcttacctattgcgtccgttataaaatgaaacataaatataggtaaagacaaattacagattttcatgtaattttttctacctaaatttaaaaatttaaaaataataacaaaataacttttaaataaaataaataaatttaaaaagtaatcgtttaaacttttctcaactacataatatcttaaactttttatattaacaccagcagaatatgttgacactaactaatccaaacacacttttcattacaattattcttatcatattatcattaaactttgaataatcaaacttacaattttactaatgtaaagattttgattatgatttttttttaatcgaactaataatcttatatatggggagtttatatatacacttttaataaaatacaatacgaaaattttaaattttaatattttgtgaaacttatataaataaagaaattcataaatagagcatcttcaaatctaaatataagatctttaattaatcaaagagaatgtagataatgacaataattttcatgacaaaaagaaaacaaacaaaactaaagaattaaattaaggagcatctccaaatctaaatataagatcttgctctttacaataataactacacattttgataataggattacaatgaaaaatatttgacaacaacaaccatatgagccaaattatcatcctatagttatatagtttcttaatattaactagagtcgatagtgtttaaataggaaaatccactcaattaataagacacacaagcataaagtaagaacaccagacctacaaaacatgaagttttaaaaagagaagttccaagcacaaaatcagagagaaggtaagccgaaagatcaataataaaatgaaaagcagaaatcaacaaaaataaaatctaaagaagaaaaattgaatcaaaaccatcaagaaaaaataatgtttctaaacaatattcaatataacagtaatgtaaatacaagtaataacgaattaaacaaatgtacatgcagaatagagattttactcaaaggttatacttctcaatattactactaaaagctcaactacgtacttgagcatccaagagtcctaattttttggtttttatttttttaaacactaatttaatttgtaataataatttttttttataacaagtgataataataagtttaaaaaaaactaaaaattaaaccccttttttttccaataaaaaattaaacctatctttgtatttaagaaagaaacaaaaggtttgtgatgccaattatttggttatttattgaagtagttttgttacatatatatataaattgtggtctaatttttaaaaccaatttccagtataaactataattacattacatatatgttatttttttttttatggtagataaattttagagttgtcaattactaaaataatttttatagaaaaatatactaaattttatatggaaaaaatgatattttaaaatgacatatacttttataaatattggtacatatttttgcaatctattcttctaactgattggcaataacaaaagcacttttattataaaaaaaaagtcaaaaggagtgtcaggtgggatacaggaagcaaatgatcgtgcacactgtaaactttcaatcattcatgatgactgatgatatatagtgtcaatttcttgtgttgtgagtcgaagaaaattgactctaaacccactaataggaaaggttttgaagttggtgggtcccattaaaaatatgctgattcaagtgtgatgtggcattcatcacacaacgtctactcatatctgactaggaaaacttttggagctacctttgtaaagcacaaagaaagaagtggagtgacctcctttttgtaaagagaggtataaaattattagattatacctataatcacatacatatgtttttctaaagttagtgaagacttgatttttatgtacaaaatcaaatttattatttataataattaatgaatagaaaataataagggcattttacataaatgtatacatttttttaaataattacaaaaaatgtgtaaaaaaacacaattttaaaaatacacatatttgaaaacatatttac

SEQ ID NO: 382572 - DNA, 2128 bp, Cannabis indica
ctccaaaagtctctacgactggcaagaaaagagcactccctccccaatggaagcaaatcgctcgaaggtcaattttcaagcaaccaagaccgggagcaggtggaaacacccaaaataataatttgagaagtaaagttaatcacttgagacacttggatccaccaaactccaacaattgctgtgatctactctatgtaaatgtgcaagctccaccagctaagaaaagaagtgtgggttgccaagccttacccagtttagggctggctgaacatgtacaagcactagactcaaggctggtacgctttcagtacaccctctcctaaggtatgaacagccaggctctagccaatctgaggctgcaactcaatcatagaaggccaatcaaccccttaagagtttattatggttagattggtaattctgttagagttagttatcgttagaatagtgattctagtattcattttcttttaaacataactggatgtaacaaaccacctcgttcttaagccttgtataaatactttgttctcatctaataatatttagattttttatcactaatctctgccatttttaatccatggctagaataagggctattgcatcaaggaattttggccaaactcctacgtcgcataactcatcttctatactagatgctccttcacaaattcttccaatcatacctcaaacttctgctatcactggagatatttccacttaacaaatcattgctccaattcaccctgctcatgaagataactctagcccttacttcttgaactctagtgataaacatggtttgaacttagttagaccattgttggacaagatttccaaccatgacaatgagattttgggctttcaattggtgcaagaaataagattgtcttcctcaatggtacttagccacaaccccaatcgatgatcctctacataaccattggctctactataattatatggtgatgttatggatcctcgacttcgtgacactttaaatcaaaagaagcatattattcttagatacagctactaaaatgttgaaagaactccattcgagatacgattaagggaatggtcctcacatcttcaaactcagggaagcccttatcactctacatcaaggcaatgattatgtaagtccttacttcactaaactcaaatttatgtgcgatgatactcaagaactttgaccctgcatcccatgtacttgtgctgctttgctttataatcttgctttcttgaatcaaaaatacgtactcttatttctaacaggattaacgaatcttacattcatgttagagctcaaatactattaattgacccttttccatccaagtccaaagtattttatatggttatccatgaagaaagacaaagaaaacttaaaagtcctcagatcccttcccttattgcttcatcaaaaaattcttctcaactctcagctcttgcttaatctcaaacagcatcagcaacgaatgcgattcaaggatgcaacaagaagatgaggccctattgttctaattgccacaagcctagacatctcaaagaaaagtctttctttctgattggatttccacctaggtatggagataaaaggaaaactgaaaaactcagccttctacaaatcaaccatctacttccactaatcctctctcccttcttgctaatttgactaaacacaaggacattcaaactctgatttcatagctaagttagaaactacaacaaacaacatccactcatgatgcatcttccccctttgcatccaacatctctggtaaactcaaactttctacaaaatttttatggatagtagatgttggtgctactcacaaattttctttgacatttctattatctcttagttacataatactcctatttctacttccattaaactcccatatgatataaacattaaaattaataaattatgttacataaaattcttacataatttatacttacacaatgttctatatgttcctgattttaaattccatttgtgtagtgtccccacttttctccaaacattaaccaacaacatattttccactagtgcttgctgcattctgcagggttcacaaaacaggaggattgggattgctaaaagagttgg

SEQ ID NO: 382573 - DNA, 1424 bp, Cannabis indica
ggttacgtctgattaaatgcatcatgtaccagactaatttcatatgatttaaaagcttatgatttcctgttttgcctttttgattcagcttctttagttggttcactgatactcaacagaaagatgacgtagaggaaatccatgatgaggttagttctatttgcagtaacaatgttcatgctaatgtagtatttcaaattatgttcttgaaccctgtgctaatcttagctcaattttgctgctttgcagattgccgatataattaaagaggatttgtggccgaacccccttacatatttcaacaatgtagctaccatttaaacccttttttagtgcccagcctatgttaccttccaaattttctaacattaattgattgcctttctgtctcaggaccctgatgaggaagattttgatgaagaagctgatggagaggtaaataaaattgacttttttgtttgtagtgtaactagtcttgtactcctaattgtgtaaatgggattctgtccaactgtaaaccagatgccattttcacactggacacattttctaaatgaatataatctccatcctgtttgcaacttataggtgttgttaatctccattttctttctgaaaatttatactgttggcagggaaaggatgacaacgaatctgaggatgatgacgaagatgatgaccaactagaagatgatgacgatgaagatgaaggtgacggcaagtgatgttttcattttgatgctggcggtctctcttttgttgctcagctttatgtaaagtggtatgtagtggaagtggttgctataaattgtcaaattgccttcaggttatagaggagggtggccatattaactatttcctattagcaatctcaatcgtgtagtcaaactcattgctctcgctgttggtggttttctgaagttctttctttttttcttacattttgacctttcatcgcctcttaccccactgtttggtttttattttttggccaatttatatttaaataacaatgaggttattttgtggtatcttcctccatatattatataacggtaacttgccttcctttgatattatcattattatattgttatctcatttcagatgatgaagttaggggtgtgttgtactgtttgtgatataaaggatcttataatttgcagctgattatctgactaggtttatttttgtttttttgatgattgtttaaccggattaggtttataaagaatactgataacattacatacaagtatacaacgatatattggtgactaatgctaagtcagttggcagttggtactccatacctccgtcagtggcgaagaatcaaaattaatattacttaagtttttttacggtaataatacttaagttataattttgaagtttctgtaggtacttggttaaataaattgtca

SEQ ID NO: 382574 - DNA, 2840 bp, Cannabis indica
attactatttgcaagggctttaactgatttccatttttggaagagactaatagggatgaattaatattctaagcgtactcgttggtgtttatttatgtacagaggatagtaaaaagataccaattttcatataaaaactgctcatccttgcttatagctcataagctaaaatgacttgctaaactttttttttattacaacatgtgagccatgacctttgagagcatttctatgtaatattttgtatctatttgtgcataggagtcaactcacaaatagtaaatccttttgagatttaacagcatatcacaatgtttgtgtctgcctgtaacattttaaatgtcttggaaattttatggagttgtagtactaggtatgatgtctatttgttctgattaacgtgtttcattaaaatgtaaagtcttgcacagatatagagatgacaattatgcataattgggtgaaatgcatttgtggattgattcataagttgtaagagttactacgaagtaacacaaactaaacctaacatgtttgaatatttttaatctattcaatgataaaaaaaacaaaaaattcccactcactactgatacttccatatgttgcagaaggcagtgaacagaagaggaagagaatgaaatccgattccgatatttcaagacactctccctctatgcgaacccacatagaagcttatgctactattaaaggcgaacaagtatgcatgcatgcaactcttttagagttctatgaaacgtgattctgtattctttcattggtatgttcatgacatcctgtataatttgtattgtttttaggtagcagctaaggtaaatgccggagatggtgacaaggatgagtggtttgttgtaaaggtcacacactttgataaagaaacgaaagagtaagttcagtttcattagatgcaatatatgggttttcatgtttacctataagtttagcctcacgttatgttggactctagtgggtcaatgttaacatttggatcccactttttccttactcgttgagatactttgtgcagatttgaagtgctagatgaggagcctggtgacgatgaagagagtactggtcaaaggtaacttttatcaagcaaatatttacttatgaaaccttgtgaatttatgtggatggctatatatatttggtggtgctccgttccctgctgtgaattaaattctagatttggagagttatcagattttgggttagtaataatttccactaaatcacaactaatatatgtgttttaatcactgataaaggattttgaaattatgtttataaaattatagcattgaattgattctaagttgcaacttgcactttaatgataaagtgatatcttatcatattatatgtaccttatttctattcaaaggatgttttgaagctaagttcactcacctagctcagaggctttaaattccatcctgactgttgtatacattattctatcattctatggccaatttagtaacttgatcagctgtagaaaagtacttcatctgaacaacctttgtctacttcattgttctcagaaggtacaaagtgccgctatcagctattattcctttccccaagaaaaatgatccttctagtgccccagatttccctcatggaagacatgttttagcggtttatccaggaactactgcactgtacaaggcgactgtggtaaatggccctcgtaaggtgataattccaactattttactttcattgtgtgattagcattcttcaaatctacattgcattcttctgtattctgtttcccctcctcaccatgaaactaacaatttgttatactttccatgttgcggaactcacccttcaaccattcaatcgttttcagagaaagattgatgagtaagtcacatctatatgctttgtgtatagtcaaataacatatgatcaatatgaaatgtttcctcagaaaatttcatttataaaaagaataatttaaacggtctgaggttcaagtctgttggtacttacacaataacttttagtattagtcaaagagtttggtttacaaaacatgatatatttctctgtttttcgggtgcagctatgtactcgaatttgatgacgacgaagaagaagatggatccttaccgaagagggaagtgcccttccataaggtggttgccttgccggaaggacatcgacagtgattactgttgttaataatgaaaatggcttatgattttgtatagcttaagccttattgaaaactatgtacttgggtagcattatgggacaagatggcctttagctgttttactttcatatttaatttcagcaataatactctaaaggctaaaggctggtaatttatttagttagggataaaactacacaattttttaagtacaagaactgtcttcaatctaagtacatatattttttatattgtataactggtatctagctatctatctacctgcttaataacacaaatattaagcaataagttaattttgaatgaattataataatttaatttgtttatatctatacatttaatgtgaataataatttttatttaaattaatattagaaaccccagattattcaacctcagtttgatagtagaagatcagtaaacctacatataagattaagcaaatccaatcttaattagtcattaataatatatatgtatttatacatactagcgaaaaaaaagataataggtaaatgtaatattactaaattttatttctataaaaaagaaaagttctctatactaattttgtatcagtaatttaataatgactttacaatttttttttttaaaaaactttaaaaaa

SEQ ID NO: 382575 - DNA, 2253 bp, Cannabis indica
ttaaaagaaaatagaacaacgaatacaaccatggtttgaaccaattatatttgttttgagtggttgttgattattttattagtttggttggttttgaatttttaaaaaaattatagtaatggttattagtttgaaaaaattaaaaatttggaccaaatcaatccgtaaacacccatttacatgattattaagttaatttacttattgttatctatttataactagagtctagaacttattttctagcccaaactctctatcttttttttttttttactggaatatcaatttgttgctattaagtgcttaatagtttacctcaatgatgaaaaagataatagaagcagggtatgatgattggaacttgattatataaaacatttaaaaactattcatattcaacactaatgatcaaataagtatataaaactactaattaaacaccatatattattcaaaaactaaaaacttacatatcaataaaaacctaaatataaactaacaaactaaatcttaccttacttttaacttaaaaagatactctcgcgataattagaaacataagaaaaccctatttgtagttctatattttggagagtcttactctttagatcataaaagtaaagagtattctttttatgcatgtatggttgaaataagaggttaccattatgtgttacatgaccaaattcccatataataatatctgatgcacattgtagcataggttgggtacccaagtcaagagagtaatatttagtccaagaatcccaaactccatattccttcataacccatatttcaatagatgaagttgatgatgatttagtgagtagagatagacacccaaacaagttacaaatacttttaatagaaaaccctttagtttctaaagaggaaggaaattcaatgagcttgaattcctcactacttaaatcaaaagcaacaaccttagtagttaaatcacacataatttctctaaggctataatagattgcccaatgtatagagccattaacaacagttgaattttccctattagggatttccaaagtaatttgcatctcatcatgatcttcattagagaatatgtcaggcatgtctatagttttccatgaatttgttttcaaactatacacacaaattttttcaccttttcgaaaaaaaccaccattgagccattttggaaactgttgaccaccacatgcaacaaccactttgaaatcattattcaatggttcgtacccaattccatacaattttgtatatggacacgaaacataaacaggagatgtaggaagtttcttacacttgtcaatagctgggttccaaagattaatagaataataaggatattgttgtagccaacaaatcaccccattatcactacccacaaatttaatttgcctcttgttgttataattgttcttgtaaatagggaatcgtttgtatgaaatttcactgaaattctcagaattacgaactgagcacaacattccatcattaagttgaaagcataagagtgtacgaggtagttgttgtttgtggtgaagaatcatgaattttgggttgtttattttggaaaaccaatgtttgttcacccattgaaattttaccaaagattttgggtccaaccttaacactatttcttcaattatgtccattggtaaatctccaaaattcgattccaaagtagtgtctgccataccaaccatctaacaaaaactctttctaatgagtaatgataatggaaagaaaaaaaaaatctaaatttgatgaaccttaacctaatttgatcaactaaatctcttttatatgttgcttaatttttttttaattattttcgttatttttttttaaatttaaatctaaattcaacgataattagtataattagttagtcgtataaaaaggataataaaaaagatatttttgttttaattaccgtgttaattgatatattgttggtgtgtttcttattaaaacgaaatcatatactaaatttagtaaaaataggccaggtgaaactaaaaatactgaatgtgattataatattattgttttttaaaaacattacaatacatatctctttatatctttatatggcattacaatacgatttttttttttaaaccaaaaatttaaataacgtttaaactaataattaaaacccaaaaaattaaacaatcttttttttttaaaaataaaaaaaaaaaactacaccaatacccactctaaaataacaatcatcaa

SEQ ID NO: 382576 - DNA, 2747 bp, Cannabis indica
ccaaagggcaaatcgaatccaaagaaaaagttttttttttttttttttaatttggcatagaaattagaaaatagaaagtatgggattatgggtggaaggtggactaaagctgtcttgtgtaagagtgggacccaaaagggtatcatttcatttggttctgtaaataaatatacacaattccaaacccataaaaaaaaaaaaaaaaaaaagagagagagaaattctttcgtcttcacaaagcaaagttgggaatttttcccccaaaagatggatgtatttatatatagattgcaaaatgagtcttccatgttatatgtcttgttagccatcattctattcatctcaaccacgagactaccacaatggccttgctcttctttttcatcccaaaattaaaaataaaataaaatgacagagaaaaaccccactataacatttgataaattcccatacaaatgttaaattatggctgattaatttttaattcatttctacactcaagtattgtaattaatgctctctttcaaaattatatatatcaaattaatacaaaaataaatgtttgttattttaacgatatttaatgatgtttaacgatactttaacgatgatgttatgtttgatttttggacaaaaaataattataaatccctgtttaacaatataatggcctagtggtggaagcatagtttttgaggcaagatcggtgcgaaaaatgatgaaaatcgatggtgctacgatcgcttacgataaattttataatttttttagtttacataccttttcacttggatgttagtacaccaatggaacctaacctaaagctgtctcaagatgaataagatagtttggcagatcctacactcgataggaaatcattgggaaattgcagtacttagtcattacaaggcctaaatatcatattcagtcaacaagttaagtcagttcctaaccactttaagatccaggcacctcattgctgctcaaagaatcctgcaatacataaaatcaagtctagggcagggtatattactgtctgcagcatctaaaatgcagctaagagcattcacggatgctgactgggcaacatatgtagacactagaaggtctacaacatgattctgtatatttcttggagattttatcatctcttggaaaagtaaaatgcaacatacaatgtcgagatctttagctgaagctgaatatcgagtaatggcaaacactgcaagtgagctgatttggttgttgtcattgctcaaagaattaaaaatagagcacaaaggacctacattaatatatgtattgtgacaacaaggctgctcaacatattgcagctaaccccgtattttatgagaaaacgaaatacatcaagattgattgtcacgataagggaaaaagtttaagagagtttgaatcaagacttacatgtttctactaaagaacaactagctaatattatgatgaaagctctttttcttaatcagttcaaagttcttaaagacaagattagattggtagacatataccatttatcttgagggggagtattaacttcagttagtttgttatatagaaattagttatactgatgtaacaatttgtataacaaatttcttctttgtatttagagctatatgtaagttcttagtttgtacatgttttggtaatgaataacagaacattcactctttctctctctattttacatctttttctctatcaatctttcgcaactaatacatcatcgctaaagcttaatttgccttttttttttctcccaaaaatcaagtattcatgaactattgtttaaacatcgtttgaacattattattatttttttttgctttaaaattaagttttcgtatatagcagcattgcaagaccattcttaagcatcacttatttaaccaaaatttgcaatttgcaatggaaaaaagtcacacattcaaactcccattaatgatttattttggtgaatcaatttttcacgacactgttgttaaacatcgatgtactaccattatattttgtgtaaaaagtcaagtttccatgttgtaagtgaattgtgttcataacatactatcgttaagcaacaattaattaataacactatcgttaagcaataattaattaattgccatcgtttttttcttgggtaaaaaatgaaattgtaacatcatttgctaaactactattgagtatatattatttgtgaaaacattaagtattaaagcatcattaggcatgctttttagccaaaaaaaaaaattaagttttcatagcatcgttgttaaaagaacattgttattggacatctgtggtacttaggaccttctatacgtgttattttgcgattgattagcgatactttctgaaagttatatgagacccgatacttaattgtaccaataacaatattgacatgtagaaagatactagacaacactgatgccttttaatatttctcttgttaaaatattatttaaatgtaatcaaacatgtttttctcttaaaattaaatttttataggaccatatagctacactatctttaaacatcattttcaaattttaagatttgaaaagacattacaaaaaagttatttttagtaataattttttactcacaacaaaaaaaatttgtgactaaatgtgacttttagtcacaacaaaaaagttacttgtgactaaacatagtacttagatacaaattgtcactaatttagttttagtcacaacaagtattgt

SEQ ID NO: 382577 - DNA, 551 bp, Cannabis indica
gtgtggttgacttgaagagtagttgcatcgacaactggcaaaaaattgaaataaatgcatcgacgataattttaatttttcattgcattgattgagttcaagaatgtataaatattaagtttgcataaggagtagtttaaatgagtagtatgtgtggtaagtaataatggcaataataataacaatagtaaaataataataataataataataataataatttttatttaccactatatacatttatatgttagtataaatatattatatagtgaattttgagtccgattaagagctggtgggccttgacttatggaggatggtctttattgagttaagtgtcaaagaataactaaatgggctttggtctttcaattgtccactaagtagatttgagtaaaatttagggaaatttacaaaattactagaatttgagtgaatttttacaaaaatattgtcacaagaaatttttctcaaaaatactgtgtttttataaaacaccagtaaaacacaaagtagaacaactaaaaaataccagtagaacaccagtg

SEQ ID NO: 382578 - DNA, 2014 bp, Cannabis indica
aacgcactttttgtttttcaaaaagtcaaaaatttttttaaaaacaaaaatttttactttcaatttttggagatttaaaaaattagaaaacaaaagtgttaccaaacggcacctatatttataaaactaagaaactagaaaattgtaaaaaattcttaaaaagttaaattgtaaatttaaaataaatcaaaaaaaaaaaatgaaaacttgtagtatcaacttaattccctataagtactaagcttgggttgaggagctatccatctaaactaccaataaaatttattactttttaatacaatccttttttaagctaaactattttgtacaatatacacaaccaactattaagttatcactgtactaccatcatcatcatcatactacactactagtcactaaacacattgcaaaactatcataaaacaaatcacaactatttattctatcccttttaacaaaccattaaatgacaaacatctttacttttcaacttatatattttaataatggatttttttaaaatttaatgtgaattttctttgaaaaaagaaaaaaaaaatcattaataattgttgatgtgaaatgtgaatatcttaacctacggctacgtacatatatatactaacaatgcaaatagaatattggtggacgtacacatattttttgagaccactatgcatatataaatattcattgatcatattatttttgataattattggtggctcgtgataattaaaggcatgattatatataaattaaaattacatattttacatatatatatgtatgcagtgtacgagtggggaatgaaataggagcaggtcatccaaaatcagcatcattcgcagtggtgatagtaacattaagctcatttctcatctcattagtgtttgccatccttgtgcttgtattgcgccacgtcatcagttacgcattcaccgatggtgtcactgtcgctaatgctgtctcagaccttgctccttttttggctgtctctattatcctcaatggcattcaacctgtcttatccggtaacaaaataaacacatttttttttttttttaactactctctattccactccactacatcatttttttaatatccatgataatgataaatagttatatattatataattaaaaaatatattaaaaaaggcaaaacagtgacaaacacatgcatgcatgacacaaccatgtatccaatccaacataattaattaatgtacaattaaatattattaaaatcgatttaaaggtaatctagtcatattgatgtgattgtatattttaacatatatcattaattttgtgttgtatggatttgttatttcacatgtcatgccgctaatggaagtaattagtataatgacaaacatttcagtaatatggagttttcattcatgagggggtgaaattagtaattaacaggttaaccaatcaagacctaaactcatgaaatatatcaatattctttttttttcttttctttttgcaagaaagtattttacttttaagaacatcaatacattttcctgtattatttgtttcagattattgtcaaatatttgtcatatatatatatgactcatatatatgtattatatgatgccacatcatcatctatgtacgcctttgtttaaatttacaattaaatagttcacaaaaaacagtcaacagtatgtatgtttagtacttctactacgtacttttcgtgtatcatttaatattttatatataataagacaaaccaaaccaacatgtacaataacaaaacaacaccaaacacatatatagttgaacgttagtttgacactatataatatacagtggcggagagaagagggtatatatcctcaactttttataatactaattttgcatgtgaattttttggaattttatattaaaaactcctaaaaaaatatttttttttcatatatcttcttacatatttatttaatatttattacttaaataaaattatatatattatttatttatac

SEQ ID NO: 382579 - DNA, 1760 bp, Cannabis indica
gagagagagagagagtagtgagaaaagcaaaaaatggaggatctacctgaggaatcagagaacggagaagaggtacagggctcgagcttgactatggagaaggttgctgcagctaaacagttcatagagaatcattacagagctcagatgaagaacattaaagagcgaaaagagaggtagcgctttggagtttgtttgaattatatgtaattttttttattctgttcttgttttgttgttgagaactaattagctggagaaatgttttgtttgagctatgaatttttgatgtactgtatttttttttttttttgtgagcttagggcgtaatatgtgataatcttgttgttagatctttgtttttgtttgttttttagttagttatgtgtttggtgaccgagaaaataagtgagaaaagagaatgtgcgagaacaggactttttttgtgttgtaatgattttaattgaacttgtgttgtttggtttactgaaattattggtacattgaaatcacaagaactttctctgacaatgagattgaagtttaggtgttataataatttaggtattgtttcagatttaatgctgctaaaaatccacatgattggtgagatattatgattaatctcattacttgcacagttgttgaattatatgtttttttttctttctctgttattgtttggctgttaagagctaattagctggagaaatgttttgtttgagctatgaattttggatgtactgtatttcatttttgttgttagcttagggcatgctatctgatattcttgttgttagattttgtttttgtttgttttttagttagtaatgtgtttggtgacttagaaaaaaggtgagaaaacagaatgtgcgagaacaggacttttattgtattgtaattatttcaactgaatttggcgaggttttgtttactgagattattggtacattgaaatcacaagtgcagacattgagagttaagagttgttgatggtttcagtaatgaactcatttgtggtgttttaatttaggtattgtttcagatttaatgctgctgaaaatccatttgattggtgaaatgtaatgatttatttcattactagttcttagaatgtcagttataaaatttctgatccagtgattttggataaatttttgtaatgatttatgtgcatttttcagtactcaatgttttatccatgaagtgtatgaataaagaaacctgactttggtacttatgaaatttgtgtttatttatacttaaagtactacaatcaatgttgattttcattctctgtgataaattttgtattgcagacgatggatgttagaaaggaaattggcttcgtcagatgtgcctgaggacgtacaaatgaacttgattagagatttagaacggaaggagacagaatttatgcggcttaaaaggcacaagatatgcgtggatgattttgagcttttaaccatcattggaaggggggcctttggcgaggttgaagttcttgaaacgtgtcatttgagtttgactctcagattcttatggctttcttttttcatatcaataaattttgctacggaagacgtgccagacttttttcatctttaaatacacaggctcttttattcaattgttttattttatgtattcatcatgtaaaattttgaattacaggttcgattatgtagggagaaaaaatctggcaacatttacgcgatgaaaaagttgaagaagtctgaaatgcttatgcgtggacaggt

SEQ ID NO: 382580 - DNA, 2038 bp, Cannabis indica
agaaagaaagaaagaaagaatatatctctctctcatgatttccttccatccctattattgcatatctagatagttaagaaaacaaaaaaactagataggaaaatgaaatctatattttctcactcttacgattcacaatcaatttaagatattgttgcactgcgatctatcttatatattaagaaaaagttttttttttttattatcatgttcaaacataatcaaaacaatccttcattacaaaaaccaagacataatataataaaaaatcacataactaaaccaccacagaaaaccagctataattgagatctcacacctactaagatatagtcaaaagccatgcaaaaccaacgactgaaatgtggcaaacattgaagtgttttcatcgaacacgtttcgattgcttttaattgatccactcatacttttctctcctttcctttcttccaaacacaaattacccaacaaaagaaaacatcagtaaagcttcccaaagtaacacaatcatgatcaccggtaaggatttctatttagtattatcagcagtggtacccctttactcagccatgacattagcctacgcctcagtccggtggtggaaaatcttcacaccggaacagtgcgccggcgtaaaccgcttcgtggccataatcgccgtaccctttctcacattcaagctaatgatccacaacaacccgtacgagatgaacttgaagctcatcttagctgacacactccaaaagattgtgatttttgtagttcttgtagcttggaaaacgcttagtaaaaaagggagccttgagtggaccataacactcaactccctttcaactctgcccaacactcttgtcatgggagtccctcttttgaaagcaatgtacggtgatttttcagctagtttaatggttcagatcgtcgttttccaaggaattttatggaacactctgcttttggttatgttcgagtacagagcagctaagattttaataaacgaaaattttccagacacggctggctccattgcttctttcaaagccgatgcagatgttgtgtcgttagctgatactcaagccgaggctgagattgacacgagtgggaagattcatgtgaaggtgagaagatcatcttcgttgtctactgctgctgctaattcgactctgttgtcgtttaggaaaattcatggaatgggttctgcaaagtcaggggcttcgaattcgaccaatgggcttagtggggttgagatttattcgacgagatcttcttttgataacaatcaaggtgcagactttggtcaggagtttattaaaccaggaagtggtcgaagtgatgcaattcaactccatatgtcagtttggaactcgtccagtgcagcttcgagttacaataatcgatcattctcctctactgatctccatagaaacacatttggtgcttcattggatgatatcactagaaaaggacctccttctttacgtggtaagtcttcattttgtttgaacttttctatttagtacttatgcatgttttcttttggttttatataaaaaattcttaccaataaataaataaaaaaaaacaagttttataaaattattttgtttttattaacaaaaattaactatcatataaatttcaaatataaacagtttaaattttttaattaaaaataaaaataatatactaataatggctacctaaactctttaccaaatttagcttttttttacgatatcaatattacaaaagtaataataattaactataaatttagttaaaatagttagttaatttcgattactgtatataattattattttattagtaccattagtggtgaaacatgaacacctaaattatttctaaataatgtggaagtttttactaaattattaaaaaataatatgatctttttcttagtgaaaacttgaagcttccaaacaattgtaataagttgaatatttttaaatatataaataagttatcaatagctgatttttgttagaattaaattaatattaatttatataaattcact

SEQ ID NO: 382581 - DNA, 1711 bp, Cannabis indica
tatttgttaatttgtgatcagctgcaaatgtattgttccttgaatcaccagctggggtaggattttcatactcaaacacaacatctgattatgacaaaagtggagatgctaacacagcagctgataattatttatttttagtcaaatggttggaaagatttccagaatacaaacacagagatttttacatttctggagaaagctatgctggtcattatgtccctcaattggctcatacaattctctaccacaacaacaacaataataataataccaacaacaccattatcaacctcaaaggaatccttgtatgtcttcttcttcttttaattatatatattattattgaaaaactacaaaataattagttatatatagtcatcatatattattctgtggaccaatatatgtatacctaagctagctagaatcctaaactatatgtcacttgattggggcccatatatataattataaattgcaacctcataattattaactataaatatataaatattaattaatatagtatttgtatatgctatatatttagagttgctaattaatttcagtttacctaattaattttctaaagaaaatatttaattaattgcgataatttagcaaactaagactttgatagtttattatgaaataattattaattagttaatttatagcattcatatatggtaattaatgatgaaaattcttctttatatatattttcctttttttttcttcactaattctaagatattaatagaaagtcatgatcatgaatattacccaagtagttagagagattcattatatgatttatgtattaaaagagggtaacatgcaagtgggtagggtagattgcatagttgtaaaggtactacatattcttagataattggcttctatataatataatacacacatgtatattacataaatatattattataattaataataagaatttttagtataaatacttaggtttaacttcgattagataaatatttaaatttaatttttaaagttataattttagaacttttatagatacttgattgttaaataattaagtaaattgtcacgtaatagtctttatttggtttagatttattaaaattttgttatttattttaaagattaatttaaatatactaataaaaaaagtgaaatgtgattgatcaattaatgggtcctatatattttttctaatcataacaattttgtgttataatttctttgttagatgattaaaattgaacaccaaaacctttttctctctatataataatatgatatgatatattttgacttttgttgttgtcgttgttgttgattagattggaaatgcagtgattaatgatgaaagtgatgaaagaggaatgtatgagtacatgggatcacatgctttgatatcagataaatcagccaataccattaaaaatcactgtgacttctcacctaaggcagctcagtcaagtgagtgtgatattgccatggaagaggtcaataaagacacttattatcttgatatttataatatctatgctcctctttgtacttccacaaatctcacttcaaagcccaaatcagcttcggtaagtatatatattacttataattatatatataaactatatatatatatatatatatgtatttggataattggacatatatatatgcatgcatgcaatggtgaacattg

SEQ ID NO: 382582 - DNA, 2158 bp, Cannabis indica
ctaatgacatgatgactagtaaagaggtgtcttgcgcgctgcattttatttgcatactggaaatcacgcaaaagatgtggctgttaaaatccagattgtagtggatagggtatttttgtaaagtgatcataatgaacagctacaatccaatacatgctttttggcagtattaactataaacttgcgtgggaacaggacatgggaaaaaaagataatatcagttaggatgcatcatacataaaatgtcataaagtggtctaaccaaaactatttaatggagaagcacagagagaaacacatattgggagttaaaagggaaaaaggagtcagggtaggattcatagacagataatacaaggtgatgaatttgtactgcaatcatgtcaacgacaccaattagtgccaaacttaagttgaaaatgatatcctcttaatccttacaattctttaggcaaaaaacctaacagcaacagcaatgatgcaaaatcaaaattaaatatcaaaccatggaccttaccacacgacctactcagtaattcgtaaacaagacactcttgcaacatttgcctaacaaaaaacgtctcccagaactcaatcgaacttcacattctccgttcaagttacagtgacagtacattacaaagctaatatctagaagcttttctcaagcaacaactagacctaagataaaattaaatcgaaccaagttcagcttcgtaaaagtctgtaatgataaactcaacattatctattctacattccttgctctagaaagccagcaatgatttctcatttacaagcatgctacaaaattaagcttaataagtaatgatgtaaatatacttgtataaaagaggaaataagctcgtaatatacttatatcattacaaagttcaactacttagacaaatatattcagaacaactattagcacataattacacgcattaataaccagaaaaacgaacaaaaactcttttcttttttttttttaaaggcaaacaacaaatcagagaggggaaagatttgtacatgtcggtaatggaaatacggagaagatgggctaaactggaggaatgttggagaacgaaaagcctttgtaacctttgtaagcatagtacgcaatccgcgtgtaataaaagcccggaatgaacaagatcgctccaagtattgcaaagaatgatccttaatttccaccaaaaaaaaaaaactcgaaattaaaatcagaaaccctaattaatattctgtaaaggagaatgatatggaagcttaccgtgagctcggtcaccgccgatacgattgtaggccatgaaaatgccgagaacgatgccgagggtgccgaagaagagaagtgcgacggcgagcgcgatctccttaataggagggcgattgttaacggtgtaggaagtccccatcataatgtcctcgtccgtgatggagaaggcatggtcgacgtacgccattttcgaattcggggaggggagattagattaaggtttctgaaattgggcagcaagggaagggagctgagtcggattgcaggagatagatgttgttggattggatcgctgtttgagtaatgaattgtacactaaatgctaataatccgtgtgcgtgttccggtggcgtgctgcgtacacttgttgaggtaaggttaggttgcttagatttggaattggtaatagattaatagaatagagaggatttatcctcactcagacggaggtaggaagagggaaggcaacgtaatgtgattttaactttcaagctcatcttgttgttattttaactgccgttggatttagaaacacaaccaatcatgacccttccctatcttcactttcaaccatttgatcatacattctaaaccctagttaattaggcacgtttattaaagcgtaatcattatcgaaataaattaataggagaaatgaaaatgattaaaatgttatgaaatcaaagttgttattttaacatgttatttactaaattgatcggaaacagaatcaaattcattttattttgtttgtattaattagaaaagataatcggaatattttaagttgagcatattacccttaatataaaatttatatttttcttctatttattaaataaattaatttatataaaaaaataaataaattcataaatgatt

SEQ ID NO: 382583 - DNA, 1954 bp, Cannabis indica
cacagggggaaatccctccccaacaaaggtctgcgcagaagacaagtttaaacgggcagccttggccaaaacatcaacataagtaataaggtccctactaatgaaattaacatgacaacaagaaaaagaggatatcaagtgcaaaagggaggaaaatagagcaatgaacttccaatgtggcgatttctttaagttgatagcctccaccaggattttggaatcagaaagtatagagaaattatcccaaccgatcgatgatgcccactgcagcccaaaaaggacagctttcagttcagcttccaagctagaatcacaagtaccggacgattgtccataccaccaatgcgtcgactgttgatcgagagccaccattgcacaaccaaaattgccatcaaggaaggaaccatccaccaatagacatttgtctgaatgcaaaacaggaagagtgggattagacaaaccagaaccaatgaaagtcgaatcccccatctcctgattcgacaattcaaagaaaggacaatggatatccctcttaattttatccaagctcggaacaacattaggaggatgcatcaacgcattcctgaaattccaaatgcagttcatcactataccagtgcaacataacagacgatttctaccctcagagtccaagtgctcaatgagattgaagataacctcggacaaggaaatgccagggatatcatccattctcaaaggcagggggaagagaaccataaccaacagcaaacggacatctgcagaataaatgcaccggagtttcaggtgccaattgacaaatcgggcatatgttattttccatcgccgaaattctgtttcccgtgggcaaggagtcagaaactgctctccaaatcatgagactcaatcgcggatgtaccttagaataccaaatccacttccaaagtttgctaggcacaccgaatctagactctgatcaagccaataagcccctttaacactgaaacacccaacatccgagtctttccaaataaggatatcatgatccccattcctatcaatttgtatggtacccaattccgagccaaaaagaaaactcaagtaacccaaattccattttctcgttcttctatacataagatccgctacacaaagcaagttgggcgctttttgtctaacactctccatcaaagctcggaattcctcataattcatccaagggatccaaggtggccaccacacatccacttcctcccccgaagcaatgatcgtacacgcccccatcacagatagttctccgagcactcaaaataccccgccaaataaaactgtcagaatttttctcagtgatgctccaaaaggactgtctcggatagtacttgcttttgaaagccttacaccaaaggctgtccatcttactagccaactgccaagctagtttagataagagatcatggttaatatcttcgaaacgcctgaatcccaaaccaccaaccgatttaggttggcataaggaatcccaagacttagcagcccaaaatctcttgttttctggtgagtcgttccaccaaaaccttcgcaccaccgcatcaagatcacggcaagtagtgagaggaatttttaaagttgacatggcataattcggcatagctaaagccaccgaattaatatacaccactctaccagcctgagaaagagaacgaactcgccaaccttcaagtcggtcccagattttagttttgaggaagttgaaatccttcctcttgcttcggccaaagaggaagtgattcccaagatgcttttcagtatcgttaatgacccccatccttagaccagatttaatagacgaccttagattattagcacaatttttcgaaaagaaaatcccagatttctgtttgctgcaaacttgaccagaccaaacttcaaatttctggatacaatgattaagtgtctcaactgttggaaattattt

SEQ ID NO: 382584 - DNA, 2971 bp, Cannabis indica
gatttagtttcccattttttagttatatttttgtagaaataagaattcatcccactaaaataaataactgaaaaattcggattgacttttttttttatttattttatattattttataacaagtataacatatttctccggagtctctccaaaataaataaataaattaattaataaaataatttaaaggggagacgttgcaatgttgcctgcctaacattcaaaaaaaccattctgcattttacttctctcagtttctcaattcccaaacactaaatttagccacatcaattctcttacatttcatcatcttccacactaaaacttctttcaatttgtcccatatcatctatcccagccttcaatcgctccacgcttcacccattccttccgcttctaccgaatctttcaaatgttgagcagaatcggatcagttagaagctcttcactgagtttagggtttgggttagtcaaaaggtggttgtggagtaagagcgacacgggtcagaggttcgcggttctttggggcaatggtgactatggcaggcttgggttggggagcctggactcacattggagccctgctcccgtgctctgttcggcctttcgtgatcaaggcctccgagccattgcatgcggtggtgctcataccctatttctaacaggtaatatgttttcacctattctttgcatttcatgtttgctgttattcactgtcagagtattaacacaaggtagtggttaacataacagcctctatcactctcttgaattattttccttaatgcacagattgagcatttaaggaaacatggagaaggaaaaaactagctttgtgtttggggtcaaatttgaccactttgaagtacttgagggtcaaatttctattatgacatataagtttagttggtttattgtatagatcagtttgaatttttaacgtctgggtacttactgttattgtttgtctagcatcatccactttgattatggtagaatagagattattagattttacaatatctgtcaacagttgtgaagattgtcagttattttcaggtagtggctcataaactgtctcctactttgacagaaactggacgcgtctatgccactggtctgaatgattttgggcagcttgggatatcagatgatgcaacttacagtgctgtatgatatttctgtacctgtctgttatttttgtcacagcatctttaaacatttgctaaactcaatgtcatttttgtcagtattgtcatgtgaaaattaatgtcatctttgaaacttttctgtttacataataatccacttgattctttgattttaagtggctccattgtcttgtgaacattaactactgatgaattagtatttgtggtaccttttgagatacactttatgtaacttgtgaaaagtcatatatttgttgcttatttgaaattccattcatcttgttttttcttaaataaaaataaaaaagaaaaatgatagtttcttcttttgtggaaccataactaagaaaggttttggttttggtgaagggatgaacagtagtattaagtaacaataaggagacttttttattggctgtattttaaaggttaattgggtatacatgttaagaaagtctttataactttatgttgaatatgaaattttgtattgattccctttagtctatctcgtttttttagaacttcgtttaatgatttaattaaagaggattttttatttacattctgataggaatttctcttgtcaatgtcatttctacactggaaaaaaataatctctgaatgttttattgaaaatgaatgaaattacaaagtaaaactccatcaaacttttgagaggtttagccaacaagagctgggctctcaaaacattacaccaaaatctgagtaagtaaatccaagcctacttcggctatttatagactaattaaagaaatacaagtggtaactaattcctaccaaacatttagatcttcttatttattataagtgccgattgtgtccttattcatccctctcttcatgtgttattaagtagaggcctataacattcatgttgtcttttatattgtgtttgtttcatttatatttaatgaatgtttagctatgttacactatgcatggatttgaattggataatctgatgatgatctatatatgtgattcttagagataattcaaaaattggttgcaaggtgttagtgtgtggctttattaccataatttcaaaatatgggtgatactacatgcggagaaaactaaatgattttagacttccgaattctttttagacttttgggatgatgagtgacctttgaggtttacttatagtccaaaaacggtgaataagtgaagtcccaaggtttgatgaggctaggaaagttagattgtgtgatgaggcaagggatgccttgaggcatggctatgactatgaagacccaacccaatataaatctaaattcatggagatagaacatgcacatgataatattttttaggagaaaactagaagcttaaccctatgtttggaagttggattttggtggggaaagaaaaatgtaggaaaaaaaagaaagaagtggaaaataaaacataaaaaattctcatatttagtatagaaagaaaaattgtatggaaaaacactcaattcaacaaaattttccatatcaaacatgaaaaattgatttacatttttgttatccacactttttttcttacatttttctttcctcacccaaatccgacttccaaacatagccttagtaaagaacctcaagatatagaaaactagaatataatgatattttgagaatctttaatttcaggaccaatgacagttgaacatacctagataatggtttataggatgagcttttagtttaggtccctgagagaccctactcttcaggaaataatattgtagaaaaaagtgattcgaattatgtgtatatttcata

SEQ ID NO: 382585 - DNA, 1941 bp, Cannabis indica
tcattttctctgacacttctgattgtgactgcagttaatagaacttctctcggttcgtgctccttcaccagataaaaaacttaagcttctgaaggaaattgctgatgagcatgaagtagattgggatcctgcttcttcggaatctgagtttttcaaaacacatgaagatttattggtaaattatcattattttttactgcacttgatttctctttttatattttcgattgttcacccttctttcgtatattgttttcttttcagaatggcccggcacagtttgtcagtgggtctaaagttccccttccgaaggaaaaacacgacgaggtatcacagactgcttctactcaagcccaccaagaggagcatgattccgataatgacttggactcgttagattttcctgaagttcctaccgtattagtgcggccaggggagaacaattcatcagccccaccggtgatctcaccttcatcaaacgtgtcacgccctggaaacgatcatgacgtgttaaaaaaatctggatcttatggagaatcatccgatgatcattatgaacctgatgaagtgttggatgaaagtgtgttgtttaataaagatgaaaaatctcaagcttcagctggtggtatggaagaaaagcagtttttgccattcatgtcggctccatcgctatcttctgcatcattttctgcaagacaaactaatagtacaccaccacccattctttccaggacgaaaagcgcaacaaatgtggatctgcaagatgtactggctgctgctcaagctgctgctgattctgctgaacgtgcagcagcagcagcccgctcggctgctagtcttgcacaagtcagaattaacgagctgaccaagaaaaacaacgagcgatgtcccgaaaatagcagtgagaatccattccatacatctagtccaaaccactcagttacagaagagagacctcatttcgatcgcaatgactctataggtgactccgaaggcattacaagccctccaaactatcatcaagttcattcacttgaatctcttaaagcagaattcgatgcttctcttcctctacccggatcagaccctgcaagtcaccaacctcagagactgccttcgatggacgacgagccttacttctcttatccaaacttgtttaactcacaaaactcgaatctgggatcccattctcagacatttacagataattctcggtcctcagatgagcgctgagtttcgatatctgtctcgggttcatcatgtgatcatagaacttatgagtatattttcgatttgtgtataaagtgcagttttgtgctgagtgtaattagtggctgtctttgatttctgtggccagtgctggagctggtgatttctctactctttactgtgatttttttttatagtagaatgagaaaaatggaaagtatcaccaaaataaaaggtgtttgaactcaactaagtacagccataaaatgcatgaaattgtttggatttggtagttctttttaatgttttttttttctcctcatttgatgtgtaaaactaaatattatattgtattaatacaaattatgtaacaaactgaaattatacaattgaggtttatgtttttgatttggggttattattacttgttagtcaatggaaatcttcattggataataatgaggtatcaaattaaaggagaagaaagagaaacacatctaagtagacacaaactatggatttgagtttggaaggattataatgtaaaaggaatcttgatgcaaagaaattattaaaactaattgtgtaattattaaaagggattttttctataataaactaaaaatggaacaagtttatatttatgatcccaaaaagggaaataaacaaaaatagaaactaaaagttgttaaattacaaaataccagccaaggaaaatggaagcctccatct

SEQ ID NO: 382586 - DNA, 2186 bp, Cannabis indica
tgtttcgagtaacacacacaatgacacatattcatgtaacagcaacataacatggaactatatttctatatgaatcgagaaactggaaaaaatgtatcttccaaaatctgcactataagcttaatgaacaaacggattaaagaataacattaaaacatgatcaattctaactaaaactcacaattaaatattcaaaaaaactatgtatgaaagaaaaaccttgcccaaaactcaaaaacaaaaaaagcagatcagagacaccgagaaataacatatttattcgattatttaaagaagaaaaatgtaaaaaaaaccttgcgattgatgaaagtaaactgagcagaacatccctgacagtgggaagcatccaccacccaactgttccctcgaagtgatggccttcctggaagcccaatcttctccaacatcttttgttttgctctccaggaatccaacaccaactctacaaattaaaacaataatatcattgactaaagaatcgatcttcccacacattatatttgtatatatcataagtaaaatcagatattaattaaaagagacacaattagagctataataaatttattcattaacaaggatcaaactttataacccaacatagtacaattacaacattcaaaacttgggatttcatctaaacccaaaaaaacaaaagaaagtattaagtattctaaaacagcaccatggataacccattagtcaattacatcaaattattgaatccaaatgatcagtgaggaggcaattcatcaaaatgtacttcataactacattgaggcatttaatcaaacaggtaatagatactaaaaccagattaatacataaaatccaaacaaaccgaaatatcaaaaaaaaaaaacaacttcatataaactaaaagaaagaaaatggcagcaattggaatcaacccaaaacagaaactcaccatctaaatgaatttatatatacatccagattgaattttacatatagttatacagattttagtgataccttgtgctaatggcaaagtagaagtagaatcggccgttgacggaagagatgaccttggtttttttcttctagggtttttggaaaagatacgaactttggaatctgatcagattgggaagttgcccgaaagttaagaaatttcacttaccaaaattatgtcaatggaaaagtacaacaacaacacaatttagaaatatttttatttatatttaagtacaacacttatgtaaatatttaaatttaattcttgattgtctatttaaatttaaactttttacaattataatatttaagttatattattagaattttcgtagatacaattaacaatttaacatattaagtattaaattattattttattagtatatttaaattaatttttaaataaaaataaaaatttaatgattttaatcgatctaggactgttacgtgattaggaatgcacacgagatgaggagtgttgtcctgttcccattcccattaagaattttaatcctcatttccacttatttctcatcgggcatgcacagagaatcctctaataggaacaaagacagggcagaaacacaacttaaaaattataaaaaataataataatatactaaaaaaaaatacaaacataaattataaaatattattagaaatattattatcctcttaaatttacttttctttgcgaatttgagacgtctgttaaatatcactgttaaatactaataaaatgaccaccgtgtacatctgtgtatacatgaaagtaaaattttaaagtcgatacagtaataattcagttagtatttaacggtgatattcaactaacacttcaaaaatttaaaaaaaaaaaaaaaaaaaaaaaaaaaaaaaagaaacctaaagagttttgaaccaaaaaaaactaaagggttaaataataaaaaattaaaacataagtgaaattcacagtaaattaacccttttcataatgattatatttcaataaacttaattaaattcttatctaactatatttggttattggttatggaagataatggaagattaagttttaccccttaagcaatgaaaaattaattaggaaatttgtagaattgccactatctatagacaccatcaaattcattcatcactattttttgttaattatcataaaaccacatgtattttgatag

SEQ ID NO: 382587 - DNA, 3473 bp, Cannabis indica
tttatagaaatgtgtataaaaatcctaataaatatatgagaattgctaaaaagtactattagtgtctagcacctaccttctctaatgtcatactgctatttgtgtaattaagtagcgggtctcatatagcttaagaaaatagtttttatagaatattgttaattaataatagagtgtcatctataaaaagtgctgagcactgttgcttaataaaaatgttctaaacatataaataaaatttaaaaaggttattaattacattaattagtgggaaaagtataaataaaaaagttatatttattgtagtgtaaaatttaactcatgctatatttttttttgttaaatttggtcatattaaaaatgcaaataagtgacagaaagctgaagtatatacctcaaatttaatatttgttataatgtaaaatttgtatcacaataaataaatgtattattctttatttacatttatgttatttatattgttttattaaattatgaagtatttatattattttattgttttacataataaaattatgaaaaaattagaatttttaaatttttaataaaattattaactaaaaattaaagtttgcatcatattttgtaatttttcattgaagcatattgctaaaaattgatgtaaatttatcacaaaataatttttttatgctaaatataatataagttttacattatatacgctagtattgaattttaattttataaacatggctaaaaatgtacatacaccatctttatagtcctcaatttaatttgatcatgaacttagtgtagattatttttttttttccaaaaataatgatgacgcattgtttaaaattagtgaaagtatttagctagacaatatttgtactcaaaacataagctacaagtctgcttttggttttgttagaatttggaataaagtgaataaatttcatctcaaaattaatttacaattaaaagaatagtatattaatctgacaatttaatttcacgcatcatcaaatactaaccctagcttttcaatctaatcataattatataaaataataagctatttgtttagtgaccaatgattgctaatgagtaatgagtattgggttttgtataactgattttaaattaaaatatatgaaagcttattacaaaagaggaatatgtcttgggcagttagccggttacggcaccatatggtttcttatcacaagtgtataatatttgaatatatgtgtattattactcaaaatttcttattaaaatgctgtttatcctcaaaaaagagttttttcttttcgcaaagaaaatttttatttataaatatgtttatccttttattagattatagaggaaaaagggaaaacgttagtttgctgtgataaattaggttagaaatatgaacctgatttataaatggctgaaaatactttgtaaggattttggcccaagacagagaaatgctcaatccactagcggcctctatgaagctattagagcttgtgatacccacagtttgtacaagggagacttctactggattgggcgaaggtataaacacaagattcattgaattatcagacatgccttgaccaaccatgggttggtccattacaactgggatacggtgagccttgagatggttagctggccctataccactcaacatcaataattgtgggcttccgagagctccagctgacactataatttcatttttggaattatcaatcaacaacgccctgtgcacacctccattccaatccttataaattaccccataagcttcaggtctggacattcctgcaaaattagtaataatagtattgtttttaaattaaactattcttatatatgtaaaaaggtctaattaggatttttaattttgacatttaccaaatcatatttcataaatttttttgttcgttaaaaattccccttaaactattgagactgttgaatttaagtacttttgtctaattttagtaaaaaaaagtgataaaagtttaagggacatgatttgacacatatcaaagtttgaggggtgtgatttagtatattttaaaatcttgggagcatgaaggatcagaaaagttcataggcctaatttagtgtatgtcaatgtagcaaaaatcctaattatcctataaaaaaaaataaaaaaatgaattctcacctgatttatttctgaaaagaattttatgcacagttgcacgaagataaacaacaatcttttttggatcagcatactgaagcaaattcgcggccgtatgcctatgaccttgtttatcaaaaatggttccaccaaccttagtcccatgcaaatgctcaaacgtgaaactattattaggagaaactccctcttcaagcaaaccatctctcaccgccgactgccacggccccaacaccggcttaaatgccacctttttttcaacccactcgtacgactcctccactaatgtcttatcccaccctgccttctccacgaactcggcgctggcgcgagtgtaaaagccggcgtttatagaggagccaccgccgaggacgcggggcctgtggttgtaaacaccatcttcggagatgaagagttgggcaggtgaatttggagtgaggtccaaaagagtggacaaaaagctggttatattggttatgctggggttgtcgtagggtgagccacctctctcaaggactaaaacggtggcgttttgtgaaagagtcgccgctagtggacagctggctgttcctcctccaatgattatgtagtcgtagcgttcaactgccggtgctgacgttgcatctttcataaatgtgtagtatcgatctgtatgcatatatatcatgatgtcacattgagaatataataatgatataacggaataattaagtactaaattataataacttaatacagtgtcaacattttaattaattaatatggaggatataattatgcaaaattaattaatagtatcatcgcaccgttctctgagtaacagtaagaataaaaaaagaagagactaattcctgcaaaaagagctccataagatgtccagaaacccaggcccatctcgaaaacttataaatatgttaaaatgtagtctttaattaaaacaaatcagcaatttgggtcttatattggaatgatgagtactaatatataatatatgagccatatttataccaataattaatgtcttcaataattttaacttttttacaagaatatatgtagtttcaacgacattaattataatttattgtgcaccatccgaggcatagtaaagaacgccacaccaaccagcagtattaaaattttaaacaagactatgaaataatgtaaaacttctccaactacactagtccatttttttttcttttctcttttcagaaatattaagagttaaggcattaagtacctaaatggctcgtttggtacgccgtattgtaatgtattgtatcgtattgtattgtat

SEQ ID NO: 382588 - DNA, 2692 bp, Cannabis indica
gtgtatattccacttatttagagactatgttagatcccgagatttttaaattttatagagcgctcatgatattgctaattggatgctttggttattctttaaggactggacctttgttccatcataacctatttttttataagtttatgtttaccaaaaaaaaaacttacgtagagtggcagagtggatctagaagaaaaacaaaaggatttgtaaaatcaaagtgacttgacttgtaaaaatgaacttgataaaaaattgtaaataaatagtgaatttaaggagttagaagagattgttaaagagttctaactaagaacctcagaaatcaaagaatgaactatctaaataaatacactagcattcgaccactattaacataatccaaagttatgcagaacatacaacgaaatgggaatggaagcacagaggtcgtgggatggctcaacaatgaaatacttgccctctcatctacatacagccgaaaatcataaaactccatatgcccccttcgtttcaacccctgtgatacacattcactaagctctggcatgaggaactcccacaaaatttgagcttacagaggccaaagaatgaattggaaaccaattgcattcttctgaacaagtcctagaagatcttagtcgactacaacaatcatcttcatttgcattgatttgactgtgaggtccagtcatcaagaaggttagtgatggactcttcgaacttttttgcttgagggccaggcttcataatattgacatcaccccattgagagcagggatccatccaccaacttctccggccagagcaccatgcacctggggaaggtcgattgagaccacgcttcagaatcttttcatcaatcaaattcagcacaggatcatctttcgcgaattgtcttgcaaaagcagctccactttgaaccatttgatcaaaatctgaaacattgagaaaatgaggttccatcctaggcggactgtcccagatcatatatctcaaatcattgttcactgtagtgttcttgaactcgggagagttgcatatgacggaatggaaatagccttcttgggacaaaattacattggtaaaatacatcagcatggttcgtggcaagttatcccaaccaagtatacaaaattcgagaaatgatcgactaagggtgacccatggggaacctgcagattacaaatgtcacagactagcaatcccagttgaaaaatactgaaaacaacaaacatgaattttgtgttggtaacagttgtgtataatagagaatattgcagagacttacctgtaaatgctttaaaagcatctggtgtttttcgtttttctgtagcatgaaaaatttggctcctcctagctaggtagatcgctggatcaactacaattggttgaaacctttgcaacctgcgttgaagagttaatcatctggatttaatctatgtgccataaaaatagccatatacaaaaatcttgtttgctagaaaacccaaagcaaaaccaagtggaagggttcgcatactctttccatccaaggtcgctagtgtgatcaatgaaattgagatctcttctgacagatgagaagacatgagaaagatctgaggcaccaaaaaaaaaaaaaaactggtgaggaaaaagcctccaaacacacagcaagatataaactataataaaaattagcattctcccacatcctactaatgtgtcgtaccaatgcccgttgcttgtgcgcatgggagtgtgaatgtgcatttggcgtttcaagaataaaacagcagaagaacaaagataataatgccaagtgccaactgaagacagtaaacccacattcaagaaaacaaaagtaattaaatcaacctagaaaatattccttcaaacaatactcaaactgaaagtaataaaaaaaatattaaaccaactctattacctaaaactgaaagctcttaaccaatagtgttttatcctactaaccaattttcatcctaaaatggtttctgtcttatgagagagtggccaaaagaaataagaagtttagaatgtcaatgtcaaaatgactaacatgagacagtgtgatatcaatcaccaaacaaccctcatcaagttttatccatgctaagagagaatgatccttgtgtaatcagaaatagtaataatgagttaagagttaaacagaatttaacttcactgaactcattcacactgccatgcaaaataaatctttaagaaattgagaggggcatcaagtcaaatcagcttttctaaacaattatggaacgtattatatctacacatgaaaaagtattggtattgccaaagcagtatttcagaaacaaaggcaagcactgaaaaccaataatccaagatttagcatcccctaaccaattacatcaagagcattttgtattactttttttttggcattttgtattgttcattccaaatacaaaatcaatctagtagtaacttacgctcatttccaaagaaccttcaagattttgcaattataagatgctgattgttcataataatgactttcattgtatgagtcaattgatcgatctcatagtttctcctcatcaaaacttaactaggaatttgggcacatcttcatattcattttcttaaaagaaaatatagtgcatgtttggcatcataactaaaaaactgttttttgtttttaaaaacagaa

SEQ ID NO: 382589 - DNA, 2882 bp, Cannabis indica
aaaaaaaaaagaatccaaagagagttcggtccgtgggatgggttcatcggtggtcgagtgggaatggtccgtgggtggtgggaatttgaaaaaggaaagatagagagaaaaggaaggaagagagagagagtcagtttagaatgagggggtaaaattaagttttaataaaaattatcccatttttacaaattttatatagttttaaattatgggaccaattttaattttattatgtatataatttcaaattttccatatattatctggtaacattttattataaccttttaattaaattttatatttgaaaagacatttaaatatttttaaaaaatattctttttatatatagtggtaatcattatagttttattattattattttttaaataatttcaataatttataatgttaaaattaagtttataatttttttgaacacatatagtaaattaaaatattaaaaattctatttgtagtacggtaaattattcaaaaattttaaaaaattacagaaataacatcataattataacaaacacagttataaaaataattctaacaaataactataattaacaccctctatctcaaaattaattaatgtgtgtatttttggtgatattattgccaaaataaaatatactcatttgatattacgtgttttatcaaaataaataaatctagtattttgtttattatttttcttttctttgaaagaattattcatgaaaacaaagaaccaagcttagaaagtcgcacaaaaacaaaatcacaataaagcttacaagaagataaccaaataacgacaacccacaccgtttacaagaaggtgcaaaatagcaagagaaacattaaaagacaggctctaacaaagcaacctaaagccaaaagaataaatgaattaaacaccatcactgcaattaaagagaaatcgaaataaaaaaaaaaacacaattcgaacaacattagataaaccaactctatcaagatgaacaataatattcatctcttaatataaatttataaattgtacaaatttagtagtctaaattcaattttaattaatttgacaaatgactctcaattatatgtaattaacaattaaaatattttaataatattgataaaaaaaattgctgattaaattagagttcaacttacttaatatctacaatttcaaaatataaaatactatataaatatattaaaaatacaagatactaaatctatattttgataaaatacaaggtaccaatgataatgttagatcagatacaattttgtaaatgttatttattctcatataggttactagttttgaattggcaatcatgaaaatttattttactcttttggttttcaaactaaagcaaccaacccaatatcttacattcaaaggcaattcaatgtggattgtgattttcatcattggccaatttttctttctcaactaaatttgctaaacatgagctgattttcatatgagaattaactagagagactaatttacttgatctaatgtttacttttctaccaaagtgtacaaatgaattatgaatatgtaatagttctaacaactcaccaaactccttaaaataaaagagttactcggaaattactcttccttttaagttatattatcactaattaagttagaaatttattttgaaccttcctacaatttaatgttaattaggagttcatagcaacattttaaattatattatcactaattaacttaacacgtgtaggaaggtccttataattgtgatacattaacgttttacttgcaagtgagaaactttttatggttacaaactcctaaagatgagctatgtcatatttttattttcaaaaataaacttaactaactaattttattttcaaatttcaaataaaatagtaattggaagtagtaattatacaatatattaaaagaatataaatagaagtattaataccattttagatttgtgttttacgaaaattactaatttgattttctattttgttaaatgactaaattgaccttttattttttaaaatagtataaataaaatcttgacctcaattttcgattatttttattcaatataactaatttgaagacaattcataacacgaacatatgtcataaacgtaatcagttttgttataacacctctaaatttagttattattaagttttattttgacagaaaattagtgtaaggtactatttactattattttaaaaaatacatagtctaattttttatttatcaaaacaaagagtcaaattagtaatttttacaaaacacaggatctaaaataatatttactctatgtgcatattatacaaatttgctacttttttagattatcccttagaaattaaaagatttgcaaattaatttttttttttttctaacttttagcttaaataaataaaatcgaataaattgagattatcttgatatattataaatattctatgttatataagactatataaagactcaaatagttaacatttttgagttattatcaacatgatttgaatgtttcaatcacccaacatattttttagcattcattttctctttttttttttttctcttaactattattttttatcttttgtatatatataataagtgtacgttttttatatctcgttcttttaatgcactttatctctcttaaaaaatttaagagctgtaagtatgtcaatttatgcagaatcctctccaaactcattagtcagctatcaaaaggattctcaggtgtgttactgtcactatccactatagcatccaaatgaaacaacttctaaattttgagcttgaagcgttttgtgatgctgatcgggctacaaatgtggatgatagacgcacaac

SEQ ID NO: 382590 - DNA, 2592 bp, Cannabis indica
aacaaccttcagatataatgaaaagggtaaagtacagccaaaaatgatgacatcatttaactgtttaaaattgctgacactaaaccttgtcacaacaactcaacgagtgaagcctacatgaataaacaacaaaacataacggtaaccagttctcacatcacatgccataagttggttattttttaagtaaatattatttagggtagcattttaaaaataaatatttaagcatgcacaattgatcaattagttagaacaatcaaacccctagaagttcaaattaaagagcatggttataggttataggcaaagtctagtaaggagaggaggtctcaagttccccctcccaatgtaaaagaaaaaacacaagtgaaaaaggtaatgcaagaagtagttttcttgttacaaagggattgatacgtagaatatttctcacacaatatgtaaaccatacaacataagaagaacagatgctatgtacttactgaaacgagcatattgttgctcgaacgatatgacacgaggtggaagaagtcctcgaagccctagccgatctctctcagtataaggaaacccagtatcctgctcttggaaacgaaagcaaaaatcccaagacattagttaaaaatcttactttgattccatcaagtacttatacgacattctctacttaatgaaacagcaattacttcaaaatttgaaaataaaagaagaaaaagaaaattgtatatctgtgtacagtacatttggactttttcatctgattagagaatttgaagacatttattgattaatcggatacatcttgcttaagaaaacacagaatgaagactctttcatgaatgggagagagatcctttcatcttaccaaaactcaaatcaaccatacatacacacacgcacagaaaaactataaattacgaaaacaaacagagcgaacataataacgaagaagaataaaataagaaccttgttgaaccagggatcatggagaatatcagcaccacgcttatggacaatacagggaccaggaatcgcagtcgataaacgcctcgatcggcgaagactagacgcggcgaatcgagctgccttccacattatctccctctgacacttcccgaaaaaaatcaaatctggaatataagaagttcaaaaactccaaaacgcgtactcagggaagaagctacaaatccattttctcagtctctgatagccatggaattattcagatatcagatgtcaacaaccacaattgacttccaatcaatatagttttggggtcaatttatagtgaagtgacagaattttcgctattatttttaattttacgaataatttaatggcatatttaaagtatatattattattggttattttggtaatgtgttatgtgtaccatacaatgcactgaactgcagtgttgtctggagaagaatatggaggtagttgaagctactggtagagttgggactgaagtacagttgcccggaattttaggtcagtcaaataacgacgacggacggtgatggatgaagaaaggtaactgcccggacaaatattgggcagccaagggtttgttctgattggaggtgaattgcacgaaccgtaggttggcacttggaggtcttttaatggaaaagtggcggattggagactttgaagaatatggtgggttatggaccaccgatatatggtgatcaacgccacgtggatgagttttgttggttcaaaatatttgtaactagatctgagtccatttagatggttcagggaatgaactttgaattaatgttattgcaatcatttgatctggaatttgattggatgagaatgctgtcacaatgtgggagtaggaaagtgatccaatgtgtttgccaacatttgattgtaaagatattttttaagttttcaacttgctcattacataatcaaataagaattcaagtggatagtttttgttagttaatgccttattgattaaaaattgtcaaaatcacattgaattgatactaaaaaagttgtcttttcttttgaactttagaattatttagttcagagtgataaattttctaattttgtttgaactacatgttaaattttttttttcttgtagactatgtttattatgtaatgaaatgagatggaataaaataatatattttattcttttgttttgttgtattttagtattggaatctcattttttattattttggtggaattatattgaaatagaatacaagatgagaaaaattttaataactttttaatcaattttttgtatacatttttaatttaattctattcaatttttattcttattttttcttttttctatatttttatctctcataatcaaacgccacctaatagagtttattgcataataagcttgtattgcaatatttaaaataaataaattctaaaaaaatcattaaaaatagtttgaaatagaaaaatcaaaaaataaaagtgattggtgcttgtgatacccaccaaacaaaagttgcttgtgaattttaatggtgtttggttgaagataatagaatagaatgaaaataaaataatatttattccatttatttgttttgt

SEQ ID NO: 382591 - DNA, 2048 bp, Cannabis indica
ttttatagaattttatataaaaacttccataacaactaacggaacaacttaaatagtatttaaaatttacataaaaacttatatagaaattactaaaaaaaactactaaaacaacttaaatcttaaattaaaataaaataatatataaagtaattttcttacttttattttgtaataattatgtcgatctcatttattaatgatcgaaacttgctaattttcgtaagaatttctaattatattatcgtataagacttattttgtgggttctatttatagtacatgtaattcaaacttttatatgtgcctatgtttggacaaggatatatataagaaaatataatattcatgaatataaattgatgattaaagaaaaccatgttctaataccaacaccaccgcatttacatttaagccaatgggtagtaaataaaataaaaccacggccttagccgcaattaaatacaatcttgtcttattctattgtattttttttattatgttcttagtgataaagaaaaagaaaaagtaaacaaatatagattgaatgtggcgttaatgcttatccaattatctccctatattatatttttttttgggtggttggggtttttgggtgcatattgaggtgttcgattgatcctagtgccaataaacttgaatatccgatagaattctttttcttttttaaaataaattcttttcttaataccaaaaacgagtttaatacttcaaaaaaagatgaaaaaattaattttctaacttactaactcaacaactaagtaatgtgatgacaatacttcataaaagtaagataacaaacttaaaatgtacaaataattaaaaaccaaaaaaaaaaaaagagtacaatgcttagggaaagcaaacttaatactaaacaaataaagatttcaaaattataaatgagactaatgcatttacaaattttgcccaaaaatattcttttaaaatattaagatatgtaagaaaatatattaaaattcttttagtggtttttttttttgaaagagttttagtgatttattgaatatatgtgaatatgcttaatagatttatattttagtggttataagcaaattttagtggtgttacatttttttttccaagagaggaacacttaagtttaaatctccctccctatataaatatacatattatttgtattgttatttaaatctcgtaaattagtaacacataagcaatataaaacaacacacaatcatagaattaagacttgatgctattagtattaattaatgtaccatgttgtactataataatcttataataataacctatatgaatataaaagaattagttcatccgtactaggagaagagaggatcttccttcctagttcctatttcattcaacttccacaatcaactcacatacacaataatattgtgaatttggatttggatttgggaaccttttctttaagtataaacaaagtaataccatgagaggacaatgatggactattcacctttctccacgtggactcctgacccatgtgatcccacgtgccaatttctcatacgatgccacttggctactagtattgattgaaaacatatattcatcatcaaccaagagcaccagaaatggtacttggtttaactcattgcttggttctaccaatattgctatgttgattaataatgtctaacaccaataaaatagaggtgatactttgtgagcaatgagaaatactaattaaggtgccaagcactgatataatatattttaatattgaatttcacacattttaatttaataaataataggaaaagtcgctaactaattataaagtgttacatcagtataatgttagataccttaatggcacgtttactatacagtaatcagaatcggaataaattaatggagaaatgtaacggaataaatgaaaaataatcggaatcaatatttgtaatatgttgtttactaaaattttttagaaatggaataattgtgatttatcttgtttactttattaggaaacgtaatcggaatgcttaaat

SEQ ID NO: 382592 - DNA, 1658 bp, Cannabis indica
taagttaaaatttaatatgatattatttagaattatgatatacaaataatttgatataagaaaatttatacaaaatacttaaaattatttttatatatttacttaatttatttttttatttttactaaattttattttttataagttccacttcttatttattttgaaaaaaaaaaatatttttccgtatcagtaacatgaaattaaaataatatttagtatttttgtaaaaaaaaaattaaaatctgtaaaatatatatatttatttaaaagagaaattttcattttttatggtttaagtttgtaaaaatatgattatttttctcaaaaacattaatttatagaaaaattttaaaaaaattaaaaaaaatatatagaaaaaaataacataagatacttaattacatactagttaatactagttatcaatacttagttatccttaattaatttttctatatttttcaactttttcttcgattttcatataaaacaacttttttttttcgtacaaaaagtataaaacttataaaatttataatttcttctatatagatctatcaaaaaaaaattgtcttttatttgtatttataaaataatccctttaatataatataagaacgtaaataacaattattcacacttattttatcaagttttgggtatttatgaaacgattattcaaacagtttgtgagcataattaacaacacttttggtataacagagatttcagagtaaaaacctgaaaatgcgatcgaaatcttcaacagaagtgtttgaaatgcgagggtaattcgaatcgagtactccagcggagttgaccagaatatgagcttggacattaaacaacttctcagccgaatcgaagagcaatttcacttgatcgggatcggacacgtcagcttggaccgcgacggctcgaggggtggtggctgaggtggcgttgatctcggagactaggagatcagcttcagcagagttggaggtgtaattgatgattagacgagctccgagtgaggctagatggagagctatgcctcggccgattcctcgagaggctccggtgactatggcaactctgtctagaagtggcagagatgaagaagaagaggtttgagtagccattaatggaggaaactataatggattctgagtctttcttttcttccataaaaatgttatatatatatatatatacatataaataataataaatattgaaaaattcaactataagttaccaatatatctttatgtgaaataatattttagttttaattatgtctccatattagtaatagaagctcaaattctcattatattattattatatctatactatactatagtactatacaatgaagtcattcatgagtcatgagatgtaagttttagattagtcaacactcaacaacttcaccttctagcatactctttgagaatttttattaaattttaaaaaatactacaatatagaattgaattacaatttttacattttaatttaggactcacaatttctaacacaatacaaccataattttgtgttgagttataatatgtttaattgcatgttttaaatgaatttattggtttaactatctcatttgcagattccttttcagtttttcaggcagaagcagttgctttactagt

SEQ ID NO: 382593 - DNA, 3443 bp, Cannabis indica
aaaaaacatgtttaaaaagaattgaagtggggtaaaataaattagtgatgcaatagtacattatggatggttatgtggggactcatgagcaatttatgtttcttttatctttttcccttttttcaattataataaatttcagtgtctcttgccagacaaccacatacacaattgttggagagagatagagatatagatagagagagagaaagagagagaggatattaaggtacatatatacatataaatacactagatatatgttccatatataataagaggggggcctcaataagctttgctattatatatcatattcatccttgcagtgtatatattattccttcttctctttatattgttcttcttcattactcaataaacttgtaaaaaagtgtactatagctataactaattagtatagttattatttttagtgaaatggaaacttctcaatctgtttccattgaaagcttttcatatagttggttagttaacctaaaagtaccatctctagacaactctcttaggacatctcttgatgcatctgagtatcatgatcatgcttctaattctttcattgagatggacccaagaatgccaccatcaaagagattctttagaaattattctcaagatttcaaatttgatttcccaacatcaccttctcctttaacttttgttcatgctgatgagctcatctccaatggttatctcatgccactttttcttgatgatcatcatgaccctttgaagaccacctcaacctctaatgaaaacatgtcatcaattctcaactcattgcattctcatagttccaataatcaaggtgttgttgctccacctaataatatcatctcttctgattgttcatcattgagaaggtgtaggagattggtttcaaggaggataattcaaaagtacttgagttttcttaggcctttgtatcgaagaattcgaggtcataacaaggggagtagtagtagtgctaaagcagctgtgcatgttgataataaaaggggaaagaacagagtttattcttctgagactgcctctccaagaataagtgtagcttattctgtttctgatagaaaatcttgtgattctgatacctctatttatgaggctgttcttcattgcaaaagatcaataggtactcacttgattcattccactaattattatctatattactatttagagtctcatatagaatagaatacttttatcttatttttacagggaactgatcatagagaagaagaggaaagataataagaaaggaacagttttggagaatcacatgggaagaaaatgagaggtgacaagagaagatcatcatcaataataatatatatctacttgttctttgtcactattctttacattttctcttttgatgataatgtaaatttgtctattattactaaactatctaaaatggccttaattaggtagctaggaagagaggaagaaaattaaataaaataaatggacatacacttaacaagatttttccttcaatttttaagggaaagaaattatgaaagcacctagctacttaatgatgattatgatgatgagaatcttccttgctaataataaacctgtaaattttccatctagtgaatgatcatgatcattttgttcatatgggtacctttcaatttctttatttatgagttataattaataaacactagtagaaacttcatgattatctttatctgtttgctatgattgtggtactcatgtaaatttcaattaagtctaataaatgttcacattctgtaaaagttgttatagttaagaatcttattattgggaaagggatatcttaggcaaagcttcttacacatgtccttaattaagatatacatacatcatatgataaattcagggggaaagagagagagagagagagaagaatctcaattcttgaaagagcccccaatttagatcaccatcatattaatttatcaaaattgactacacaagtagcctagcttacgataaagtagaataaaaaaaaataataataacaagctattatatgatacttgagaatattataaatagaacatgaaacaacaaattactgtgtaattgtccaaatctaaatgtattattattagatggcatcattaatcaattgtcatttcagttatttatgtttaaggatccatcaacttccaagcttatatatacctgtgattctttatttcgatctaaactatgtcataagaaataaataattatttacatatcaaataatatttataaaatttacttgaggttaatatattataataatttgattccatagtggagcaatagaacaaaaggacacatgatctgtactacaatatattgttggcctcaccttagtaaaatcaatcactttcttaagttgtactatcaacaaaaccaactgtagtctatttttgtgaacataatcatatatagagcctctcttttgtgcccatttcttcacatatataaaatctctgtaccagaaaaaaattaaatgacattttagggctccatataagagttatattatattcaataacaaataacagtggtcatagctcctccaatttacaaacaaaataaaactggaccttaacggtcccaaaaatgcgacttgcccataagattaaaagcccaacaaagcctatctagataccattatggggtaatctagaaaggggtgactgaagagacatccaaagatagtttgtcctctatgtcagacctgggagcgcgtacactaccaaaagggacatactttttgtccaatgccatattctctaatatttactgtacacaataggaggcgcatgacacctgccaccatgattaccagtttacactttgccaaggagattggagctgataaaaatgaagtgtacagtgactcctaggtagtggtgaaccagacctcgggagagtaccaaaaaagggggagaagatggctacacacgtatctcagacccatgctccaaaatttctaaaggtacattatctgacagttccccatgactagaatgctctcgcagatatgttggctaaactagcaatagatctaaaaatcaaggcacacgaggttgttcaaattgccctactaatttctccaagtactacaacatcaagggtaagtgtcattgatcagttcgcctcttggatgggtcctatctacaaattcttgaattcaggagaattaccaacagacaaagctgcaacaagaaaaagtcactatcaagctccctagtatgttatcctagatggaaagttgtacataagagagttgtttgtaccatatttgaagtgcatagctgttgggttttgtgccctaaataaaaccaatttcaatataatcagatttactaattaataaaaagattagaaatcgcattttatgttgcatggttcacataatt

SEQ ID NO: 382594 - DNA, 2069 bp, Cannabis indica
cggtagtgaaaccttcttttttctcattgtggtcacatgcttcccggtgatggcctcctcaagtggtagaaagagaaatcgcaaccttcatcagagtggcaaagtgtcggccaaaatttggggtcgtagccttctttagagtacttgcttcgcaagctcgtgttgcagctactgttgtgaaaaaggtaccttacttaatctaaaatctttaaagttgtcagaaaaagttgttgaatccttaacatatttgacaaaaataaaaattattgataaattatacatatatttgcaataatttattatatttcatttgattttttgtaataattttgttaagaagagtagttgacaaagacaagaaggaagatgtctgtaatttgaaaaagataaagcaagttgtagaagacgaaataacatttttttgaacatttattgtatttttttagttgttatattgatcttatttagtaaaaaaatttggtattttttttgttttgcatgtgatcgtttatgatcttgtgttcgatttttaattttagatctgatttggtgtttttaagttagggtttatgttattttttttaagtttatttgttaatttattttgatagttatttcttaatttattttttagcatgtaaaatttagtttagtttattaataatcataattagcttttcaaaattaattttaaaaaattaagtttcttgtgttgttgttttttctttttagtaatgttatgtgattgttattttggtagtttgtatatcaatttattgttttagcaatttaaacattgatttaatttatttgtttaattatttatattgtagtatatgaaatttaggttttctatgttgttaaaaaaattaggtttactatgtttgttattttttatgttagtagtgtaatgatttattttatggtttagtattgtgatgggtattttagtagattgtttatcaatttatcatgtaggcaatataaaaattagtttacaatattttatgtttactgtgtagttactttttttgtgtcatttattttatggtttatttgtagttttttgttttcctcaatctacgttttatttatacttttttgtataggttttttagtttacaccattaagtacaagtttactattcgcttgttgtatatcatatgttatttcaggaatgtgagttatattttcagcttagtgaaaagaatcaggaaaaagttatgttattttctaataaagataacattgtggttaaaaatattaattttgactaacgtaagatttttcgtagtatttatttgggttattttttagatagtcatcttgttagttttcagtctcaacttgttcataattccttacatagggaggttcatcagaaaaatgaaaaagatatgtaatttaagtttagtgatgagaattttaactttagtttagctgaattggcggttgtgactggtactgtgttggtgatattgatttgagcaagtatacacacacaaatataatacttttattgatagatatttttgagattagacagtctgttagtgctgttgagcagaggtttatgtacaatgattttaagtctgatgaatttactgtgaagatggctattttgtaccttgttactaattgcttgattagtaacatgtactcaaaaaatgatttttttgagattcttaacatcattggggttggtgagtatggtaattactcatggggtataccagttgttgtccctgattttacccaatatacgtggaccaattagacaaggacacgtggatcgaacaagcttaacattcaaattatttgccaagtctttatgtaataaggcagcatccgggacatgcctcccggagaagacatagggagccccatacgctcccggaagcccaagtaatactaaggcatctccgcgaggtgtcaggcttcccctgagcaatcaagtcgcatttaatgccgcatgggaggaaacgtgttgggactgctacacgcaataaagtctgacggcacaacccccaatctgcagctacaaagtaatgatcatttaagtctatcg

SEQ ID NO: 382595 - DNA, 3749 bp, Cannabis indica
gtgctcttaggttgtaaattggtgtgtgcaatatcattctctgattcatcaaaaaaaaaatggactttccctataaaaggagagctcctcaagctaattattcaatctccattcattctaaaaggttagagcttctctctcctcactatctctctagaaattatgagctaaagcttttttctctagttctcttgtaaggcaatttacttttgtgataatagaagcttgaagtagacataactctattaccgtcatgtcacgcagagtgaacaactataattggtggtattctctttatttttttgttattccttcagtggccgctaccaatatttagtcggtcgcttttcaacgttaatacttgactacttgcaagccttacctcattctttaaaagtgtcttagggtccttagggagaccatgcgaaccctaaaatgatttccttgtcacccttggacttttggtcaggtggtaacacatgttcatctcgtaaacgtggataacatttatctccaacttttttttaatcttgtaaatgagagaaggctgcttatttttccccgatctaggatattactcctcatgtccccatattaattattaaatcaaaatgtgtaaaatctaatattaaaatgcaccaataatagcatgttagcttttgtgtggttggcatctgtaaaaccataaaaatatctctctctatttccttgtattattttcttgcttttatagtacggtgacatgtgtccctcaatgagtctcctctttattataaatatggttgtactttgtactcatttctttgaggaatagtaatacatttttcattccttctgacatggtatcacagccaaaaggctccccatggcatcaatagattgtactagctctaccccacaaattgaagatcaaaatacccaaaaccccttcaaaaccctaccatcactaacacacaaaaaccctaatagtacagctgcaccacctacccctgcttctcctctgcatatctcggcctcatcctcttctccttccttacccccaaatttcccctccttcaatcaaaccatctcaataaagttagatgacaccaattatctggtttggagaatgcaaatgcaaaacattattattgcaaatggtcttgaaggttacattgatggcactgtggcatgtccggaacaatttcccgaccctacttcgaaccaagtcgacccagccttcacgacatggcacaaatacaatcggctgctcatgagctggctctacgcctccctctccgactcaatgcttggtcaaatcgtgggtttcaccactgcagtagagatctgggtctcccttgaacgcacctactccgatgcctcgtttgcacgaagcactgactttcgcacagccttgccaaacttgaagaattatggtctcaatgcttcggcatatcttcagaaactaaagactctctgcaacactcttacatcagctggggaaccaatttcctcccaagaacatttaacttaccttttgaatggtctcgaaccggagtacaatgcatttgttactccgatcttagcccgacctgtgaaacctaccattgaagaggttcatgctcttcttctcagctatgaagctcgtcttgaatgacaaaacgatgctgcctctcttagctcccttcaagccaatttttccaatctttacttacccaaacaaagacctaaatcatccccttaacaaccctcttttcaacctcgcttcccgtcccatactcagcaaaatcgcccacccactataccctcttttcgtcaaccttgcagcaactatccttcccctcctcgatcccctacaccgtggattccatctagtcataaccgtccccacccaaacccccaaaatgctagatttgtttcaaaataggacatacaccactcatgtgctatcaccgaaccaatctcagctttcaacctccacccccacgcccattcaattcctatttcacccaacaacaaccacaaactactctaccatcattaactacctcaccagccagcaatccacccttacttcccactcctccatctatgggagccatcacagatcccgcttggtatatggactctgtcgcctcttatcacttcactcccgatctaaatcttcttgagtccgggactccatatcatggtaatgatcacattactatgagcaatggtaagttttcttccatttctcatgtgggcattgcatatctaccatcttcctcttttcttaacattaaacttaatcgcacataccattctccttctttgtctaagaatttgctcagtatctctcaactttgtttagataataatgcttatgttgagtttcatcctactttttttcttgtcaaaaatcagggaaatcataaaatccttctcaaaggccttcatgatcaaggtatctatcgagtcacctcttcccccgcgacatctcttgctgcctctcctcaactcctctacacttccaagacttccattgatgtatggcactctcgcctgggtcacccggcctccgatattatttctcggatttcatctacttgtaatttttcttttccaataagagattgcctaactttttgtactgcttgtcaattaggaaaatctcataggcttagcttttccaactctgtatctcgggcttcaaaaccctttgaattaatacattctgatatttggggaccgacccctgttacttcaatcactggtgttaaatattttctcttatttatagatgattatactcgtttctcttagttttatcttctaaatacgaaagacgaagcattcaatacattccttacatttaaaaatcttgtttccactcaatttcaaagtaccattcaatcggttcgcactgattggggtggtgaatatcgatccttgtctcggttcttcactcaacatggcattcgccatgatctatcgtgtccccacactcctcaacaaaatggtcgagtcgaacgcaagaatcaacatgtcgttgaaaccggcctcactttgttagctcatgcccatcttccccttcatttttggccatatgctttttctaccgctgtgtatttaatcaactgcctttctactcgagttctccattatgacagcccctatcacttactctatgacaaagctcccaactattcactactccgagtgtttggctgcgaatgtttccctttcttcggccttataactctcataaacttgaatttcgctcctctccttgcacatttcttggctacagcagcaaacataaaggctatctttgccttcatcccacatccgggcgtctttttatcactcgtcatgtcatttttaatgagtcatgttttccctttgccactccttcggctgtttcaccacctactcatacacctcactcagttattacctcacttcctctctcggttcccacatcaaccaatgttcccaatgttactcgtactcatccatctccacatacttcccctccccatagtccatctcctaatattttgtctcctcattcatctcatcatacctaggcccgtcctgaaccactccaaaattcctcttgcccaacacatgtttctcctcttagtcctctcattactactcctttctccaatgtatcttcaacttcatcttccacagcctcccctcccaccattcctttgatagtagatttacaaggcccgtgtgcacttcctattgcccatactaatgtacatcccatgattact

SEQ ID NO: 382596 - DNA, 2899 bp, Cannabis indica
aaaaataatttcttttaataaaactatttagaatactccatataataaattttaaacttcttaataaataattctaaaaaataattaataaaattgtgcatttaggttttttaataaaaaattatttagaaaaatatgaaataaaatagtacatttataatttaactatatattaaaattacaattttattataatacttaaaaaattaaattatactataatagtaatgtatataacatataaaacaaaaagtaaaatattttacccaacataatttcatttcttatctgatttacaaatttttattaaaaaataaataattcatctaaatttatcactaatataaatatatacattacataaatgtgtgagtggcagtgcattcacgcctttgcaggagagacgagtatgtgtatatacgtggagagtggacacatgaaaacctcttttgaggcaattatagataaagcaaaagagtgaatagcagtcggcttcatctttactctttatctgcgcttcattatacctttatttaactttgtcggtccctatgcttcactttgagcacctaaaacacctctctctctctctctccctctctctctctctctcacaatataaaatatatgattattcccagcatctaagtaataaatacacaccttattccccaaactacattatagtaataaactgtctgtcttttactttgttttcacatcttcatcacccacatgcaccaatatctctagtactatccacaacatatatataagccaaaaaccatatataatttcttacttcacaatcattattgtaaccctatataaataccaaaaacaaaaagagtagtagagtaatattagtaagtgagatatggagattttgtcacagctatggtccttgctaggccttctaaccgttctccaaaatgtcttaccttctcaactactctccctactccactcgctctacgagtccctccaagacttactcagcccttattcctacctcgaaatccccgagttcaatggctactgcggcgttgaactcaacgacctttaccgccacgtcacgctctacataaacgcagttgatccctccgccacaacctgccgccgtctcaccctcacgcgctccaaatcctcaacgcgcttctcgttcgcagtagccccgaaccactccgtccgcgacgtcttttccgggcacactctctcgtggacccaccatgtcgacccagtccccgactccctcgaggaacggcgtagcttcgtccttaagctcccaaaacgacaccgtcaggcacttctttccccgtatttagaccacattctcttaaaagcagaagagtttgagcgtgtttcaagggagaggagactcttcaccaataatggccacggttcttatgagtctggctgggtctctgttccgtttcgtcacccgtcgacgttcgacactttagctctcgaacctcagctgaaaaagcagataacggacgatttaacggcgttttctaatggcaaagagttttaccacagagttggccgtgcatggaagcgagggtatcttttgtacggccctcctgggactggtaaatctagcttgatcgctgccatggcgaattacctctgttacgatgtgtacgatctcgagttgactaaagtctccgacaactcggagctccgagctctgctcatacaaacgacgaaccgttcgatcatcgtgattgaagatatcgactgctcggttgatctaacggctgagagaggctccaaaaatagaaaaagatctcagccttcgattaacggtcacgatgatgaagatcagcagagcgggcgggtcactctctcggggctcctgaacttcacagatggtctctggtcttgctgtggggaagagagaatcatagtcttcaccacaaaccacaaggtgaacgttgacccggctctgctccggtgcggccgtatggacgtgcacgtcagcctcggcgcgtgcggacccgccgctttccgggctttggtgaagaactatctggggttggacacccacgctttgatggaggtggtggataactgtttgagatcgggtggggccttgacgccagctcagatcggagagatactactgagaaacaggggagaagctgacatggcaatgagggaggtagtggcagcaatgcaggcgaggatattgggtggacgcagagaacaggtgaaagatagtcaatattgcgaggtagaagccgggtcaaggtcaccggagagtgtccttcttagagggtcgccggagaattgggtgtcgtcgccggggaagaagagaaagatcaagtttctggtcaggcttagatctttgacaaagtctgactcaggtagaagaggtgtgggtgaccattaatgacgtgaggcctctctaatagctagatgatcacttactttgtaatgctcaattccatggaatttttttattttacgaaatttgaaaatggctctatttggttttatgtaattgaaccatttgattaattgacctgtttttcttttttttcttgggcaatcatgtttaatgctaatcaaatgtcattcacgatgtaatttcaggggaactaataaaaaacgaaaatcctttgttaaatataataccaaaaagaaacctttcatcacgaatattaatgctcaaccatctcaaaaattttattttcaatcttttgcaccattttgtaaaagttattaattagacaatctattctcttaaatgataaaattgattctatattttttaaaatgataaaaataagattatgaactttgttgggttttatgtcctaaataaaactcatttcaatataatcagatttacttgttaataaagattagaaataacatttaatgttgcatggtt

SEQ ID NO: 382597 - DNA, 3331 bp, Cannabis indica
gtggataatactgattttaaattatataaaaacatggattagtaagtcaattcaaagcaactagtttaagtcaattttcaaaccctccaaagtccaaactaaacgaatttaaccaccgaaatactaaatatataatatgtactgaaaagtagtagagtacaaattcaatctccttgtcttttcttctgtttacgtttcttcttgtgccaaataaacacgatgaaaatgaataaagaaagaattgtactcttttttattattttatttcccttctttagaaatatgtactctgttttttttaacattatttctttcatctttatgcctaaaaagtatcaatataaacctcaaaagatgaatggcaatttcgaaataagtgtttgtaataaagctacacaagtcacagattcaagctttcttctattcacatgccttgagtagaagaaggacagatcagcaaatatggttttgattttcaggaattactcactcatctctacatagaaaccactttcaactttctatactactactagtagaagtagccattattagaaacgaaaaatgggtatgacgaagttgtgatctaatttaatttatgaggttcatcgttgagattcagcctcgggaaatgaatatataacttacacacttgagagttttgtccaaagacaaaaaagaggtttactgaggaaagaaagagtgagtcagaaactttagatgataaaataaaaggaaaatgatatacataaccatctttttgggtgggttgcacatgaaatatttttaagtagagattgctcatgaatgtgaatgtgaatgtgaaatgtgataccttaccaatcaattaaataaaaactccgcatgctatgctttgcatcaagattcaacaattgtaaccaaagctacaaacttaaacactctttgtctcataaataaaatgaatcataaataatacataaacaaattaatattatttataacaagttatattagcaaatcccaccgttactataattacaggtacatatgataaacttttctttttttcttaaaaaataaataaataagaagaagaatatatagtccttcaaaaatcgaacctttttttcccttaagctttgaatataaaaaattaaaatagtaatttatattatatgttttaatgggagattaacaatataagataagtagctaattaattaagggttaacttaatacaccttcttagtgaaaagactccggagattaaaaagatttccaccgtttccgacactactaacaccgccaccgcgaccaccacctccgccgccgacttggccactgcttctatttcttccgttgataccgccaccttcactgccggtgacagcaccatcactagtgccaacactcatcaaagcactattctcattacttctacaactcaaatgatttctatacccaatacacatcggaacattaatattcaacactttagctttcgtagcaccaccagcaccggcatcggaggaagctgctacacctttactccggcgaatttcggatacttcttttttcgctcccttttccccattccgtaccaaaggctcaacggttctaccaataccaccgccaggagttccggctccggctccaccaccacgcctaacttgccaaactgggctgctccggcccaaatgaactccggcacgacttggactgctcggccattttctggactttgactcgccggcggagttgctccgggaacagggtgcgctatttaccttgcgtgaaccgggagctccaaacattgtcttgggtcgggtataagcattaccggcggatctactccgggagaaaggccatatattgatgttcaactcggcggcggaactcgttccggttccggtcttccgctccttcttcttttccttattacaatctttactatctttatccttattactattattattattattagtattaatattactatcttctgattcacttttggtgcttttcttaaaaatatctctccaccgcttcgacgcgctcaaaggaacagccgattcggcggaagaaatcttgggtccgggtccgggtccggattcgggttcgggtttgggaggaggaggaggagctggttctggttggggaagatggggttcggattcagaaggtgtatctttgtgttggtgggagagaaggtgaagagggagtagaaagccatctacgataagctcgtcagcggataagagattgggctccggaaaagaggggtttcggaccatccagaactcgaagtcgggtgagtttgaatcgaagctgattcctcttctccttacgctattgctgggagtcaaggtttgggcctccggaatgattattgggctgtccattcccgggcggtagaggagttgagaagtttttcagtttgtttcctatgtttagagagagagaggaagaaggaggagaagagtagaggtgttttcaggggggaagtgaccctactaatgcaataaataaagagaattaaacaaaacaatagacagatatattatagagaagaagaaaatagagagatggtgttttatttattttaataataaaattttataaaaaaaaaaaaaaaaaaaaaatagagaagtggggtccatagtacatggaaggagcaatgtcataggttaggattagagagatgatttggtggtgtagtttgaatgtagaaggataatgctcttttttctctttcataatatctctatttctactcattaattagaatagatagaatttgtccaactattatctttcatcttcgtagattttcgcctatctcatttttttcttcttaagtatatacttctaactataaaaatacttacaaatagcctcattcaaatattttggtctttttttttaatgagcaataaagattaaagatacttctaaaaatttggataataaatgcaaaaatttctcataatgattttaaaaccattaaaataaataaatttaatagaaaaaaataatgacagttgtaaaattttggtaataaattacaatccaatatcattagggtcatgcaatttattttaaaaccatgctatcttttttctaaaaatttgaaagaacaatagggtaaatcataaaaataattatataatatgaatctaattaagtcgtaaatctctcatccctatagataaataaatatttagataaaaagatataaattattttcaatttttctctttatacaatttcaatatatatattattgaatatatatatatatatataaattggtaggcatgcggaaatggtaatatcaaggattata

SEQ ID NO: 382598 - DNA, 3408 bp, Cannabis indica
aaaaaaaaaaaaaatacaagtatggcccagtgattaatcccagtgattaatttgtcccacatttaaagcttttaatcatattctgtacattcctttgatttattttatgtttatttttgcataatttggggctaccactgtctcttgaaagccatggaaacttttgattattgagcttggaactgggatgtgtggtgtcattatgtgattataaaaaagtttaaaatgatatatatttaaagtacagtgctataattttcgtggcgcaatccacggtgggatttattgttatatgatgtgtatagaattactatattttattgattttacattaagtcaatattaattagttaatcaattaaatattgtaattgaggtccaaatttattttgttacccaattttatttttaaattgattgacgattaattgcagtagattttggtaaaaaagtgtgcatatataaattttagtttaaggtattttttttgtttttattttacaaatgtaaaaattatatgttaacaatacgtgcaaatctctactaacatatccatacagagattcctttaatctaatataaatatatataatccatggcccaaaacttttactacgttatgaattattatgatggattggtgaataatgaaatgtcaaagttgatttcattattaaaagtgttgaagttggaaggaaatttctaattcctttttattttaaactaaaatctattaattcttcttttttttgaaatgaactaaaacttaaaaaaacatgaccataaaaccagaatagttattaatataattatataagtagggttactttgtcatttaaagtagtagttgggtaggtacgttttgatttaatatactttaaaaactgatcatatctttaacaaagagtttctcattactttttagatattgaattttcttataagaaataattagttcatacgataaagccatgcagagtaagtatttcacacatgactaagatactattacttcctttaattaatacaattttaaatggcaatcattatcttatttggagtaagtactgtatgaatatataatttttatgcattaaaactagctagtggccgtcattatattattactgaaactttctaatatagcttaagtaattattaataacaaaatcttcaatattatacccatgcattattgtggttcagagcagagagactgaaagtctgaaacatataattccatgcaagaccacatacgattccgaaatttcaaaatgctactatatgacctcattgaagtatattttattcaaacagtcttgaaaaagaaaaggcccacatgcatcctcctgctgatcctgtaagatatatatgtaaaatcatgggacaatacttatatcatgatacaaccaatgtgaatgtaccatatattatgacaacattgtcatggaattattttccaaataatagacatccactacatctagttttaactcttaattaccatcatgtcacaacaaaataaggattaattaccatgcttaattacattttttttttttgttaccaggctacatgttgatagagtcatgtacgtacatacaaatatgtacgtttatagtttcttatgtttcaaaaaatcataattgcataaccgttttcctaataatgttctaaaacttaacatatcaattattacaaattgataatgatataatgaatttacagatatttcatataggtatttcatatcgtcaatacaatacaaaattctttaaaaaaaacttttataacatggttagttttattaatatactaaattagttgatataaaattggttaacaggggtctaacaattcttctacatataactaaaattgaaagaaccttcacaaaatatacattgtgtgtgatccagaagacccaagaaaagaagatttttatgtgcacaggaaataaaaaaatagaatagctaggtgcagcaaatgtggcccaaaaagttataggaagacatgtcataactaagcaattagatattgaaagaacattaatttgaattgtttaatttttttctgtaaacttttacaggcagaaaatatcactttagtacattgttattacatttgatacactattggtttttaaaaaattgcataatagttgttttgtagctgaatgtcagatccaacatattatcaaaaatgtaaagcattagcaataccatatttgaaacattaattagaatttcaaaaaacttttcttattttgttgacaagcatgttggttattcaacagttgctaaacaattgaatgataattgtatagcaagtgttacacataacacattgattcaagtgatttctctaacttacttttataaatataatagttagacattttgaataaacactgtcccaacgttaaatcaaatattttatatatcggcataaacgaaaaattcatacaaaaatatatgtattataacccaaaataatatagtctcaataaaagataacaatttgatatccaattcttaaacaaaaagaaaaaacaataatagaactataacatgaataaccaagatttaacatctagcctttaaaaaacaaataattaaaataaataataacattcaacaggctatagaaatcagtccccaatcacgagagtcttgttcttcccttaaacattcttcatagacttctaaggcttctcatgctcactatcaatgtattcttcattttttcttttatcatatacaaacaaaatcatagcaagcctcgtgagataagctccgatatcaaaatttagtggaacattttttcgaactcaacaaatgtagcaacaaaagcaccacagtcactgggtaaaatacaataatcaaaatagttaaaaataactatgctgaaatacattaacaactaaaatacaacgacataaataaaatacatttattttcttgaccaagcagagaaacaatctccactactcttagtggagctttcacatcataactaaaatctgcaacaatctataaatataatcacaattgtcaataaaaataattaatgaatcataaatgaaacctaagattaaaaaaataaaataataaatcacactacaataagcattcaacatacataaattcataaccataaaaagcaaaatcaacagcaagtactaaaaccattaaaaagagaaacatgattccgaagttgagaaacggaaaagaaacctaaaaccaactaatacgaaatataaatgaaactcaataacagacctaaaacaaactgagaaattatatatatcaaagcacggaaaccatacctaaattaaaaaagataaaacctaaaatatggcaaaaaaaatgcaatacaaacctcaatcaaacgaggagtttgattctt

SEQ ID NO: 382599 - DNA, 2339 bp, Cannabis indica
ttacatatatattatgggaatgcaggcaatgctataattgtttttttttttaatatctgacaaaaatatgttttttataagtattttatttgcacaacacttgttattttaacgtaattttaacttttgaatgcatataaaacattgtttctttagtcttaactacataacattacacatatgcccataacttatgctttctttattggttcgaagctgtaatcctattgtgattaggcactgcatatttcagcagtgctattaaataattaaatagaaaaaaagaaaggtaaagcattgattagtgttttgcataccctaatgaattataatatatatatttgtgggaggagagccaaaacgggagcaaaatccgaaaaatgaaagaccatgcgaaaccatgacatgcgcgtaaaggactttaaatgtgatacagatatatgcatgtacaatattatataatgtaatatgtattgaaaacggagccatgatgagtctgagttagacagagcaaaagctaaatagcttagaagaagaagcaggaggaagtatggactagagaacactagtgtatagtatagctagctagatatataggacagtgtaagtaagtaagaggagaggtgtcagacgaattggctctaaaaagaaaaagaaagcatgacatgaccagtgttagctagtaggatattgatatgaatatatatatttagtccttttttgacctgcttttgtcagccaaaagtcaaaaggaagagaagaatcgggaaaagatgggcagtgttatagattgtaagagacatgtcagtactccacgctacatgatagctaataacaaaactaatatataaaaatatgaactgggtttgtttcttattctgcaaagtagtaccatctttccacctgctttcccaacttataacatattaattacaacacagtaacgtaagtacagtaaatgaagtttggtagggttggaattaattaagtggctgatcgatgaggattcaaaacgctaaaccttgaaatttctttcaatttttaataattttagttgaaatccaaaacccttgaatgattaatggttgtataataattcataaatcatcaatcatccactagtttttataacttatgatttctagtgaataaatataaaaaataaaaggtcattgttcaaaaatatatatataaaattaaaataaaaaaaaatcttcattttgttgtacacatgttctcatcgtatatagcctttcccaggtgttccatcgtaaggtacatacaaagtacaaacctataactatagtattaacaataggaccacaaaagaatattttagtcaaagccaattatatttctggcttcttttccgtctcttttccacctgcacatattatttgttcctttttttcattcatcgagactattttttatgtgtgaagatctcatttaacactggtcacaaatttcatgtatgaatctttacatgtcattgagaaaatgagagtttgcagaaagatccattctccatgggaatgggtgggttggctaaattttgggcagttaataaaaaagggagggaaagatagtaaaaaagggcgagaaaatatttggagaaagaggacaagaaggaatagtttttgaatgtaaattagatatgaacataggtgtacaaagcgtgctttcccacgctttttctttctttcatttccaagaaagagcaagccaaaggccagtctcgttaaaagcaacgaatcttttatcctcaaaaatccctaatcctctttttaccttctgcttgttaattattttgaatcatactaatactaattactaccttaatacattacatgcactagatctctatctacgctatcttatctattttgtagtacgtactaatagtttcagcgaaagtttaataaatatcaacttttaaatatatgaagtttgacatatgttttttttctaaattgtcaatacaccactttctgattggtttatatgtcttattaagaacagtcacaataacttatttaaaaagttgtttattttgagcattaataattatacttctctgactattctttaaaaattattttcttaaatatgaacacatctatgataatgtaataattaattaataatgtaggaactgcctttgttaataattaataatgtgttaaaaccaatccaaatctaatacattaaactcttaaaatttatattaaatatgttaactattttgttgacttaattaaaagattttaaaattttataaaataaaacctacacaaatcaataatgaaaaaaccaccttttaataaaaaaactcttga

SEQ ID NO: 382600 - DNA, 1704 bp, Cannabis indica
atattaattaattgtatctatctttgaaatcacgaagcattatcatttccacaatttcgcaaattttagcttgcatgtgagagtttcaatttaatttgattttttttttcaatttttttttatttatatatggttgttgattcaatgtcttatgtttgttcataatttgatttactttaaaaatcaaagtgtaactaatattttcttattgtagtttatattgaagatattattatggtcattttttcgatgattaaaaatacattaattttcaatttaggttaaaaacaatacaaatttgttgattgatttagagaaccattttttcaaaattttgaactagttatatattaatgtaattcgattgatgataatttattgatattgcattataatttttaatttgtaaaatgatacatttttctaaatttaaaaattcttatgtatattgtaaaaaatttatttagttggataggttttctaaattaccataggttattttaatgtaatgcttgactattataagatataataatttttttacttttttgtatacaaatcaaatatcattgaattgttattttagttttttttttagagttgtagtcatgatatcaacaatttattaataatgtattgaattgttattaattatcaccaacttttgatcattgtaacaaaaaaaattcaaccttatataaactaatatatgtacttaaattttcctcacacatctaggatattaattaaaaataaacaaatatgtcatgagttaacaaactaattactaaaaatttttaaaaatttgacttggtatcaataaaagaaatagaaaagacaaggtaaaaaaaaaaaaaaagaatagacactgatggaaaaaagtatggtggtaatttcatgaattgaatgttatttttcttcaaattagaacagaatcgtgtaaatatgtaaaggaaacatatatctatacattgagcatttgaaaatatcaaaagttcataaaagagatatttcgttttctaattttttcctaagtagatcattctctaacatgaaaatatatattgtatacatatataggtgttttgcacatatattacaggtcatatggacacagtattcaacgaacatcataaaagagaaatgctgtggtacatgtattgtcatcaaaacaaagacggaggatggggactgcatattgaaggtccaagcacgatgatgtgcacagttctaaactatcttgccatgcgcattcttggagaaggacatgatggtggtcttgataatgcatgcttccgagctcgaaaatggattcttaaccatggtggagcaactggatctgcttcttggggaaagatttggatgtctgtaagttcttctacatatcattgattaattagttggtacctaacactatttcacatggttggcctatatccctagtaaaaaaattaccaataacatattaaattaaaaatatatatatacataatttaataaacattatgaaataaatgtgaattgcagttttcaacaattttgtgatagttttttattttgtttgtaacatgattacgaacatgaaaattttaattggcaacaaatttgtatatttcagttgaaaattaaagtaaattattgttacaaaacatattttttttagagcaaaataaactatttattattttacgactatgtgcacgg

SEQ ID NO: 382601 - DNA, 3362 bp, Cannabis indica
tttttttttttttgtttgaataaaaaggatgacgtggttcagattctttctctatccttttgatcattttaacattctcagagatcacgtgtcagctatagaaatcttatacttcccgtctcccttaattaggtcagggaattgctaaaaaatattattgatgtcttatactttctttggtgttatattggtactgatgtaatcaagtagcgtgtctcatataacctaaaaaataacttttagagaatatcactaaccaatcgtaaggtgtcacctataaaaggtgttggacactagtggtgtctaatagcaatgctcattaggccatcggtaatcacctcaaagttcccatcatacagataacaccacctacactaagctagctttcaaagggccaatttttttttaaactcttcaagagggattgtgggttttgaacccttgacaaagtaggcaaaggaaggatgatagtaaaggcaattcctaccactacaccatacaacaagttggttaacccaaaaaaaaatgttataatgggaaattgtttaggaaaaatatacataactattattttttataaaatttttatactacgtctaaagaattttttttatatatttttaccgtgttcataaaaataacataaataacaagaaaactacatgaaaataatattcaaacaacattaaaaaataatatacaaataacaaaaaattaacaacaaaataataagagtacaacataaaattatcttaaaaaatcgtattttgtgtaaataaaattttaaaaattgtaaaaatatttaaaattttgtataaccttattttcctaattttttgttattgtttttgcatatttttgatataatctcaaattttaggtgtgagtatcatttttgactttactatagaatattttttattttcggtataaggagaaattataaatattatagttataataggtattttctatgtttttagaaaatatgattcaaatatagtttgttacactagtactgtttttattttatgcttgtggaattaattgattattttgatctttatattttatgtcataaattatttagaatttctcaaaaaatatattggatgcaccatcctataaaacaaaataaaatataatttttactattgtattttctgagcattgaatgaaagtgatattgcaattttttttatgtgattatattttagttttttttggcaaataatttaggaattagatggctgattatttggtttattaatttatctaattttaatcttggtggtgtctccaacaaaaaagatgctctaattgaattgtatgttattattttagttaattgctattaataaagaggcgtgatttattaaaaaaaaatgtcaaaaattgaatatgctcctatagtagaggcgaagtaagagatattgtccaaatttcttgatttagttaatggtaagttattgagaaatgttaaggagtatcttaaggtgtcattcgctattagtgcaatttaatataaggtcttatatattttgatgcaattcaatatcagtatggtgttggtcactataagatgcgtaaaaataatactcctaatttattgtagtttcaaatatgacattgtgggggttaaagtagttaattaccaaatttattggggatgaccatgtgattttacagcaagtaaattacttgtttgatgttttttcacctggtgggacatgagtaaaaaaaaatgataacatgtctttctttcttgagatgtttagtataatagtttaaatgttgctttagaattctacttctaaccatgtcttaacacaacttcttatgacaatttgtgaattgatagtgtatcagaagatggtgaacttgaaggagtaaggaactcttgtgtttgtgtcattcaataatgaggattttgcctaaaggtgagatttttctttctttcttttatccttcttttcaagtgttactctcataagtgtctaatcttaatgttgaaattgcctatataaatcttagaagtgtgaatagtatatcaaaaggactattaattatgatcattgaatgttttggtggttgagggttagacctcaattgggacacaaaaattttacatgttctcatttcaaatcaaattcttcaatatttttctatatcattagtttttgagttgttaggaggagacaagccaatttttttcatgttgccaacaaatatgatattttcattttgtgtagttaagaggggacaaaccatatttttcacccatcaactccataaaacatgatcattattaatgtttattatagctttcacatgcattagtgtcccatcttgaacaatgttagaccaatcaaacacatttacctttaaaagtatatacaagtattgaaaaagacaatattttcttcttagaagagtgaaaaaatgcaatttaaccaacactacttttgaattttgttctctttctctgttaaaaacttgatgcattgattaagatttaatgtagcttatactcggtttaatgtatttaggctttcattgattaataattatttgatcaatttaattattgatttgacacaatgaatcttctatgacttaataaaaattatttttttaattagaataatttgcagcataaatatataaatttaactcttggttacatataaatacataagtttaatttttgaatataataatactgaagttatatttttgaaactttccgtaggtacctaattgttaagtatcaagtcaatagtcatgtaacagttcttaatttgttcagatcattaaatttttattttttatttaaaattaatttaaatatacaaataacaaaataatacacagataatgacttgacacttaccgataaattttaaaaatacaagcctaaaaaagacagatttccctatttattatagtgaccaaatgatattaaacaagatcacaatgtggaaagatgaaaacaaattaaatataacaattcaaaaccattttttaattatgattttctttcatttccttttgttaataataacattacatcatagttaaatcttatatttctttggtattgttgcagatggggatctcctttcttccttccaatgcatctcttctggaataaatttgagagaactaaactttatgtcttttgcttggttgacttcatataggttttagctagtgcaccctttttgtgtcttatttcaatgacatgcctaatttgttatggaaaataaaggtaaggaaatggccctcctccacaattagtttctttatctctctcaaaataagggtaaatactattttagatcttgtgttttgtaaaagtt

SEQ ID NO: 382602 - DNA, 973 bp, Cannabis indica
aaatgatagtatgaggggaaaaataattatgtatcggaggtgaaattgatatagtagactcgggagtggcatgagaatcagatgatgatgaggaaggagtgcaaaatgataagccatgcttattaaaattaacatctctagatagatagattctcccatcaacacttaagcacttgtcacccttatggacaaggttataccataggaatgtgcattgagttacaattaagtttgtgtttattatatggtctaaaattagggtagtaagcacaactaaagactttaatagatgtataatcaagtgttttgtgaaacattatttggaagggaaagaaatggctaaattttggagagagtttataagataaacaactatcctaaaagcttcatccaagtactttagaggcatatgagcatgtgcaagtaaggaaagaccactgtcaactatatgtttgtggacaagattggaagtgaagaatgccaagttgctcaaagtatttatcaaaaggtttaaactcaccatcacaattagattgtgtagcttttataggtaaattaaattgaagtttcacttgttttttgaaaatttgaaacgtgagaaaagcttcgtatttggctttaaatatagccaagtgtacatatatactatatgcatctatgaaactaatatagtatgtgtatccattggaggaagtgtgaagagcatggccccataaattagtatatatcatatgtaaaggttgagtatagaccgtctcagaactagggctgttcgtagtgcaggtggtgctattttttgacttttttttttttaaatcaatccgcacatacagttttttttaattttttaaaccgcacctgcactgcaacattaaaaaactgcagaaactgcactacaagaaataatgtgatttctgcggtttggagtatcactaaataattaaattatcacaaatacaataaaccttgagca

SEQ ID NO: 382603 - DNA, 1998 bp, Cannabis indica
aatggagattgtattagttggaagtcatagatccaattcgtagtaggactttcaactacaaaagcagaattcatcgcgaccacagaggtattcaaaaaagcaatatggctacaaggatttctgaaggagttgaagcttatagttggaaggacaagggtatattctaacagccaatcttcgattcatttgtgtaagaattcggtttattacgagaagacaaaacacattaatatttggttatttttaataagggagaatgtagaagaagaagtaatcgagccggagaaaataaagttagaagagaaccctgctgatattggcactaacgtgttacctatcagtaaattcaagcattccttggacttactcaaccttagttgctaagaagctacacatgaaagtactactgcctccataggacaaatgtgcacaacttgttaatgcttgaagaaataaggtagaattaattgtggtataattccttaaactcctaatcaagattcggttagttagttgttcattaactaacttaattgtaaaaaatgatagcaaatatattggatccattgtcctatataaagagagctactcatctcatttcataagaacaacaaaaagaagactcaaccaaaaaacggagagagacaacactgtagagagaagttagagtgtgaacgtgagagagatatctaagagataaagagttgtgattgagaaattgtattgagcaacattgatgattatgttggctcgggttagtgagttaatgagtgttgatggattacaccatagaagattcactgtgattatttttttgtagcttctacgattgataactcttattctcatcaaataaagattggtggtcgtgcttttaaactggagtaggacaaaattcacattgaacttgggatttgaaccagtataattctcgtttcttgttgtgtctagaagctatcaagatttatcttggtgtttatgtttctggtttgatatgtgtttgctagttttgttcttgattagtttgttttgatttaactcatgttgtttaagtatgattttgaagctagaattaattaattcatatacatgacagctaaatttcttacatttacaggatataaatatgtttgtaaatataaatttagacaataagttgtacaaaatagtaaattcacaattaaaaagtagtataaattgatgtttctgaacaaagaaacaaaacataatgtagaaaagagaagaagctattggaaggaaagtgcatgagctagcagtgtctattgttacaaaacagactatatctgagactgaaactctgctgaagtgtgagacagaatatttaacaatggcattttttcttcaattcccaattttaagtggtgtatttgcaaacttccatgaacaacgaataaaagcatcttgtattctatcacctgccacgtcattgatggctaccaaatcagaaatctccttcaagtcttctttgctcagtttcactcttaatgatccaatgttatcatcgagattctttgtcttagttgtacctacaatattaatcaacaaaacaagcttagttaacttacttttgctactaattaatatacaaatagtggcataatgaatgagtttgtctcaccaggaataggcgccacgtcatcaccttgatgaagaacccaggcaagtgccaattgtggaatcgtacatccatatttttgagccatcttctccatttgattatacaagagtttgtttctctctatattttctccttgaaacctagggtgtgattcctacatattcaaaacaaataataataagtagtatgtcactcagtttagtcggtttatgctacattttattcaactcaaaaagttataaaagtttaaatgcaacccgctcaattaacaaaacattaaacttcaacccggccagtcagattaactcgcccaaatcgagcactaatatttattttttttcacattcaattattatatt

SEQ ID NO: 382604 - DNA, 1212 bp, Cannabis indica
gatataatacatgataagaaacaatcaacaaatgttgttgatcaagtgcctaattgaaaaggcaatcatcaataaatcatacaaatatatatagtacattaatgaactgttaattaattattagtactatatgtataccgatattttaaattgcttaattaattaattatgcataatcacacatcccataaacacaatactgacccttcttgcacttgttcttgcaagcaccacaatgcctcttgtcaaagttgatgttaacacaactccctttgcaacaaatctcagtatacttgcatttgtacccacacataccacaattcaacttatcactcttcacattcacacaattcttcttacaacaatctggcccactactgctcttcaaacgacaaactctaggaaacttgtcacatgtcatcttctgtgtcgccaaaactcgcccacctcgtacccaatcgtgactagttttctcgaattcatagtcacgatcatcatgatcttgatcttctgtgtcgtatgatgatgatgagcttatgacggttcgatcattatcatcatcatcatcatcatttattgctccaacattattagctagtagtactagtattgtcaagaaaagaaatactagcactacaagcttcatatttgataaaaataatattgtgtagagagaaatattaaaagggatgagagtagtgtttatattgtacttttagagatatgtgttaattttatagggaaaaaaatttgtgacagaagggagagagttgacaattggggaaatgaatgtgcaagagtataaaggtaatttcttctgtgtgtgtggtctaaattcataaagactgcttagatattacttaataactatttagaagagatcgtttgcttgtatagaaagaaaagtactatactctccacttttgggtctgtattaggtttatagcctcaaaatatatataagggtacaaaagacgttattagcaacgaaaaaaaataatgcattattgtgtttgtaccgaaaatgtgatctctaatatctgctagcttccatttgcaatgaaagataaatactttatattatatagtatagtatagttgtgtatcttgtacatgatcagtatcactgatatatgatatgttgatacatgtgcaattttattatttttatatcactcgtggtactaaaacaatttatataaatataaaaac

SEQ ID NO: 382605 - DNA, 1365 bp, Cannabis indica
ggtagatatcaaagtctaaggaggtttattacttaaataatcattagaaacagtaaaattaaaaaaaaattagaacaaaagtccttaatctaacaatctcaatagttcgggggaattttaatggccaaaaaagttcaagagccggggcacaatttagtacatgtcaaaagttcaatgaaaaaaattactaattagccaaaaaaaaattatatatttaggctaattctcaagtcttctcctttaaaataagattttactttaccaccatctcttacttattctctccctccatccaaacaaagcattaggcttgtgattgaattatgagtttttaataaaaataaggatttatttttcacatactataatatagtaaatatttacatttttgtagcaatatttatagatagtttaaaatagcattattttttattttatataaagaaagtagcgtactagaaggaaggaaaaacgggcgtccactcttatttcgcccgaaaatgaatgaaaacattaaagttaaagatttgtatgacaataatatatatacagtagtttggttgtgacttgtaagctcttgcgttttctgacatagtttgggacaaaatatatgacaacaatatacacatgctagatttacttatctaggaggctaggcttacccccttctagttttggcaccactaatcatttcacagcatttacatgtgtatataatgtcgtttcctaattcgaataatacaaaacacaatattctatccaaaaaaattattagaaaactactccaaaagtaaaattgtataaaattatcattgtcatccatattttttttttttttcttctcttctctcaactcacaatacttggcctatgacagtttgtaatcgttgagagatgaaattcctactttccttttcattccaagtgtctctttccgaaatctcactttctcattttaactgaaatttgtttgattaattttttctaaaataacacaaagaatcaaccaagattttttgcaattattattttattttttatataaaaaaacctataaaaattaaagctaatttgatggtataaaaataacatgatctaaatagatggttccatcagtataattggtaatttataatactttgatttacatctaaccactattgattcaccatagaattcatactgtcaagcacataaacataaacatgaacacatcattgaatcagcaatgagcctatattgaattttatagaccaaaaaaatgctagattcaaatttttctaaccctacagaccaacatgagtgtctccagcgtgttttgtcctcactcacacacttcctaggaaaacttcccaggaggtcgcc

SEQ ID NO: 382606 - DNA, 2005 bp, Cannabis indica
aaaaaaaaaaaaaattaccaaatttagaaaaataccaaaagtccaccaatccataaaagcacaagtactaaatcactaataaaaccgtcccaattatttagctggaatttttaacacaataataaatgttatttatgaccatagtaaataaaaattaaagcatagtttaatacttcaattttggtaggaaaaaatgtatggaaacactagatttttcatactaaacataaaaaatgtgatctttttaatcttagtttgattgtaaggaaaacaagatttttcatactaaacactaaaatttcattttttgttttgtcataataaataaaaattaaaatactcaaaaaaattaaagctttgtttgatagttgaattttagtagaaaaattgtatgaaaaataaatatttttcatactaaatataaaaaattaattattattttttttcgcgtcaaaatccaacttctttctaaacatattaatgtaagaatacttacacatgcgcttgaacttttctttgagctcagttttgtgttcactattggtgatcctgaagtagtaatccggatactcactctgaaggacacaattggcgggtgtagccgtgccgatcgccatgatggtggccgggccctcggcccgttgtgccttgcgaaattcctccacggtaaccatatttggtaaacttgaggaggttttttttttgtgtatgtagtttaggtaaatagtatactcaaacaatagtagtattataaaagaaaataaatgttgttgttgtagtagtagtagtagtagtagtggtggtggtacgaaatttattaagtgataagagtgttatttatagtgagataatgtaagaaaaaagggtaggtgtgatgatgggtcacgtggttgggcaatggcaaaatttgtagccctctcgtttcaactacctttttttaggggttatgtagttatgcctattaaaccaatggccggtcgtatggcacgtgaccacaagagtttggtgtacttgttcaaaaacaagatattataactttgaaaacactctctctttctctctctctaagattcaattgtatgaagaaggttgttgttgtcattataagagccattcgttggttatgtttgtggtaggaggaatggatggtcatgatctatttgattggtttctcttcttttgtcttttgtgtttctctattcatataatttgagaaatgctaaaagacaatattggtgtctagagtatcagatctcgtgtaaattaagaaaatattttttagagaatactgttaaccaatcgtaagacgctatttatagaaagtgttgtatactactggtgactgataacaatgctcatataataattaacgtaatatttggttaaatagagtgagaatgagaataggaccaggaataagaatggtctttttttttttcattttaaaattgaatagttgttttgctaaaataatggaaaagtaattccattagaatcatattttttaatactttaaaatgtaactaaataaaagaatgaaataaaaatgattttattctattttattacttccaaccaaacgtcaccttagggtaacaattttgttagagagtgtcgtattgttaatgtgtagaaagataatatcatacacccctcctaaagggttgtttctgtatactctctttttgttttagcatccagaaaagctttttaattcagtttgttttatgatcacgtacgttgcagctatatgacatgacgtcttataattggttaacggttctgtataatttttattaaattaaaagaagtgggattcaatattgaattgcactaatagcgatattacacctcataagagcatctccaatggtaaaaaattaaggcacacttgctgaggtggatagatgaagtgacaaaatgttgggatgctatatcattggaggagaaagaatgttattctaagaatatgtgtgaatgttatacagtagcattgatgctatca

SEQ ID NO: 382607 - DNA, 2590 bp, Cannabis indica
ccatgggggattggcaggtttacttcccaagtagccaaaatcctcaagaggttgcaaagcataaagcctttgtgaaagaaatattcgttgttcaattctggaaatctcaattccaaggaagtatttcaggtcaccaaggtcttttagtttaaacttgttattcaagctaatctttaattcattcatagcttgcaaatcattcccagcaagtataacatcatccacatacacaagtagaatcaaaatacttgtctcttgctgtctaatgaataaagaatagcctgaagcagagtgttggaaaccttcttcaataaagttgtggaaaacttttcgaaccactgccttgaagcttgtttgagtccatataaggacttttgaagcttgcatacaacattaggaggaagcacccccttagggatatacccttgaggtatagtcatatacacttcctcatgtaagtctccatgcaaaaatgcattattgacatcaggttggtcaagaaaccatcctttgatagctgacaaagcaagaattagtttaacagaaacaagtttagttacaggagcaaaagtttctgagtaatcaatgccctcttgttgattataccctttggacacaagtttggctttgtgtctttcaatgctcccattagcattgtacttgattttatatacccacttgcaaccaatagcatgttggtggggggtaatgaaataataatccaggtgtgattatcctccaatgctctaatctcagtggacatggccccatcccaaactggtatgccatgagcctgatggaaaattcaagttcaaagtgactagaaatagcaagatcaagagcacgaaactgtggagacaatctagtgtaatcaatgatttcagaaataacatgatcagtgacagctttagatgattgactgtggacagtgttggtggacaagaagcaatgataatcttgaagataagatggttttctagattgtctaacatgtctgctagttgttggaggatcaggatgctgctgaatatcaacagtatgcacaatatcaggtggtgtgagaagggttgaggatcagttgtaacaatgatgttttgatcagtattaacagctgtagaagtagcagggaaaaattctgagatgtgtggtggtaacaacttagcggatacaaaatatgtgttcatggaacacaacatctctagaataaaaaaacacgattggtgttaagatcaaggaccttatatgccttcattccaataggatattctaggaaaacacatgcagtagctcttggagagaattttaatcttgcagaccctagggttgaaacataagcaagacacacaaatgctttaagatgactataatttggcattttggaattaagaatttcaaaaggggttttgtgttttagattgggagtgggagttctgttcattagataagcaatagtactcacacactctccccaatatatcaaaggtatgtgcgattgaaataagagagctctagcaacattcaacaagtgttgatattttctttccacaacaaaattctgttgtggtatttggacacaagaatgataatggatgattcctagtttagaaaatagttcaggaaattggagctctttagcattgtcaaacctgatcccctcaatttgagcaccaaattgagttttaacaagttgtatgaaagctggtatggtagtttgtgcatcaaatttgtttttaattaggtggatcagtgtacctagaacaatcatcaactatggtgataaaatacttgaaaccttcagtggtttgtgtattatagggtcccctatagtctatgtgaatcaaatcaaaacattgtttggaaatattatgattagaaacaaaaggcagcttcttttgtttggcaaagtgacaaatagaacgatataaatttggacaaggaccatattgaaattttaagttttattcaatgaatgattttttacacaagaggcatgaccaagcatataatgccacaaggtttcatcacttatttcagaattaacaacagaaaaaatagatgacaaagtttgatcatgtaagtaataaaggttgccaatcctttcacccatcccaatcacttgattcttggtaatttcctgaacaatgcatttggttggcataaataaaaagagtaattagatgaatcacataaggcacacacagagagaagattgaattgaaagttgggaacataaagcacattatgcagcaatatgtcatataaatgaactgttccaacaaaaacaactttggcataacaccattaggcatgccaatagaattaattctagagtttttctaaataaaaataaccaaagaagggttataacagacatggtgtgtggcaccaatatctatgatccaactagtttttggaatagaaaagacattaccaaaaatgctagaaatagtaggctgttggttgtggtcaatttggcattgattagtttgagttggggatccagttggttgggatgtagatgcttgagactgagattggatcctttgtgctatcatttgttggattttgtgccctaaataaaacccattac

SEQ ID NO: 382608 - DNA, 5583 bp, Cannabis indica
aaaaaaaagaaaaaccagggctgagtgagtacagctggtggttaaactgaaacaaagaatctgagagagagaccattgttttgttgtaattggggtcacagaccaaccaactccaactccaagccgagccgagtaaccaaacaaaggaagctgctcaatttttgtcgtgtataaattaacccgagttagtttcaactcaaccacggttaatgccccataggccgcgccacaaaaagaaaagaaagaagtctgccttttacccccacctctttcttttctctctcatgggagacgactaagacctgctgctattcggaccagagggaaaagtagctgaagaagaaagcactcgttttgcgaaaaagaaaaacccttttctttttgggtcaccaacgaaacggtgtcgtaacaagagatctgactacagagatagagagagagaaagcttagtggtacatccatggaggaggagaagagcgcgcttgtgcagagcgtgatcgacgtcgttagcgatataggttcgatctccgaatacaagtgtacggtaaagaaacagtattgtaatttagctaggagggtgaagctattgaccccaatgttcgaggagattcgtgatagtaaagaggggttgcctgaagacaccatgaaagccttggtttcttttagggatgctttgagatcggctaacgatttgcttcgattcggtagcgaaggaagcaagatatacctggtgcgtgctttattattttatcttctcgattggtctatggtttttgcagttctgtgcttttattttactgctcttctccattgttattattataattataatatatttgcttttcatgtttagttgctaagaaaatagtgaaccctgagagaaaatagaaaattattttttgtttccatgggaacttggagcatcctgttgttcacttttattatactattgccgcgcagtaactaataaatccttataatcgcgaaaaatttgcttaaaattcagttgaatgtgcaactggtttgaacattgaaatttctctatttgttagatgatatggttatacaaatctgagtttcaatttttgtattatattctcactcttgttttatttaaatttttgggattaatttacttgagtcgtttgaatatgaagtcaacataggtttactgtcctattttttcttcctgattgaccaacaatttcttattatggttttttcttagtttataataataatttttacgaattctatattgttaatttgaaacctatggattaggtgatattcatatcgtaagttttttcttatatcgattactgtccaatcaccagtctgtagctgtgcgaatttgaagtaaaatctcaatctattaattggcccaaacttaaaatataataatttatttgcctggttctttgattctagtgctatagtattagttctcttggttactccttgatctactacttgtccatgaacttgttttttctttttttggtttatgcccttgtctggcccttcctggatttacccattgaaagggcagggtgtgggggtgagaatcatggtctctgattccatttttgactttcaatgaagaattatgagataaagtgatgtttttaatgtttcagaacaataatgcagacttcattatttagggcttattttatttttttatcattggcacactaagtgcttaattgaaactaaaagtctcataaataagatcggaagttcgaacgttgttgtcatcccaattctcaatccccctcagcactgaccaagcctatcatttagggcttaatagactattcaaaatctagaatttcagctgttctttgtgtaagacaagaaaactgagcctggtacctggcttaagaagaaaattagctgctggtttcgaagtcgtattaagagaggaatcttttttgatggtttaattatatttttataaaccttttttttgactagtagttttctcttgtatggaatttgcaataatctaacacattgtcacttaaaggaatagttaatgatattatgttggtttgttaagtatttgatatagccaccaatcactgttgatcaatcaattagaaaatatgagtagatggttaattacgcctcttgctcaaatgattagaattagttttttctcactggttaattgttatttggcctctttcatcaatttcttactctcatttgtctttacttgttctggagtacgttcctgattactctattgtcttgttctttctttttcacttatgcttgaggttcctttttattttgtttacttttggtaacctttattcatgtaggtcctggagagggagcaagttatgagcaagttccatgacgtgacagctaaattggaacaagctttgagtggtatttcctacggaaaacttgacatatcagatgaagttaaggaacaggtacacacttcttttatatgatcgtaacagttctgagacgattactgggagttttctctttccaagcatgtcacatcttgtctgatgtgacttagtttagatttttctttttacacctcagtattcttattgagttgatcaatttttaacacaatcttccttcatataaagatcccatttaattccaattcattgttttaatatttttctcggttcaggttgagcttgttcttgctcagttcagacgagccaaaggacgggttgatgcccctgatgttgagctgtatgaggatctctcatcactttacgatagcaatgatgcaccggcagatccagctattctaaaaagactggttgagaaattacagttggtgggaatagatgagcttgcacaagagtcaatagctttgcatgaaatggtaactgccagtaatggggatcctggggcaagcattgaaaaaatgtctatgctattgaagaaaatcaaagattttgtgcagacagaaaaccccaacttggatgcccctgcaagagaaaagagtgttcctgcaagttgtagtgggcaaccctcaactgagaagaatcacaaggtcccagtcataccagatgattttcgttgtccaatatcacttgagttgatgaaagatcctgtcattgtttcaacagggcaggtaatgcatcatttgcttgctgtatcatgactgttgcactatgatttcccttctatattttgtaatttgtttttctattgcactggaggtcctcaagatgttctgtcagtcaagccaaagtgattacccattgtaaatgcacaggaaatcatgggccagatggactgtttcttttaacgtatttaatggaatttgattgctaactgattctgcttccagtttactatttttttaaaattcaatcacacttagttttgtttatatatcttaattctttgtctaatgcaattcatttcccactgcgacagacttatgaacgttcatgtattgagaagtggctagaagctcatgggacatgcccaaagacgcaacaagctctctctaacaataccctcacaccaaactatgtacttcgtagtctcatagctcagtggtgcgaagctaatggtctcgagcccccaaaacgacccagcagttctcgacccaataaagctacatctgcttgctcacctgcggaacgtactaagattgaaaccctcctgcgcaagctcacatgcggaaaccccgaagacaagagatctgccgctggagagatccgccttcttgcaaagcgcaatgctgataatcgtgtggctattgccgaggctggtgcaatccctctccttgtaaatctcctttcaacacccgattcccgcacgcaagagcatgctgtaacagctcttcttaatctttccatatgtgacgaaaataaaggaagcatcgtatcctctggagcagttcctggcatagttcacgtgctcaagaagggaagcatggaagctcgtgaaaatgccgctgccaccctcttcagcctctcagttgtggatggaaataaaattactattggtgctttgggggccattccaccacttgtgacactgctgagtgaaggtaatcaaaggggtaagaaggacgctgcaacagcactgttcaatttgtgcatttaccaagggaacaaggggaaggcagtgagggctggtgttgtgccaacactaatgcatttgttaacagagcctggagggggcatggtggatgaagcactggcaattctagcaattttggctagccaccccgaagggaaggctgccattggtgctgcagaggcagtgccagttttggtagaggtcatagggagtggatctccaaggaacagagagaatgcggctgcagttttagttcacttatgtggaggtgaccaacaacacctagtggaagctcaagagcttggagtcatgggtccactggtggagttggcacaaaatggcaccgaaagaggcaagcgaaaggctgtacaactgctcgagcgtatgagtaggtttgttgagcaacagaaacaagctcaggagctagctgaggctgaagctctagccgaggctcaagctctagtcgaggctcaagctcagatgcagcaattacaactttcctccacagagactgtagatctcagatgcagctatcctccacaaatgctgtagatggctgacatgtttttttttttcttttccatttgtctgcacttaaaattaaattatcaaagggagcggcattgctttgcttttggcgggaggaggtggaagatcaccttcaaaatctgcaagttaaatatattcaatttgttttgtgtgcaccacaccacgaaggaccatacgaacatcagattcttaaaagaagaaaaaagagatcaacaaaggggttgggggtaaactagaagacaggacaggaggggtgaaatatacctgacatgtatctaaaattgtaccatcgtaacatcattgtaatcatcctcagttttttagtgaagagatgtttattgtcccaggaaaggagaagaaatgtctatttattgtactcgaatcaaatttactgttactgcataatttagtgaaattaatgattgtgacgaagagaacgaaagaaactttagttttatcatctcacggaattgccactaggagaacatgttgaattataatgctagggacaatgaataagattaaccttctcttattgtgcttcagaaaggttatgatgagatttttatcatggtggattagactgcattgtcaatcacaagaaacatgttttgcttgttaaagaagtttttagagtagctcaaactaatttttttgtgtagatgggaaattagctcaaagccgtttgctccaaaggaagataatgttaaaacgctactatagagtaaacaacacaatggcaaattagctagtgcaagtttgcaactacagtagtagtagtagtttccaaatctaattagaataaaaagagacgtacctctcccctcactttggtttgtaattttttgggaaaatttacctatggtatactaacttttgtcattttttttataaaaatactaccaaataatatttttttacttttttactgtgtttttttataagtttcat

SEQ ID NO: 382609 - DNA, 1723 bp, Cannabis indica
agaagaagaagaagaagtggaaataggaggttgttactgtgtgttttaaaatgaaggagaaccctaccttattacacatattaaggtattttgacatggactttttattaaataggttgcgtatttgttttttgatcgacactaatatgattgtctaatagtgttgatttaaaactgacactcaattttaatagtgtcggttctaaaaaaaataacattttaacttatggaaattagtgcttcattggaactagcaaaccacagtttaaatctggatcggaataattcaaaacactatagagtgtaatcggcgacaccgtctttggcgatctggttaattaggactattcaatgctgagtggtttggttgtggttcgtactaaattgtagacagttaaaccggactggaccatttacaatatatagtttgtaggttttatgtatatatcttataaaagaaattttacatattattacccaaaatattaacctaccaaaatgattgaattaccctaaaataatacaactatgaaacataattattattatgttatgttttaaattttatattattatttgtgtgctataaacatgtcacttatcatattaaatgtatactttcaaaaataaaattaaaaatctcataaataatataattactttaaataatgaataattataaactcaacttaaagtatagttttgaaccaaacttaaattttttttaatagtttggtttgagaaatttattggtttgattttgtttctaatattcaagaaacttttatattgatttagttcaaaaattacaaaaatttaaactaaaccaatcagtgaacacccttaattaaaaatatttctttcggtagtagtgctaataagaataacaaattagtacgagtgtcgttatatgttggattcgtgaaaaatatataaataaataaagcaaatagaatattcggccttcttttgttaggcaagaaataaatgctgcatgtgtgcatttttgtttccatataattgtatttcaattaatgaaattttaaataataatgattttaaaaaacaaataaatagctctcttgataaattatttgattcatttcctggcttggatgtaatattatataggaccagtctacgggacacctcttaaaatagtatttcagtagacctttcatttgtttcgaaaatattcataactttttagttctttttttttcatgatcgtgtatgttatagttatttaggaccatctgtaaattttgtaaaaattttgaataatttatattatcgaaaataagttttacatattttgttgtacgtacgtactaatttttttatacacatggaaagtaactgtttaaattttcttttcgataattgtaaactattcaaaattttctgaaaaagtttacaagtggtcttaaataattataacgtacacaatttaaaataaaaaataataaaaaaaaattatgaatgccaaaacagataaagatctaccaaaacaactactttaaaaggtctactacagaaatctccttttgtatatataatattctaattgtatacaattaattaattgagtaaaattgtgtagataattaacaatatactaaatataagaaaatatttaagtaagattattacttttgtttatataagtttgggttttttaatattttatgttaaactatagttttttgtatttttttttttt

SEQ ID NO: 382610 - DNA, 1693 bp, Cannabis indica
aacgacgaagttttgaagaagacaagaaaactccaaaccccaatgctcatgaagaagaagaagaagaacacagtgttggaattgattattttcaaagacccatttggaaatgcttcacctttgaagaaatctctgaggccacagatggtttcagctcaggttagcttcttaaagttcttctcttttttttttccttagtgccattttggtctgttttttttattaaggtgtttttttttttcagataatttggtgggtaaaggaggctatgctgaggtatacaaaggagttttaagaaatggagatgaaatagctgtgaaaaggcttacaaaaacagcttcagatgagagaaaagaaaaggaatttttgactgaaattggaaccattggacatgtccaccataaaaatgttttatcactacttggttgttgtattgacaatggtctttacctcatttttcaattctcttccataggctcagttgcttctcttctccatggtaccaaccaaagctttaatctttctttctgggttttctttcttttctccaatttcataatgggatttttttgttttcttcttaaaggtgagaatttggctcctatggattggaaaacaaggtataagatagccattggtacagccaaaggtctccattatttacacaatggttgtcagagaaggattatacatagagacattaaatcgtccaacattcttttgactacagagtttgaaccactggtaaaaaatttctacttcttcatatgaatttcttcttatgttaattttggtttatctttaatattattttttctttcagatatctgattttggactagcaaaatggcttccatcacaatggactcatcattcaattgcccctatagaagggacatttgggtacttattaaaaaacaacatttattatctaccattttctttaaatgaaatgaaatgtttttaacattgttttatttatttaattatacagacacttagctcctgagtattatatgcatggaattgtggatgagaaaacagatgtgtttgcctttggagtttttctattagaaatcatttcaggcagaaaaccagttgatagttctcaccagagtttacacacttgggtaatcaaatcaaatcaaaaaaattgcaacttgattaattattctattggggttaaggctttgcttaattagtctttggtaactaaatattttttaaataagcacatgtgattgattgttaattgttaattattgattaggctaaaccaatattgaaacaaggagaaattgaaaaactgattgatccaaagatggaagaaggggcctatgatgttactcagttgaaaagacttgcctttgctgcctctctttgcataaggtcactcacaaaatggcgccctaccatcactaaggtattaaaaacaattcaaacaaaaaccccttttattaacatatatatatatatatatatacacacttaatttgtagaaaaggggtatttagtcatatttcatatcactagaatagtgaaacttgttgcttattctttgcatgggatctaactaggccattgtagatggaaaatgatatattatataattatatattactttggttgtaatctttgagatgctttccttatcaatatggtcatatatatatatatatattatttattatgt

SEQ ID NO: 382611 - DNA, 1576 bp, Cannabis indica
tttttttttatttattattaactttacttattattacatactagttttagtacaaattgaatatttttatgtattagttcgattggaatattttttaattatcaatataaatattgttttttaattttgcttctttaaaatttaattttatatttataattaattttattatattattatatataatgaataattaaaatctaatataaaaatatatataaaaaatcaaatctaaattttataggtgcatttttgcgcctgtaaaacaccccataaaatatccagaataattttgtttaccttttgccagcgcattactgtgtcggcaaaaggtaatacacgccaaaaatatattgatgcaaaaatattttattggcgcaatattgcgccaataaaaccctcacgccaatcactcaaaaagtgcacgacacttttactggcacattaatacgtcgtcaaaagttttgttatgctgactattggcatattaggggctttgtttatttcggtgtacatattttgccaacgtttattctcgtcagtaaagcatgttttaccgacgcaatagtgaattgcactagaaaaacctcctttacgtacttaccaacaatagctgacatcttttccaggcataattatgtgctggcaaaagtatgccaccgcatataatatacttttatcggtgcaaaaatacgacgataaattaaagtaatatttcttgtaatgattgtaccatgttcttgctcaatatcattatagaagatttggtggtgtttcagaattagagtagagttatagattacactgatttttaggactcaaaccaatatatatctttgtgttgattttattgttttgttgctttaatcatttctagttttaatgctctgttcatttctgttttaacgtctggttattgtgtatagtttgttaatcttgtcattattaattgtttattgattaagttttaattgttttaattttgcactataattgtaaaattcccacagttacatattttaatttaaatcatatatacaatttcttaagggaaaatatatatttgatttttatgttttatcaaaatacaagtaccatgcatctgtactcaaattttatcaataaaactttataaatttaactaaattacaaacagcttccatattcataaaatttgtttattaaatttggactccaagataccaatttataatttcaaattacaagttactaaatgagtgcattatatcttcaaaaaaaaaatgtgtgcattattaaaaataagaagtagtaaattaatattttgtagaacacacaatgcaaaataaatatttactcttaaaataaccaaatatttagcatataattaaggtgaggaagagagttacaactttacaatcgatcgaaggaacaaaatactataagatattgtagctaattaattatcattgatctttctagggttttctgtattgaattattaagctctcgaacgtacaataggcaatttgcatgtttggtgtatatatatttatatactagaaaaaattacgtgcgaggcacgtatattaaattt

SEQ ID NO: 382612 - DNA, 2123 bp, Cannabis indica
tttgatcaaatccatcttgcaaattgtgccgaattagttcatgagtatttttcagctgcttgtagctacatgtgatgaattacaatctattattttacagttcgttgggggggggggttacaaaaagtgacaagaggaagattgcttgggtaaattggtaaacagtttgtcaaccaaaatcgaaaggaggattggggttcaaggatttggaattatttcatcaagctatggtggccaagcaagtgtggagttgcctagtcgggtgttgaagcataaatattttcctcattcatctattttggcggctaaggattgaaatgggtcatctcatctatggtcgaatttgatttgggggcttgagcttttgcataaggggttgaggaagacggttggggatggaactagtattgtcgcttttagagatccatggcttcctaggcctagaatatttcgtcagatcacttcgaggccagaggttgattggttggttcaagaatttattacaacaggtggtgtgtggaatattacggcgttaatcacatgtattcttgctgatggatgttaatgtcattcttgatatttctttggaaagtgagtgttgtggggatgattggtgttgggactacaattcagatggttattttgtgaggagtggatattcacggctttagatttggtgaatgaaagtaaggggtgttcggacttaaatttgagtgcttggtggaatgatgtttggaatttgagggtgccacagaaggttaaaatctttgtgtggtggatgtattatcgagtagttccatcgaactctcaacttattaaatggaatgtattagttcagccgctttgtgtgaggtgtggtgacgaggtggagacttcggagcgtgctttgttgttttgttcatcattgattcccatttgggtttgtttggggatttggggaaagttggatggtcatcgtaatgggccttttattgagttgttggtttagtttttcaacgaggtatcacaagatgctttttccttggttgctatggtgtggtggtgggtgtagtatgatcaagattctgtgttgtttgagaaaaaatagtctagattagaggtgcttgtgaagctcgctgttgtagcgttggaggaatttcaaggggttggggtacgggtgttggaggcgatggtgactttgattgggggtgggaatgggatgggtgggcggtggaggctcaacgatgggttcttgatccggcgcaaggtctcttctcactgtcgtgtgatgcagcagtggtgcggggaagtggttttgctggtcttgggggtgtgatttgtgatgctgttggtttcgtttgggcgtcgtgggctgttggatgtgagggcgagttccaggtggtggtggcagttgggcttcgattgggattggggtgggcttctaatttaggttttaaggtggaaaaagcagaagttgattccacaattatttgtggtagggttaattgtcccaagtctaatattatttttaaattagttgttgatgaggttaattctcttttagttgttgttggtggtggttcgtattgtgccattcctcgtgttgcaaatagtatggcccatgcagtagtaaaatttgttactagctcagtaagagtttgtatatagatagacgcttgtcctaaattttttatgtattcctataacagttgatttaattcaatagtattatcatgtttttctttaaaaaataaataaataaataaataaataaaataattgttagaatgaatttacaacatttcaaaatacaatcaaacacaaaaatataataaaattgattctttttaaattcattttattatctcaaaccaaatgtgacctaaagttttaaagcccatacttatatatttcaaccagtttcacttaaccggttatatcaagtaaaaagttaagggtgcgtttggaaagtcacaatgtaattggatttgtgtgtaattggaagtaattagacaattcggcatgtttgtctgaccatgtaattacactataactgtgtaattagaagtaattgagggattccaattacactctccaattctcatggccccccatgagaattgaatgtaattacactgtgtaat

SEQ ID NO: 382613 - DNA, 2422 bp, Cannabis indica
ctctctctctctctctctctctctctctctctctctctctctctctctctctctctcttgtggttttttcgctatttgtaatgagggagtatgggcttttgggtcatgtctcaacctcttttaatttattgatatgtttttttgtgctcacttttgattattttcaaagaagcgtccttctcttttgatggtaccatcttttttcttgagtgtctttcaagaccctcttccatctcttcttaagtgtctatttttttagggaaagggttgctcgaggcatgtttcttctttttatagcgactaagggtagctaatgcttgtgcgtataagaagttctctttatcccttcttgcccctagtgtgtagcaacatttatagtgctcgacacttaaggttttttttttttttgcaaagacccttctatacagggattagaggtcatcgaggtaacctctttcttgcttaccattggaatggtaaatttacttgggcgcttggcattctgagttctaagtattgaagtaatataatgtgtgtgagctagcaatggtcgaggcatatggcttgaggaattacttgtagggaattttcatcaagtataacactattctattcttgtatgggtgtcttccttgattatagcaatgatgtactggtgtctaaccttacttgtggtcctttacacttagcacctccaccagtgtttggggtctgtctctacatcgttaggtctcttggagccatggaggagggatatagatgatggttcaaaacaacttagcttcttgcccctagtgtacaatatatagtcgcctctaaatttctttaaatgtttcatcctcttggaggaagttttttgcgacgcaaaggcgaaaggggcgaggtggtgtaggtataccttattggtgataactatgatcaatgtggatcaatggttaggctctttcaacttttctcatgtaagaggttcttgaggaatttgttcaatgaaagcctctatagtgccatgtgctccatgtggatgtcatagatgaacagtccatgaaggctcggggatgaagtatgtagacacgctcccaagtaaaggaaagtgttggtttacaagtggatgtccttctttgtttatttccctagtagcgtagaagagtgacttggtcctatgggacttcagctccttgtcttgtggctatggaggcttgtccctagttccaagcattgggagttttgtcacgtgatatcccttggggttttgcactctcatactggattttcctatagattcgtgcatgaggcatgtttcatgaccaagtttgtcacatgttgctcaattactttgcaagcatttgagaacatcagtgttgcctccgttttactcccagatggtgcaaacaacaatatgtcttttgaaaagcgcccctttttttttatcttctcatctctgtagaaaatcttgaggttagatatataagatgaacaaattctcttacttgttctttgctcaggctatcaactataacaatctagcctccgcttagagcgggttgatctttattagtaagaaatctcgtacagcttgtcagagctctgggaccgttagcaattgggatatcgttcatgacttcctcttccatcaatttccacactcgactcttagaggtgggtgtttcttatatgctaattatagggtatcactagcagaacataaaggtatctttccatcacttgggttgtcgtcttcttttgtcttcataccattggttgttatgcttatcataacatcatctttattccactatattcgacttaatatctctcatatgcttgtcatcatcacttttggcctcctacttctcgatcgaggtttaatcattttctcacaacgatatatattgtggtttgttcattttctggtcttagaattcatacggtcctgagtttaacctttttaaatcaagcaaaacgaacactgtatgagggctcacggggtccctatgtttccttttggcgagagataaatgagattcttgtctccttcctctcgtgcactgtaccgtaataaagaggagtgaggccccttgtcttacaaaggggcaagagcagagtggtgatagagttgcaggcaagaggtatggacgtacggaggtgggcacggtgctggcagcacggggaggcatgaggtgagtagaaggggtatttatagttgggttatgttggccttgtttacaaaatgagctttaggtggtcgctatggggaccatgtactactctgatggcaggtggtagtgggctggagacattcttggttgggcgtcaagtggtactgagtgttcatccaatccaatccgcactattttgctcatagtgtatccgatccacactaagtgcggattttattttttggatccaatccaatctgcacaat

SEQ ID NO: 382614 - DNA, 3984 bp, Cannabis indica
atatatatatatataaatatcttgatcaacattggttttgtgccttttatgtggtttatgttctaatccattgtaacctaattaagttactttttggggttacagcgtagatgggcattttgttaattcatattgaaagtcaatgctaatgtaaagtttataactttttgtagatccttttcatgaagtgaagagcaaacgtgaaaagaaaaaagaggttcgtgtgttttgaaaattctcattattatgatttttgtttggtaccttgaaacattctttgatttatataagtttgccttccttgtgtatgagagagttttgtgtttggtaccaaacacatttgatcatttatgtttttctgagctctgtttattttttcttgcaatcgttttaacttgtttcactcatttttcattgctacagaataaggataccactgatttgaggcctcgcggtactagtagctcttcaaatcatcgtggtggtaagggtggcggggatcgttattctggacgtggtggttcaagccagttcagctctaacggtatgtaactgcttcactccctttcggtgtgtttagcatttatatatttcagttgttttgtttatttctttgtatgtttatttcttttttcagattctggtgcatatcatggtaaacctgcatacaagaaggaaaatggatcacatggttatttaggatcttcatcttcagcatcgggtgtgactggaaataatactaaccgacgacctcctccatcctacaggttagaagaactatatgaatcaagtagaatacattcttaaattcttcggattttacaattagtctgaagtcgaaaaaagaaaaaagaaaactaagaatatacttaagtagtcaatgtaatagtgatccttatttaattgtctgtaacttataatgttcactttagccaatttacctgtgattttgaagttgattctttccaattacgttcaaaatttgtttcagtgattctgtctcctcagaaaataagacatggccagtaggctctacagatggtatctcttcaactccacagccaccttctggatttcaatcttcctggttgggagtccctggtcaagtatcaatggccgatattgtcaagatgggcaggccacagccaaaggtttctgccccgtctaacccaccaaaccacggtgtccatcatcaaactgtgcctgcacctccttcagcacatcacaatttgcatttatctcaagaccatggatccaaggattcagagttccacagtgagagggggcttattcaaagtgaaaacgttggtccaaacgatgaatggccttcaattgagcagccacaagctgcaagtttgtcctctgtcatggacagacctgaggataccgagtcctatgctaataattcgtccaatttgcctgtagacggagcaagtcagcatttgaaatcccaattagaagaggatcaagtagatgaaaatgatcttgaagagacacttaatgttcctcatataggtcatgcttctgtatctggtagaaatatgcaagaggatgaatctgtaggtgcacctgttttcgagaataactcgtatgaagacatgtcttcgtatcaaggacatgggcatacttatgaccataataaaggtaactataatgctttactttttgtttttgtctgccttttcatataaattaaaattacatttgtatggaaaatattaatatttgtttctccttcaaattgttgaatccagctgaagacaacgtttcatcaatggctgcaaacttggagcaacttagtttgcaaaaagatgatcgaggagcacaacccgaagaggatgttccttctgttgttattccaaatcacctacaactgcacactccagactgcctgaacttgagctttgggagtttcggatccaccgctaacactgctatttcaggttctggatcatttgcacccaggtccatgaacagtaacttagaggagacatctgcttcagtcgatgtccctgcaattgacactaggtatcacatgatcatgcttttttacgtatgtttaattggtttatttatttcttttcggtatttcttaataggaaaatttcctgcagaaatactgagttttacggagacgagcatcttggaacttcagatggaaatatgattcatagaactggagcaaatgctggagaatatgaaacctcttctgttcctcagacagaagccatgaagcaagaaacttctgaagctgatcaagggaatcagtatgcatttccttcttctgcacccggatttacttacgaaaattctcagcagttgaatggggcttttagtcatccacagacaagtgcacaaatgcagaatcttgcttctttctcaaatgttatggtatgctaatattattatgaaccaagtacttttcttctaaatatttgatatgaagcttatcctctattgggtttgacaatttatctaacaaatctgatactgcaatatgttcttggcattatttttgtggaaaataatttcggtatcagtagaattttcgctctttactcactctgccatatttcattgcagcagggctacactaatcaattaccaagcactttgttggcttcgtctgttcaaacccaaaccggaagagaagatcttgcctattcacccttccccgttacacaattgcccacaaaatataacaacggggcttcttctatcagtggtcccaccatgtccatgccagaggtaatcttctacaacatcttctaatcttagcttaataagtgctcttctttaaattctgatttctttcattcgaatattttcaggctttgcgagcagccagtatgtctacaccacagccaactcaacagaacgtccccggtggcaatgtagctacaggccctgctcttccccaacatcttgctgtgcacccttattcccaaactcttccgtttgccggcaacatgatgagttatcctttcttgccgcctcagacctacaatccatacatggcatcggcgttccaacaatcattcgctaacaacacatatcatcagtctttggctgcagtgcttccacagtataaaagtagtgtctcggttagcagtttgcctcagtctgctgccattgcctctgcatatgggttcgggagttcgaccagcattcccggaggaaatttcaccgtaaacccacctacagcacagacaggcacaaccatcggctacgaagatgtcttaagctctcaatacaaggaagctagccatttaatgtcacttcagcagcaacaggtaattaaatcttaatttgctcattcattcaaacaattaatgaaatgaatccattgcagaacttttcctgaaccgtgtttattttgtttttgacagaacgataactcagcaatgtgggttcacggaccggggtcacgagcaatgtcagctgttccagccagtacttattacggcttccaaggtcaaaatcaacaacacgctggattccgacaaggacagcagcagccacagcaaccatcccaacaattcggggctcatagttacccgaacttctaccactctcagtcagggatgtcactggaacaccagcaacaacaaaacgctagggaggcagcagcagcagcagcatcatcgctcggagggtcacaacactcacaaggccaagtccaacaacaaccatcgaagcaatcccaacaacagcagctatggcaaaacagctactaattccccctaatcgcaacaacatcctcctggtttttcttcggggtctttttagtatcgatcgagtttcgaaaaagtggccaatgagaggcattttagcgggtcttgaaataattaatggtttgtttcattatttattttggtggtctgaagagaccttagactggctgctcccctgtgccacgaggttgtattctacatatttatgattatcattatcattatgttcttgctcttgtttttttttttt

SEQ ID NO: 382615 - DNA, 1374 bp, Cannabis indica
taaacttagctatatatagctatttctttactgtattcattcaatgaatttgattctcaataaagactactcttatttttctctgctttctctgttattagtctttagctttgcccactattatcgtggaaaaaaatatttcgacatatcttttaggcgtaaaattataagaaattgaatagaggttgacggtaacagttttctataaatttagtataatttcttcaattataacttaggacaatttcacactctcaaataaatacactgacaggtccaaaaattgtgaggtgaaaaaagtcagaaatagctgccgatattactgtcgcaaaatatactgacaggtccaaaaattgacatttccaatttgatcgtaagagattacggaaatggtgacaagaatacatataataaagatagatattatatttcatttgcatcgaaatacaaataactaggtgtggtttcaaacaaaataaataaaatacataggactatgttactcatatattaatgttttaaataacaatattaatcaccgtacgtatacatgtattttcagatgcagaaataactaaaaattattataaaagttgaaagaacataaacaaactttctaatttctaataatcataaaattattatgcctacttttctttatcttcatcagtattaattaagaggataatgtatatcaacagagagaattctttatttatttatttattttattgtgatttaactactaaaacaataaataaataataataattgagggaccgtccacgccaattgtacaacgagtccactaatcctaatcccgtgccacaacatttaaaaaagcttaggtataattaaataaaacattaattttaataaatttttaaatttttacgtgtaattttttatatttaattttatggtattttataaaaataaaaaaaataattaaaaaactaaataaaaaaatatataaaaataataagaaaataacaataaaataacaataaaaaaatattaagaaaatatttatacaaaaaaaaaaaaattaactacaacataataataatacaatcagcatatcttctaaataaaagcaatttttataacttctgtataatattaaaattatttcatacatatattgaaagttatgagttttaattccaataaaaatatgtttaatttatggcatgtttactaataagtaatgggaatcaatagtaaggtaatcattcccttacatttgtttacttgcattattaaaattaggaaagggagaagttgattaaataagggagaaaagaaagggagaacttctcccaccaattttgtaaggaatgccattaagggtaatggatttttattattttt

SEQ ID NO: 382616 - DNA, 4742 bp, Cannabis indica
aagaaaaagaagaaagagaatgtaaaaaaaaaaaatggggccgcgtgaacagcggagctacagcaggcaagcatgtaggcgataatggtggtagtggacgtggtagtagtagactagtagtggaagtggtgtgttaagttataacaacttcaaataataaacaactatatctttatggagatatgattttgtcatattattgtacttttacgaattgtaatctgtgatgtacgttagatgtaaaatggatataattttgtcctgttattatactttcacaaattgtaatgcgtgatgtacagcagccgtcaaatgaaggagatatttaatctgacggctgagattgatctaagagtaattagggttaaaaagtagaaacgtactctgacactcatttaatgtaccttgagacccatctaatgtaccacggaatacattccatgaaaacacattatggataaaatcatatttatatatatgaatgaagagttcaaatatatgtatgtacacacccaaataggcatcgaaatattagatcctcaccattttcctttttaaactaattacattgatttaaactgagcagattcaatgtttttaaaacacagtattacatcaactaggtgtatatttttaatttttttaatggaaaaatttcattaaattaaaagtaaatgttaccctattacaagaatactctgaaaaagaggaaaaacatcttttcaaaaacattaactcttatagagctaataacagaattaattagtgcgtgaaaaataacataagcaaacaaacttataaaatcatcaataatatgagcatagactatggtggatatacatattattaatttatttttctctatcaagattcaagagctagccatgaggagctaggtcccaattcgaaggatcaaagttagcccacgtagtatttattttgatatgtagttgtagtagtgggtatagttaaggctgatatatctcaaaactactacagcacattattaatttccttaattacaaatatatatacatatttatatatttatataatttcccatgtggttcgtgccctttaatgcacatgttcacatcatatcatatgattccaaaccctttcggcagcatatatatatgtatatgatgatgccaccttttcccttgctttgcacactagtttgtagccctgtgttagttgttacttgttacatacattgctcaaattattcttctttcaacttacccaaagtatcccattatattatactaatcttaaaaaattatactaattatttttaatgatcattgatttatttttcttaattattatagttgtacgtaatcatctattaatgatttcatcataaaataaaatcaacattaataaaaacaaaaacacatgaaggttatgagtgtacaatatataaatagaaaaaagaaaattgtgatattaatgccacttttgataaatgaaaagcgatctcatataattggaaatctatttaagtcactacaacaaattatacttacttatggtgagtttttttaaaatgttttacacaaaatttgtaagacattattactacatttagaagactgactttatttatttttattgtagactaaatgtgtgagccattaattaaaaaggcttggtgacattgtaaggatattccaacaatagaactcctattttgttgtagtgtatctcggtttatttatattttcaattcttattcaatgtttcaacgatttttatgaacatattactactaccaaatgtcttgtgccccatcacctaaattttttccttcgttacaattttttttttaattttttttaatcaataatttggactttgactctaaattagactttagaaatcagaccttgactaggacttcgaacccaaaccccaaactgaacccagatctcgacttggaccccagacccaaaccctgaaccgcgaaccccggaccagacccagaccccaaactggatccagaccacgaccccaaacaggagccggagtcggaccccagacccagaccctagactaaacctggaccccaaacccgaacactagatcccaaactaggtctggagccagacctcggacctagactgcggaacccgacccagaccccaaaatcagaccccgaacctcggaccagacccagaccctagactggactaagacccggaccctataccgatcaactcggacctcaggcccgaacaccagacctcgaaccttgacccggaccgtagacctcgaacccgaaccttggcccctgcgctggacctagaccaacgccagtcctggacctcgacccaaccccggcaccgaactaaaactcaaacctagatcccgaccccagtgccgaacccaaatccgaaccctaactcggacccaacttaaataaaatcaacaaatgatgaaaatgaaaattagatttacagaacatgtacacttttattttttgtttacaaaattgaaaaataaaagtggttgtaaaacacatgcttatgtttcacatgtaaaactttaaaaacaaaaattttactttttattattgtgattaaaaattttaaaaataaaagattataaacatcactgaattttcaacaaattgtttttaaaaaatttgatcaacactttaagttaggaagaaaaataaccttttatgtatttgattttgattttttattttattaacgataagaaatgaagttagaacacgtaacggtactcacattaagtctgttttagttaagttgagcaagtgtgaaggaataatatgctttgccgtgtgtggcgagtggtatatatagcgtagtgtacgtatttcgtatactctctcataactatatatgtatgtacatataatacatatatttataacacatttgtttatgcttatcttatccttttgttttgttcacactttattcttacccattgcccttttacttagtcatgaccttaatttccctgccatgccatatatacagtatataataatatatactatatatagctgtgcattaataatattattagactttagacttttcttttttattttatttatatgttttacagataagattaatgagaatggaacctttggactctctaggcttaatttcttcaaattaataaaactctttttatatgggggataaagaaactatttagcctcattcactacaacatatactttttgttgttattatagttattattcaaataaatatatgttataaaacataaatttttaatactataataagatatccattaaaaaatgtaaaataaagaaaatgtatatattttacttaaaatctacacaaaccgattaagaaaatacatacattttcttattaagaaaatgaattaatatacactgattaaacattgcacctaacatagatggttgcagtttaacacgtaattgaggataagagattggtacatacttgaagacttgtttgcacttttaagtgtatgtattcattttggagagagagacatgcatgtgggaataatttgctctttttttaaaagatttttattttctcttttatcactaatggggaatttctaaaattagaaagaatatatttttacatatttaatgtattaaaattcactccaaattactttaatataatgatgaatataagtttccataaaagttatcttggctatacatacataatgttaagttgttaacccccttaaataaataaaaaaaagataaatattaatttagactctttattttacaaaagattgattttattttgttaaatgataatttataaattgtatttttcaaaataatataatatagactctaaacttataatttttcgttaatttttttaatataaccaaccataaaagttaattttaaactcaatatctattttgtactattttaaaaaattaaaaatttaaattatcatttaataaaataaaaaatactgaattataatctaaaatagtatttactaaaaaacaatacataatgttacataaattaattagtaacgagaaacgtgcgaatgaaataatagttggtatattgattttaataattttcaagccattccttttattttttagttgacaatgtactcaacgactcccaataattcttggaagataagaaaagcaaagaataatagaatatgaagtgatttttaatacttttgatgagaaagggcataatatatataaatatgtattaacactttttaataggtacacatatatttggaaaaaaaaaatagtaagtacaaacactttaatttaatttgattatacataatacaaataatgctttaaaacatcttaaaccataagtacttcaagagatcagaatctgttaatctaactaagatggaataatgaatccgaaactgaccagagataataactaataataacttaagattatattaaataatattaaataaattaatttactatatatgtaaggtagatatgatgtggcaaagtgttttaagaataaattcataaaaataattaaaggcggagtccaatgtttagttctaattaaagttaattacataaatagggctgctcttggaaaaaataaaaacaaaatagggctgctatattttataattttatattgcatgcttcttcattattgatttttgagtaatttgcggcaaaactccatcaactatcaatttacttgcaaa

SEQ ID NO: 382617 - DNA, 2314 bp, Cannabis indica
aaaagatccccctaaaccaacccgggggacctcaaaacgatgggcaaaacccaacctaactctaaacttgtcaatatcacccttacataatcgggattccataacaaaaagcgaagaaggtttatacatctaaactaacagggagagatctaggaatgctcgatcactcccaagacctcaagcattctaacttaaaacaattatttctgaaggtaggcctgttcctccataggacccgcctcttcactggagaccactccacaatgtcttcttgtggtagggctttttacctcttcaacatctctcactactcattgccgacagttgccaactttctcttgaaacaagctacgatagtctgcgatcctctcctagcctgcaaatgattaggtgggccttcagatcgaggtgccaacagcaaaagcagggatattggagcaccaggcaaagtgaaattagtaatggtggaaaggcgagattaggaatgtggttcctgaagggggcattcatagggttagttgttggggatatggaacttttagaactgggagtggagtgttgcttaggggaagcagaacaagacatggatcctcctgaggccacaatcattaaagcagtgaaggatggattttgtgggtggccttatggggggatggtgacgttggggtgactgcacagattgacattactatgtggggggggggtggggcagaaatatagaggcttgtagtgccagattggtcctcttctttgagttggaaagaaaaattctattgattgatatgtcttctaagggttgaggagctagaaatattcactgggttctggtttggaatttgtatgagttgggtgggggaaatttgcatattagggaagtgtggttggttaaaaataggtaatataccaaacgggccatggttgtgacgagctagaccacgcaagacatttttgtagggcagtggtggggaatgtggggattcatctcaagcacgcatgtactgagtacaaccattgtaggtgtggcccagacgatcacaaaagtagcaatgatcggggatgtctccatactttaactcaagccatgtgggcgagaccattcttggaaagaggattggaactcctctaagcaagggtttagtaacgtcaaacatgatacaaactttcagataagagccccaagtttgaaggagagtaggttggtgtattttcaaaagggtcccaacgatttggccaacaagtctagctaaagaagaggaacgacgagaaaaggaaatgttgtgaatttgcacccaaaatggtatcttacgcattgactctggggtaagagtggagtctaggtcgtggatttcaagaagaacagggtttttatcaaaaatccaaggctagttagggtgatggctcttttcctatcaccctcgcagtgaaaggcagccaagtacaggttggagttaggggacctttccttgacactaacagggaatctacctttctagtacttctctaggaaattcttgagggagttattattgaaacttttagtagtgtataaggtcagcattagatgaaaaaggaaaagagctggtggaagtcctccatgcacttcagtttaatcaacaagagagtgcatggtatttgcagtgtcagcaaggtgtagagctacataaaaagagcaggctaacccttccataactagcaatttatgagcgataagacaataaaggataatatggataaaaatggtaatgcatgaaatctgggaatgtggcgttaaataatctgacactataataatggcaaacgaatggatactaagcctaggtgctaggactgaacattttgaccgggtttgacccggacccgaccaacctacctggacctgacccgctcaaccaaaaaatttttaaaaaatcatttttttgggcgagtcgggttcaactcggtaccccatcgggcgggttcgcagattggttttttatggccaccaagttgttgaaccgaaactgcccgccaacctagctaaatttattttatttttttatatttttcttatatatataatatattaaaaataaataaagaaataaattttaaaaaataaatagatgacatgtctgtgttatttattatagatataaatataaatataataatataaatctaaatattctaagatatattatatatgtatttattattattgttattgttattattaagtgatagttagtgattagtaaatggatgatagtaaattagtaatgtgtcgtaaaaaggtgtagtagtggttgtaacgcctaatgctaaggcacgctac

SEQ ID NO: 382618 - DNA, 1071 bp, Cannabis indica
gagagagatgtaatgtagtagtagtgattaaatttaaaagtgtctacagctcacaagtttggtatccgtgatggaaggaaaataattaatatggggctttaaatttgtgcactttcgtaaattccaaccttaattttttggggcagaaccacaaatattggcatcttataaatccataaaactatcttcaacttcaaccatttcatacttcattctttttactatattattattaattttgcccatttgtcggcagtttattcacaagctctcttttctttattattattattattattatatattcttttaattttatttttttaattaaggtttttttgtttgctttcattaattaatcatgagaggagactaatataagagttaaataacaaagaaaatctgacccctcgtttactttataaataattgattgttaaagtttcgttttttccacttctaagttctaattataatttattagaagatagtagttaatgaagggaaattgctataggtttttaaagctttgaccaatagttttggttctattgttaggttagcagctattattatcagaccaattatttcccattgaattatgatgacatatgggcagaagaatatgtagatgaatacaatattcaaactacttttcttaaaataatgttgaaatctaattatctcacttttagacacataatcgattactattatatttaaatgagcattgttattaggtataagtgatactaatacttttacaagatgacaaggaatgaaggtagaaatttagtgtgaaagagtcaaagtgcaagaaaataatttaaggggccatttacaccttagataaatgttatgtctttttcagtgcattagcaaagtatgctcagatcggatgtatggagtatacatcggactgaaccaatattgaacttggataatatatcataaacttaccgttatatctatctaagtcaatattagttaattgatcttaatcctaatatagttaggttctccttaaatgtattatctatgttcttagagttgttcgttaaagctcgatcg

SEQ ID NO: 382619 - DNA, 2664 bp, Cannabis indica
tttttcaaaacccatcacatagttgaaagaaattcattggatctagaaccatgcaatgcatgtgactctacttggtttaaacttatctcaaaggactaaactttatgtttatctactttcttcaaccacaagttagtcatgtttagttttgttgaagataatattggcccaaagggtataatgaatcttcttttatctctctctttgtttttttttttttttgtacccaaaagagaagagaatctaatgttttctttttttgtctttacatctattacatggccaaagggctaatttgataattttcttttatttttgtatttatatgtaaaaaactaaacaaaataggtaaaagtcatattttcaaaacctaaccatgagtggtttatcaacttaatatttacactatcatgtttgatcatcatgatttttggcttggagttggagtaggggtagataaagaagaatatgatgatgttaatagtgggggtgggcgtctaggaccaacactagtgaatggtaaggcctaaatattgagattttgacataaaggtattgtgaggtgaagtaatatagtctaaataaaagattcaaagtagaatcaatatgcaagtgaaccaaccaaccaaattgacctaactagtagtactactagcaatagttgttgtactaatactagtaccattaacgatttataattgtatacataggtgctagggttaattcaacatcttattttaacatctttcataattatttaattattgaattaaatatattattaaataattatttaattaaaaaataataataaaataaaaaaatttaactgaattctattaattataatatgatatttatatttgatttgaattataaatttgaatcaaattaattattaacgattgaataatcgcattgataccaagaaaataagtatatgcaatttaaaacttttatgatctaaaaaaactttaggtgaatttgtaacttttcatcacatagaaagaagaagaatcgttaaatagtattaacgattgaataatcgcattgattgaaatcttatccataatttgttaaatactttacatgcttattttaattttcaaatttgtttcattgtttactatgaattttattatcaccaaatagaaatataggtccaatttagttagtattctattacaattctcttgggttcgatttcacctgtgtgagtactgagtactacttgtttgacatgtgcacttgcatagcttaaatatttcgcaacaagtatctttgtgggtcatattgtcactaaagatagaattatgatagaatcgggaaagatttaattggttagggattagtcaaaaaagaagacacttacagaagttaggagcttcattggtttagccgggtatcatcgtcgtttcgtggaagggttttccaagattgccacacccttaagagaattaaccaagaagaatcagcggtttgtgtggaccgataagtgtaaaactagtttccaagaattgcaaatctaatgttagctttaccttgagatcaaaaaaattgtagtttattgtgataccctaacctggacaaaattgatttcgggaaggggagtagtgttatgaaagcccaacaaccaggcccaatatcatttgacccaaaagttatacaagagaaattgaagaaatattaggagacttcgtctcgtgaagaagctaaagtaaatgatggagttgaaaagaagatcgagactcaaaggaaaaaagccatttcgccaaagaagagggaaagagccaaaccacaatggctcaaagatttcatgatgcagctagctcattcggggtctagcctttttttttttaataactaaattctgttaatcctgtttggcttttatcatttgagtataaataatttcctctaaaaaaactttggtttttgttgaatgaaatagcaaattcattggtttggagactagccttgtctcaaagaaggcttttacctatcatgtccagcttgcattgaaggtaattgatggcattggcataattagagctcaagtgtagaacctctaaatttgggaaacagaaaagtaattttggaagtgatcccattaaaaagttgtgggaaatattgagctgatccaaactgcctaatgattaagagaccataccctcatgtttttatctcttcaagctctatcttttacatagtgtcattccattaaataatttgtagaattcaagttgtcacttccataattgattcttgcaacagtagaacataaatggtaagtttacaatgattaaatcaactgtattattgagccaatcaactatattatacaaattatttagaaaaaaaaataaaaacaaattatctcttgaggcgacgaacgatgaagaagacataaaatatagtgagatagaatgctgcgagtgcataattttcaggagcactgaaagacaaagcaccatttttagtctccataagtagactactcagctctttcttctcgtacaacaatgcctttgtacccgtgataaaggcaatcacaaaagaagaaatggaaagagagatgaatgacattgtgaccatagtaggatacctaaatttcctttcaaaaattatggaaagcattgcaaacatgaagtggattaacaaaga

SEQ ID NO: 382620 - DNA, 1393 bp, Cannabis indica
agtcagaggagacattcattgggatatttctagattcttgggcttaattctctctctctctctctctctctctctctctcagaaatctgggtaagaatatcgaaatgacaaaaatggtactaagttgacctctctcctatttatattcaaaattgtgatctgcgtgccaatgatccaatgacccaaatagtatatgagaaaaatacattcttcaagatccaatggtctgggaataccaacagttgtcgttaaatgctatgcacgaaaatcaaggcgtatgtatgatggcattcgcctcgaaaatctcattgacataatcgattatcattttgctacctgagacctcacacgctccctcaagctacatggcgcgcacggaccaagaaatcgatgacacatgtattccactcaaaatatgaaaggtccacatacatccacaactttctaccttagaatctcaaagggcctgagttgcttatggccccgcataccacaatgaattcggatggtggctgcaagccttcacaatgctcaagcctcgaaggcttaggggtagatggtattcatgtttctgggtggatgacgcgtatacttccaaggcccaaaatcaactcacatgcccatccattaggcgtaaaacaaagcaatgggtcagcctatatgcggagtcaaactacggctccaagttcagctataaccttgtctcgataaagctagacctttttggtttaggaaggagaatctcgtctagagaaatagagacttagaaaaacacaatcgcatacccttaggggtagtctcggaggagtagttaaagaggtgtctgggtgcagtcctacattgcatttctctaacaccaaatcccaaagaatcaaaggtttgtcccatgtgtcaaacctgagaaaggcgcacaacacaaaaagcaataccttttatccaatgtccactactctaacatttattgtacacgattagtggtgcatggccacctgtcaacagtactatgttgtcccgacgatggttacccctctattgggcctcacctacccgactcaaagtcaatattataatgtatttcaccccatcaatggatttatttcatacaaaaaaaatactaactcgtggactaaggctgtttaacgcttgaacccagacctgaattggacccctaaccccaaactccggacccagacccgaccccgagtcggtgttgggattgagactattaaaaatatattataactttacacatccttttaatacaagacaataccaaacataatattatattaaataatactaacaatacaatcagtgacggacccagaatttttattttgtgggagcttatttatcattaaaaaatatttatacttatattataatcactctt

SEQ ID NO: 382621 - DNA, 1530 bp, Cannabis indica
ctggtagagcttcatcgaaattttcgaatctgtgtgaaccgagatttagcttggtggcgtttcgacagaccacagacctttggccgctgcgctcgagcccagtggcgatctctttcagctgagttgatttgaatgacccgtagttgccaaagcagaggaacaccacagacttcggcggctgattgcaagccactgcaggatctcgtcatgatctgacgactgtcgattgttgattttaccttttacgtccaaaagggggccgagggtgtaaactggtggatttacaccgtccaaaagtgagctaatcgcatgggattccaactcgagtactgtgttgatgattatacctttggtcttctttaactgatcgccttggctcccaaatcgatcttgcttgtcaaaggcaaaatcaggtaaaacattctttggaactgggttgagataggtagatatgtggtggtgttcggaatttggctcagtgccatcgagtttgccgtggcttgtgaggtagagcattaagcccaaggtggccgcgccgcaggtgaagaacaagtatgaaggaacccctagttctacggcaacatcgatgatgtcggtgcagaacatgtcgacgaccaagccagagaggcgatttgaggatgaggcggagaagcggttggctatgatgtccttgattagagaagcgtgactcttaatgtaaagcagaaggtagtttgtaaaggattttttcattagctctggtgagggaatttccaagggttttggaactggtatgaagtgtatatggggatgggaaatagtgggcggtggcgttggagtctgttcgagtacagagcttatcagaagaaaagttactgaaaatctttcatctttttttagtaactgatgtgcaaactcaactgctggggccaggtgactttttccggccatagggatgaaaactagctcgtttctcttcatagtttttgtaattaaagtgtactgtttattgttttcaacttgatgatgaagaaggagagtaccattggtttataaagatgaaagatgattgaaactattcatatttttgtaaggaaaagttaaaaaaaattacgcatgtcgtggcgtcactctactttcgtactgggtccactaatatggatcacatcaaacttaagtagaatgtagttgatatgctctgtagttaatgtttggagaaatgcatggtctcgaaacatttggctttaatttctctcgagtgacatgttaatttgttataagtccatttatcataattttgccttggttcttttttttttttaagaaaaagtcccaccttctctgtatgtactatgtagacatagaaaaaatgtattaatttcttttattttactccaataaaaacatagtttctttttatgtttgatagtaaatttttattataccggcaaagtgctatgatcaatacatttaaataaagggtaataaatacactctattattaaaaaaaatatataaatttaaataatttttaaaaattactattaatat

SEQ ID NO: 382622 - DNA, 3165 bp, Cannabis indica
tgattcaaatcaagtaaagcttgctcccacatgatttagacgtactaaattggataatttgtcccaataaacatgatttagattttccatgcttcacaaattgaacaatttactgtgacaggtacttcgactacctcttttacatagactttgaagcatctatggcggagccccgagctcaatatgctttgggacatttgcaggtcagtctgccctactcttattattctccaattccttctgtaataactcatacaagcttttaacttccatgaaaacataaagttctatagcttgttgcttattcatgaacttttctacgagttaaatattcatagcgcgatcaaaagaacaaggaaaattaagaaaattgaaagagttgcctatctgttgttatcatgcaggaattcgcaagattccttcgggtcctaggttcctatccaatggacacatctccataaagagggcaaaatgtttttgggttttgtcacagctgttggggatgaatgtaaaagacatggttggaccttctaggttttgtaaatacatgtgataatattttgagggctggaagataataaccttggagcaatgatttttcaataaattaggaggaaaagttccattcattttgtaaggcttcttattttatttatttttaatgtaaatcattctttttgttggttgaaatctaatggaggtttatggggacaatacgccataaaattggagaagcgcaagctttacgttcatggatttgtttgtgtaatcagagcacatcgtatgagatagttttacaactccttttctaattcttttctattgttgttgttaactttgttgctggcaattattggatttaatttaattttcttgcatagaataaaagacatatatttcaacaaaagcataggcaacgcaactacattaattacactcaaacatcaaatacttccattggatccatttgacattttagttgatacacatcatgaaaaggaaggaggcagagtaacatagaggcaaccatattaaaacagtcgacactggttgccctcccaaatgcactcacttattcaaaggtgaagatgcctcgtccttattgctaccgagcttggcagttacccatggagttccttgagaaaatctttattgtcaaccaaaacctacaaataccagacaaagcaaacatgagccaaacttaacaacaatcgaaatagattgataattttatatcagaaatgtgtctgagcgctagaagtatcttttgcacatttcgaaaccccatctattcatgcatcagatttcactgattttttttagacttgatatagaagaatttcagcttaatatttactttaacatagttgatacacttagtttagttatcttacttgatttgagtattaaaattagcttgtctcaaacttaacttatctactttgttaatcaaactaaaataacataagaggctacatgtgttagtgcaaactcacagtcttccagccatctgggtccagaaaagaggtaatcttggtgttgagcccaggaatcggtcctggttgtcgggtaatctttcctccaagctcttgtataacagtgttcacaacctcagcactcttgtatacatcatctgtaccaatagcgatctggtatgatgcaagcaaaagcagattcaggataatgacattgttttcctaaatttgggggaaagcaaagatgcaaaatagtaaacagatatttagcgacctgtgcatatgcatttccctttgtgtattcagtcacaccataattataagtcaactccacaacagttgtcttctcctcttcttcataccccatcatggcaatggagtactgcaaaccacatgaaacaaaacacaagaggatccataagtatcaatcaacatagcttaaggatagaatagatcatcctatccatctcacaattctgataattaaaattatgtcaccgaccttgtactctggcctatcaaccctttttacaacacgcatacccaaagcctgcataacatgaaaagcaagaaaacagttggttaagtgctaatcgtattaagaatgacataagagtatagacctcataatcatattgcaataactcctgaaaactattaatagcatgagttatattcccaatcgcaatccaacagtgaaaagttaatatacttcggtaacaggagtgcaaacttggtaaataatcaaattaacaaattacacaaccatggtggataaacatattaacacgtcaccttttcataaaacttgacggcacgttccaagtcaccaacacgaagcataacttgacaaaatggctcaggggttgactcccgttgaataagctcaaaaatataaccatcagggtccttcacaaatgcaatgacagtctttccacctttaacagggcctggctcccgggtgacaatgccacccttggccttaacatgttcaaccagtttgtaaacctggtggtacatggagattataattcattctatcaccatgaaaaacccaaatatgaaaactttgtaatattaaaataacttacatccggagttgctatagcaaaatgtccaaatccagttccaatatcatatgaagacaccccataatctgtgatcaaaacaagatgataacccctcagaaaatatatcaatgaaatagttcaacatttacgcctcgataaaatgatacggaaacagaggtcggatgcaagttccaaaaacgaattactacatctttgtcgctcttttccatattctatcaatgaaacagaaaaagacaaagactccaattttcaaaattcaaaggaaaccacaagcaccattgaaaaactgaaatataaaaaccaaggaagtaactgttagtaggccttagggtaataaataaagagggtaattgggtaattgtaataagagggactggtgctatatatatgagtgagtagggaaggtaaggggggagtgaatcattttagttaagtgagctttagctcttgggagagagctgggtctctcgaatacccagcaacttgttctcttttcattctgatatcaatatatcagcaatattatttctattttgctactgtttgtaccgaaatgataggaaattctaatcagtaaccaggtccctaataatttctaa

SEQ ID NO: 382623 - DNA, 730 bp, Cannabis indica
tttgaaaaagaaaatcatgagctccacctcaaggcatgggataagttgtgcctctcaaagtcttgtggtggtctaggcttccgtaaaacaaaagagatgaatcaaacttttctggccaaataagattggaatttacggaccgaaggtgactcgctctgttgcaagattttgaaagcaaactacttgcaggggtaaaagcttctttcaatgtagttacaagaattcaaattcttggttttggaacaatgtggttaagtctaaatccacaattaaaaaaaggagactgtaagctgattgttgatgggaagaccacaagtatctgtgatgatccttgggttgctcacaggaacagattctttcctaaatccagtggcaatccttcttttagctataattgggtagctgatcttttgactgaggatggtgattgggatctccagaagcttcactacttgtatgagcctgaaactatcgcaacaattttgaatgggggaagccttctggtagggggagtgattcttggatatggttacttaacccaatggttaagtaagcagacttaacaagaaatgataaggtacacaaaagtaatttgggtaacatcaaatatttattgactctattttttcttgttacacagattacagagctattatcattcccactctcactccgacacatacaaatgtttggcacacccttctgctagactggatcaaattaaattgtg

SEQ ID NO: 382624 - DNA, 1191 bp, Cannabis indica
ctagacttggatttactacacacctggcccgaccacctctcatacagagctaaacattgaattaaagtatcaactttcctttcatcagcacgcccaaaaagaatggtgtcatccgcgaacattaaatgggagatcgaaggagctgtccaagctatttttatcccatggacccgaccctccatctttgctttgtgaagaagcttcaataaaacgtcatgacaaaggaggaatataaatggagaaagaggatccccttgccgcaatcccctttggggaacaattttctttatgggactcccgttgagaagcaccgaataagacacactcgtgatacacttcatgataagattacaacaagtttcatcaaaactgtttgccgagagcactctacgtataaagacccactccatgctgtcataggctttaaacatatcaagcttgatggcttgggtgagaaaatacaaatcggagtgtatctttctcatagaaacaagaatggctaaagaaagaatggtggaagtatctcgttgtttgggctactataatatggtttgtatccctgctattggtttggtagggaatttttgtctaatgtggaatggggaagttaaaatcaatattcttaatattgataatagtattatagaggccgatgtgtgggattaccaagtgggttcaatgtggaagctttatgctacatatggcactccttatgaagaagaagaaaaaaactatttctggaataatttgtccttaaaattggacacttttaatagccttagattgttttgggacttgaattggctcagtagtgcaaaagagaagcgagggcatagagtcactagaagagaaacaagatggttgtctaagtgttttggtagaacagggggagttgatctgagattcaaaggatgcaactttacttggcacaataagaggtttaaaggaggtctgattcgagagcacctcgatagagctattagctcaatggattggattgccttatttcctgaagcgaggattcttaatttcccaatcacgttgtttgatcatgcacctattcttttggacacatgtatgtttgctagtaaagggctcatacctttgtgtttcttcgacgcctggtgtaacaccctaactattaaaggcgtgttagcgtgattttaaatgtactgtgtagctcgttgctaa

SEQ ID NO: 382625 - DNA, 5849 bp, Cannabis indica
agtacgtcccgcccaaaacactctactaatggggtagaattggccaatttcagccaatgtccagggaatacctcatgtcaacccgttggccagcctagtcgggcaaggattgacaggttaaaacctagctggaaaaggcaagctgaagttgttcctatagtgcaagcatagctggatcaactcaagaacatgatacaaggcttgtctggcccaaagttgtctgacttagagctggataggacccgagggtgacctttttctgcatgcattaatgtgttgccattgccaaccaagtttaagatgccaacttagaagatgtacatggggaaagaagatcccttggttcacatcaaatattttgagatccaaatggatttgtaaaatgttgaggttgatattcattgtaggattttcctagcaaccttatctgaaaccgcacagtagtgggttttcaaactagttgttgggaggttcaattcgtggaactatttcacaagagagttctacacagtttttgtctttcaagcaaacaccatacaggctagaagacttagttgaagtcgaatagaggcctggaaaacctctaaagatttataactgaggctacaaaagtcaaaaatctcgcagaacaagaaaggtacacagccatcatgagtggcattctacctttgagtgggttgtggaaaagatatccactgacatttaactcaaaacatggctgatttcttgattgggaaggatttgttaagcttgaacaagctgtctaacaagcccaaattgggagaccagcaggtgctagacagacctaatgtggaagatagcactcacttttgtccaatacacctgccaatatgagcagtgccagccagccctccaaaggccaaaacaatggaggcaagtgtaacaacaacaactctggctgagcaaaaggaaaaaaggggaaatttaataattcccccattccaaaagactcaaaggagaaggaggagaggtttacatgcttcactctcctaacaaaaactcctaaaatagtctatgtggctacacagtccatagttccatacaggaagcctcctccaatgaaaaaagacataagtaagagtgacacttcaaaattctgccaattttacaacgattttggccatgataccaacgagtgcaagcacttaaaattaaaaatcaagtttctaatcaggaagaacaatccacatctgcatcattgtgtacaagatgaccagacacaggcataaggtgcctaaaatagagacctgatgccacctcatgtggttggtcacttaggggtcatcattggcggaccccatattacaggtgaaacaaacaaagctatggagagctacgcttggactctctgtcaagggcaaaacagtgacatcctagctgtagtggaaagagatctcaaatagctaaagcttaaagaacctgccatctccttcacaaaaagagattctgccaaagttagattctctcataatgaccctctggtcataataacacagatagggaacatgacagtagccaagtgcattatcgataatggagccacttcaaacatacttttcaagttagcctatgaaaagttagggctccagttgacatatttagcaatttgtacacagctgatgtacgggttctttggccaaggccttgtaccctttggaatacatttgattgcctttgatggttagagaaagtcccacaacaagaacactaatggctcagttcatagtgattgatgtgcaatcaacgttcaatgtaatgattggttggccagccctgtacggcctaaaagatgtgacatccatttacccccaatgtataaatttcccaacaaagcatggggtaggctatctaaggggagattagtagtctgcccagtattgctacaacttagctttgtccaaagccaagaaagaaaagatgcctgccaagagctctagcaaagagtcctaccatgggaaatgaagtttagcccaaagcgaggaggcaaacttagatcttcactttggaaatcctataaaaagctttggattggtagacgaattagaagatcgatcccacccttccgactagaagattaaaaatctagaaaggtttagggctggaaataaaatcagcattggtaaaaattttaagggcaaacctcgatatctttacttggtctcatgaagacatggtagggatcgatccatctataatttctcataccctgaacttaaatccaaacttctgacatgtacaataaaaaaggaggttactgaataaagagcgaacacaagctctaaaagatgaagtcaaaaggctgggtgccgatgacttcatcattgaagctttttatatgctctgggtgtccaatcctatcttggttcccaaaccaaacaacatgtggcgagtatacatagattttactaacttgaataaggcttgtccaaaggattttttcccactttcaatgattgactagctagtagatgctatagctagtcatgagatcctaagcatccactagaccaagaacatacaagtttcttgatagatgtaggcatgtactgctacaaattcatgtctcttagacttacaaatgcacgggctacttattaaaggcttgtaaaaaatgttcaaagacctaattggtcataacatggaagtctatggggacgacatgcttgtcaagtccaaaaaggctgaggggcatatagaggatctaaatgaatgcttcgagatcctctgagagtatcatatgaatttcaatcctttcaagtgttgtttcagagtaggcttaggcaagttctttggcttcatagtgaatgctcagggagtaaaagcaaactcagaaaaaatctaagaccttttggacatgaagtctcccacaaagataaaagaagtgcaaagcttaactggtcatatagtattattaagcagatttgtgtcaaagtccacagacaaatgtgtccctttcttcaacatacttagagaaaataaaaaatttgaataggcatagaagtgtgaagctgccttccaagagctaaagaaacaactagctcaacctcacatcctatcaaaacctctagacaatgaagaattgggcatatacttggtagtcacagagttcactgtaagtacaattctcattagagaagaaaatagctttcaacacccagtatactatgtcaataaaagacttattgatgctgaaagttgatactcactcattgaaaaattgacatattgcttgctcatagctttaagaaagctaagaacttacttccaagctcatccaataagagtgtacaccgaccagcccttgctataagtacttcagaaacctaaagcatctggctagttactcaagtgggcaacagaacttggccaatataaaattacctaccaaccaaaagtggcgataaaagactaagctctcgcatactttatggttgaatgtataggcatatctcctaaaatctttcaatattcaggagaaaagtaagagccagagaagaagggaaagcaagaaaagaagtgagaataagaaaattcaacatggaaattgcacgttgatggaagctatatggaccacttgtctggtgcaggcattgccctcatcacacctggggggaaacagctacataggcaatcaagttcccctcaggatcaagagagtcagtcccctcagattcattatcttcattcataggatcttcaagataggcttcttgttagtttgatccttcttatggggactagtcaccttagttggatcttctatgtgtcccgacttagcattgggatcaacatcaccctttgtagggtcgttgaagtgaagaccagatatggtttgaatgagtaccataattactgaatgtaatcttaaatggtatcactactttctttagctctcaatgaaagcaccaaaatatttactgaaatttttggaaaactaattatttaatattaaagctaaggaaaatataaccaaaaaatataataatatatgtagaagacacctagaattacgtggttggagtgttaacgagccttaatctacgagttagtattattataaaatttgctagagaagcctaagggattataatagacatgagcactttattctcttcttgagcaagctattcaagaatttccaaccctttgttcaaaggattcaatgagtatttatagtgtaatagaagtcatacttagttacaattttcttctgatggggaatttacagataatacataagtttgggcttatttggtgaagcccagcccatgaggtaatacgtgtatgctgatgtggataattgatcacgatcgtatctgtaagaattgtgtcctatgactatgggtaattaaagatatattaattacttgatctctaattgtatagtttcatatctcagcacaattctattctctgtctaagatttaaggaaagtaattccttaaactgcttataggaaatagaaaagtataactggcttctaggtacacgctaaaggattcttccagttacacgaagtcatgactcttccaaatgctgactagacttggcagaacctcgtctgggggaattatatactaatgttatcccggaagacagaatggatcttgagcttggcccaatttatgttatttggacccactgatggaccttaagcttctatttagaatccacgtgtcccttgccgaaaatactgataacaatttccttcaggtggaagtgccagaattaatggagattttgagttatcggagttgttttctcattggttccttgagatctacgcgagaggagttcccgaatttgagtgcacctaagactttatgaagaagttgtatttctgtaatattaaacttaaggggatcgtataaatgtcaataaagtcgacccatcttattttataatttctataatttctttgccctattagactataattgaaaaaatctcttgattaaaattttgaataatcacaaaataaatatgtagaaataaaaaaataaaacaagggattggagttttgttggttgaatatattaattatagtgtagtttttaaacataatttgagttatttaattagatcggtagttaaaaaattgtatacctaatatcctattaatatataacaaaaaaatgcaattgctaccgtacatccttttatatatttatataaagagtattatcatcaacttcttattacaatcttttagtcggtctctgtgcccgaaaacacatgttaaaatattttttttcaaaatttttttttcatatgatgtgttcgttataattgcaacagcgtccatgtaaattttttaaaaatttcgtatagcttatagtgcctaaaaaaggtttaaacttttctgaagatgagtggtaaactgaaatgtcagaaactctgttttcggtacattaaactattcggaattttaaaaaaaatttacaagaatgatattataactataacaaatattaccgtgaaaaaaattaaaaaaaaaaaattcgatatataattttagatgtggatgttatatttttataacattctattacaatttattagtcaaactacatcttcaattaattagctttgtcttcctctatttatattggttctataaatgagtgagaaacacaagcgccaaaagcaaatatattacccgaacttttgttttggaatctcattgagtactttggttggtacatggtaggtaagcttaacatctccaaattacgataatcttttatctattttcaatatatgtgttgaatcatttttttttttttaaacgattctattttattcctttattaataaaactagtaaag

SEQ ID NO: 382626 - DNA, 1802 bp, Cannabis indica
acgcggggttagatcacttccgaaaatatttgaaaacctttttgcttaattttattttattacggctcgaaacttccacgtatcttatttattgaaatgtctaaattgcccttacttgcaacagctgaaacggcgtttgagcgtgaataataatgtctttttcatttttctgaagacgacgtcgtttgggttggttttttttttttttaatattataataagcacgtgggctttgctttgtcttgtcaaacaaaacagaactgaataaaataatataaaagtgggtagggtcacacttcacacctcacccatgatttcatttacttatttttattttcttttgtttttgaaatttaaattataaagtcttttattaattaattcattttgtttaatttagtatcaaatctttggttttgtttataatcacttgagatctatctataacaactttcccaatcaacccaaaaagttgattttaaccaaaacgtgacaatattagaaaactagattagtagtacagtataatgtagctgtattaatctataatttagattgttaattctttttaaatactcaaatattcaaattatatttaaacactcgagaataaatctttgaaagaaaataaccaataaaatacataaaaattataataattcagctcgaaaaaatttgatcattatgaaatcgttacaaattataatcagccaattaatgtactaattataaatggttataaattaaatataaagttaagtgattaaatgttttactactcattattgtttggtgtctttcttagagcgtaaatttaacctattaaagtaacaaacacttttaattttaatatatttattttattgttggaaatattaaaggacttattctcttatttgtttatttttttttttttttaaagtaaatgcatttcacatttcgtgactctagaagagccagcacccacgctttctttattcaactacttttttttttgtttggacaaaatattcaactactattttaataataatgattaaattaattagtggtacaaaatgaatggacaagtaggtttgacactttttttgtccaaaaaaaagttgacaataaatttgttactatttttaattttttttttcctctgacctaaaagtgcagcgtgtttttttacgtcaagagataatattaataagagtaataatttttttttaaaataataataataagatttattccacgcattgttaaatattacaaaaaacaaggtcaatttcatcaaatctcaatccattttacttaccgtattattattattattattatttttttagtttttgaaaaatattattactaaaaatttgattaagcttttttgaatacacacctcttttatctttaacaagatattctttcacagttgttgaaaaaaaattattcttgaacaattgattactattattgaatcattagttttattgggcttttacaaataattcttttatatatatacaaatcaatagaaaatgggagctcgtagaaaaaattaaatagtaattacaaaaaaattgtgttagataaaataagtgttgattaaaactattattagttaattagatattcaattatactaataacaatttaaagtgttaaaacacataaaataagtagttgaataaagaaaacatagctacatatcttgtgtttgacattgtgggaaaaataatgagaatcaaatataataagtattattattattattgaaagagatcaaatataattaattaattaattgaatataa

SEQ ID NO: 382627 - DNA, 710 bp, Cannabis indica
cataaaaatagcaaagttagttttattatgatgtaaaagttaaaagtaaaaaaataaaataaattaatgatatcttttgaagaataaagtaaaacgattgcaggtcttctttaaacttgacatatgagaagggattagtagtgctagtcaccacaatagtacaaggtattatattgtaagtaatctaattatatactgtgttttaccttgtgaaattttttaactatttgtgaagtaacactttatgattatgctagatatcactcgtttctattaatattgatatttttaagaaggaaaattaagatttgttcaattcaaatttcgacatgtattaaattgtgtattcaaaacttttcatgttgttaaaagtttttccaaactatcgaaattgatagatttaaagacttctgtctaaatttattcaattttactaacaattgtctaatatgatgattatttatgtatcaaaccgtatttcttaaacctccattcatgtcaagctgccgttagtaaaattgaagaaaagtttagggtgacatatcctaattaggctaaagcaagaatgaggctaaccaatgaccaccatcccatcattagaatcattacttaagagcattttcaaaggagttgcgtagtcttgccacatatgtaatgtagtacaatttcaagaataattttatgtgaagtgttgttcaatataaaaaatg

SEQ ID NO: 382628 - DNA, 615 bp, Cannabis indica
ttttttttatattttttaacaaatattaattaaatatttaattttgcatcaattcttgcaattatttatacatttaagtacaatattgaaaattaataaaaatatatcacaaaaatattttatgccaaaaataaaacacaattttcacatattccattaattagatataggaagaaaaaaatgatggaaatatttagggtgaaaaaaattgaaacatgtcccatccaagtaaagattatactaacactatatattaccaagttaaagatagaagaaccataagaaaaataataactcgactttattgggaccaaaaacaatctattaatagtgaacttaacaatgattgcaaaattttcatttatgtcattcttagggatcccatttccattcagtcctgggcccgtttggtacgcaggactggattggattagacaggctaatttgtccaatccagtgtttgggcatgttagaagtctggataactaatccagttaacctcatctgtctgggattatttatcccatccagcagggtgggataaataatcccatgcaggtgagatttttttttattcgtttttttttaattttaaattttattaatatattttaa

SEQ ID NO: 382629 - DNA, 1815 bp, Cannabis indica
aactgttaatagtatatttaaagatcaattgacctacaatcttagttcattttttggaccaaaacccacaaacccgatgaaccccctgatgttcagccctaattattatatatttcaactataataataatacagttgaaaagacaactgtaattgtgcgagcattatatagttatatatttttattacttttatattaagaatatttagtttaatttgcataaagatgtttataaatgattaaaaatgagtgaggaaaaataagaaaaagaaaccaaaaaaaataaaaactagtgcttttgacaagataaacaaagctgaaaatatttaaaacatggaaaagaaaatgttttataattattcagaagttaggctacaacagatacagtgaaaaatggtaatgaataaataacataaacaagaaaagtagagcaagcaactttctccggtcaaaattttgtggataattcattcatatttgctgatccaaatcacgtattatgtgatgatacctttcaagtgaatgagttttgaaacgactctttcttcagccatctccatggcattttctgcagagtattctcttgccgttaatgttggaatttctttttcttgttcgatctggatccttgataacctttacctcgtttcctcccactatcattgtccgtcttacttttgctggacttcttaccaccattagcgtattgttcaagcaactcgggatccattactcctttcaaatcagatttcatatccgcctgtaaacagaatataatcaaatttagttctagttcttttggtattgacggaaggaatgaaaaagaagaggacgagcaagaaaagtagagaatacctcagcctgcctagcagctttttcaagatcctgctccatagaaaccttggttggctctattgcaatctgacagcaaaaccagaaatattaaacaagttccaatatagcactcaaaacttatgaaagtagatatgtaataacattcacaccatacaatttttaatatagtttacatcttttcagttacttacaacaagactgttaactaaaacttcatttttctcaaaaaaacaacaatattttcttactggattgtgtaataattggttcgaaatgatcacacagcatgagtataatagtataaaataaacttggccgggcacggtaaatgagattagagtctatagagattataagttataacaacaatgtggtgagggataatcttcaatgaagtttttgctttccactttttaattcttttaactaatttagcataaaaaaggagacagaagtgtagataggatgccgaaaaaccgaattccagacaaacttacttcacttagccgaggcaagcttgattcaatctctttcgatgcaattctgtcgagatatttgtggaactttttcatagcttttataaattgtgacaatatttgttgcctctccagccccatctctctctgtaatgcaagagttatagtgaaaagaagtcaaataagaacacaatatattaataaaatagacacttttaaatcccattatccgtaaagattctgaaataacatacagctactatatccaactaagacaaataaatgtacatacagacaaaaaactacatctgcattgactgtgatttaactgagaacccattaaaaatatatgcgcatcactgagtaaccaacacattttatttataaactcagttcgaaactagggcattcaaaagagttttaattcaactcagcaaaacttaaaacaaatcaagttactttctggaaatcttagttcaaata

SEQ ID NO: 382630 - DNA, 2155 bp, Cannabis indica
aaataacttaatactaatgtgcaacagcagcctattattgctaaaacttaaatattaattgagatagttacctgagtagtccaataactggttgcaaggcaccagctaagagaacctccttcttaatgtttggggatgagtgaaccaaatttccaattacaccaacctgccaaaccacaccagctcagttactctagtaaaacaaggctaaagaatgcccaaaacaaatataaagggaggggagggtgacaaggaaaaaagatttgagacggaccgcttcataatgtattgtagcatcttcagaccaaagcattagtataagaataggtaatgcattacactctacaatctgcaatttcagttcgaagttaataactgaattgtgaagtaattgaaaagggtgaacaaaaatgtgtaaatggtagtgctagtcacctgatttttgttctcgtcattcttaaatgcaagggtccgcagggctgcagcagctgctctctgcacctttgcatcagaaaactcaagcaactcaacaagaggtggtatgccaccttcaatcctgaatacaaatttcagatatatgaaaacaagcatttattgatttacacggacactaattgataatatttttttctttgaaaaaaaaacaaaggaaacaaacaaacctgacacgggttttgatgctgctattctcatgagcaagattagtgatggcatcagccgccctcctgataacaccactaactgctctggagttagcatcttttttatgcctctttaacagatcgaccaggtgtgatatagctccagcatcaactattagctgctgatactcgggctgttcaacatattagggagatatattacgacataagcagataaaaaagaaaacaaagcatcaaccgttacctttcattttgccgttaaaatatataattgacccaaacaagtcaagccaatagataatagttgataaataaattagaaaaatacctactaatcttactttgcattttccttgtgaactcttcaaattgatcgattaccaaataattacattcaacaaagtatataaaaccgtaacgagtaataactattaagaaggaaaaaaattgaattaccttaacagcaagaagtccgatcgcaaaagcactatttctctccacttcattctcgtacagccttggcgcagcctcaccacctctagccggagacatcatcagtgtctggagatgcttaacaagaacaggaacagctccacaatccacaataacatttacaatttcttctgcacgaatcacaaaatttaccagaaactcataaaccctaacctcaccccaaaaaaattattagatcgaaaatcacgaaatgaaacaacaacaacaacaaagaaatactgtatattcgatcagcatgaaaaccgcaccgttcttggcgagttcacagagcgcatgggtggcgcgtttaaatgcagcacgatcggaatcagctgaatcaaggattccgatgagagatcggacgtcacggagcaggtcttggtgagcatcgtggggtgcgacggaagagatcttccgatcggatgactgttgatcgagttcttcttggaaatcttggtcgagcttcctctttaagctttttctggcggaggaggtttggttctgatcgcgttccatgggaggctggaggaagaagacgacgggagaggagatagaataggtttacggtaattttgggccttttatttttgacggcggcttttgagggaaatattgaagcggggttggttactttttatataaaattacaatcccgccaaagttttacatatgaaaaattctaaagggcccttcccgccctgccatttatgaattgaatctctaaacgaatgtcgttttagttttaattctaccttcagatactcagctttataaccatccactcaattttttttttatatatatatacagataagagttttatttgaactttataagtatactttaatattatataagtatataattttaaaaaatcaatcttaatacttttttttttcaaaaaaatcacattattttatattaattttaatagttattttaatttttttcatgtatatttttcctaataagatttcatataattttgttgtttttttttt

SEQ ID NO: 382631 - DNA, 2661 bp, Cannabis indica
aaatatatataaatattaatatctatttttattcttttttgttatctttattatcattttatatacataaatttattattttatattttgatacactgtgtttcattctttaaataaaaaatagtactgaatcgtagatatttactgaaatttttagaaattaaatattttgagcttaagaaagaaataatatactaaataataaatacaagattttttatgtggtttaggcgttaactatccttagtctacaagtctattttattagccacttcggcaggcaaataataatacaagttggcatacaatagacagaaactctttatacctcttattcatcttgaagaagaagaaacttaatagtaaattttttatagagttgttacatagttgtatatagtgtttatgccttcaaagaattttcctatcttattgtatgcagggatatttataggctagcttcccttcacgtgattattaggttgatgttaggggtaaaatctagtcgttattgatttggtaggtggttgattcatcacatggtattaaaagttgtcagcgtgtactgtctaatttcctcacacgtgtcgccctagggccttcccttttgaattgcccttggcgatggtcgttggatcacccgggcaggtacaactagacgtgtatgcttcatactacggcgtaacgtgggggaaatgtcctagcgtcaagcctggctgccaagtctacaatctgacaagtacgggcaaagcctccccatgatacaaaaaggggttatagctcagctagacttcttttgcggcatgtatgggtgccttgtgagaagaccttaccctttgcaggagcattcgacttcagtcctgcgggattagttgacttcaatccctaggaatgggagagatttctgattgcgaattctccccgcatcgttgccttgcatgggaggtttccttcctagaggccctttttgcgagttagggctccgaccttctaggaaccgtggtcgaaggtatggattgactgattagtattgagccttcttggattagagtccacgtgtgaagcttacaaaaatctaaacatcatttacctaccaagctttcggaacgtctcacggttcgagagcttacagtgtttctctgctttctcatgattggcttccgacacgtggaatatcttcaagtttttcactatgtcatgcgagtcgtcgttagttgacgtgtcactggaaaaataaattatcctcgctgtacactgacagtattgtaagtcccgactcttgtgattcgcgcgcgtactaggcacgtgtttggggaaacaccaaaatgacggtgaatcaattgagcaaacctttcatttaataagaacttcttacaatgattgtcgttaggaaggttaaatgtttggaaccgaagcttcttcttagctccctatccgttagattttcaggtaccattttggtgaatgatctgaattgttttcttctcgtggaaggcacctcctcttggcactcgataagtacttacaacacctaccattttttaagttttaactttttctgcccttcacactagagcttttgcactttatctcctcttcttgcctactttacaagactcgtacaacaaaaccatccccaaacgtgcacgtcgccagacgcagtgtagtataaccatccctcataatactttcgcctcttaatcagtaagtgtcctttgccactgtttacttaatgcaaaaatattgaggttgaaacagtgtatactatatacaagtcactattatcaaaatgttggtcctgtttgtatggtctttgtcaaaatgggagaattgacatcttgtcttgtgtagacccgcttaatcccgtactggcttatgcaggtacctttagatccgctatagagaaggccaatacttcaaaagttgtgggagacagcgatcctcgtaggaatagacaaacaagaggttgctgctggtatagagggccacccagcgacacaactcacagttgaggcttggtaggctccgcgcccacattatccaaccgttcttctgaaaatactttccatgggcttcacgttctccacgaaaaccacgccatgtagagtgaaaaggagataaacaaggctttggaagaatgtttagaaactatttgtatagttgtattacataaagtataatagtgaataataaaataacacatgcaataataatgataataataataatatttaaaaaattaaataataatatctctattgataggtaaaatacctaattcttattgtaatagtcctatacatatatatagttctatcaaattaaatctcatacatatattaaaatggatatctttgtcattaaatatatataggggtgttcataaaataactgattcaatcaaatctgcacgatccaatctaatccaatccgcaaagtacggatatccgcacttgtgcagattgggaaattcaaaatctgcacttgtgcggattagatgttgattgacatgtaaaattaaccgatccaatccaatccacacatatttataaaaaattatatatacaaataacattttaatgtaaagaaaataataatttaaaagtctaatgcatataatacaattatatttcaaaactcaatagatcaaatgtatattct

SEQ ID NO: 382632 - DNA, 2010 bp, Cannabis indica
ttattttttttttcttacacatacaagcaacatgttttatggatagatatcaaagcaaaagtaatgtggcattataagtcaattgtgtcgacctatcatatttgaaatcatttataagaagagaaaaaaggagttttgagttttagtttgacccacctaaccatatgaatatgatatctttatcactttattctaattgtgtctataaaaataatattagttaattagttaactttcttcttaatacctaaactctgtttttaacatccatggttggtaagtagcaaagtttagaatatacatagttaataataaaggaggttgctttttttgctaactaacaaaagtggtttcttgatgattgatctcatccaagtctaactaactcaccttggctattattattattgttggaactgtcacccccagaagtcgaatctgctactttaattccaagtcttgaacagtcggatccaagtgtgcctttaaaataatatataacaaaccaaattaaattaagctcatcatgttaataattatattaggaaagaattaaggctgttgtatacattcactgtagcaaggaaaagcagaaatgttgagaagatttgaaaagccttgtttgcactggcacatgtgtgtgtgagttctgttcttagtgcatgtcccttccccacaataggcccagtaacaagctacaaaaaaagtttaattaatttacataaaatcaaaattaattattgaaattaaaagattaaaaagaattatagttttttgagatgaagataatggtaattacgatcaaaagcagaaatattgcgtgggacttccttctctggaactgggggtggagctggttggcaccctccataatttagagtacctgtatatataaatataaatatttttcatctttaaattatgtatatagaattaattaattaaagaagagagtaaaaatttgattaattacagttagggatgacacaagggagaaaagggtaatcatcttgatcatcttgatcacgtgttctcttccaaccagcatcacattcacatgtgaaccctaatgggaaagctccattccatttgcactttccctttccacactccacttctttacacatatcctctgttattaattgttataaatgtcatcaacaaagtcagtcatgatttatagatatatagatatagttatgaacagtatatgatggattaagtaccagaaatactaggagctatgtcatcccaatcaagcccaaaaacagcaactggtgacaataccagaatcatagctagaaaagctagtgaagtagtagaggaagccattttgttctagtttattactgagagaggaagaagatatggtgtgtgtttaatgggcttataagtttacgtatttatataaatatattaattaacatatattattaagggtgtgagttattgaggtttttcttgttactcaaacaaacatgagagaaaaaaatatattaaaaacaggacttccagaaacaccagtttctttcttttagagtagctttcttgacttttactaagtaataaggtgatacgaatatactagcgtacacaagacaggtagtaataccattcttttcttctctttgaataaatcaaatcaaaataaaaatcattttttttaaaatattaatttaggagatttcttaggtacttaatactgattaatttatattattaagacatgtacacttatttaattatgtaaattttcttttaaccatttgggccgccggccgaatattactcgtgactagggacggagtgactttagcctatatgtaggctaaagccctcactcaaatatatacattaaattttttatatgtggatatacatacatattaattcatttcactcaatttattaaagcccaatttacaaaagccctcactcaatatcttaatcatgattcatgaacctactctcattctaatcaagccaattttaaaagtagtccaatacaaa

SEQ ID NO: 382633 - DNA, 4498 bp, Cannabis indica
ccgagtctagtggcctaaaaaagtattttccttttacacataatttttaaataattttcgaaaacactaaatattttttaataaagagtttaataattttctttttctttagacctaccaaatttcaagatcaaccttgtaattaggtggaaggatttcttctgtccaaacaaaatcttctttttctttgtggccaactcaaaatattgttatctttttagccaacatgagaccaaaacaatatgtaacttttcttaagtacttaaaacttgaaggagaatttttatttttatagtttttaaagtataaatttacaaaaatatgactttttttctcaaaatttattttatgagaaaattttaaaaattaaaaaaaaaaatatgaaaaaaaataataatataagatattaagttaccattttatgataaatggttaccataaaagtatatggttatccttacttgattttctcatatatttcaacttttttttttcaattttcctataaaataattcttttgtaaaacaaaaactatatttttataaatatatatatatttatatatatataaatatatatatatatatatatataaaaacccataaaatttataattatcttgtaattgatatgtaagaaaaaagaaaaaatgaggataggattttacccatttaacaaaacagctgtatcaaacactccatggcctctatgaaccatgtgatcatcaattggaatcatcatcatggttggatcaagaatgattccaccaaaaatgcttgaatacatagctgggtatggttgtttcttcactaagctccatttctcatttagttttgcaagtaactatttcattttcaaaaaataacaaaaaaagaaagcttttagtcatataccatttttatttacatatatataacataatcattaaagccaaaaaaaaaaaaaaaaaaaatcacctcttttgatgattgaaacacatgaacttcaagctcattcccattttcaacctccatggattccttcaaaataaccattaattaaactaattaaggttacaaatcttcttaattcactctcacaaatgataaataaaaataaaatgaaaacacaattagaatttaatgttaccaaattttttgatatatcactagatgagagatgcaaaaatttcaaatggtgaatgaaacttttgttgtaatgatagtttatatagaaatatatcttatgttattttttattttattaatttttggttgaggacaaaaacatttaggtgtgggactaattaaagataaaataaaaattaattattttggatagagtgaaaatagcaaatatgattcccctctttgtttgagtgcatatggttcttggtatttgtcaccatctttttaactttgatgcttcattaattattattatttggagtgataataattaggacatatttggaagttgctattgtgtaattactaattggtgagtgtttgaatgtgagatgataattttatatgaatttctattgtattatttgaaaaattatttggtagttacactgaaagtaatattgtttaataattacattttaaattttaaaaaatttagtgattatacccaattctcataaagcatatttatatattgtaactatattcagttatacgattaccatataattacacgactagacaaatatgttacattaaaagcccattcgacataacatttagaaaagctaaaagttattttttggaaagaactatgttataaagatgattagtaaacaattaaaaattagtttattgaacaatttacagagaaattgcattgctgctaaaagctaaaattggtagaatctaacttttagaaaaaattgttattaattttgattaaaaaactctataagagctcgtttggtacatcgtgatatattgtattgtattgtgttggattatattgtattgtattatattatgttgtattatattagtattatttaatagaatactatgtttggtattgacttgtactaacaggttatgtaaaattataaattattctcaataaactcaaccccaaccccgaccacgacctagacttggacccggacccagaccctggacccatgacatgcctcaaaccaggacccaaactccagccctgaacaaagacctggaccccaattcgagtctgcgtccagggtccgaggcgaggtgggggtcgggggtttggttcggggtcgaggtcgaggtcagggtccgcggtctgagttcgggttcagggtccaaatctacggttaaggtccgagcccaagtctagatttgagtctggattcgggtttgggtttgggtcggggcccgggtttgggtttagattcgggtctaaggtctagggttggggttgggttttgggtccagggtccgcggtctaggtctagggtccaattctggggtcggggctggggttggccccaccctttgtaaatattataatgcaatctaatacatgtcatttgtaatatattaaataatacgactcatattgtattaaaatttatggtcgtaataaatattacaatacaatattttatccaaacatagtgttatttgttatttaatacaatatatcctttatacagactgtcaaaccagccctaataaatttatttacactaaaatatattttcttatatatcatatattactaaaataaatattaaatattttttatttattgaatattttctattttcatcatattatatgttagcaaaccacgtaaactacaatttttttaacaagagttttttttctttcatgtaataaaaaattgtttgaaaatatcaaatacataaaaattcaaattttgggaaaaaaaataataatatacaatggctcaaaaaatgaaaacaaacttttgatctttaaaaatgtttgaaaaactctccatgagtatttttgtaatggttttctttttctttggttaattatgaaaaatccccaaattatacctaaaatcaatttataaggtggtatagaaacttctttatagaacaaattaatatattttattgctcataatccatttcagtacacaaacagaaataacataatgaataaactatcacaacaaagaagttagaaccaaacaatctttggcctaagactttttgatagtggattttatttaattttaactagaacaattgattttacattatataataaggtcatacacatatatataaatatatgtgttgatattaagaccaaataaggataacaccattgtgtaaagaattgcaagaaaagtttttcacttttcctattttggttgatctttgatatgaatgtttagactctcatggcatgcctttgatagaaactcttagttcttcttaatgcttcttcaagtgaggatggatcggctgcgaatgtaattcgcagccaatttttgagtccaactgctgtccctacaaaaaaaaagaaacaccccttcttagatggattctactaggcgaatagagcgacacaagctcggtgagccacacacattcgcgttgggattgcagcattgcatagcgattctcgtgttaggtccttgtttttatttttcaactaggattttcgcttaaccttatgatatttggggttcgggaaaactataacaattgttatgtaagtacccagaaaggattcgttgaacctttgagagcaaactacatgtctgatcatttgagctatacccttctcgggtatagagagaaaaccttcttgattaggcaatcgcaacagaacatatattcggtttgacatgcaaattacaagctagattaaaatatgaagttcatttcttaccaggaaggatgatcacagattcctctttagccaatttgaagcaaaaatcaatatcatcactaatgtcttctagtaatgagatgttcaacttgacctgcagcattcattgaaaagaatataagcataagtagttcttataaaatcttcgatttcaaggcttcgagctgagcattgtgtcgatttttctcaccattacaaccatagatccttctggtttttgtggacatgtaatgcaaggaatctcctttatccaatcccagcaaatatctgagctcttcttaagtaaataattagttcttttgaagtgaatctcttctgtttcctcgagtatgcgtggaactgctgcctgaaaaagcgaagaaaaaaaatgatggattcttcattcttgatcttttcgaatgactaaattgcttgtaaagctagtttattgataagagcaagaatagatacaaaatttcaagttaatcgagaaacttggtaaactcgctgagtaatattttactctaaacaattcacacaaaattcaacatactcacatttaagaccccatctaagaatttacaggctagactaacaattatcttgatcgctaaggacttcgaggcatttcgagttatttgttgacatttgttgacacgga

SEQ ID NO: 382634 - DNA, 2372 bp, Cannabis indica
ttagagatcagtttatggaattttattttgttgctgatgcacaaaaagtacatacattctgagaccatttaagccaaagagattgaaaaattcccattttgggtaatcctgaattcaagcactaaaacagtaaaactcacgtttggtttataattctctaactaataatctaataaagagcagaaaatgaatatgtcagtactagaaaatgtgaattttttccaaaccaaaaaaactcataaccattatttgctccatattttttgaaccttcattcacaaccataattggttagacaagaaaacttgcagcttcagctcatacattttctgaactttttcctctaagtttagcctcaattttactttaagtaattgaccattttgaatttcaaaacatagaaatttaattaatcaagtcatctgaagtatgtattagtattaattcaatagaaagaagctgataatacatttaaaatattaaataaaaaaactgcaagaaaacattattaacccatcattaattaccttctttatattattctgtacggttattatgaaaataattattattatattataaccattgtaacaaaagagaaatatcagaaagcaaaaaagaaaaagaaaaagaaaataaaaggaaaccattgaactaatactcaaatgttattaaccattaatggaagaaaatcacagataaaatgaaacacaaactcaatattttcaagtactataaaaaagaaaattgaaaaagaaaaatacttatgaagaagatgatgatgaattaatgtcaaatttggtccatatgttatgagctccagcacccattgtttccttagcaattttcaatttcttttcttcttgactatcatgattttcatctataagcaaagaaacaacttgaatcctcaattcattcaccttcaaattcaaatcactcaatttacactcaaagaaatttctgagatgagatatcatagataagtatatctcatctgtcaacaccataaccaaatcaggacaacacagagcaacttcaagtctcaaaatttctttaaggatcattctcatgatctcgagttctatttcgccggcgacctcagatttttctcctcttttcccactcaaactctttctctttttcattgttcttactactaattggatcacagataagaaagtcttgatcacaatagaatcattagttttctcaacacttagtagttttatcatagccttgaaatcatcaagattcttcattatgtcattcctatcacccaaaatcaccaccaaaagaagaaattcagtgataattacagaaatatcagtgccaagatcaatcacagctttcttcatttcttcaatggtagtctttctttcagattgatgatgatgatcaaggtgttgtagccactcaatcaaactctttcctcctttttctcttttttctttggattctttctcccaaaacatttttcataaactcttgtaaattttccaagtaacacttgaaagattgtacaccaattagagatgggatgttgtactttaggtgtttttcttcaaactcataggttcgatcgattagacttaaagcttgtttctttaactctgtgtatttggcattgaattcttgatcttcaacgctccccaaaagtgatgatgatgcttctttaaggagagaagtaagttcatttcctaattcaactaagccttgaaagtcatctgagttttccaattcttgtaacttcttgttaattttgtttgtgatacaagttaatggtaaatcatccatttttttttgcaattgaagaagatgatcttgtgactagagagagagaaagagagggagtttcataagagggttctaatgaaaatgtggaagttattgctgttatatatgttatttgctgctgtgtgaattgatatcattaattaaacgacatgtcgtttatggaattccgtttattgtataatcaaacggcgtgtcttcacttttttctatgacataaaaattcttaattcattttttagtgaaatgtcgttgtatttttttttaaaaggagaaacgatatgtcgttttggtacacataagtgactgtggtggtccgttgttgaatgaatctatagacacttacaaaagagttcaactaaatacaaatcaaaatagagaaattatttaaaaaaaataaaagaaattaattttgaaaaaatagaaacaaaaactgctaattagttccactatcattaattattattattagaataataaaactaacattaattattagaacaaatagatttttttttataaatattatttttgacaaaaattactaatttttttttaacgcggtgatcaaaatcaca

SEQ ID NO: 382635 - DNA, 1166 bp, Cannabis indica
acaattccttgtgtatgttttctatgctgttgttaaacatgcaaaagtaatgcattagaatttggacgtgaaacaaatgcaatggaataaccaaagactaatatgcaaataaattacgtgtaaattagagtactacaaagggactccgtgctgccgaatacctcaccacatgataaggtgtttgtgtgtcaaaccatgaaattcattatttatttctacatatttcaatttaaaaactgctaattgccactcataaagtgttacctcatgtactgttgagcgggacaaattgcaacagtgtaagataatatttatcgtaattgtaccttatcatcaagtaaaactgtcatgatctcttcacgattccaaagtctactacgcatgcaaggatcaagaagattttcatgcttaacaatgtgtcgtcccatgtctctaagctggtcatgcatccacaaagtattctctggagtaattttgatgagtgattttgcagtgagtttggagattgctatgtcagcatcaaaaccacaccccttcaatatgtcaattgcataatctctatccatacccatattcacaaatagacaagaaatatctaagaatatacacttctcttcctcgtctagtgcattgtaacttatcttcaagacaccctgaatattgttaggaagaatctccttcaacttcctagcagcatcactccactccttagttgtcctcttatcaaacaacatagaaccaattacttccaatgccaatggtaaatagccagttaaagaaacgatttgattagacaaatcctcaaaattatttcgtggcttctttcttccttgtgagtgatagctaaagagttccaatgccgaaggctgatccaagactttgacctcatactccaaatccacaacactttttagcactgttgtatctcttgtggtaattataatccgactcccattatagaacacatctcttttggaaattagagtttgcaggtgcataatattatcaacatcatccaaaactacaagagcccgcttctcattaagaaacattttgattgcagcttgaccttccctaatgtcacttacatgaggattgtttgcgggccagaaagatcgtcgatgagcttgttttagtaaagataattggccagcaacatctgctgg

SEQ ID NO: 382636 - DNA, 2142 bp, Cannabis indica
aataaaaaaaaaaaaaaataggttgaaaagtgatatctagctcatattgtgttaaattaatttaattttgacaagtcatctaacttaatttatattaaatatactaactacttttgttgactcaattaaatgttttttaataaaaaaattaattgacgtattaaacttaaatttgtttaacactagaacattactttttaacagagaattttgtgaaatttttgtgagcgtgtgaaaaaaacagtttaaacttaatttagatactttagataaaagtttcaatttctatatataaatgaattgttatataatagttgtaaattatatatattaaaaggaattgtatggattgggaacaagaagaattggggttataggagcaccaccaattggatgtgtaccatctcaaagaaccatgggaggaggcttagaaaggaattgttatgatgaagagaatcaagttgccataatgtttaactctaagctctcttcatctttggattatcttacaaaacactatgttaatcatgatgcaagacttgcctatattgatatctactatccactccttcatgtcattcaaaaccctactcaatatggtaataataccctttattcattaatatcttaattaatcttttataattattaacttatatattctattatatataacttatatgttgttttgttttgttttaggatttaagatttcaaaaaaagggtgttgtggaactgggcttatagaggcagcaacaacatgcaattcattggacaaaacatgtgtggatgcaaatgattatgtattttgggatgcttatcatcctactgaaaaggcatacaaaattattgtcaaagatattatcaaatctttgtatgaggttcataatttttaatcttgtaattgttatatatataatataccattagggtatattagtccaagctgtaattttgatcatgtggtttctcatgaacatgctcacatggtagttgtcttcttacttatatatctttatgatttaataataaagaaaagtattggattaaaaatttgttttgttattttttgttttttcatatatagtaaaagaggaattgaagatttaaaattggatttgtttggaggtaattatgtatttttttttatttaaaaaaaaggggatcacgtggtgcagattccttccccactctttcggtcattttggcaatcttggagactacgtgttagcaataagggtcttatacctcaaccttccttaattgggtcatcggccgtcacctcaagggttcccatcactccagcaaggaccaaacttttcttaaatttcttttaaaaggggttggagtgtgtttcgaacccttgacataattatgtaattattactaagcaacatatgttgcataatcaacatagtaataaaaaaaaagtatgtttggatgtgaaataataattatatatgtatttttacttttaattttagcaaatgagttagtaattagataccaaaataacattgtataataaacaattgtcgaaaaattgtaatactttgaggttcaatttcaaaaataaaaattatacatggtttatctttcttttatattaagtaatgtaacactttctaacataaatatataattaaacaaatatattaaacttaatagttactttgaattgatgggatgactttcaaacgcaccctaatcaattagtactattataactaatgaaacgtgctttagtaattagtttagttaaaatatgagcccaaattatttcaattattttttaagggttggaaaaactgttataaacatgttgtcaacaaattaattgggttattaatttcaatttaaaattacttttgagaatacaaataagatttagttgtataatacttcagggtgttggctagtggtgtgggttgtaacttttttttttcaaatcaaactgcatttgtaattaggtatataccattttggaccctgtgttttgcaaaagttatcaattggaccctgtgttttgttaaatgacaaaatggaccctgtattttctaaaatagtacaaataggaccctgaattgatttttaaagtttaattataattcgatctaaaagtgctatgacaaaactgtttgc

SEQ ID NO: 382637 - DNA, 3054 bp, Cannabis indica
ttacttcatcgcttgggacatccacgagatccgatactgcccgttccagtgggtgccattttacaagcgctccatccctacattgcagaaaagggatagggcaaatcacattctgtccctccctaaagagaagaggagcatactcaaattagccacatgataattatcctgtcatactgtgcgacatgcgggttcttgaatccctgagggaattaggaattcaatataccaggatggaaaggctctgtctcttcatctgaaacgcatcctgacaatttcccatactcaccatcctggtatcacctaaacttgtcatctaattgtattattcgtaattgaattagatccttggattgttgctcaacttgtggttgtcgatctacattctaatttaattgatcacaaagatctggaacttttcgattcaaatgttcgtgcaggtttggttgtctacggttcaaatgctcacgtagatcaaggttgcactgcctctcatttctctggtcgtaattgcttacaaactttgttgctgaataacttttagattgataactctgagaataacttatgctcccttgatcatctcaataatagtggcgtgaaccctccccatctcatgatctcctttcatgtgcatgggttctaattgatctgctctgccaatgggtccttgaccttgacctgcgaggatttttacttgacctgttatatttgcctggccttcgcattcatgcgagataattttggattttcaagctgtacattcccacggtttgtatatccatggaaagttcctagatcgttgggtcgactctcttgatttctagtgtttcctagattctgggaatctcttcatccattgggatgtccctcacgtccttgggttaattttcctgagtgttcgaggggtttctagtgttattccccctaggggtttccccatctctcctggtccttgagcctcttggtcttccccgaggttgtttagtagacatatcaagttgttttggaggggcattatctcgcgcagcccttttagtcattgcctcgtgctccaattttgcatttctttgatttgattcagccagtcgctatcgaagttttctagttttcagttccactaatggaacatatctcgtgggatcgtaggcattctcgcttcttctttctgggatttcatccctagtttgttcaaactctccactatttctttcataacggggagttttagtagtatgggagacctatgtcttcagatatttcataataaccgaagaggtaggtattttattttataaaacaattaaaaaaaatgattttttacctaaattgaagccactgttaataccgctgccgccgagtcccaaatccacaaaattccaaaataaaaatctttaaacaatattatttttaacccaccaccgttaacaccactatattccaagcacgaccaagtattttctgaccaccaccgcaaattcaaactctatcatacacactgaaaaaataaaatataagctaaaaggaatatattatagcgatgtatacctcaatgcaaagtaaaaaaaaataacattgaaagcctcaaagtccttgccattagtcgaccgtcgatctctagaaatcttaaaaaatcatttacctaaactcttagatctaccctcatatctcaaaattaattattttctatatatgtattgtgggtgaggaaactagaagatttaaaagaaaaatgaggaaaaatgatggtgtatggagaaattggggctttaagagagatggtggtggtgtttttcgttgagaaagaagatggagaagaaagaagaaacaagagtttcaaatctgaaattatggttttatagacctattcttcggttgttccaaaatacctgaatacataggcctccacgtgtatctaatatggggctagagttgtggagacctatgtcttcagttattttaaaataaccgaagacaaaggtacacttatgtcttcgattatttcctaatgactgaatataaaggtctccatgacctgtgcttttgattatttcgaaataatcgaagatataagtccacaaatttttgctttctttttcttcctatttttatcttcggattttatattttgtatcattaaaaattaaagaaatataccatatttctagaaatgcatgtagttcatctcatggcaacacaaatgttgatttggtgttgagggatgtcaatttatttatggatgccaacattaaagaacatgattggaagagtggtcttgggatgatggtgatgaatcggggtggggagttcctctgctcggctgcttctccaacaatggttgggttcgcccctcatgtggcggaggcagcgactttgttgcaaggtttacttctttatcttcggcttggttacttgaggctcacagtgttctttgatggcctttgcttagtgcaagctatctcaagtagtgataggaggtctactaagtttggtacaattgtgcatgacataaaagaggcttctctttctttcacagatattttcttctcttattgtaatcgggctcataatgttatggctcattctctagtttgtattgctttctttgaatgtccctcaagtttggtgacctggtttacctctgtctcccaatctaattattctgtattgtctattactctaatttctttgtgcctcttctataaaattattccttttcttaaaaaaaataaaaaattagaaactaagcaatgtatataatatataccgatagaaattaagagtgccttaatgtgaagttgctcaatcactttggaataagctttagaatagtaatattttggagcatcacaaggttctatggtggtgcatcatttctaatgctctcctggttagatccgtgattggaagaagatttcagattgaggatacaagttgtccattatgcgggctgggggaggaatctatagaacatttatttttgtcatgtgatgtggcgatgcacttgtggcgatcttcgccgtggggtatttaccctgtttgtgatactggtat

SEQ ID NO: 382638 - DNA, 3671 bp, Cannabis indica
tttttgtctgactgatcttgaatccttttgttttatgttacgattttagctttagatagtttaaaattggcccatacgccaattcttaacatcgttttttggtctgagtttaagttgcactttaagtttaatgttttgacttatatctattacaaaacattgtgttacctagtttatccgtgctcctagcagtgcatgcttcatgctaaataggttagaaatatctcctagttccctactctgtttttcattagtgatatttttagtaaggaaataatgataagaaacaaaacatcaatgtgacaatgtttaaaattttggatttttggtctaatatttaggtaaaagtgttatgattacaaaacattttaatagtatcttgtttggaattcttccatggctccttaatataagatgctgcagtgtctaagtgttaatgtctagactactgcacttttatgattttcatgagattgctgaagttatttggggcttctgagaacactgcctgttgcgatatatattatttagttttcttggacttgaagctgctgagaacaatttctttcttgttaccaatatgttgttgactgtttggggtttttttttttgtttatcataatttattgtttgaaaggaaggtaaactcgtgaatccggatatgaaagtcttagtcatgaactttagacaggaagtgacatttttgactatattgcctttttttttcgttcttttctttaatattgacgagagttctgatacaaaatagaaaatcttaccctgtttgtgttgcctttggagctgtttgtgtttgctatgttacagagatatgcatgcaagacctttatctttcagttgtggttagagacagtgcttaagtagattagagttaaaagcatttaatagtgtcatcatcagtttcagctacttttttctgccccaaggaatgagtgatctcccttcactgatcagaaggtcatagattacttgacaattgataaaccatatagctaggtacctagaagattagggagagtggcattcatatctcttgagaactaaaaattaaattgtttagtcagaccttaaaccaaaaaaaaaaaattgttttagtctgttttatacacaaatcagatgtgtttttttagtgcattagtgttttctgcatgtaaagtttgtggcctcggccttgtgggcattaaactatactttggtcgctactctggatttttattacaaataatacttggctggttgataacttactttgagtattccaatttaatttcgtttgatctacttggataatgattttgcagtatactcagtgcaccaatacaatatagtatccttttttctttatatttttgtatgaatgctggaatgttcatggtggacaaagatgcatgtattttgatgaaagttgtaaaacttgatttcattttggtctcattgagaaatgggattgttttggataatgaaaaattctttggaggcaaaagtctctagtgattggcttatggaaagagatcggaatatagaagtttcccatctacaaacccttaagcaggaggatatggttattaaaaaattaatcaaacagctttattaattcatggatatgggataataaattctattggaaaactttgtgtaactgtatcccatcttaatgtatttcaatgaaaaaaaaattacaaccttgcatcgattttttttaataattattgtgtgtgtaaataatcaatcttgctttccaaaaagtgaattatagaccaccattgcttgctccacagaatctgcttttcctgctcaagttaaaaattgtgaaaatttatggcagaaagccagaaatggtatgtagtgctcttgttttaaaattcatattgcatcaaaagtggggtctttttttcaatctttttctttcataaaaataatctccactgcagttcttaaccttttttattacctcaaaagaagccttggcttaggtttcttatgtgtcaacagtgtaatagtaactttagtctgtggacctttaaaatacaacgtaaatcttggtccttttcgacaacagaaaagtctttaacgattccaaaccgagaacaaaacgcacaaatatgggtgaagcaaattgaactacacaaatcccagttatagaggctctagtcatacatggaagaaaagagtggaaaccccctaaatgggaaggcataaagtaccttcaaaggaaagaacgatagtctatagaagtatatattccttactttcggttttgtaaaagattcaccaacaaaccacacaaaccaagcgttttaaccacgccttatttgtctttccaaattacaccactaccctcatttcaactgcaggtttctcttatcattttcaaaccaaagaagggcatggtagtaagtcacttcatgtcaaaagcaattccatgtttccatatattggtatggccaatatggggagtactgaaagaagagaggaattcaattaagatggatcaagaacaagttgaaatggttgggagaatgttcgtggatcggtactaccagctattcgacaacgatagagcttcggtttctttgttttatcagcctaactcaatgctcaactttgaaggccagaaaatacttggtgttgataacatatcttctaagcttaatcaattaccctttgagaaatgcagacatgatatcagcaccgtcgattcgcagccctcgtctacttcaaccggtagcattgtggtgtttgttagtggcagccttcagttggtaggggaagaacactccttaagattcaatcaggtaagtcatgttagtttatgttattaggtagagaaaaattagttaatattgagttttgaaatggtttattatttattgattggtgcagatgtttcatttggttccatttggacaagaaagtttctttgtgcagaacgatatatttcgcctcaattatggctgagattggcattactacactatatattgttgtcctaattgaataaacattatactatatatgatgcacagtttatttctctctaaggctttcctcaaaattatggttatgcgcttgtaatgtgtaaaaatgagtaaatttagccaaatataattaagaatgtgtgtagtagtagcaatatatggagataaattcttaaactacttactattattgttcatcaactgttaatcatgaaattcccttaaatatttgacagaagagtaagaaaattgaacattttaaagttcagggaccaatattgaatgatcaattttgtgtaccgtttgatatttgggggtgtgagtaaatctctaaaaaaaactatttgggggtgtgagtaaatctctaaaaaaaaaaaaaaactcaacacttttaattaaaactaaaaaatgacaaagttaaaagctttggggaaattagatagtatacctttttgtgtaaaccttttctggttgttcaggacccataccaaagtccaggccatctttaataggttgggccttggcccatatctaagaattaatttttataagtacgactttttttcttaaataataaatttctcaaccagctttcaaattaaaactattttgctgtgatgaaatagatcttacattttttaaaatggtacaaataggaccttgagtttaattttt

SEQ ID NO: 382639 - DNA, 1572 bp, Cannabis indica
cccatcttttctttctcagattgtttcaattacagctagagaaaaagcttttcaagctcataatatctggaaatggggtgctttatttctagctgtgatagcttcttttggaaccataattagtagaatcaagattttggttattagattacaatgtcatttttgtaataaatctaattcacaacaacaacaacaacaatcccttgtacccaattttgatgaagatgatgatgattatgatttcaccagcgataccgaagacgacgaaaacgatgaagatgataacgaagacgacgacgtttcgtgttcttcgtacgattctgacgaagctgttcaagggcagagtagtaattttggtcttcgtaggcggcggagcttcgtggaccaattctcgtggtctgatttctcatctggcaagagcgttgttaagctttgggatagtttgggccttggattgggcctagacgaaagcccaaacccgaaagtggtgtctctgtattcatcggccgaggagaacgagtctggtgggcgcgcgtgtatgggagtttgggatgcgcgcgtgggtggtcgaatcccggctattctggccgagtggggcccacagctggggaagattgttggagtcgcaaccaatggagctgagaaggtctacgtcagagatgacgtcagcggcggattaacaatcggcgatttgagaaaagttagctcgccgttgaagaggttttcgaaagctgacgtggacgaaatctggtgggacgctctttctggcttagtttcggacgagtcagctgacgtggcaagacttgactcggcggcgactcggtgtgtcgacgcggttaggtcatatctgttgtagacaaaaaaaaaaaagagagaaaattggtagttggttagaataatattaataataatcataattattattatcattattattggattattcaccaacataaagaatctgtaaatattaatttatcatcgatgatttatggtcaccacgtatattagttttgatctaattaattgattattattattagctaaaaaaataattacaaaatattattatattcgtgtacaacaaattcatgggaacaatgatcagtactgtaataaattaaatgcattattaattaaatattttaatacgtaattatgtttggaaaactattcagtaaacagagacttttcatattttatatttataaaatggtattaagcttattaaataatgagaaaagtcaggcttcaattcaactattcttaccaataatccaaaaaataggtgtgtgtgtttcacgtgataatattttcattttttaaattagtggaatcttcttgttcagattaatcatctccaagtggtacaaagtgtctgtgtacaatatactttctaaatggttgtttcggtagatgttttatctagtggcaaagcccctctaataatttagtgtgtgtaatattttttttcacattaataaaggatataattttattaaaaaatatataaattttgtgagtgttagagtattagctgtatattaggtgtaaaagaattagggtaacttg

SEQ ID NO: 382640 - DNA, 1299 bp, Cannabis indica
ggtcagatcgggtccgagtggattgcccaagttttgagttaaacctgctacaaaatattcagtcctaactaaaaattattacaaactagaaaaaagttgttgatttgttttatctcttattttttgtttcttttgatagaatgagtcaatgatagttgtatctttcatgttcaaatccacttaataaagagtaaagtattcaatattcctaaagaagtaatacatagtaaaaatatatatgagacaaactaaaatttttaaatcatacataagcctaggtcatgatatatatgaaaaaaaaaaaaaaaagaaaaaaaaaaaaaagaaaaaatggacgagtacaactcaaattggcaaactgtatatatattacaaaaataataaaccataaacatattattgattacgtgaaacataacaaattggatatatatatatatatatatatacaattcaaatttacagtgcttttgaatatatacactcatagcttcatctactataacaatagaatttattgtatgttacgaggcattcaaccttagtatatgactaaaaaactttattaacgtgctgcacattgtatatggaatagaattatcacttaagttatattatgacaataaattaattgtattgtattctaataacaacatgagttttgataccaaatgttaaaatactgtaaatttaaatttagccctaaataatttatgagaatcaaacaatagaagcgtaccggaatccataaactcgattttagaatggtataatcttccaattttcacatcaaagaacttttgaagccttattttcctaatgataggaattcaagaatctagaaaaaaaaatatgatacaaaaaaatagagaccattacccgttatgttaccaactgccaaaacagttagtaatatttattaactatttttaatttggtccctcgtctaattagaaattgtctaattagtatccacgtattaaaatcatgataatcatgctcaaaatttataaattttatttcaaaatatatcacataaatttaatttatttatatgatgaactaagatatattttttacatatacaatttatttattttggaaaaaaatctcaattcatggtatgtgtagtttagattacctttgtatatatagatcgtttgtaataataatattttgattatattttagtcataggttgttgataattccttgatagtggatattatactcactaacactactacaatattagcctttagaggcagttttttcaacctcatttataaaaaaggaagc

SEQ ID NO: 382641 - DNA, 1767 bp, Cannabis indica
agtaatccggagtattttcaatattttctctcttgccaaacagatctggccgtggattcaaaaagtgaataaataaaactaattcgctatttatttattttgaaactgtttcaggcgtggattctctgctgcatcacaaggagttgtgtcgagcgtagtaagagctggaaccgcagcaggttctagaaccgcaacaaagaaatccgtcgaagaaaacaccgagaaggtgtcgtggatccctgacccggtcaccggttactacagacccgataatggtgttccagaaatcgacgtggccgagcttcgcgctacgctcttgaaaaagcactgatttaatgatttaatttatcagtaaatcaatatttttaagaaaagaaaaattaatatttaaaaatatcccctagagagacgtatggggagttacttggtccgagtcgcctgacactattcgactcagtgggtaggggctgtcgttttcattgggtgtataatcattttaattggaattcgataagccgttggttgttgtgggtggtggtggtatatgaaaacttttgttttatcacataatgtttatgtagctcttttttttttatcaataatatgaaaaatttccaatctattttttagccaagatttagtttcgatgccatataaattaaattatagcattacttttttctctatttaaatcaaaatgtgtaagaaaatcagtgatttgcattaataatggtatggagctaatttgaagaagataaaggtgaatgtataatgagagaatttagttttcgtttttgtaaaaaaattaaattattcacaaaaggacaaattttatttttgtccctaattaatttatgaagaagatgataagaaacttataattaaaaattacttgtggaagtatagaatcgtagataaaatcaattatttgctttcgaattttggctacagtaacataatataataaatcatatataaaaatgtagccaagtaaaggaattttgttaagaatataagttaaagtattttaaaaatatataggaacaatttttaagccgaaagtgtcgaccttcctaatctttaatagtattaatttattattattattattttagatgaatggtaaagctgttgttgaataattggagacaacacaacattatttgatgcgtcagagattttaatctattgaaaacactctcattattgttagtgattgatattgatataaaattggtataaggataagcttggaatataatctaacatagtttttcttttttttggtaaagtttaaatctctattattttgccagcaaaatatgtggtgaatagtgtatgaatgtacattattttaaacgcgctgaagagacaagaagcataggggaaaaagagtataaaatgcatgcatttaggcaagtgacgtgagaattgaagaattaattaatggggtcaatgtcatcaaattatcaatcatgtattattattaattatttgcaaattgcttattagatggtataggaataggactaggaaatgtgctagaaagaaaggattagcaaagcaaatatggatgtattcgaagagacttgtgagttgtcattgaatgaatggagaaactaattaagttaatattttaaatttctctttcatttttacactctacttatgtaaaacatgtatcttgtctgatgtggtgtgttttattatagatcattgttattagatatcagtagtgcctaatacattctcaatatcttatattgc

SEQ ID NO: 382642 - DNA, 3246 bp, Cannabis indica
gtatttttcaacttatcccaatatttaatttctggctccaccaactgtctcctttccctaccaatatttttcctaaacgatttccaaaccgaatttcattccatgtataatccaattaagtagtggggttgcataaatgcatactaatgtaacgtgttaattgtttaattattgatatgatttgcatatgaatatgaataaactcatcccgagtagtatatcaccaccaacacaataaactgtttaaccattatgtttcaaagtgtcaatttgcccaaatggatcaacattggaaacatttaatgaagaatattctttattagattcggtcaaaccatgatcttcttcttcttcttcttctaccttattgaatttttgatcgaaacctaactcaagctccaaacattgtccttcttcttcctccccttctccgaaatcccaaatatttttctcctcacaacgcccataagcccaactacacaccaaaaagtagaccaaattgaccaaacccaagaaagtcaaaacccaaaagtagtaatcgtagtgacccttgtttggatcattagcaacccaactcacattcccgcctttcccacttgcttcgttggctattcgtagaatcaaagccgcaatcagattcccaaaccccattcccagagcgaacaatcccacggcaaagctggtcatgttcttgggaaactgagagtagtagaattcaatctgtccaatggcattaaacgcttcagccaaaccagtcaaacagtactgcggaacaagccaaacccacgacattgtttcgccataaacgacgcccaatcttcgtcgtttcaactccacggcggcggccgtggccgtggcgatgcaggagatggcgaccccaattcccatcctttgtttgaagctgaggccttgacgatgtcgttcggtgaagctggagaggagtgggattagtgctctgtcatagaaggcgacccagaggaacagagtgaggattgagaagacgacgaatgagccttctgggatctcgaaatgggtggtgaggtgtcgttctgtggtctttgcttggattaggtaaagtgcgtgttggttcattgttactgcgacgaaaatgccggttgaccagattgggaggactttgagaatggctttcagttcttcaacttgctttactgtgcataaactccatggatttattgctaaaccatctggggttatctccttatctgggtttctaatcatacaagccttgttcaagaacctgagaataatgggtagtgtttttactttgattaaattagtgatattatgcaaagatagcatttttattatggtttagtaaaattgattgtggtggcttctagttctacctaagcttatctgttggtctgacaagtttggaacctttgagatgataccagccatggaatttgtcatcttgaggcaaaaccaagtgtctgttcttccaagctgctgcaatcacatgagtaaaacctgaaaacatgttcttattagcgcccacccttacataaagagaagagcctatgaaaaatagaaatgttgagactagcattagccctgcaggaactccaaaccccacaatccagccacatttctcttgtagataaactatggcagttactgaaaccatcactgagattccaaccgaagcgtaataccagttgaaaaagctttgtaagatcctcttattattgggattttcaggcttgtcaagttggtcagctccgaaagccaaagaacaaggtctaatcccaccagctccaacactcataagaataaaagagtaaagaagcaacacaagttgaggaccggttgctttggaacaactctgtcctggtttaccaatgtcacagtgagcaggccttgctgttgggattatagctgttaaccatagtactatcattccctgagaaaaatataaaatccaaacgaattaataataacttccattccattcattcttttttgaatggtttaatatatacttaccaatagggtagtgatagttcctagagcaatcattcgaaaacgacccaaatgagaatcagaaagaaaagcccctatgatgggtgtaaagttagacatggctccccacaatagcagaatagtggctccggtggccacatccaagtggtactcattccttaggtaatttatcatatttgcatggagtccaatactggcaagcttttcaaatgtttcgtttgctgcattggagagagaggagcaaaatcaaaatgttatgctattattggctcagaaatatatatatgtatatattcaacacaagtaaataaacacaatttcatggtgttgtaattaagagagattagtacaaatgataaatggcatggttctaaggccaccctttttgcttttaactttttcaggagagatctccatgcttttcttcatgcaatgaatttagagctcactatgttttctcagattactgacctcattattttgggtgagagagattggtatgtaaaaagtacttatatataagtagagacaagagtcacgagagaaagggagttaattacaatctaccaagactaacatatgataatctaataggtcactttgagattatcatcagaatattccaagactaacatatataatttgtgtctgtcattttcatgtcaaaagcgaacaagtgcaatttaacctcatattattagaatttacatgtgaaatccaaatgtgtggaaaaagacaaattaaatttccccatgaaaatatatttagttattagttcttgaagaaaataagttacttcaatttagaatgaaagttgattacgttagcaagtgtcattgttaatatctgaaaagtaataaaataaataaagtgaatgagattccgttttaaaaccaattagtaaaaccaacaacttctaaatgtgttcataatcgaaacacaaaggcaaaggactagttaataatccattcacattgtggatactttacaaaggagtatgctaatgtaaatatcatgtaactcaatcaaatcactacaacaaaacttcaaattcgcccctaaaaagtcaaatgatttgacttaatatcatcaacaatagaagcaacttatgatattgcttcgggagattaccgaccaatttttttttttcttaaaggaaaaaggttgccattgtcattttattaaattttctcacatttacatcatctatttttggctccacatctaacaagtgatttgtgt

SEQ ID NO: 382643 - DNA, 4511 bp, Cannabis indica
accagttggaaagcaatgtatagcagagatgcttgtgttgaattggtgctatgcgaagctctttctcttaggaagctttggtaggacataacagttactaccatatatagatcaaatagtgatatctacctcaattacttccacacattatatttggaaataataatagtaaataaaataaatataatccacaagaacaattgccaatcacaaacatcttattcacgtcatccacatttttgtcttttaataaatgttcctcatccaataaaagaaaattaaattaacaaggaaccaaaaaaacaaaaaaaaaaatcaatttgtttttcgagagttctgtatgcaataatctacataagtaaaagttttttgtggagaaggagatagattaaatttcaacctcaaagtgaccaaaagaaaggtccagtttcaattcaggcacacaattcttgtgacacgtgtcattcaaccaatcttgagtgtgtggccgttagtcatttgaaaaaccaatcctcacaatatcccttttggtacactcaaaactcttcctctataagttctctcctttcccaaaatttcgactttaggagaataacactgcactattactatttctcttttcaaaatcaatcttttgaagtctaactactgccgccccatctcggacgaaaccgatggccgccgctgtgtccaccatcggagccgttaaccgagctccagtacgtacttaattaattagctttgcctctcctaattttctgcctttaatttctgtgtatctaattatcaaatcaagttcataactttctataataactattagtatgagtgtgtgtacttaattattttggttgactgcatacagttgagcttaaatgggtcaaacaatggaaccagttcagttccaagctcaagcttcatgggaaacagcttgaagaaagttgtgaacacatccagagtgaacaactccaaggtttcagctgggaagtttaagattgtttcagcggcggctccagatgaggactcaaagaaacagacagacaaggacaagtggaagggtcttgcttatgacacatcagatgaccaacaagacatcacccgaggaaagggtttggttgactcactcttccaagctcccatgggaactggaactcactacgctgtactcagctcttatgaatacctcagtactggacttcgccagtgagtttaatcatatctctatctctatacatgtttcgtttactaataatatgacttgtgtagttctttatttttattaattgactcaattattgtttattttattaggtacaacttggacaacagcatggatggtttctacattgcccctgctttcatggacaagcttgttgttcacatcaccaagaactacatgactttgccaaacatcaaggtacgtacacaagttaaactatcaaattcatcacattattaattaattatttcgtaatagtcgatatttgaagttataactgtatattaatgaaacaggtacctcttatcttgggtatttcggggaggcaagggtcaaggaaaatctttccagtgtgagcttgtgtttgccaagatgggaatcaagtaagaaattttatgtattactttaaattctgctcaattctaggtttcacatctattttgaattgaaaaagaaaaatgttaaagggtacttatggtgcttaatattttttgtgaagtataatatccttattagttaaactcaatatcagattacacttattttattttaataaatattataaaaaatcgttaactaatgatagggtgacactaaaccatatgtggttcatagtaatgctctatgaaaaaaggtggacccatgtgtttgccatttattttaggaaaatgcatgatctatatatttatttttaagttttttttttaattttactatttgaattgctcgagtaatttttaagtgggttgttatgtaaattttaattgcgacttgagttattgcgttcattgctatatagattactatataaatgtctataaaaataaaataataataaaaaaaaacttattaaaagtgtaaaaataaaaaatctcatttatttattacatatagtatatatacaagtaaaactcacaattattatatatataattgcttcgctttaataattttgctctatagggttcaaattcaagcttgttttcttttttctaaaaacatatatgtctagtagctttaatatatatttcatacttttttttagctatccaaatcgaaccctccattgtcttatagctttaatttatatttgatgtcttttttttggttactaagcaagatgatattaatccaacaaaacttctttacaacctaataacaccaccaagtggcctataaactatatgtatatttgatacgttataaagtaaaaactgtattgttataaagatcttacataatatatttcaatatacttaattactaagttacattacatattaaattacattactcttattaagtgtaataagtgagaatgtgtacgttgcagccctatcatgatgagtgccggagaattggaaagtggaaatgccggagagccagcgaaactgatcaggcaaaggtaccgtgaagccgcagatatcatcaagaagggaaagatgtgtgccctcttcatcaacgatctcgatgctggagctggtcgtatgggtggaaccacccaatacacagtcaacaaccagatggtcaacgccaccctcatgaacatcgccgataacccaaccaatgtccaactccccggaatgtacaacaaggaagacaacccacgtgtccccatcatcgtcacaggtaacgatttctccaccttgtacgctcctctcatccgtgacggtcgtatggagaagttctactgggcacccacccgtgaagaccgtattggtgtctgcattggtatcttcaaaaccgacaacgtcgccaccgacgatatcgtcaagcttgtcgacactttccctggacaatccattggtacgcgcgctttttctttttctttcatacatactgttcttataataattataatctaattaatgttttgtttttttattatatggtgatttattagatttctttggtgcgttgagggcgagagtttacgacgacgaagtgagaaagtggatctcaggagtgggagtggaaaccattgggaagaagcttgtgaactcgagagaaggaccaccaacattcgagcaaccaaagatgacaattgagaagctgttggagtatggaaacatgcttgtgcaagagcaagataacgtgaagagagttcagttggccgacaagtacttgagcgaggctgctcttggtgaggctaacgaagatgccattaagagtggaagtttctacggttagctccttgatcctattgacgccttggtgggaggtttgattcctcatcttataattattatttgtacttaataattaaacaaagtttagaaccaataatgcacatataattaagttatatgatgatcagtatatataatgtatcgttctaatttgatatttgttgtcatcttttttaatgcatgggtgagcaggcaaagcagcccaacaagtgagtgttcctgtggccgaaggttgtactgatcccaatgctgagaacttcgaccctactgctaggagtgatgatggtagctgcctctatactttctaaggcgttttctatcgctttttactttttcctttttcgtttttttttttttttaccttttacttcccaaattactatggtcaacccactttaaccaaacttttgtgaaagtagaaaatttttagtaaattttcagattaggttctaagaaataaagaatcaaatgaatacttggagtttttcctaaaatattatcatcatagttgctttgtagtttataagaatatgttgagctagtcaagtagaaaaaaattaggtaatattatacctccttgaatattgaaaacttaaacacatgaaaatagtcagtgtaataaagtgaaatcttttcttaagtgactaaggataagtcaaaataatagctcactagtagactagcaaaattaataacaatcatctcaagaacaacatagtacaaaaaaaataaaaatacaaaggactttgttgatcgaacaagacagtttaaaggtttcaatataaggagcataaatgatatattttgaagagcttacttaaaagcttatataagaattatccaaaaatttcatcatgaatgatcgatacaagaagaatgtctaaacatgtgtctcgcatatgtcgtctcatcctcgtacaacgtgagacacataacaaatacatcatctctatgaagtaaccgtttcagataaggataattagaagttttcagtagtaaattaatttatcccacatataataaaaatcaaatgaaacatggagattgttcacgtttcatgaaagattatcaagagaagaacaaataaaataaatatcatcctt

SEQ ID NO: 382644 - DNA, 5453 bp, Cannabis indica
ccattgtcttgaagattggcgtagaccatagatcgatttgtggagcttacaaacaagattggtacctgtagattcatgagcagagagtgttagtccaggaggcaaggccatatagacctcctcatttagatctccgttcaaaaaggcattatttatgtctatttgtaatgtatgccattgtttgattgtagagatagcaagaagtaattttagagagaccattttggctacaggagagaaagtgtcaaagaaatctaggccttcttgttgcgtataaccttgagcaacaagtctagccttaaatctttcaaccgaaccatcactattgagtttgattttataaacccaacgacaaccaatgactcgtctatttggtggaaggggaacaacagtccaagttttgtatttcgaaggactctgagttcagtattcattgcatcaagccactgttggaattgtatggcttgcttgtatgtttgtggttccttcaatgaagtgatagcaagaataaaagctttgtaagattcagtcaatcttgcatatgcaacatatttatttaaagcatggggagtggaagatttgtcctgaatagtggagtaacactcaaaatctttgaggtaggcaggtggacgagtaacccttctggtttttcgagttgtaacatttgcttgtgcaggagtgtgttcctacaattcttctgcatctgctgatatatctgatgcagcaggtgcatcattactggtgcctgtagcgctgtaactggtgctaggttgttcgacagcagcatgttgataatcacctatatgtgtgcgagagatgtcactggaaggcaacacaacaataataaaagaatcaatattaacagtgttttcatttaatttttaagaaaggaaaaatgtgttgatgaaaaaccacatttctagaaataaaaatttgcttattattaatgtcataaagacgatatccctttactccttgaggatatcctatgaagacacaagttcgggctctatgatcaaatttagttcggtgagcagaaagtgtagatgcaaaaaccaaacatccaaacatccttcaggtgttgataatcgggttcctttttaaacaacaattcatatggtgttctgttttgcaaatttggggaaggagtgcggttgattaagaaagttacagtcataatgcattctccctaaaatttgatgggtaaatgagcttgaaagcataaagtacgagccacattcagtagatgttggtgttttctttctgcaatggcgttctgttcaggagtttctacacaagtaaaatcatgtaagattccaagttttagaaaaagttctttaaaagtaagttcaggagcgttatcagatctaaatttcttgatcatgcaaccaaattgattttgaacataagacaaaaattggggaatgacattcaaggcattggacttttgtttcaaaagataaatccaagtaaagcgagagtgatcatcaactaaagtaagaaagaatctaaagttggaatgagaaggaatatgataagggccccaaatatcacaatgcactaaatcaaatatgttgcaagcaaagttatttttattaggaaaaggcagtttcctttgtttggccaaaggacaaacataacatggggagttcttatgtagattcttggtattacaattgagtttatcctttaacaaattcaattatttatcagataagtgccctaatctagcatgccaagtatcagcagaaacagctagaataggagaagcagtaggcgaaggatccaatatgtagagaccattcttggattcacctctgccaatcgtattcttgttgattagatcctacaatacaaactcattagtagtgaatttaacatcaaggcaattatcattagttagacaactcacgaatataatattgtacttgaagtgaggaacaaataaaacatcatttaaagtaatataatccgtgagttttatagtgccactttgatgcacaaaaacaaaatccccattaggaagtaataacctggtagaatttactttatatatgcattggaataacttcatattagaacagatgtgtctagttgcccctgaatccaagatccaagagccattattaggcaggttcattatgttagacataactatacctgatttacctgtaccattaccaagttctgtgtttggcaaattattttgttgtccagcaaggaggttcaagagttgctggtactgagcagtagttagttgtggcagcaaggtctgactttcaccttgggcattattagcatctgtgttggtctgaatttgattagctgaagcatctttcgacttgtttttgttgtatccaggaggatatccgtggatcttatagcacctttcaatggtgtgtccaaggatattacactgggtacaaaatggacggttcttcttaggagggtgagatctgtttccttgagaatcagttttattagaattggacttatctccctgaaacgcaaaagcaattcctggattcggatcagcagcagtattcgagttccatttttgattttcctcttgggtaacaaggtgaaaaaaccctgtttatttcaggcaaagggtccatgattagtatactgccacgcacttgagaaaaagaatccgaaagacccatgaggaaggacatgatgtgttccatgtcatggtgttcttgaagtttcttcataccaccacatgtgcaaccattgcaaacacaagtgggtcggtagttctacaattgttcccatatcgttttcaattttgtgtaatacatactgacagtttggttgtcttgtttcaaattcatcaaactctttctcaagttgtatatatgcggaccatttcgttgatgaaaacgaaccttctgatcggaccaaattgcagctgcagattcatcatataatatgctagaagaaatctctttagatacagaatttaatatccaagaaatcactatgttagttcctaaaccaagcattgtacaaaatatgttcagaagatgggggtttaggaattgtaccgtccaagaatcctagcttatttttgacaaagatggccaagatcatagccctgctccaagacatatagttgtcttgtccagtgagaagctgtgaaaccagcacgttacctgggttatccccatgatgcagatagtaaggatgcaaagggtcttcaagatgacttcttgattgcacgatctgttgatttaattgttgttgcatcgtcggattgggaggatcaccaatcattgtggatattccgtcattatcgactccgtgggtagaactttgatcatcggtggccatggcagaatccagttaaagcaaatcgaggaagaacagatgatcgagaaaaaaaaaaagaaacgaactgaaacagatattcagtcttggaacgtcgccggagaagaagcacggcgagaagtgaaagagaagaatggatcaagggaaagcatttctttcccgctctgataccatattgcggaatagaaaaagtggagaaaatttcattgatctcaaagtgaatgaattgaattacagagtgcttgaactacagagtatatatacagctagaacctaactgacttaacagacccaaccgacttaagtaaccaacgcccagtaagaataggaaaccgttaatacagttaaagaagataagtaaggcaaggactaactctaactataactaacagcactacacaaaacactacagaaccaatactgcagtaaaatgcaataaagtaataaagtaattcttaacattgtgaccacaatacttctatatattatgcaagtaaaaaaaataaataaataactaggtacgtatcttttgttggtgtgcagccaaataaattggagtactatttcttttatatatgtgggacttatttgatttggactgattacaataacaaatgagtggttgggtggttacttgtacattgtatatgtatgtggtctaattgtatactatatttatatatataggtaaatatcatttaggatcgtgtgttttgcaaaagttattaattggactctctattttattaaatgacataatggaccatgtattttctaaaatggtacaaataggaccctaaattgattttttttcaaaataaaatttaattataatccgatctaaaagagttatgacaaaattgtttacattttctgtatctgttcgtattaggaatttttttcaagttggctatattaaaaaaaagttttcaaaaattaagctcaaggtcctatttttactattttggaaaatacagggtctattttgtcatttaacaaaacataggatccaatcggtaatttttgcaaaacacagggtccaaaatagtatttaccctatatatattagcagacattttattaattatttttgtgttcattttccatggttaagctgcatataacattatcatcactaatttattgttgtatgacattatcatcactaatttattgttgtatgatttacgctgcatattatcttgaatttgaagttaggattttttctctcaatacaatatttggtaaatgttattatatgtatagattattttcactaaccttaccagcaagaacatagactggttcttatggtgagatgcatctttatcagtcttaagctctttcttagccacctaagcaatttgcagcaactttagttgcttgctcaagcaaagcctcaaaatcatggagtaccatgaaatcttatagacaagatgagcttggaggattatttcctaccttgcatagttggccacaagtggctcaacgacagtggtgatacattttttctatgcaactgccatatgttggtttaaagattatccactttgcccagacatgagagaggttccgaacactatacttggttccactggtaatttttttagactagagattgctgtagtaatttccctttttagtgatttattgtatatttctctacttggaaaattcatcatgagattgagtttatggttataggttgtgaaggcttttgaagtcaagtgaagaggtgagatgaacaagattctcaactatctatcgatcctactttacctctcttgcttgggttcttgaagctatgtctgctctatttctaagattggtattgagatttgctacttttagggagcaaaggtcacagagccaaacacaatcctggtttcttttttttttaagtatttgtatatgttgtctggtttattgaagcttatttcacattgagtagatacttggtacgtagagaaaaaatcttagtattaacaacatcaggattgatctaatttatagatttgtgtatgttatatattttgaattatgttagagattttgtattataaacttgaattgtatatatacaacttattaattctattaaagtgagttttgatatttta

SEQ ID NO: 382645 - DNA, 2052 bp, Cannabis indica
aatttattccattccattcctattctcattcccattcccattcctattcctatattttcattcctctcaaccaaacgcctcctaaatgtaaattttacataataaatctaggggtaagttgaaaaatgccccttttattgatcaattaatcaaatttacctctaattttatatttatttgaaacatacctctttttatatgtattgtactcaaaataccctgatataagagaatcacatggagagtatcttgaagtgacaagggcaaaattggtacaatatttaaaaaaagaggtaaaaataatagactttaaaaaagagagtaaaactaaaagaagacaatataaaaaaagtatagagtataattccctctaaatcctaagcgtaaatctctcttagcccaaaactagttccgtcataaaaaattgggtgtacttaccaaataaattgtaaaacattttctcttcacatttgttaagaaatatatttgtgggacccacttggttttttttatctttttttttttcaaacctaaaaaaaaaatcttgttgttccactatattttcatgttcatttctcttcattggaacataaggggtaaagcatggaaatcaagagaaaaaaaaggctttagaaatgctcaaaagcaaacatgatgattctaattagaaactaccaatgtatgttcacatgtgaaagcaaacaaattcaagtaaatatacattgaatcctcaaattcaatcaaggttggaatagaagtaattgagacctattattgttgttgatggagccttcttgaaaaatacacatggaaatactctatttttagcatgtattgattcacacaacaaaatttttgtattagtattccaaatagaggattctaaaaattacaaatcatggcattggtttttcatgaaaggaaaaggaccagccctggagaataataactataataataataattttgtcaattagtttatatatatgaaaatggtaacaggttacccaaaaggttgtaacttgttaccgttagagctataaccatgcaaattttggcaggtaacttgctaccattcagactttgttacctatagatctaatgtcaattttcttttgtttatgttttcaatagaaacaaaaataattaaataataataataaaaataactataaataataattttgccatgaagttatatatatgagaatggtaagaggttacccaaaaggttgtaacctgttaccatttgagctatattataaccctgcaaactttggtaacaggtaacttgctacaattctgattttgttacctatatacctaatgttatcttttttgttatttcaactcctaatataattgtttattagcttcactcttcactctaataccacactatagtgtccccaaaagtatatttttcataatctttacatttactaaactcataacccccaatttataattgtatattatagatgatagatcaataatatatatttccaagttttaaatttggaaataattgtggtttaatttgttgttcccataacaattttgttggagtacaactagaatattggatgtcacatccaattacattaataaagtaattttaattatatattattggttagaaaagtggtttaatattctaacttttcttcaataacaagcattacataattcttcaatgtcagaaaaaagcatggaataaagtaaagcttcttatgtgtgaaaactttcatttaagttgatttgtgataacaaaaattcactagaatttaatttgggatttacacttttttattattattattgttgaccgaggttttcgacaaccaataagataataagagtttagagagctgtaagaaattaagagagagagatttttacgtggttggggcgttaatgagccttagtccacgagtctgtatatttatgattgtatttaatacagataatattcttggtgagtatttactcttcttgcacttatgcaacccagaattctcgacccccattaatgagctttgaggaggtatt

SEQ ID NO: 382646 - DNA, 1645 bp, Cannabis indica
gttttcatgatataaaaagagtaaaaattgtgtaaatgaatattatatatattttatataattgtgaccatgcaagtagtaaatttggtctaatggtgatgaggttgtcaattgggataaaaaccaaggttttcaaaaccttggatttcttgtattgaaagaaaccattagactcaattataagcactaaataatttaatattgataaaaaaaataataaaaaagttgtgactgactatacataatttttcgaatttgatttttttttttttgaaaatattttgccaattaatgtgagaaagtgatttcttttttaatattttaatattgcatccttgtattttattgacaatcgcaattcacaaggaaattacttatctaattaaacaattaattaatactttactaattaagactttcttgaaagtttaattaagacaaatatttaaagaccatagatcctatctaatagctaaagtcatggatttttactaataatttatataaatatagattaattacacatcatgatgatgagtcaataatattgaggcatgagtcaatatacatgataaaaacaaaataatataaaataaaataatctctaacctgtccactgatttttctttcttttttaatgtatgtttattttatgtttttttctatgatatatttatatgaataaggaaggaagaagttataagaagtaaatgaacaaagtctagttctaattatcctaataatacttctcaaagcttaattatagaaattaaagagagagagaaagagatatgtctatgtctctggttggcaatgaatttgaagcctcaaatgaaattatacaaaaagatagccttctcaaatcgaatcaaccctaccgaactggctatcattttcaacccccgaagaattggatgaacggtttatttttctcttctcaaataattttatatgttttgaatgtagttatacgtatataatttaatttatctagcgagactcgtccagagaaagaataatactttttttttttaacattattttggtttcgattaatttttttcatgcatgcatgttgaaatatatggctatggctcatcctcatcatcaatatatctattcagatcctaatggtatgttttcctaactcaactctttgtttgtatgttttaacatgtttttttttatgtggtttttcatatgataagttagttcatttaaattttgatagaaaaaatatatttaaattgaaattggtgagtgtaaatagtagaaattatcaggttagatgtgtttgttttactaatatttttactctttaatatttcaataaatatattctctaattcttaaaagggcatgggaattatgtaattaaattgaaaacaatcaatttttactttattttaaattactatattataatttttaaattttattgtcaaacataaaaataaaaataagaacttaaaattgtataaaattatacaaattcaaactttctaatttctatttataaaagaaattttaatctttctgtttaaatccaaatcaagagaacatggcatttttttattgtttttacctatcccatttttttttttttttggattatttcacaaatatacaaaaataacaaaaaagt

SEQ ID NO: 382647 - DNA, 4563 bp, Cannabis indica
atatatatttatatattattcttccattagcaaattcaatgcagtctcaaccaaagaatgaatagttgtgctatggcggctcattccaacagtacctgagaacatattaaagctctcaagctctgcagtggtctccaagacactctccaactccttctccaaccccaaatcattgaagattcttatgtttgatgctttatttgtcatcatccaaatggccaattcaatggcaaacctccttattcttggtaattttaatatggggtttttggtacttcttcagaatttgaactaaagcataagctaattcagcttcagttatcccagctctctcaaacatttgacttgattcttgtgaatccatgaatttgaaaacatgtgctgctagtccaaccattacttcctgtagtttgttctctcctgacatgattgcttgaatcacctgaaataagcaccaaaatgattagtatttacatgtcaaaattataacccaaatgatattagattgagaaaaacacttactgtaggtgctgcagcagtgatgcccttgagctgtttgaagctgttttctccactataagtgcacaagtttctcaaaattctagcagcattaactctcagcaagggaagttccaaagcttgaacaagcctatcaagtatatccaactttaacatacgataacaattgtttttgctttccaatgccaacatagctagagcttcaccagctgcagttctcacttggtcatatttctgagacagtccttctttgaagaagatattgaacaaccctttaagaactccacctgtaccgccaatcctttcggttgcatcttcttccaatgccaggctagttaagatttctatcccaagttgttgcaacattggttgtttctctccataccttagaatatctctgatgttgctgactgtgaatattacctcagaaatctctctccttagaagtttccctgtggttcctgttgtgctccccaacctcttcactacttgcaaggaacgtttcactgtcaaaatctgggatgctgcagcattgtcattcttcagcaaccactcttcagcatgagtaaaatcaatgatcttcggtaagagacctcttgtgtttccaatcttgccacagatgtcatggtcacgagcaagctttttcaagatcagaagtcccaagtgattgaacttccaaaactcatagtttggatggtcacagatgatgtttctttctccaatctcatcagctgcaccacctgaacttcggttggtttgtagcagagatgatattgattccattgcaccaggaatcccagccactcgaagcgagttttgcttctttcctgcaagctttgacaaaacctcagcagcatattttctgctctcttcttcctgtggatcactccaattcaacatctcaactagtttttcaataactggaaagttcaatccaatcttctgcaaggtgtcatcagagaagcgtggattcagcgaaaattggcgaagaattctcgccccaatgagctgctcatcaggggaattagaagccagaagatccatggcaaaagtaaccatgtccatcttcaagccatcaaatatgcttccattaacacatctcgaataggcatcatagaagaaccttctgattgaaaccataccagaagctcctcccaattcactctctttgttcacctcatcaagcagcttgcagtaagtgaccttccattcccaataagctttctccattagaaacaacagagcttcagccaaggccaaggcatagaaaatagtaagagcagcctttctattcttcttgtcagtgtctcctttagccacatccccatagttgtgtttgatgagtttcattgctgagagaacaacacaagctgttgctgacaaaacttgaagccaataaagaagcttactgatgtgttttgtaacaaaaacccatctggcatatggcaatagaggcacctctgagcttgtccatctccgagttggttttctttgacaatcccaattctgtgcattagctacacctccatttcctgctatttctctactgcattgcctgcttttccctgctacaaaaaagggactgaaaactgttttgatgttcccaatcaggaaactcgagctggacttcaaagcgcgaaagctgttgattccagcatcagttatggaccatgttgcctggtgttgccactcaagctcgtgacttcggctaaatattctagctccttcaatcaacaatatgattgtgatgagccaaaaatcagtcttgtccaaagtaatggcaaaaccaccaagaagaacaactgttgcccagataaaaccaagtgttccaaggccagttgctgctttttcaagaacagcaagcctaagagcaaagagggtaagcttcttttctggtgctcttactgtttttgttaaggctgcagagccagaatttgcattgctactattgtcccttttctctatactattttgaggctcaaacattgttgtaactggactaatgttatcactcaacctgttgaggtctgatatctggaggtgaatgcttcttcctccaccaccctcctcagaatcccaacgattcatattttcttatgttcttttttaatggtatgttggagtttggagatagtgttagaacatttagagttatataaatgagagtttgagatatgtgggaagacaacaaaggtctgaattggtctaactactaacgtagaggaaacccaacttgggtggcacgtttcttttgcggcaattgtcttagttagggaagagtaacgtttttattgcttctatttctgtcattttttttcttcttctaaaaagtgttagttatgttgtgattttagctagtttataacttttaaagctcattaaattactcatacaaaaaggcacaatagcctacttttcattttcatttcttacctcaatttcacatttcttcactttatcttaaatcaaagggtgtactgtggaccctttctctgcctgccccagctggaatatagctttttttattcatcaaatatacttttgtattgtgactttaacattttctttcagaaaaggaaaaaggaatctcatcttctttcttgtcaattttcaagtacaagagtcctcttctttgagacattgactttcataaaccccaactgttttctataattaattaactatattcccctctttcattctttatttccttaatgagaactaactacacttgaaatatgtttcaatggtttaacataggggtttatatcattttgtgtaactatgcttttttagtatcattttggaccatccatttcaaacaataacaaatgaaaatgtcaatattaaaaaaaataataaaataaaaattagtatcttctagtattagctccaatttactcgacaatatactcaaaaatgatataaaaaattttggtatcatatttttgttatttcaaaatggttttttgttagtaaattgtttgtggttgagagtctaaactggtattttaaaaaaagataaactttaaaatatgatatgagaaactatgttgaataataataacaagaataagaatgataccatgatgcccggaaatggtgtttttcatttcatgttttgatggattaatattacactattactatatctcatacaaaatgaagaagttactattagcttaattagtggtttggtttcataaaataaaatagtattttcttaaaacgtgtaatcttgcattttagttggatgatgcttaaaggagattggtgacaagagtgtttaattgtgttaagctaaagctttaaatgggtcccaatcccaaactcatagtagcttatcccttttaagcattgagtacacgaaagagaactatcttattatgtaaagaactcatcacaagaaggatcagggattttaggcgtccaaatcaggccgtacacgtggcagacgatgatgatcaacataatttggttgaccaaattcggcctctatagaattgctgtcgtttcattgcccttatgctcttccaatccaatatatcaaataatacaaatgtacaattaacaactttaataaagagttcgatcaataattaatggttttgttttgtgttgtataaatatgacatgttacaaccaaaatgtgacatgtcaattacatgcacttcatcatttatgttaaagaaatcaatatcttatagaaaactcttttaactgtttgccaaatataagatacaaacttttaaccttaactctcatgaaattatagtcatatatatgttaataagatttttatttaaaatctcaaaatattcttaagttcattttgacaaattataattatttttttgtagcctttgtaactaatttaggtgaagggggatttgattgattgttaaatcatattagggtaaattgtgtcataaatacttaatgtttcagattttatacacttaaatacctaatgtttatttttggaggtaaaaatacctaatgttacaattctcttcaccgttactaccacttccgttaacttat

SEQ ID NO: 382648 - DNA, 1838 bp, Cannabis indica
ttgacttatgaccggtcaacaaaatgggaatattgtcaacatctatttttacaaagggtaaaattgtttgtagaactatgacatatatttttataatagtaagatataatataaatatatttttgattaatgaatatgaaaaagagatatttctcaatttaataaaaaaaaaaaaaaacaaaaacaaacattatgtgataattaggggtaagttgaaatatacctatttttttcatcagttaaccaaaaataactttattttaaattcaattgaaatgtaccttttataagtctattactgattataccctgttcagggaggtgaggtaaggtttttttttattaggtataatcgggatataataaataaaagagtgtataaattaaatatatagaaagaaaggtaaaaatgaaatgggttaaaaaaaaaaaaaaggatatatgtgcaatttctatgtagctaagccttgtaagttggagtagtatctattgggccgagtacaaagctgagcagaaaagcaaattcaccgaggcccaacttaaggcggttcaaagttgtcattagggtttcttttcttgacctataaatatttccaaggccctctcaccataacccctcgcgtcacatttggtttctcggcagacctatctttcttctgaaactctagggtttggaagcgaacttcgtctcatcttcaccatgagggctaaggttagttgtactctaaagatctgtattggttattaaatatagatctctttattacctgttcgttgcttgatgtttggttttgattctattttgttaatttttgtttttatatttgttgtgacagtggaagaagaagcgtatgaggagactaaagaggaagcgccgaaagatgagacagcgatccaagtagatttcttaataaagaagtgatgttttcccctttttgtcgttaaatttcggatgttttgcaatgtttgtttttaaattagtactgatcaaagagtaatagtagtatgtttatttgaatacattttcttatatgcagacagtttatctatcttaatgtgagttattgatagttttaaaccattttaattcttgaatctcgtatttctgtgattttttatgcgtagatgttgattcatgttcatgtggatcagtgttaagttacaccaaatcttattggttgttgataataggtttgagttgatccctgtgatcttagggaaagtgtttgttcttcttgaacaatattttccgttcttcgctactttgttacgatgctgatctaagtgtgagttttgttaataacgtttatttttcagtgacttattttaatgaatcaatttttttttatataaataattgaaaattagtgttctgataatgttttattcataattggatttctttcttgttccagcccaatagatgttgagtggtgttgatttttacgagaatttcgagcctcttctgggttctaagctgtatttagttcgaagttgaaaatttcaatcttgggtctttttctattaaacctatagtttaatggtggcaagtagtagacgaatattttagagtttgtttgagttgagattatagtggcaagtttaatatagttttgttgaatgagcttagtctatgccgagataactcacttctcaagccgtatcttgtttgttttggaaacacgtctgttggtagttttggatgaacttgtttgcaaatttggcactctttaatattttgatgtaagctgaagctctgtgggttttgatattttggttggggttggggttggggttgggaatgggttttttttttcttgttacattggaatatgatt

SEQ ID NO: 382649 - DNA, 4381 bp, Cannabis indica
ttggtatcagagtttctaggttacaatttttttttccttctttgtttctactgaagctttctcccatggcgtctcttccaatactggttccagacctcaacctgccgcatctgcaaccacatatgctcctccaacacaggctgttcaagtaattcccaatcacatagtaccactcaccttgcgtctcgaccgcaacaattttttctattggcgatcccaagtcctttccactgttcgtgcacatcaacttgaaggcttcctcacaggaacacgcatccgaccccctgccaccattgttgattcctcatatacttcaagaacacagcctaaccctgaatttgccgattggatccgattggatcagttcttgctcagctggttgttcaattcgatatctgaaggtatgctgggacacgttgctcgatgtggatcgtctgcagaattatggagtgttctgctgcaactattctcaaacacctctcgtgcgcgagttctccagctccgtggcatgcttcaatcaacaaagaaaggctctactccgattgatgagtacatactcaagatgagatgtcttggtgatgcgttaatggtagctggccataacatcacagatgatgaactcatcatctatattcttggaggtcttggaagtgagtacgatccggcaatcgtaactttaacctccaaagaatcagtctctatgcaagatgttcaattcttgcttcaaactcaagagatgagaatcgaacaacaacacaccactgctgcactggatctgcataatccgacagcaaactatgctgctgcagccaagaaaggtccttcctcaacaccctccactggatacaacaataacaatcgaggccgtggaactaacagaggaagaggaggacgaaactccaataatcgaggaggcaatagacctatttgccaagtttgtggtagatctggccacacagcattaaaatgctatcatcggttcgatctcagtttccagggagaaggaaattcgaacaactcagatcaaaacactgatgagccccaggccatgcttgccacagccaacacggttgctgatccccaatggtatttggatagtggagcctccaatcatgttacctccgatggtgcttccctaaccaacaaaattgactacaaaggcaagggtaaactcactgtaggtaatggacattctctcccaataatagctactggccgaataaccatttcatgttcaaaacctcttattttgaatcaagtcttatatgttcctggcattcacaaaaatctcataagcatatcacaactctctgttgataacaatgtctctattgtttttgacactaacatatgttttgtgattgataagaccacgaagcaggtccttctccagggaacccttagccaaggcctctacaaaatctcacaccccttgccaagaaatcataatccataccactgccaaaggaatcatcaagcacatcagccacactcccaaaccagcaacactaatgtgtctcataatgctgtctgtaatctttcttcaataaatagatccctgtgtaataagtctagcattcctaatctttggcacaaaagattaggacacccttcccctgtaatacttgcaaaggttttacattcaataaatactccattcactactaaagatttgtccttttgtgatgcttgtcagttgggtaaaaatcatcttatgcattttagtagttccactatcaaaaccaccaaaccattacaaatcattcattctgatgtacggggtcgatccccttatcccacacatgagggatacaaatattacatcttatttgttgatgactttaccaaatatagttggatataccctatgagaaccaagcaagatgcctatcctatttttaaaacctttaaaatgcttgtagaaaatcaatttgatctgaaaatcaaaactctacaaacagattggggtggggaatacagaaagttacaaccatttttacaacaattaggcattctatttagacacccttgtcctcacactcaccaacaaaatggtagagtggaaagaaaacataggcatgtcactgaaatgggattaactcttcttgctcaagccacaatgccactgcatttttggtgggatgcatttgtgtctgctgtatacttgatcaatagacttcccacaatagtcaatgcctacaagtctccatttgaatgtctatttcattacaaacccgattactcctttctcaaaacctttgggtgtgcttgctttccatttcttagaccatacaaccaacaaaagtttcaatttaaaacttcaaagtgtgtttttcttggctacagtccctttcacaaagggtacaggtgtttacacacctcgggcagaatttacatagcccgcagtgtcagtttcaatgaaactgaattcccatatagtcacctattctcccaacaaccttcccaagtttttcatcacaatcttcttgcaccagcatttataataccagatatatcacctcctaatcccactacccctatccaatttggcacaattgacatagagcccaacgtaccacttactgcctcagaaatcccacaccagaatgaccaaaacagcccactgccccctgttccacagaccagcaacacccatctccacacagagccctccctacctgaagacaccattgtcccagacccccatatacccattcaacctcccccattacctactggtcaccacatgcagacacggtcaaaatcgggcatttataaacccaaagttctcttagttactgcatctcagcaacaactttatgaagaacctaagtctgtcaaacaagccatgaccatgcctcaatggaaaaaggccatggatcatgaaaagaatgctttagttaaaaagaaaacatgggttatggttcctagaacttcagatatgaatgtcctctccaacaagtggctcttcaggacaaagtataacaaggatggcagtcttaacaaatttaaagcaagactggttgtacgaggctttgaacaagcacctggtctagactttaaaaacacattcagcccggttatcaaggcctccaccatcagaattatttttgggttagcagtgacatttggttgggatattcaacaaattgacattaataatgctttcctaaacgggacattgcaagagaaggtttttatggagcaacctaagggatatgaagatcccactaaacccgatttcgtatgtcaattaaccaagtccctttatggcctaaacaagcaccaagggcctggtttgacacattaaaaaccaccttaattacatggggatttacagcctctatatcagattcctctctgttttacagcaaacaccaaggttcactattactcatattagtatatgtggatgacttgctcatcactggtgaaaacactgctgccatttctgccctcatagctgctcttcatcagaagttcgccctcaaatctctaggctcagtcagctactttctgggattcgaagcctacagaaatccctctggtttgtacctgactcaatcgaaatatgcagccgatcttctagcccgaactcagtttgaagattccaaagaatgtgacacaccaatgatcatggccaacaaactctctcttgctgacagtccattctttgatcaaccagaactgtacagaagcacaatcggtgctcttcaatatctcacaatgacacgccccgaccttgcttactctgtaaacaagttgagtcaatatctcaaaaatcccacaattcatcactggaatgcttgcaaaagagtgcttcgatatatcaaaggtacaactcatttaggacttcatttcaaaccctccacacttcttaacttggaggcctactcagatgccgactgggcatcaagccttgatgatcgtaagtccacaagtgggttctgcttatatcttggtggcaatctcattaactggagttctaggaaacaaaaggcagtagctcgctccagtacagaatctgaatatcgagcattagcatccactgcaacagaaattgtttggattagctctctgcttggtgaacttggtgtcacacttcacaaaactccaccagtattacggtgcgacaatcaaagtgcacaggctcttgcattaaatccagtcttccacactagaacaaaacatatcgaattagatgtacactacatccgagaacaaattgcagaaaaacggattgaaatctgctacatccctactcatgaacagactgctgacatctttacaaaacctttgtcttcaccaaggttccaatttttatgtaacaagctcaatttggttaataccaaacatagcttgagggggggtattaggccag

SEQ ID NO: 382650 - DNA, 1667 bp, Cannabis indica
tcagcatcttgtttctgaatatggaaaataatgaattataagttaccatgttctatcgtctttaaactacaatgtatcacaacaaaaaagttgaataaaataagatgtactaccattaattctgaaactacttcttttaacattataacaacttcccttgtagcttcgttgttgcccgaagatcgatcaacatctttgatcttaagcgttagcgtttgatttttgtatcgtttacgcctaattcgccatacatcacccacacaaaatttttcacccaaaaatgccttgcccttaggccatgttagtccacccttaacttttgtatttacaacggcagaattaatcaaacgtttgagactttcaaagtcatcatcctgtaataacataaaaaaaattagcaataattagcatcattatgacgagttatatttctaaacaagttttatctattttattcttttgataaatccaaatattttcttacaagaaaattagtttgagttcttttcacgcatagctcgagcctcatatccaaattcttttcaaggcaagatatgtctctgagcatgtgacgactataaaggcttttaatctaaaataaaagatctttcacagtaagtctcagaatttgataatgaaaatttaatataatcaaactgttttctttatcactaattcaactatcatgaatgaaatcaacaactaatatcaaatttgaagcaaaaaattacaacaaagaaaagactttccttgtatggattcaactttccatcttctagtactctacatttgcaccacatatttacatctggttgtgttacatcaacaaactaaagagaaagggttagaaatttgatattttctctcttaaagcataaaactggaaaaaagacaaaaacaaatatcaactaaatcccataaatgatgtaaatatcaaataagtgatatattagcactcttaggaaaaaatatgtttcaattgtgtgccaaaaagtgatacaaatttcgtacataacaaatgctgtgttgaatttggcacaacatatgccatgatgcaaaatttgaatcaccataaatgtactactttctttatttacttttatgttatttttattattttatatttagccataacattaaatgatagactattatatatatttttgaggttgcttctacaatgtaccccttaaaagggatcgatgcaccatctacttgttttggcagtaagaagaattttttagtctaatttcatatcatatttgtgtatattatagttatttaagatatcttacaaaattttaaaaaattttgaaaaaattttaaaaaattttgaaataatttacaatataaaaaatagtatttaaagagtctatttcacacgtgtataaaataaaatagatacgagtgcaatacattatttgaaccttgttttcaataggttaaattttttgattttttacaattttgcatgatgtcttaaataactataacgtacatgaccatgacaaaaaatttgacttaaaagtattttttgatatcgaaacaaataaaagtggtgcctccttttaaagggtgcattgtacaattttcttatctttttgttttacataataaaataataataaaattaagtgaaatttacatttacaaacgtaaattgtatt

SEQ ID NO: 382651 - DNA, 2907 bp, Cannabis indica
aataataataataaagattatttgccgaagagataaacaataaataccttaaaataaaaaaaaaaaaaaaaaaaaacaaaacaaagaagttattagctttccctcctcctcaaccaaattatcggtggttccaaacatagccttaatctctcaatctctacgactcttcttcctctctatctccattttatctcccaaaatcaggtaactccaccatctctgattttccattttgctttgaatcgcagctaaatgtaaatggtattgctttactaatgttggtttttgctttcagccgccgtctgccgatcgtcgtcgactgctccatccatccatccatccatctctttcaaggttattgttctttgattttatatttgattcaaccatggaatgatgagcagttctaatttcttgtattttgatacggattttatttaccgagtttatgtattctgttttggggctgaaattagggtttatatttatattttattgtatgtcttgccttgacagaattactactattacttggcggtttaccctttgctctcctggacttttttttgggttttaaaatcggttatatgtgatcttctatgctttaatttaatttatgttctgcttatgcttttcagggtttttttttccttcttcaaaaattagtttctaagtaattttacatagtttctaaatattttccctcgttctctcttttcctttttttagtgaagaatggtttcgggtttaatcaatgccaatcctgtggtctatgaaaagaaagagcgccgggtccgaggtgctataagtgatgtagatgagtatgcagtggaaccaattgatcagcaagaaatttttgatatccttcccaataactattagcgacccagaagatatgggatgtttagattttcagatacatgtatttgatgtatatgtgtgcgtagccaaagaatgacttagcacttgttcaatatggaattcatgctgttttagtaatatgtagctagttataacaaggtatataattaattaaatttaaaattaaactcagtgggcctctaatcatgtcgatattttatttgaattttcttaacaattcataaatcatattagagatataaaagatcctgagcatccttattctttggaagaactcaaagtaatagcagaagacgcaattgaagtggatgaccatcgtagtcatgttaggtacttgttgaatcttttctctatatatacatagattcttattatttaaatataattattatggaagttagggtttaaagtcttttgaatggaaaatggcattctttcagggtcacttttactcccacagttgaacattgtagtatggcgacaataattggtctttgcttaagggtgaaactcataagaagcctaccttctcgttacaaggtatgaacttccataaattttgttgacgaagttcatttttttttataattaatctatttatcttgacctgaactgtctttgttattatttaatgctgaattgtgtgctctgtactttctattaatttgagtaaatttttgctgtatgctggtgttgaaagtcttacttatatcttatcaactgtcatggcataagtagcatcctagctcagccctttgcttcatacagtatctttctgttgttctggttgtgaatgccatcgtgaattagcccctgaagttgggtctccatctttattgagagattagaaacaaacagttttccaattggacaggaaagagaatattgtaaactgatgtttgttgtgtcttctgattatttgtttcatatatttttttcttggattttttaatattatgttctcttttatcattgttattattagaatcataacaaataaataaaacattatcaaccaatgttagctgtataaatcttttggggccaattgatcccttttttcttctctttctagatttatgtagctaggtaatgcatttaaaattggctattagcatctgttattccattttcaatgtaaaaatagcatggacagtccccacttatttactgatttcatttaaataatttatggaattaggtggatattcgagttgcacctggatcacatgcaactgaagcagctggtactctcttgttcatcctttgttattttcgctatttctgtacagaaatttcaatatgggattggtttgccttaaatattttatgtatcctaagattggaatagcttcttgttgcagtcaatatgttaacatggtatttctgagtcatttcttttacctttattcctacctctacaagatttcattacctatattgatatgattgacaagcagagcatgtgaactcgatatggtcgtccatatccaataatttagataataataaataaataaaatctggtcaatttggctcaggaaatgaagccttttttggtagaacacattatttatgtcaatctgtttctgctgtatgtgcagttaataagcagctgaatgacaaggaaagggttgcagcagcattagaaaatccaagccttgtggatatggttgacgaatgtttagctcccacctttggttcttgaactaaagcatgtatgtcacgagtgaagctcgcaacaacgctacaagtttttcactatgtgatgaaattttggcctcttctccgttttgtatatgattcattcatcaagttttgaagagtctatttgttgtggaaagcaagccagagctatagtttttatctcaataatcacagtttccctatgcctttacttaatcttgcttttagcttttagttttttctacaatgaatttatttagttagcatgttaaattcatacaacactagttgtacatattatacacaaaaaaaaaaaaaaaaaaaaaaaaaaaaaaaaac

SEQ ID NO: 382652 - DNA, 2751 bp, Cannabis indica
acatgaagaattactttcaacttaggtatcttaattctcaatcttcggttgattctgatacaaatcgtctaacttgtaagttttattttgtgtgctctagttatatatttcacttggaaaagatttcatatccaatcattaccattttgccaatttaatctaagttttgacgttgaatctatttaagctgttgctgttatgagagtataaaattgacgcctccaattaatataagataattagtcacataaatttgacacgtcccttcagctgatatgttcctacttggtactacgtactactgtttcttctgcttcacaacatgtcttttgggtaactgatcgatcaatctcatttaattaagactttattcttctgtttatcacgtgatgatgagctatattcacacaattcacattaaaacaaatttcatttagtgacaaaatcacaagagacaaaaattctcatgtaaacacaagtaacatcaaattcaaaacttaattgatttattttatactcaaaacgtttagaggtgtttagctatagaggtagcagtactagcttatatagatgattaattaaacttgctactattattgtcgaactgaaagagataaaaataatcttaattaaggatatattttcttttctttcttattttgttgggagcaaattttaattatattatcattaaacattcgaatcctagtcattgataagtaaagtgaatgaaaatcatcacacatgttaacttgtatttgacccacgtggtgtaatgaaatttttatcatatcatggattcatgatagtttgcaaacgttgaccaaatcttaaatctcttaaaatatcataaaaactatattttgttgtgcttcgatctttttaattattttattttgatgacaatcagaacctagtgctctgttcttgttcctgcaccaaacacagcctgtttatatttccatgttctttccacttgcacctctctctctctctgtatttaaatatataaagaaaataatgtggtttaaataagttggtactctttcttatattttaatatattaaactattgaattcaaatgcataatgtgtgttttggaaccaatttataatagtaaaatctaaacgagtagtccaaaagagagatggcatggaaaagtcttatcttattattaaaaccaatactagagtagatgtgtataaacagagaatcatgttttgagaaattggtttttatttgttttcttcttcgtaatttatattcataaatattttatacgtggaatcgaacatttggattttcatatttgataataacatcatcgggtaatattgcgctggcaattacatttatgtttataaaggtacataattccaatcattactccaatttaattcaccttcttggtgatatgtgtcaatttttccagactcgttcaaactaataaatttttatgtgtggtgtggctccatagttaccacaccatatatatatatatatatatatatataaatgtaataatttcgagctcataatccaattaatattgtgtttgtacgatacagttgatccggtgggtggtgcatggttaattatattgtcttttggggaccaaggagaaaaagaggccgtgttaggccattttgcaggcattatcaaaaaaagtaggtgcctctttggggcatacattttgactagccaatactttctgctccaaacttaatcgacctgtaattgttgctatatccaatatatataaatatatattcgtatattataggttcaatatttcattattttctacttcccattaaattgtatgttgtcttttgcttatcaataaaagccgcacttcgatatatattaggctaataatataatgagcgtctgtattatacaaaattatagtaattaacatattcgaattttcgtataaattgaaagtttcagttcaatcattgggacggtcaatggtgcatgtgcagtagggaaaccatggtgatatatgaaccaatcatatgaatattatttacggtagatagggaacaaaaacagttcaccccaattaattaaaactaagttatatataaatatgtatatatgtatgcatttgtgtatttattctcttcgaggaccgattattttaaatgacacaatctgtacattccaagtttttcaacaagttatccgcttagttgcttgagcatgagaattatttatatacatattcctaaattaaggcttattataaaattcataaccacagcttttcgatcaagggctttgtttagattagagcaaatactcgagtgtacttctttagggtcatcaatccttgtagtagctttttattttattttttattttttttacctacaagtcttctcaatttaaggatcgatgagtactttgtaataaatccttgacaactcataaattacctgttcctaaaacaaaaattgatactaacaaattaggaaaaagtagaaagagaaaatcgaattagaataaaatttaattgatttaatattaactaaaacagtttctgctaacggcaccaaaaatttattattgattttccaacacgcaagtacatatattgtttgcaagtaatagactcacaagagtaaaatcgatcttaaaaacactatagttaattactaaataattaaattactaattctatttggagtcaataaaaataagaaaaaatgtttaatttctactaaaaaataaaagaaaacaaa

SEQ ID NO: 382653 - DNA, 2871 bp, Cannabis indica
cattgtatctgagcaaagttggagacattcaaaggtttttggtatgtcagggacatgcaaagattttgaatggtaagtagttgtgatgtaaatggggaaaggatagaagagttaccaatattttcaatttgagttcctgctccattgcctacgaaaacttgctcactgcctgtgtatggactgccattggtgagatttccttgatgtggtgtaaagtggtgtgtagctcctatgtctggataccagttttcatcagtaacagtctcaggcccagcatacattgcttgcatctctgcaatagttgctactggtggaaagttggtaaatgactcaggacccgtgaatgatttatcaaatcggtaaaagcactgcttgacagtgtgacccattttatggcacagttggcattgtaccttttgatgcatagtactgttgggaccacgactatatgggggaccacttttggatgctgaattttgagggggaccacggccatatgtattgcctcctcgagccatgttttgctgatatgtacctccactgttattgtaattgttgtggctattagtgctacgaccataggtgaagttgttaaagcctggtggaacagcaggtgcagagtattgtgtcctaccataggtgaaccctggatttctggtctgagataggttagcttcagcctttgaaatgtcaagattcttggcatttttcttgattcgagcagattgagccatgagtaaagcttctatttcagctacagagtatagatctttcatagtggtaaccgaggttacgaacacatcatattccatgggtagtccattgaatattgcttcaatgtggtcctgtgtagtctgtttatggcctatggtagctaatcgatcaactagacctttgattttgagcaggtaatcccttaaagatccagtcatcttagtgtttcgaagctgtgttttgtacaagcttatgttggctgcattcaagactgtataatactccatcagttgctcccagatctaagccgtggtttcgcatccgatcattctgttagtagtcttttctgacatcgacgatagtagccatgaaaccagtaagttgtcctggtgttcccaatcatcatactcaggattcactgtgttacttctttgatcagctactgacagaaactttggtggtgcaagagaggagtcgaggtatttttggagtctgcttcctttgatggatgcaagaacttggtgcttccaaggtaggaagttgtgttcatcaagctttatggatagagagtggttgaaagagacagggtgtgattttggcagaggaacctgttgattgttgttcggttgagcattgttcaatcttgatgctgcaccgtttgttgatggaggattcgccattaacgaacaattcaagctctgataccatgtgataatgcagtcaagaacagagaagctaaagataacagagtgaagtaaaagactgtcttattaaatcaatgtaatgtacagagatttatatacaagcttaggttcaatgaatgtagacaatcctaacagattaaagctgtaacataaagattacaagacagttgaagttagttataacaactaacagaaatgacagctaatcatccttgacagcccccctcaaactacagtgtagacaaagatgtaacactgagtttgtctcgaatctcattgaaccttgaactggagatgggtttggtaagacagtcagctatctgtgcctggagctgggacatgtttcacctgaatttgttgctgcagcaccttctctctaacaaaatagagatccagctcaatatgctttgtacgcgcatgtaacacagggttggcagtgagaagaatggtgctttgattatcacaccacacagatggaatcgagggagaggtgatatgcagttctctgaggagtgattgcaaccatgtttcttcagttacagcactagccaagcttctaaattctgcttcagtggaggatcgactgacagtagcttatttttgggatttccaggtgactagatttcccccaaaatagatacaataacccgttgttgacctcctatcatctggatcactcgcccaatcagcatcacaaaacacttccaatgaaaaatttggtgctggtttaagccaaagtccatagtctaaagttcctgcaatatacctcaatattctttttactgccatccaatgacaatgtagaggtttgtgcataaattgacaaaccttgttgactgagtaggcaatctcaggtctagtaaccgtggcatattgtaatgcaccgactatggacctgtaaagagtaggatctttgacaggctcacttccataattagaaagctttaacccactgttcgtaggtgtgttttgtgtgttgacattgtgcatatctgccttccataagatttcttgaagatacttggtttgagtcaacaaaattccctctggttttcttgtaacttgaatacccaagaaatagtcaacacaactaagatcttttaaggcaaatgtgtcactgagttctctcacaagtagattgaccaagttatcatcacttcccataataagaatgtcatctacatacaccaaaatgtagatgcagtgagatgaagttactcttgtgaagagagaatgatcggcttgagagaattgaaatccatgatgaattaacacagatgagagcttgtcaaaccaagctctaggtgcttgttttaggccatatatagctttgttgagcttgcacacatagtctggaaagtcaggatcaacaaagcctggtggttgttccatatagatttcctcttgcaagtcaccattgaggaaagcattattgatgtctaattgtctgata

SEQ ID NO: 382654 - DNA, 1991 bp, Cannabis indica
taaatataacaatcttaatagttagaaatttttagtggtcaataaaaattaaatatataaagcataatttaataaatatcaaaatttaggtacgaaaattataatgagctaaaaaaatatccaaaatatatagaggcaaggcatagccacccactccacccacgttgtgaaaattcacatctcatacaaaattgtgaaagttgtctatttataacattttaatgataaattattaaaataaaagttgtctatttggaaatttaattcataataaatgtttttatttttattgtgaagagttgtgaatgtgactatacaaggtactcccttaattagccaaaatgaatatgtttaggctataatttggaaagttattctctaattagaattgagtataattatgaatatctaattataagtttgaggaacatttaagtaattacccaataataataatgatataattatttaaaggtaattgatgttttttaattgtgctctctaattctcctaacttccttaaagatgtaattataaaaattataattttacaaatattaaatatttatgccagtaaaaaaaactattaaatatacaacttacaaactcaaaactttaagtacttataccactatttacccctataagtatttatcctctataatagtaagaacggtcccttaaaatgatggtgttctagtaaaagagtttcacacttgtttcccgatattaaacactaataaaagagaaatgttaaaagatattagtagtattgaatcttacataatttaatttaataactattataaattatcgctaactatttataagagattgtgctccactaataccgagtagcaatattgaaataaaataccctaaaatagtcaaaattaacctaataataaataaataatattaatgtgaactctccatcacacatacgcgtaaaccctttttccaaagtttccattatttgggcacctaaccttcattctctctctctccctattcaccttatatatacattcattctctcattctccaaaaaacatcacaaaaattcccaatctctcttcttcatttttttctcccatttcaaaattttcaaagttccaaactttatttctttttcccaatcaccaagagagaaaatggagtcaaagtcaacaatggtatttttgatggttgtgatgatgatggtgttcacagccattcctatggcctctgcagcagattcaccagccccaagcccaacttcagatgcggcccaattcattccggccttctttgcatcttttctagctttggctttgggcttggtcttctaatttattaaatatcaccatttatttaattaattacatatatatagtttatatatatgtattatatgactcatttctacctttctctttttaaattagccatttttataaatggggaattttgaattggattatggagatttgtttgtgagtgaaaaagagggagatgatgaaatgggattttttattttattttatttttgaggtgtgatttaattatgtaatgtataagatattcttgtatattaattttctatataattttatgtaatcttctcttttttgtttgtaatatatttatgttcttatttctcccattattatattaaataaaaattccattattcttattaatttttgttctttcttttctcatatagcacaaattaattcatgtcattttgtttctgcaatctattgctatatttagaaaaaattaacataaatgaaaaatgggattgtgaaaatatgttatgatgaggagaagaacagctggtattattggttggaagattctaatataataagccaatgtcatgtgatttctagtcatataaaattgtagtgaatgtagggcctttcattttaggaagtctttgtatgaatattttaatacaaatagattttttcagtttaattattttttatatttgtgtatgttat

SEQ ID NO: 382655 - DNA, 2725 bp, Cannabis indica
ttgagaatgttgtaccagaattatcaatctcttcaaaattattatagttttggttgcttgttctgcaagtatttcatgtgatttatgggatttgcattagtaattcttgtccaaactatcaggttgagtgataaaagtctccacgtgcttattttatccttgtaatatagataaaaataaccattcgtctcatgtttgttgaagaatttgtaagttatagaggattttgaaagctacatgctttcatgttgacacaatctttgccattcctacaaggatccttcctaacatgtatttgtatgtgttgctgtatgagaaagttttctcatttttgtaacactaaactaccaggaccaagatttcggtctgtttaatcatttcttttgattaagtgggagttggtatgttgtagattactcgtcctctttcaccctgatgttgattttataacacgtgtttaattagtatcctgatgcagggtctttctattattgtttagttcaatatttgtcatttcccattttagttttattgttatgtatgttttactagaccatcctgttttaaatgaccatatatttaaactgttttatgcagatgagatatataaccatatttggattgagtgttttcttctcttttgttctagtttttgtttggatctctcagacaatgttaggatcacggattgtacattgatatgtatagatgcaaatgtatttatgtacagatatatatcttctgtgattgtatccttagccttgaatgttcttctactttttgcagccaacagagcggattacaattctgtcgtcatactattatggtgagaattttctttctttgctgtattttactgctgttacttagaaattagatacgtaatatttgaaaataggacatttctatcacaggttaatgaaaagtcttgagaagggtcgtatggaatttatataaccgaggttcaactgttgtgaacttcttttctatagtttatctacataataggcgtctaatttgcaaattgtactactcgtgggttttatatttattttgttatcagataagcagatggaaagttgtgaactggataaatcaattttgaagaggaggttagctgcatctactgttgaaattgagagacaggtattttatcatattttcatttacataattttgtaggctgaaaacatgccattccatgataacattgtttaatcctgtgtctgtcattttgcagagaatgaaatgctttccgtgacaaacaataagaagaacccaatcatcggtgagagaaccttctctgggttgctgatttgcctatttattcattcatgtagtttacattctatgacttggcattattaacctgtggttcttctaagctgagaagatattgatagttacataaaatggaacagaaaacctattttttttcttcaaaataatgcagccaatagaatagtggttcactcttcgtctatttttatttttcttttttcctcccttgtcctacccctgcctgcatactcatttcgctcctgttgtctatgacatttttcttatgcacatcacaatcattattttcttttttgtttaatggccactggtattgatgcaaatgaatgaggctcttgcaagccgttgaattcatttgagtctcttctacttcatgatgaggagttagggcatctccaatgcaattgctatatctgtcagtagaaaaacaaaaaatgggccatagcaggcaacacaagtcgttgtgtgcattgtagatggccttagtagacatcttggagatgcagtcgtgggaggaagcattggcagcctttgcttgctgtctaacttggtataagacatggcttttcatttttcaccttcacaaggggtgttcattgggccacattcaatgtttttaggcatatccagatctgatccagttatatatcggaagttagattttaccatccgatctgattcaattaatttcagtcatccaatcgatccaacatctattggatgttggattggatcggttctgtccattggatgtattttatttatatttattggtttaatttgaatttatccaatattttagacttagtattttttagatcggatcggatccatccaatattttaggtccagtatattggattggactggatccatccaatctaagaaaaaaagagtaaaatttaatattaattttatatatacatatatagattttacgcataacaatacaaaattaaattactcatcaaaattaaatgaaaatactaattagtttgattggatattggatgttggatgtatttgatttttggacaccccatccactatctgatccgatccaattggatatttaaaaataacatccaatccgatccggtcacaattggatattcagtgtttggcggtcggttgtaattggattagtcggttctcattggattggatcgatttatgcacacccctattcacaaccttcaatctacttatcttcaagaacatttttctcatgagattaggggtgttcatcaaatttaatgcccattattttgttcatagtgcatcccatatacactactaatgcagatttcatattttgaattccatccaatcttcaaaagtgcagattgaatttaacattaaattatttaatatttattataaatataatttaacattaaattatttaatatttattataaatata

SEQ ID NO: 382656 - DNA, 891 bp, Cannabis indica
atattaatcattattatgtctaatagtttgtttcatatacactttattttttttttttaaattaaattacagtggagaatcaggagaacgacatttacaattcaccgataactaattatgtggcaacatacagagttttggcactggagttgataacgctatccttgagcgtgttatttagtatccctagaggatatcacttcaaaacagcattagcaccaacaccggcaacagctgaagcaacttttcttggctaagagtcgttcaaactgtactttatcagcatcttacgtgtgtttgggagcatcaataattttctgagtttcgttgttgctcctaaagttaacaaaaaggaaagttgtaagaaaatcctactcatgtgtcattttttttatccacattgttgtggtgttgatgatcgtgctcgcgacatccattggataattaatccaaggatgttattggtttttattgggaatcggtcttgcttcagcaataggttctggtatatttcttttttatacttgggattggatattgtggttggctgttgggttgaaggccaaaattgtttggacctggaatgagctgaaggtgatcggagcattgctgaaacaaaagttaatttataagctaattttaaatggattcttgtgtgttgaagtgtagtgaaatggattcagatcattttcaaatacattgtatttttattttattattttctttgtcaataaacgaatgtattctgacattatttttgatttcgtaacttgaaggaaatgcaatgttataatatatcatgtaaaaaataagatattttacatcatgtaaaaaatgagatatttttttaataagtaatcataaagtttaactttaagaagaagaagtgaa

SEQ ID NO: 382657 - DNA, 1073 bp, Cannabis indica
ttccacacatatcaataaaaaaaacagattgatcaaaaattcactctatccagtaagaaaaaaaatcaacaaaaataataaaaataataataaaaatataataattaaaccataattctgttactaatattatattaaaaatacaaaaataaatacttaatttatttatttattttttaatttatagtaaaaagaatacctgcaacgggaatttcgaccgcaaattccgtgtaacaaaaaacagaaagcatggcggagattccagaaacgacgtacgataagacaacggcagggccagcatcggtcttggcctcgagtccggtgagaacgaatattccagcgccgatgacggctccgataccgaaccacatgaggtcccaccaagtgagcgtcttcttcatctcgtgttcgcttcgagccttcatttcgaccagttcggtaatatccaatgatcgggtcgtgacccgattattaaacgggtcggagtctctttcagtgctcggacataattgccccagctctggaacgattcctcagggagaaaatcgtcttttgtacacgaacatcctcttctcctcaacccttcgtctcctccttctcccactcccatctttactttctctctctgcacatttcagtagaaatatttgattaaaaaaatctgaatctaagcattatttttaaattaaaaaatgaaggaataaattgtttgattcaaaaatacagagcaaaaaaatgatacgcttattatacatatatatataatggtcatatataaagatcatcgaacctgttactattagagattttataggaaaatagaatgaagaaaattaaattaaacaaatattgctacattaaatacaatcggaaactacagtagagaagggtacttacgaaagcgactatgctccgagagaaaaatcagagttcaggaagaatttcctgagaaaatgagagagagattgtgtttgggaggcgcgaaatatggtgtgctatagagccacgtatataagggtggagtctatatatatgtgctagtctgtgtatgtatatatatatatagagagaga

SEQ ID NO: 382658 - DNA, 1771 bp, Cannabis indica
tttggaattatagtgtcgtcatttgtcgcaaatataagtatcaatttgaacaatgaatttgataacataagtattttatatttgaacactttattttagttgttttaatgtgacgatataaatatttttatttgagcacttaatttagtagttgcatgtaattatttgaatgcttttattattttgattattgtcatttttattagtttttaatgaatattttaaatataaatataaaattaatttttaattataaaattatttttttaaaaaaaataaataccaatgggtgcaccccttgtggtgcccactgctatggataacaactttcagcatttcaagtgggcactacacctgtcgtgccatttgttttggctattggcacgataccatttgtggtgtcggttgtaacatattggcatgaacctattggcccgaccaaaagggcacgacatgtcgtgccaatcaacagatgggcactaaaaaatgaattggttggcactaatttaatcgtgccaatgcccattttttcttgtagtgtctgtttttagttttttaaaacccggtttttaaaaaattttgtcaaacaaccccggttagtttttaaaaattgttttctgtttttgaaaactgaaaacagtttttaagttatgaagccaaacaactcctttgccttcgaagttgtactaaatgttttttttttttttgtgaaaatactaaatgttttttttggttgtgaattaatatatagattaaacttgggatattactgacttttctaaaaaaaaaaaaaaaagactttgggatatttcacatcaaaacattacgaactggaatcatgagtgttctatcaattaatatgtttgcgctactcaaacattaattctattaatagtacgaaactacctacaccaattatccttcacttcttactttggttgtgcctattaattgatgagtaaaacctacctagctaagagttatttaattaagagacgtaggtcgacgtatatataaatattatccattttcagaacacatgcatcatcatccattacttgtacatttttttatatagaaaaatatatatggacgtaatatctattttggcatatatgtttctcctacttttttccacaaaatattcatattcttgccaaacactcaattgaatgaggacccctataaatacatattaagaaaatgaagtccacgtacagttttactttgtgcggtccaatcaaattagttgtaatttttttaggggaaaattattagtcttgtataattactaggataaaaaataaaaacaaattttaagtattaagtttttggaccactaatttgtagtcgccatcttgagtatatggataagttacaaattcagttgtacgctatttagtgattaacagagtttcatgataattgaaaacgaagaaaacgatacaaatatataaaaaacaattacttattatatcattatatttttaaaatgtaaatctatatttgaaaagaaataaataacaaagtgatgagtagatcgaccaatatacagatccacgtatatttattgtatctcacaataatgctaattatcatcataaatgcccttaacatttctcaaatataaaaggtaataaaagtaaaaagaaaaagtttgcttcgtggtatatatgcacatatttggtaaatatagccagctctttcaaatttaaaatgaccacatatgaccttaaagagtctaattttccaaataaataaagggaaaaaa

SEQ ID NO: 382659 - DNA, 7610 bp, Cannabis indica
attccattccattcctattcttattcccattcccattcctattcctatattttcattcctcccaaccaaacgccttttcttttacccaatttccatacttaaaagccacagatgaacaccaaatgtaaatgtagaattttttttgtcctgtgcacctggtgttttaacaagttcagcttttgattgattgatctacatggtataattacctctgttatttctacctcacaattttgtttaggataaacagcaaaaaacttgatgagatttttatgtaattggtatttccctctctctgtttttttttttttggtaagaataatttaattactgtgtttaccatattgtatttgtttttatctgtgtgtttaattagttgaagacttgattttttgattcatttttgagcaagtgtatttatgattgattgcagggtgatccatgtcgtgtgctaggagaatcaatctctttcgggaggtttatgtcagaacccctggcctgggagaagtggtcagctttcactcaaaatcgctacttagaagaagttgagagatactctaaacctggttctgttgctgagaagaaagcctatttcgaggcgcattataagaaaaaggctgctgaaagagctgcggcgttgcttgaggctgcaaatgttgaaacaacttatgaagctgtcacagagtcagtagtaaatgaggagaagaactgcaatgtctcttctatggattctcaatttgaaaaaagagagagccttgtggatgatctgctggaaattgatgttcaaaatacggattattgtaccaatgaaactgagtctaattcgtgtgtggatagggatgaaaaggaatgttccatggggagttgtaatccaattgaaattcctaatctatctgagaagaatgaagtaaatatgcacagtcaggtaaagaaaaagtaaattgaatttgttttctcctttgttagcatgtagattttgtttttagttgggatttaaacataataatctctttgaaaatgcaggatgttgtttgtcagaatattacagcttcaacgtgcaaacaaaggccggccaactcttccccaaggacatcatccaaacaggtgacccctataaaaacaagaaatggaaacaatcttgcttcaaggtgtaagaatttcatgcaagatttggttgacaaaaaaagtgcaaaatcaatccatatgtcgattcacttttcttcttgcgctggtgaaaatagtaaacctgtttcaccctttagacaaaagatcataagctcgaaagatttaacagcttcacccaaggtgtttgcagctagttcaacttcacaaataaaaacaaaggtacttactttctcatcaaataatctccaatgcaattttttttttctttctttttgttgtgtgtgtgtgttattttgtatgttttgcacaaatgtttgtggcattatctatttattgagactacttcaccttgccaacttcaggcttctgtaaatggagtagtaaagagaccaccaaacctcaagtctgaaaatagaaggtatcaaactttctactatgataagtgtttaatcaatgtttcaaacttccaaggcaatcctttattactttgtgcacatgcactattatattcagactgacatgttaatgtaacatacagtagtaaagcaatactaaataaatcagttgctgaaggaacaacattagatcgtaagcagaattgcctctcgccaaagtaagattttttcttgtcacttgttcctataatcccgcttgttctctagttttttatgatattatattccctatgagaattccctcagaggtgtactcatgattttctttacttatttagttttcctgaaaaaatgtttatgtggcagcaactcaaaatcttctggtgggagaggaagcaaatcacagccttctattataacatctcctttcagattcaaaagtgatgaaagagcagcaaaacgaaaagaggcaagattatagtccatacgtttcttttgttcacataattactccttgtgataatagctgttgtttacaattatgcttacttcttcttcttaattggtgattttctatttccagttctatgagaagctcgaagaaaaaagaaatgcagatgaggctgaaaagaagcgtcagcagacaagattccaggtttgtagcataactttcattccatgctcatttgtgagaccatttcatgatacaaattccaattggcctatctggttcagttgagaaggataacaactcacaaatgtagatatgcgttagggggtttcagttctttcaacaatgtgaataaatcaagactgtcaagtcaatttgattagtcacttgatctagagtgttaaatttctcccatctatgtagtctttagaagggactgactgagagttcagtaaatgttgagctgtgagaggattagctcggctcaggtatgtatgagtaatgaatttgggcaactcactgaggtgctgctcccatgtgagtcccgctgtgatgactaagactagcgacattcatgctataatcataaactcatggggtgtcatgataaatttcaaattgtttacataaacttgttcgatatgagtttgtaaattggtgcatcttgaaaatatgcagggaaaaacatcgcatgatgttatgaaagtgcggcagagcactttgttaaaaagcaaaccaaatgaagatctgtgttctgcatcgcaattgccaactggtcatattaaaaaggtagttgcttttttttcactcaatatgaaatacattgtcattctgttgacttaatatctaatttcagcctttggtcactcaatttttaccctattattgctttaataacataagaacaaatgtctttcctatgagtcagatccctttgagacaacctagatcacctactcttggaagattggcaactcccaacaaaatctgtgatgcaacttctcagtcttcagacaataaagaaaactcgaagtgtgttgaaaataaccgaccaactattcggtcactcgcttcacgctttcagaagaataacgcacacgagaatgccactccaaatatttagagttcaacagtaaaaaggtaggaattatctcagagattagactgctgttgtagtgactgatcaaccatcacaccaaaagccacttgtgtaattaggagacatgtgggggtagtagaattgtgatctcaaacatcagttggaaaaattttgtagtattttaattctgtttgtaaaatatgtagattttcttttctttcctttaatcgtaccgtaccagtttcggcatggggaagggaacaaagtaataacttacacaacaagacagcctttttttcttttactaatttatttttttgtttttaatcatttctcattttgtaataacttgcagccttgtataacaaactctcgtttgtttctataagattattgcaattgtgaaatatggtttgaatttacaaaatgctaggaaaacaagatggaaattatgtgaagacatgtacaacttactatcttgtcttctaggcctgtatgaaatcttatgcttcaatgtgagtttgactgtcaccattgaagaaaagaatgagacatgtcaataataatgataatgggtttgaatattagtagcaactaattccaaaattctcatagcattgctgatttatgagagaaaatggagtttacagctctacagtatagagataagagatacatacacctgtactggattctaaacctgccaaaagtgatgggagtaagtttattatgcttagtgtttgcatatcactgctacaatacacataatctcaatatcaaaacccagactggttagaaaaataatattccaagccattaatttaaagatccacttaaaaagactggattatcatttagaaacagaaacaccaaatatcatcatcttgcgaaaagaggagacagcaggatcaagtcaataggctttgatctattatagcatattcagggtcataggagttctcatagccaaacctcagggaatcatacaagtgagcaggcacttcattcataggccaaggatcaacatagtctgaaaattctacatttcggacttcttcgccaaagcaatcaccttggaacaatacctgtaaatcctcatcaaatgttgcaagagatgacccacttgcaaaagtcaggtttctctgaacagactccaaatcagttgtgctacataaattagagccttgagtagtcagagttgatgaagaggtgtaaatgggttcaaaagcctgatgatttaccatttggctcttggaagtaagaggaagagtgcttattgtgcttatgtttggactaatatgactaacttcattgcttccatactcgggatatggagccttgctctcgacagggccacttaatgccttttctgcagtagaaggctttgaactgattgatggatttgactgtaccggctcggcatggacttggtgcagtgaatctggcagtggtagcttagtgaagccattctctaagtggataagtggtttatgttcttgcccgaactgaatttctgaaacttcgcaccaagagtactttgctgggatacccgattcaaatgctgcaaaatttacttcagattccaatgggacaaatgaatggttgaaactcatttttgaactgttattcttgtgagaatcagaaaggctgactgcaggtgccttagcttctaccactggctctgaaactatgctcctgagatcatcttcatggctgctggagtccacattctggagaagcaagttaccgccacagattctgtagcttccattcagaacatcattttggtgaatactactcgagctctgaaggccgaaactcactggaggatcttttagaggtacatcagaatggtttaaccctccgaaagaagttttcccatcactttcctttccttttgcagcctgctcaagtaaaggcggtacttctgcagagacgaaaacttatcaatgagaatccccataataacttaaaacacatcataactcataaccattttcaagaaaaagcagatactgtcacacatctagttgagagaaaatagaaatggatatttctaaaatatccttaccaaatatcatgacatatatcaactaagtatcatccatcttaatgatatagagtactatatgtatcaagatcttgataaccataacagttttaggaaaaagtgctacatcagtatgaaaagcctatcagaaaaaacaaattctagtcatagaaggaagatttcggtttaagagatgtacctgcaaatgactcgcaacattctctcttgtcaaccacggcacattcatcaggtcaagaatttttttgggaccaacttctgccaaacagacattacacatcatcgctctgtagaagcataatatggtggctatatcattaaaaacgacataaatgatggaacatgcatcaaatacttcttagcatgcagtactaaaatgtctcctacatgatggttcattgaggcccaagcttggtaaataataagtagacttactgtcaaatccaatttgattaaccgcctttacaaatttctgatgaagatcaacagaccaaaccaccctagcctttttggcagaagatgaatcaccatagtctttttcatcatgcttgttgtctatatcttttctcttcttcacagaagagaaatcttccatactaagaaagtgaccatcatcagaatgatcggatgtatttctagtcatgatactttcaatgctttcatgggactcaatgtctcttatctcatgaatcttctttctgaaaacatgttgccagatattcttcagctctttcattcttataggcttcagaagataatcacaagctccatgctgtactcctttcatgaccctgctcgtttctccatcaactgacatcactacatgagttcaaacatacaactaagtgagaaacaagaagccaagccaggtatttagcattcaagaatgttttttttttttcttgaaattagattactgacttatgacagggagatccatctccaatccaacatgctcaagaagtttgaacccatccatgtctggcatgttgacatcactaacaacaatgtcgaaaccatcttttctttcgcgaagcagtcgtagtgcatctgttgctaaaccacatgtggtaactgaaagacagacaggaaaaataatgtcaaattaatgacaattcagaactctcattaaatagatcaggtactaataggagtcctattctcatcaagaacaactgagtcagtcgttgagtactttccattgattaatcttcacttaatggcctttttttctctaaacgtgtgcatttaatgccaaatgaaaacaaaactcatatccaatacaagtcaacagatgccttgaactagtttttccaaaaaaaatagctcactagtcactaggcatcatctcttcatgtcaagaactctagtgtatccgagtaagcgtgtcccaaaaagctggttctaataccattatgatgggattaatctatgaacttaacaaaactcttagaccattgagtcccctgagtttcttggtccaagtcatgtacttagattttgttggggatagtcaatgtaactgtaaggttatacattatgccaatagtgttacacattgaagttttatggaaaaaaaatggggtactaattcaaaatagcctatcgattagaaggaacagcttcgacccgattgaactgctttcaacttaactgtcatggagtcttaactccttgttgaagtggatcatcagatcagaccataatacaaatcgagccctctgtcaattttgagagttgccctgatgttcaaaatttgattctagagaaaaagtcttgtggttccaaatatttatttctttgtgtgacaaaaccaatctcataggtattgaaatataagacaaatatttcatcagaaaacaaagtaaacaattcatataagagcaaacttccttccatttttcacttaaaaaagacaataatacactaacataaagggaaagaagaaaaataggtaaagaaaaatgaagaattcaaatagaaaaaaaaaaggtttcatgattagatcatataagaaaagaaaagcaccaaaaccagaaaatgaagcacacccacatacaatttccacaaaacaatccataacttgattaacccacatcaaatcacacaaccataatcataaacatcaatataattcgacaaccaagtaaaaaaacaaaaccttcataagcacacttcttaagcatcttctctaaaatcttaatccaagtgggatcatcatcaacgacaagaactctgagaccagccggaaaagtgtcgttccggggagaagaaaaaccattctccatgagaattgagaacaacccaacaagaaaaaaagataaaagagttaaaagcttgaaaagggttagtgagtaactttagtattgaagtgttgagggggtagtagtccggtagagtaggactatgggagattatgagactcttataatatatgttctctctctttctctgttgttttttttttttttt

SEQ ID NO: 382660 - DNA, 2110 bp, Cannabis indica
acatgcatcctttgtgtggcggaacttaatgtggggaaaggaaattattatgagtggatctcaatggagaattggtaatggttagaatgttagaatattgtaagacccttggttacctaggccaaagagttttaaggtgtatgataaacccgaactgccaaaacaactatatgttgtagacttgacacttcaaaatgggaaatggaatgaggtttttatgcgagctagcttctacaatgaggatgtcgagttgatattgaatttaccgcctgttaaatatgactgggaggataaacttatgtggcattacagtaagaatggagagtattctgtgcaaagtggctaccgcgtggcagcagatatgagaaaatatgttgctacatctgatgagaaggtgatgaaggagtggtggacaaaactttggaagttgaagctcccgtcaaaggtcaagcattttgtgtggaaaatggaaaatttgtggctgcctactaattttgctctttctcacaggaaggtggctgttgattgaacttgtcatcgctgctctaaaggggtaagtgaaactatttttcatgatttatgggggtgtaaggctaataagagagtttggaagcttagtggttttaaagctgaaacacaaagattggggaaagaagaagttatcacttttctcatgagaattgcaaaaggtatgactcaagatatgtatgaatttttttctggtgctatgttggcatggtatattatgaataatactaagcataggggaagggtgccacaggctgccgaagtcattgactggagtgcctagtatttgacggagtttaggaggccgcttaatgatgggaaaagctgggatatgcggcagaaggctcgatgggtgcaacctcaacaacctaaaatgaagttgaatgttgatgcgagagtgaagcggggagggggtagatcgagtattaactatgtaatacgagatggagaagggcattgtacttttgcatctgctactgtgctgctgaaggagtactcaccgctccatgtggagcttctggtcattcaaggtggcttgcaaactggtttaaaaaggcgtttacattggtttagtatcgaatctgattgccaagaggccacccatttaatccataacaaggaggaaggctgtagggatgttgatgatatactaaattgtattagggaattgatgttacatgattcagttgctatcatttcttttgtataccgagaggcaaatgaggtagcacatgtattagccaattacgctttgattaacgaagtgagagctatgtggattaggattattgtcccttgtgcaaggcttgctattcagcgagacttgcctaatcctttgtaatgcttctatcaatgcagaatttagtttcaagaaaaaaattatttattaaaatatgatttaaataattatttaaaagtatgaacaaacgtagataattatttttaataataaaaatctaaattttaattaaatattaattgaattaattaatcatatattttttaacaaatttattagttatattgtttaaaatatataaatttattatctgattttattatttaataaaactagttagatatattttttatataaataaattaaaaattagattaaattttatatatttaaaaaatataattgaattgtattagatgtgactttttttttattattatttaaattaatacttaagtaatagaaactttaatacactctaagcaaacatgccttgtatgttactaatacttagtttatatatatacatatcttctcttataacaaatgtggttattgttgactcaaaaatttagacacagatctttgggtcacaccagcttgctagattggcaagaatgtattatgagttaagtataagtagagagaaatagcagtttatagtaggagtgggcatccgatccaacctaacctttgtttcctcatccgatccaatccaattagtaattggatttggaaaatcatcatccgatctaatctaattagacctcgaaatctaatccaatctaatccaattactaattagattggatcaattttataatttgatatctaattacacac

SEQ ID NO: 382661 - DNA, 3798 bp, Cannabis indica
ataagggacaatgaatcaccttgacagagaatccaggttggttggaaattccctatcctttccccatttatcaaaacctgagaagaacacattagtcacacacctcatgatcttctcaatccaatcctcttcataacccagccctctcatcatagtaactaggaagctccattcaacccgatcgtaggcctttaacatgtctaacttcaaggccattttccttccattaccaaatcttctcatcttcatacaatgtaggctttcgataccgattatagcattgtcttgaattaacctgcctcccacaaatgcactttgttcttgtgatatagcttggtgaaggctatttttcatgcgacctgcaagacacttagccacaatcttgtaaatcacattacataaactaatatgtcaaaattctgacatcttggtgggcttctgaatctttggaataagacaaatgagagtatcgttaatgtagtctaccttcttcccctcattaagaatacccaaagaaaccttagagacctcatcacctactatcagccagtaattcctatagaataggcccgacattccatcttcctttgagggtggatagctcgcattgcttgaaagacatcttcctttgtgaaaggttctttaagatactcattagtttcgcgggagatcttattaggaacaatgctttggaactcctccaattccgccagggtagctggatgagcggcaaacaagcattggaaatactcacaagccacttgtcccacctttctattcccgaatacccaacgcacatttctgtccagcagccccgttatagtttttttcctcttcctagcattagccttcctgtgaaaaaaatttgtatttcggtccccctccatcaaccataaggcacgacttcgatgcttccaaaatttctcttctttatccaatagcacattgtacttccgctctatttctttcaagtgattccaatcaatgggatctgtgttcctagaaagagtagctatcttgtcttcaaattcttttagctgcatattcatctctttctttttaatcttgttccatctttgaagggcctccccacacttgaccgatttctgcttcagctcataagccgtgacacttctactgccctcccccgggattctgttacgattttcgaacatttttcttccccaagccaagcactttcgaaatggaacccagagtgccactgaacccccaactcacttccatgaatccttttcgaacaggtgaggaggagaggacaatgatctgaatttatacgctcaagatggctgactttagcttcagggaacatttcaaacaaatctgaattcccgcaaactctatccaatctttctaaaataagattgctttgtctcccattgcaccaagtatacttgcttccttcaaactccacctccctgagatgacacccatccaaagctcttctttagatattaatgagataccccggttttgattgaccaccaacttctccttctgcctcaaaatctcattaaagtccccctatcaaccaagggcccgagtacatccgcccaaccctagcgaggagtttccaggaatcgcatctttggcttggatcggggtccccataaaatcccgtaaaccgccaccactagccctcctctttcctagtgaaagtatcaatatggaaaggagaaaaggaaaggatattgcagttaacatctgcagaccacaacaatttgagaccaccactcatacccttagcttccaccacgaaacagccaacaaaacccaaagtaactcgcaaagcctcagctctcaacttattaagcctagactccgaaatgaaaaccagatcaggactccaacgcactaccagggacttcaatgaacggaccgtttaagggttccccatcctttgaacgttccaaaatttattcatggctgaaggcgaccctgactcgaagggtgcgcctcttcttcattctgagcaattttcgaatccctaatctgagaaactctaaccagtatatcatctatcccgcccttccttttctttgcatccttcttcacaacaacctttctcctttgttcttttgggattgtcttctgacccgagccaaagacaaaagattttccttcattcatcccgggtatctccgtagaatagttgaccagaatctcaaagtttctgattcttaacgtattgttttgagtattggccgtcttttggagtttgccaaaccccgtctcttcccgatcatcaatcattcttcgtttaccacaacctccatcatcttggatgcttaatttctcaataaccactgtctcagctagcttttgtaacactaagttagtcttgggcaaaattttcaactctgtcatactgctaagttggccccttccccttattgcttcactcaatattgtctttcccttatccgcttcttccattaatggttcaaaagaattcaaaacccgcaggtcctgcttcggactactcacaccaaggttttccttttccttcatctctatttcttttctaatacccctcctttccccatgaattccatctcgtgccccattatccactttcagccatggtccataggcattagctatctctccttccgcccctttaattttcttggtatccaatgagcaatcttttttaccatgtccaatccatccacatcaaaaacacataaacggtagctcttcatacttgaaggctacccaagtcttggatcccccacatggtaatagaaagcctgggcaaattggtttattgattgtcattcaaatttgaaatcgaaataacccatccgccaccattctcgacacatccgaattgttgattgtgattactgtccctgccactggagctaatcttaatgtgttcttttcagccagatagtcctctggcactcccaaagctctgccccgaattggaaatactgtaaggtcattcttccaagattcactagagttccccatctttcccaaaatcaataaacgatttgataaataccgcgacattcttgctaaaattcttgactaggtttgttcagagcaaaagaaaatgtgaggaacatacctgaatcgtacttcttctgaatcttgatattccattccgcctccttcaacctccagattcttcctagtatgttcttttggaaccccctgctatggtcgaccttagtgcataatcttcccttgagattatatttagcaatcgtggttgatatactatggtccacctcccattcctcttcatccgagacatgaagctaatgggtttttgacaacaattcctccatagcaagggtgagtacacaccagtccggtacaccgaaatcccttcatcaccgagggaaaaggaaagaatagctcagccacgtgccctagcagagaacctagatcagtcatacttattaaatattatacttatgatgatgagtcatcattatgaaatgttacttattaaatgttatttgtgatataaatttgtgcgaacatatatcatgactaggtactattttagttattatacatatgtttctaaattataaatgtttttgtaacgtgtagttttttcaaaagatttttaagttattttacataaattcttaataatttgaataattaagatagtatgatacaaatatttatatgttataaaatcatataaaatagaataaatgagaagaaagaagaagaagatgaagagagaaagagaaagtgagtgagaatttcagttgtttattccaatggtgtgaacctctatttatacaaata

SEQ ID NO: 382662 - DNA, 2832 bp, Cannabis indica
ctctctcttcttgacttgaattttaccgaaaaccagagcacaaaagcaaagacaggagagagagatacatgtcaacgaacaccaacaccactacttccccatcgttcttcaactcccctattcatacccttaatttatatatttaagttactacatataaataatacaattaaattagatatagttggtgaatttcttagtacataatcttctggtgaaggggaagcttttgttgttgttgttgttgttgttgttgttgttgtctttgggtgtggtctattagtcgttgggctttcattatctcatgtagatcaattggttacttcctaaattttgactctaattcaagcaaacctatttggcttctttcttcatttccatgtatctttaaccttagagcttttctactctaaatgggtttcttcctattgtctccgattcttggttttcgattgtatcaactaagctccgaggtcaaaattttctgggtttgattattattatttttattttgtctgttggggatggtatgcgcggattctgatatggtggccaagagatatttgggttttgggttcttttccaagaggagattaggtttattgaactgggtcgtctttggattttggcttgcgttactgcttttgcagccggtggctagtgtcagacccttgcgagagagagctcgttcctggggcgatgaggttggtattgagattattgcctatttttattttagtttatgaatagtttcatcagctatgaagattgcaatttgaatttggtagtggttattagttttgttcaatgtttctcttccttaatgtacactctaagagattagagattatatttcagtgaaattatttatgggttttagactgttaggactgggggaagtcggtgtttgtgtttactccaaagctgctttagcttttttacttagttatgattttgctgcaatgaggagaataggaggagaatgagatattattctgatgtaatttgcaagagcactgaggatgctagagtatttcctaaaatagatagtaacatactctgcttgattgcacaaaaccatagattaaagaggagattcattagctttgtcattgatgtggttctctggcattgccatgtagtcgtattgaaagtagctcatactctttcacattgagttttgttcttcataaactaaagtagacaatacagatgaattgaacctttcatttatgcaagaagacaactataaacaatatgttttttaaaagaggaactgtcatgtgaagccaattttaagttactgaacttccttttagagaattagttgctctcatttccctttcactttccatagtatacaaatgtaagatttcctttgaaaaagtttctggtaggaaaaggagggagaaaactcttattttcttttgtgtagaaaaaagtagtcgtttaaaatgtatggaaatttgagtaaatttactgaattcacgtttatctcttgcagtggttatttgtaagaaaagatgaaagtgacttgggtccattttctgcatggaatataactggaacttatagaggttagtaacttgcattgcactcatttttaaatgttacctggtaattttagctgcatgctctcaacgtgaaattgatgaagaactggagcttctttgtttctccttgggagtaccaagacttatgtaaacatggttttcctccgccatgtgtgagggtttataataaacttgggtagaggtcagtcaagacttttgtcacttttatgtgtttataaattgacttcaactgtgattctattggttgactagtgatatgagtttgtcatgttgggaagcatacttaaacaaataatttagtaatttcttaaaaaatttcgggtgaaagagcaggattagttgcatccctatttggcagcatatatgatgggataccatgtgattttcttgttttatgccacgtactgtctgttcattgtgatcatataccatttaactgacacggttatgtggagttgcggacaaatttcactagtaaagatccattcaatttagtttgtatgtctacttcgatctgaatactggtacatccatatttgtgtattgcagggaattggaagtttctagattctgcaaatagctcttccaaatttcctgatttcaggaaatcctcgggcaattctgtaattgagttagttagtacacctacaaaaataaccggtgtacattatgtgcaggtgagtgctctgaattattgttcatagccatcatgtcaaaggaatcaagaccttatgtaatcagtgactttgttatgaatacaaagattgccactttatatagccattttactatttgattgcagtatctctgaaaggctcatgcagatatatgcattcaaatctagatgagttctaagtccttagtgagtactagaagtatagaactactgtctctgctgtgaaaaagtcactatgtcagagtgctgtagtgctaaaaaatatatttttagatttgatatctgccatttaggttagtgtcagatgattgtgctaactccaatttaacttagtctattgactttgagttgcgagtcatactttctctttagtatgaacctatgaataattatgacatttataacctgctttgcttcaaatatagaagaaacaaaaaggaagtgtcttggttctttccttcagattaggaatatgactcgattttgtagaatagaggaatttatgtttccattgagagggaataatctgcatttagggctcgtttggaacgtcgtattaagtcgtattgtattgtattatat

SEQ ID NO: 382663 - DNA, 1233 bp, Cannabis indica
ttttttttttgaaaattttcatttatattttataacgaaaaagttattaatgtgttgaattatataaataaagtggatgatacttatcctaatgcttgcttggatggcttaaaattaggattctactaacaattctagtcagtactattgctgtactattgctcatgcagaaatgaactttgcaaaattgaagttgaatataatcttatctcgatcaattatgtcacaaaataaattaagtgactttgctatgttatttattgaaaatggtttgatgagattatacagtttgcattaaaaaaaatgcatgacgtaagttacattacatttatatgattaatttacgtggaactttattttaaagaaaacaaaaaattaaaaatatgtctattagttatacaaacaaaagttaattaattttactgtacgtagtgaagagattagatcaagattaatattatattagcgtatatatgcacgttaattaaatacaaaaaaacacgtgggtttgtcaggtatatacacatataaacgagacatgttttaacttactatcatcagcagttggaataataattcacaagttatcatgatcattactaattagttatgctcaaattaaataataataataattaaaaaacagtttcataaatatataataataataataattaagaataattaaagtttcgtatcattgagccactgcttttgtatatcgatcgatcgaccactctcatgatcaagttgtgttctgagagttgttggatttaattttccaccgccattgacagccgaaactagctcagtagacccaccaaaatatggttaatggtggtcccttaagttatatgttcttggattgagtccatgcatgattggaataacaactttatatatatacatacgcaaatcattgatcaacgatcacattattcatttccaaagatttgtttatatataaaccattatagaatgtatatatatatatatatatatattgtttatgtggcgtaaagttcggccacgtatctttccaaaataaataaataaaaggaaagctatatattcatatgtaattagtcttgatgatttccaaagaaaatgattttttctattttaggttaaaattacactaaataaatatttatatcattttaataaaaataaatatttatactatttactaattacaaaaataatattcataaaatttctttattacaaaaa

SEQ ID NO: 382664 - DNA, 1282 bp, Cannabis indica
tttttttttttggaacaaaaagaagtgttcattttggaatgccttaaatcttgataaaagattcccaaaatatattgtaaacaaaatgtcatttatttgtcccaccaaccaaaccttggagtaacattccactacaaatattaatataaactactcaaacacacacgaaacatgtttaaaattgaataatgaccacctaaaagatattaactccaaaagattataaattgctttaacaatgtatgtagccagagaaatgcacaagttgcactcaaattaattaaataaataaaagacaaaaaatatgattaattaaaaagaaaaaaatgaaatagcatgaccaatcacattactctatcttcaacttgagaacagagccgaacagatcatttgtttgttccctaaactcttggagcaaaaaaatctccaaacacgaagcagccatggctgttgtttcagattcttcttctttgattctcttctttttcatatgtctcctctctctatctgtaatttcatcatctcattctcatccgatcgatgatgctccacagactttcatcgtccacgtgtcaaaatcccacaagccttcctttttcacttcccaccaccactggtattcctccatcatcaaatccctccctccttctcctcaccccactaagcttctctactcctacgaaaaatccattaatggcttctccgccactctcactgctgctcaggccgctaagctacgcgactttgctggggtcatctccgttgttccagaccaagcccgtcagctccacaccacccggacttaccggttcttgggcctcgcagatgggtttgggctctggcctaattccgattacgcagaggacgttgtgattggagttttggacactgggatttggcctgaacgaccgagtttctccgattccggtttgtctgcggttccgtccggttggaaagggacttgcgagagcggacccgatttcccggcttcgagttgtaacaagaagattattggagcgaaagccttctacaacggctaccttgcgaaattggggggatccattgttggatctaaggaatcgaaatcacccagagatacagaaggtcatggctcccatacggcttccacggctgccggagctgtggtctcgaacgcgagttttctccattacgctcagggagaagccagaggaatggcgaccaaagcccgaatctccgtctacaaaatctgctggagcttgggatgcttcgattcggatatcttagcagccatggaccaagc

SEQ ID NO: 382665 - DNA, 1037 bp, Cannabis indica
cgttacgtacttagttggtttcactttttaaagtttactttaatttttttttttttttgtcaggtaacaacaaaaggaaaccacactgagtattgaattatttcccaacggtatctgttagagttttatattagtaatgtgtggattgaaaataaaatatataaatttcatcagatatttctcttatactcaattgatttttgaaatgaaccttaacgtattttaaaacctttaacatgatattagatacaaaaaacaaaaaaaacaaaaaaaaaaaaaaaaactactaaccatctgattcaaaaaaaaagtatagtaaaaagaagagctaccaaatccaaaaaaattgatcctagagtcaaaaatcaaaaaaggtcctttgtgattttccaccaaaagttcaaaaatctgatccaataaaagtagagtagaaagagttgtttataatttaaggataataagccaaattttgagatattttagaaaatactaaaaataaaatagaatatataaaaatttaaaaattattttttttattatcaattaattttgatatagaaccagtgcatctgtcaaactgtaacagtattcaatttgtgttattaatatggtaaaactatgtatggctcggttttaattaataactttaaaagttattactacataggattgaaattggtaagtgaatcatataataatctgaaatcccacgtgaaattttagttgtctataataactacaagtagtacaaattaatttatagtgtgggaaattttaccggtgaggcttctactgtttctgattcccacttcccagtacattgtcaaatggatacaaaggtgggtaaacgttaatgtggtgggtttgggtatacgagattaatttagtgttgtggtagtactgttaggtgtgattcatatttaataggatcatatgactcattattaaacgttggatatatttccttggcttaaaaggtatcctttgaggatccatactaacgagagaaacctttatccactttaggatagcttaag

SEQ ID NO: 382666 - DNA, 2651 bp, Cannabis indica
aaaaattaataatttttttatgtgttttaattttgattcttttccattctcatttctatcctcattctcatttctattctcattctcattcttataatttatttttatattttcattacttttaaccaaacgctactttagtgtgctcgcaatgaatttgacaatcaatttgtaaagtataatgtgtcattcaatctcatgccaaaagtgaaactttgaggagtgaacaaataatatgatgggacataatcacaaaactaaacctgtttcaaacaagttgtattgaaactaaccaaatttacattccaaagcaacacaatactaaacttaacctagtttgtcattatcatcaattaaaccattgataaagcaagttatatttccagagcaacactaattacatagccaaaagtgccttaggttgagtctagatcgaattggatattccaagtcacgtggcactatgagtggtcggaaaattgggatacccaattttattaggacaaatagcattactaatcacttacctagatgtacctattgcaaaagcttgtcaaagtgtcaaactaaaccaacttgttcagtctcatcacaagaaacccaagacaatcttgaaaagacattgttcttcctcaccccagaatccacaacttcttgtttaaggtaaacattcttgggcttgaatttcttccatgaattgtgcttctgcaccaatgagtccatgatttcttgtacgccgtaaactcctcttgttgtatctttttcttctacatcgggtattagattaaattcactgtccccatcttcttcaatgacttttgaactaaagttcaaacgagaaaaaacactagatcttttgtcttgagcatcagaatacaaagttttcacttccaatgaatcgggagtcccctcatttgactggcgatcacctgtctttggtgaaggaacagcttcagatagcattccatctagctttggtgtagcaaattcgacatctatattcttctttcctaaatcttcagcattcaaaagtgtcatagggaaaatcagtttaagagaagacaaaaactctgtttggtcattcttcacacagtccacttcaaactcagaattgtctggagatgacaatggtataaaatctccaagatcttcagtactaccaacatctttcaaagagtcttctaagctttctggttccttctctgatacaatagtttcactactgccacctttacatctaccagagctggaactaagtccagacacctgggattcaggcgagctggaaccagaagcacaaacattggtagtactataatccactactggactgctttctgattcattccacattacaacagttatcccagaagataatttcttacagaatggggacctttcattctccaccacttctccatcttcaaattcataatccaacttcctttttcttctgcatgataacattttggaaatgcccacatccttcttttagaatcaaacaaccatagaagcctgttgacctgcatttaaagcattaatccccaacaacctaatgttattactatcagttatgaagattataaactgaaaagggttaatttctgttttggaaatctctaactcactgtttttgatctgaagcacatggttttgtatttgtacaaagtgataaatcttgtgaagggttgtttgttttttctaacctgtaatcttgatgtgttcttgttctttctaatttgctaaaaactataatacaaacggaaaaagattaaagataaaacgaacctgatcttgagacaaaccaaatttgaatttggaagtttcaaagtagttatcctcaattacaacacgaaactcagattcatcaagtggataacaatcccaaatcctaataaaacgaacctaataatcataataacaacaacaatcaaacgcatcaaattcttagtataataaatacaatatgcagtaaaatcattcaaaggtgttcaacaaaacagtttacctgtgctggaaagagctttccagatgacttcttgtatgcatgagtaacgatattcatttcaccatcggaacaggcctgaaagacgccatggagtcttctctgctcgtactcgaagaggaagagaaccattccggatcgaacttgatctacgaaatgggagaaagaagaagggagtccaaagagctttgagcgtagacactcgtggaaagttttacgattagacatgaaaattgctccgtaatctggaaactcaccgccataaatcttcttcttcttcattggttctctcttcatcgtcatcatcatcttcttctttcagtttctggaaagaaaatgggactgagtcacgagtcacgagtcactgagtcggtgtgcatttcccgctcccgttctcgttttatagggtcccatatgcgatccgacggttaatatggctccacgtgggtagtgtgattgccgttatcttgatttcccgccaaattaaaataaataaataaattattattttattattataaatattgtcaagacattatgttatgttttttttaatgcctaaatcaattgataattctaataggaaatttcattaatttggaaattaaataataataaataacttgtaacctgaaagtaacctaat

SEQ ID NO: 382667 - DNA, 1957 bp, Cannabis indica
gcagctgtaagatagtttcttgtatttggtgtgtagctttttttacttcaccattttcctttgctagtgtaagactactcaccttaagcttaccaccttcgggtcctcctcgtattctttgtcattgtttttgttgtacgcatcctttaggtcctcgtctttgccttctttgtcatcttcgttgatggaggtctcatcaatgtatttttcttggtgttggcttttctgaggtggacagctagctacttctaacacttcaccatcccctacaacatctgcttcaacgtctgccagaaggggctggtataaatcgtcgaccgtagcattttaattgtcattgggagcggatggttttttggtcacatttctagttgcaaaccatggttgtagaagacaacaatggtaaagacttccttcaagatcttaatgaaagcatcaaaatatttaccgagattttcaaaaattgaatttaaatatattgatcttaaagaaaaatgatcagaaataaagaagaatttttttacgtggtttgggcgttaatgagtcttagtctacaagtcaatattattgaactctttggctatagagttttttacacagtgtttagccaaaattcgtaaccctttgcataaagggacgaagctttatttatatgctgaagtcaagttctcgggtgaacccggacccgttagggttcgtaaatgtgaaataagccactaatgggataaaatacaatataatgtagactttgagtcgagtagttgaagcccaattgagaggtaagtgtcgtctgtacgagcttgtacaacctgatgttgataggtggccatgcggcgctgattgtgtacaaaatagtggatgtttcacaaaaggtatgtcgctttttgtgttgtgcgcctttcctagatctaacacaagggacaaacctctgattctgtgaaattcgttgttagaggagtgccacgtaggactgtatccgaacacctttgggactacctctgagggtatccggttgtcttcctttgaatcttcatccctttggacaagagttacccttttgggaccatagaggtctggctttgttgagacagggttttagttgaactcggagctgtagtcgaactccccttatagtctgaactattactttcttttgggcattggaagtacatgtgtcacctatccgtaaacacggttaacaattataaataatgaagcataattaaaatgaaagtaaatttattatagtattataattaagttttaatttgggtaaagatttgattttttttctctacaaatatataaaaaattataactattgggtatgaatatactttaaaaaatgataaatactattttagatttgtattctacaaaaattacaaaaattactgagacttattttttataaaaatttttacataatagatcaaaaattttaaaaaaattacaaatacctcattatgaattttttttacttatactcttaaactttttttatttatacaaatacaccttcactaaaaacaataaatctttttctagtttatttttagttgttttataatttatttatagttgatttataattgtcgtgatattaatttctcgtttattttagttgttttctactttttctcaagaaaagcatatttttgaaattttaaaattttaaaaacgtatttttataaataaaaaatttttatatcataaaattataaataaaacataaaaaaatatatttttaaaaaattattcttttccaaaatcagtaattttgtaaaagagaaagtttaaaatggtattaaccaataaaaaaaattaaaatttaaaaaaaaaatattttttaaaatgactaattagtaatttttcccctgaactttgacatgtactaaatcgtgcccctgaacttttttgaccgttaaaaaattcatcctgaactattgagattgtt

SEQ ID NO: 382668 - DNA, 2958 bp, Cannabis indica
tatatatatatagggaggtttaattagggatgtagtaagagtttccattgctggccatagaaagcaacagcagtgatttttagagaagagagaggtttgactagtaatgtggcagtgaaaaaatgagctggtcatgatgccgacccatcaaaacagaccacgtgaaatcttctcaattctcaattccattcccatttcattatatttatagcaccaataaaattacatatattgattactcaaacaggtatatgtatttggttggattaataactttatataaataattcggggtggaaactattgtgcggtggctattgcgagagatcatacggaatcaattttatgggtggtgacaaacaagcttcatttctctgaccctattatcggggaagcggtgacttgtatgttagctttgaagacggcggtcacaatgcatcattttgttatggtggagagtaattctaagatggtgatcaagaacctaaagggtgtcgaatctttttggcagcttgagaattacacacgacaatgcaagcatctctctacttttttcactagttgtaatttttcttatattttcagaaactataattttgcggcccataatgtggtcaaataagcttttgccaacaatattttgggtatgatagaaactactaatattccgaatattatcttttataatgaccgtgaagtctgactgctttgttcttgtaatatgtaaagctttatttcagaaagaaattggtttcaattatttctgaaacaatgggaagtgaggattttaaaggctcttttctttttacgtgtgttgttagttgggagagaagtaatgaattattattattaaatggggaacttactgaagccttattaatagaaatattattctagtaatgcagaaaaaggacatagttgtcactcacgtggtttttattttgaaagtggtcagtcaaatggggttatgacacgtggcagaccctgccaaaggagaagtactcctgtgtttatcagatggtggtcagatgtggtcaggtcagtcaaaatgcaatgtattttgatttctaataagcctctgaaaatttgctaggcaatcaattcctcgtggcctattataagatgccattgccagtcccccctactctttaactctctcccaatataatatcatttatatagatggatttgttaatagtaaccaaaattattagtttctaaatcttaaccgtataaatttaatatttaattttaatgatatatttgtaattttttttagtttgattagtgcaaatttattaaaaaatatttagttttataaacattagttacttataaaattaaaaataaacattgagtttataccacttataaacttatattgatatttactctattatatatttttaatgaaaattattaattttattcttaaaatataatattttacacatatattattatgcttcatttattataatattattcattaatttatttgtcaaaaataaaataaaattataaaatatacatcataaaattaatgtgaaaaaaatatttattataattgattagtcgaaaacaacacaaaatcataaaaatgcttagaccattcatatataataattaagttgttttagaaatttatgaaacaattataaataaacacagaataattgattaaatatatattatatatataaatagaggatcagtatatgtacctcccgctattgattttgatagcgattcataaacttcagctattgatgcatgtaaattcgtatttgagctttagatatgcaaaaataaaggagaaaaaattaatggtatatagactttccaagcttttattagccttctttaatggagatttgatagaatgaatataaatagtgagtttgggactaatacatacaaattaattatcaaaatactttaataattaataaaaaaatataatttttagaattgagttaaagaaaattgataactaaataatattgattatatttaaaatattatgtcaattaaactgaatttatttgtaatcaatttaaattatacaattaataattctaatattcgtacaggttacactcatggtccaagctataataataatcactagtaaacaaatgcaaaataaatcattgtacatagtgcagcaatggaatgggtatttaattcgaatacaatcctttaaatgaatgattggtactatctgttttatttattttgggaaattttatttgtaatttataaaatgataagtacactttaatatttaaaaaattaaatttaaataattttaaaaatcactcttaatttttttttaaaaagttcttatattattttgtattaattttaatacttaattttatttttgtatatatattttacaattatgtataatttttttttaataaaatttcacataatttttttgttataatatttaaaatataatttatttttatttaatatgtatatttttcaataatataaattggaagaatttttttaaaaaaattaacataattaaagatatatattttatataaaataaaaattattaaaatatagtatatctatgaatatttagagtgaaaataaaacttcctcacttatatttccataaattggttaatagttcttttcgacttgcaagtgccaagcccaactgagtccaaaagtgctgaaccttggtgcaggcttaactctactgtgtgtagacggaagcccaatttactttaactggttcatagcccaagcctgagacaccatcttgcttgttttttaatttgaaaagtacctcatatacaaaaacattacaaaaatacttaattattagttcaacacttctataaaaatgatctcatcatttgaagatgaatgaacttattattaggctaattttagcctggtcacattctatagttgtttttcttttttatt

SEQ ID NO: 382669 - DNA, 3016 bp, Cannabis indica
ttttggtaattcgaacttgaaaattccccaccattattatttgttttcatttttgagatcaaatcccaccttgtgcctcacgtcatacatacacactcactcacttataaataccatccccacaacttaaacttcctttacaagcacccattttatagtttcctaatctcctcttttagcttgttaatgttgttatatatatcttattaattattaactgacatgatcttttcatccttctcatttatctaattctcctaattgattctcattctcttatcatcttccttgctgttctgttacatatatatattatatatacatatttatctaatgggggataataataataatgataataatgtaaatttgcctcctggttttcgtttttacccaactgatgaagagctcgtagtccatttccttcatcgtaaggtctccctcttaccttgccatcccgatgtcattcccgatctcgaactatatccttatgatccttgggaactcgatggtaagaatatgaatatatcgatcggttttagtaattgaataaaaactatatatagttagcatatatttatgggtttaatatagtatatgtatatatgcaggtaaagctttgggtgaggacaacaagtggtacttctatagcagaaagactcaaaatagggttacgagaaatgggtattggaaggctttagggatagaagaatcagtgaacaataacactacttacaagaaagttggtacaaaaaagtactttgtcttctacgttggagatcttcctaataataataataattctagtagtccagccattaaaactaattggataatgcacgagtttcatctctcagattctgcttctgcttctacttcttccactagatcatcctccaaaagaagatcatctaacaaaatagtaagtaataaaaaacccactaactaataatttttatatgcacattttttataattaagtttaaattataacattaatttcttggtgtgaattttttatttttttttgcaggattatagcaaatgggtactttgtcgagtttatgaacgtgatgaagatgatgacggaacagagctttcgtgtttagacgaagttttcttatcactagatgatcttgatgaaataagcttaccaaattaggtagtttagcaatgtgaggattaagtaagaaagaaaaaaatgtttaattaattaagcacgaatgaagatccaaaatgaagggtctaccaacaaaaaagtttagttttataaaacctatatgtagaatggcattattgtttttgtcatagctagtaagatgtgttgtaactagctatagctttatgagcaccttaagtgggtggacattatgtataatgtacctttgagcttttgatgagaaagattataaaaaggaaaaggaaaagaaaatacaaaagaaaattaaacacttgtgggtaccaatgttattagccaagtgtctcaacttgatattctaaatgagatacacgcaacaaaatagaccgaggaaagttgcaaagtgtactcacctcaaagtttgtgaagaagaagaaaaaacataatgtggaaatggttgacttcaatagttgcatggaattttggtacaattttatgtgagaaattgttaactaattacaacccgtaacaatattaatctaatgtagtatattaagcgcgcacttgaaataaaatgattaatataatgctgtaatatatgtagtattatggtgtggtgtgcttagtacatatttatttatatatagctttttgtctttatctcgttcgatagagatatataaaggttgatcacgtgcaaggataattgagttgagagaattggatagataaaatgtggagcccagtgagcactgtaatgtaagtatgcagctctgtgcaattgagcatagcacacacccaaaagaaatgtataacctttttagcttttgttttctttctttgatagaacaattgatgacatttggtagttgtatttgtcacaatgtcaaggaacaattttttatgggtggctgcttaggggaggatagagtcatgtatgatgcaagcattcacatgtgctttacaatatataaacatacgtatgaggtgtgtatgtgtggttttattcaagtaaccttgcccccaataggtaggacccctataggcccaagtcattaattaacttgttaaggtatacatacaaaagaaagaaagaaaaacaatacataacacattaattaagcttttttatttgaaactagctagactactacatgtacaaaatgatacccaatctttatatcgaagctttatcacattttaaagtaattcatccttgtttcatgatccgaagtcagcttttctttcttttatttttctctcattctcttcatgtactgttaagctatcgatgagcttgtcatcgctccacacgttagtaaaagtgtcacacaactgtaaattttgactgcattttttagtgagctctacccaccccgaggtcgaagacaagtaccatgcaacgagcatcccaagagaaataaaactcaaccacacacattttgccaaaacttattgtcattggcatgtgagtttgtgagtagtttagttaatttggaagtcaagttccaccaaggtgacctattataagaatcacaaaaaataaataaataaataagacgactcactacaagaattaccgtttttaggggcggaggggtccgctggtaataattaaaaaatccgccggtaataagtattagcggcggggtccgccggtattgctccgccggtaataccccgtcgctattaatggttaataccggcggactgacacatccgccgctattaataattaataccggcggacaattagcggcggggtccgccggtaatttatttccactgacatttaaaaaaacattattaccggcggacccccgccggtaataatgttttttttaaaaaaaaaaataaataaatattaataagaaataa

SEQ ID NO: 382670 - DNA, 2327 bp, Cannabis indica
ttttattatgactaacaaaacacacatatagtccaaaccaaatgagatgttttaaatcatgagaagaaaaatgaaacccaacattgtataaacataggagaaaatgtagaagagaagaaaggtagcacaaggacaaaggaggagcacgtaccaaagacgaacagtgctggactgagtcttgtgcgaagcttgagcagtagcagaggatggtggagggtcgttaattgtcgccatcgacgataatcttagaatgaaggggttattggggcaagcaaagtgtcttagatgatcttagaagaagagagaaaccttgtttaaatttcttttgctagaaaacccttcgtgtaaacttgaaaaaaaaaagaaatgttttctgttaaacttgagcgggctttggaataataccgcgagtttttccaaaataataccgcctattttttagtttaatttactataaaatatattttaaggcagtctggagtgtgtgggtgatagtgggacgatgaaggtatatgatatgtgtattaattagggctggttattaattatcttttttaaaataaaagggtgtatggtgacacgctatccgtgtgagcaaatctgtttgccaacgcgttatgcgtatcgctaaagccacgtgatttacatgtggttttagtgacacacataacgcattagtaaatagttttgctcacacacgtcgcacgtctctattgacccacattttgagtgacccacattttgagtgttaagtaccaaacatttggagtctaatagtgtgtgtcactaaaacttactcttaattttttagtgacccacacttttatgcgtgtcactatatagtgtcactaacagcctaatttgtagtagtgggacttaggaaaaagtgtccatgttttctgtcttttaagagcataaaactcatcagacatggtcgagttccacccctcatgctgaattgcataaacaactgaagcaaggatgagttggtcatgtctgaatctgttgtgacccatgtagactttgggtttaaatatgcctgctttggcccttgtaatcatgggatgagtgggacctacagatgctggtgccataatccatctctagggaatgaaggcggtatccctctgccttagcctctttaaggagaatgtcctgaatggtccggggggaagtctctctcatcctttgcatggcagccaaggcaatatatgccttcacaccattcactaggcttcggttggcttccccttgaaatctgttaatggtctcctaacgaatgttattattattacaggtcgcttgaagaagcaggttcagattgtcgtgcttgtcatccaagactctttcagtctcttttctttagtatattcacctcgcttaagtcctcctgaagggagcgcatagtttcctcaatctctttctcagcttgggccttgtgggacttgcacagtttctagtactttgagtctatctctttctccttaaccgccagcttggcatcacatttttccagggctttttggacattgagggcagcctgggatttaactcgtttgtttcagcgcataaggtcccatttttagttgtcaaggattgacttttggcatgacgttggctcaatttgatggtcatattgcccaactctttagcagtcctctctgcaaacaaagcaatctggctaaaatagatagtcatacaaccttcaataattgtaaagctttaccaagaaaagacttttttttttttggaaggctaagacttacccatgccgcttgttgtttggtggccaccaatacagtgtacgggttaagatttttgcttaaaattcatttttcagacgtgagctcactcatgttaaggcccagggtgtccaaaatctctacaatatacggagctacagctctgccaacttagtataccagggtctgactcagcgtggcaatgtccaatactaggctaggtgacgaagtttgacaaaccccttctacaatctctattttcttgatggaggacagccgagtagcccctttttgaagaatcacttgctctcgctcttggtgccttttcaaggtagtagtagaatcacctgccttggtaagatagtcatggcctagatttggagacctcatgggaaaggaaaaccaaatggagggattttacccaaggccatgtgccgaggtgtgtaacaccctaatctatagggacgccacgtgtgtgattttataaactaatttaatactagtagaataattaattattaaaaatcgtgataatattaaaaacttaactaaaataaaacactaaaaacggacattataacggca

SEQ ID NO: 382671 - DNA, 1552 bp, Cannabis indica
aataacatagttccgccactgcaaagagtctattacacacgtgactttttttattttatacgcgtgtgaaatagacggtttaaacatttatttttatactgtaaattattctaaattttttaaattttacatgatgtcttaaataactataacgtacacaattataaaaaaatttagactaaaaaattcttatagataccgaaacaattaaggattgcatcagtacatccattttaacggggacaccttaaagtatattccactagtagttagtactagaatagaaatggattgttaatgtacttgcctaaaataaaagggcaggccttccaagttccagttattttcttatttgccggctttccttggtaattgaccgtcccatcttttgtgtagtcatcatcattactttccatggctttcaaactgtgcgtctgtactagaatgtttaaaaatattaacagagaggtgaacagagcaagatttgggaagggcctaaaacaactgcagaaaacaacaaagtttccattttaaaaaaaaaacatgccagtacaattattttcacataaaagaatttgtaaacattttttttgtggggtacgaaaatctaactttttacacacaaactcagtttcgaaatcagagaaaataataaaacaggaaaagcgaagagtaaatttacagacgggcagaggctaaaatctgaggaggggagattcatagagaaataatcaaacctgacacttttgaataaaccggctcagagcttccacatttgaaatgtttctgatataatcttaattaaatagaagaactgaagaagtgcatagacttgtgcagaaaatatttttcttcttttgtgtcattgcatagtagaatttgactattctctacaaaaaaacaagatagttttctcgactaatgaaggcaattatcatagtgggaagaaaaagcaggccatatcatatttttacgtgacatgtcactttgacttcaaaaactgaccttagtcgatgatgtagattccctaaagtgtgggtgagattcatttgaatgggtaggttgagtgagaagtacttagtactattgataaagaggatggagaacatgggataacaatgccatggacgttgaatttaaggtaataatcgtattctttgtcgttgctgttcttttcttgcaaataacgacctagctaaaatattatggaaactttcctcaaagaaaatatgaaacaagaaaagattattatttatttgttatattatttataatttaaatacaatgttgttaaatgattaaaagtgtgacaaataaaattgggtgtgataaaataaatttggtcaattgtaacctatgaaaggaagttacaaagaacatcagcatttcattgaaatataatattaaagtaataaagcatggagaaatttttagggtaaatatgtgtttgtaaaatttgttaattggactctctgttttgttaaatgacaaaacagactatgtattttttaaaattgtacaaataagaccttgagctcaattttcaataatt

SEQ ID NO: 382672 - DNA, 1125 bp, Cannabis indica
acatcccaattcaaatatcaacaggaattctatgttaaccagaattttttaaaaaaaacggaaaaggcagacaatgagtgacaccgaatatcatactgtccctactccgtatcgagatccaggatcaaattatcaagatacaaacaatggtgagggtaatgtggttaatcaggtagcaagatctagctttgcataatatgtttcattttttttaaaaaaaaagaaagaaaaataataaatttttcatgctttaaactcgcagatataatgaatataatctttcctctgaacattcaaatgaaaagctttaaatttgattagaggaaaaaaaaaataaagaaaaacaagtagtttttttctcgtttctttcttcccaacatgttccgtaatattcactaaagtgaaaagacaatatcgtagggcccattatcaacataaacgaaagctactctgaaacaagaaaggaacaatcccagaaattttccttctcaataatcgacaaaacaaaacaaatcgaaacccagaaagaaattagaaagaaaaggtaaacctgaagaccggctctggaagaacgagagatgggtttcttcttgtctttgtccttatccttgttggcgttgttggccgcagcggtcttgcccataatcagacccttggcgcctttgcccgacatctttgatttaccgccaaaaacaaactcaaaactgtgtttagatttatgagattgttcccgaacacaatcactcttcgacccactcaccaaaccgattggaatagagagatgagaaacaaaaccaaagacggtcgctaatggtcgagtcgaactgcaacttaggactatttgcctatttatgtgtcccttttgactaaaataaccctagtatccttcttaatttactaatatggtattccttaacttttgtttttttttaagtggaaaagctggaggttttgagtcgttgactgactccttgaatttcgtaaaagaaaattaaataagagaattaccaccttctttattttttttttaagatctacttaatttacgaaaatgttaatcaccaataataagagcatcttaatgatactttaaaatatttgttcaacatactttctactatagtt

SEQ ID NO: 382673 - DNA, 2622 bp, Cannabis indica
ttttgttttttctttttcaatctatgttagttataattatttattatattttgttattttcttttattattattattgagaaaagactatcaagactattataaatgatcaattacaattacataacagtcataagtggaggtggatattcttccaagttccaaccaagaacaatatgtattcactgtaatagcaaacttagctaacacatgggcttcagttttcgcaaatcgataaacatgtgagatcagtgctcgtagaaaattggatacaagaagtcagatatcattcaagatggcatgaaaagcaaaacggtattcactcgcatgtcgctgtccttgaacaactatgagtgagtccgtttcaacaaagtcgacatctaaattacaacgaaggagccattgaaggctgtgaaggctaaggcttccatttcttcagatttaaaattacctgaaattgattttataaaagaagcaacaatgttgccagatgaattttttaagattgcaccaattccaataattcatcttgttgcatcaaaggttgcatctgtgtttaatttcaaacgtccagagggaggagccaaccacttcagtttgttgttaatgcgaggagcctccatagtaggctcagaaacaatttgagttggttgggacagtgaaggctaagatgttgtggttgttggtgcttgcgctttcgtgtagtcatctagataagaggtagaaaaaatgagaaataatgtagcatgttttgcttttttgccatggatttttgcatttcttttgaaccagatacaccagaggattataacaaactgctcgaattgatccttcgaaagctgatttgagacatgaatgagaaaatcttgaccgctaaaggtggacgacaatggtagtcaaaagcaaggtcagtgagattccatacttcttgagcacagctgcaccaaaatagtgaatgacttattgattcaagtcggtggtgacacaacaaacattttggttcatcagcaatatgtcttctacaaaggacaacagcaacaggtagaacctcatgaaagactctccaagcaaaaatgcgcactttcaatggtaatttcaagctccaaaagaactgccaccaatttgtagcagaagtagggggactggtttcatctcttgctgccaaattagtagcaaattgatatcctgatttaacattatagcaccctgttgaagaatggtgccaaataaggatatcatcagtgggaaacaaacttaaagggatagttctgatgcagtcaatgtccacctgacaaaagagagattggagagccgtgaaatcccattgtctttgaggtgttattaaatcaacaacgagtagtgatggatttgttcccttaaacacaagtggcctgaagaaagcttgccctggaatccgaggatcagatttgcagtttacattcaggccaaaaccaattcgaaatcgcaagctttgttttagtaactccttacccccaaagaatgctcctacaagtcaaagatggtgctcgtccctcaatagcttctagaaaacctccatgtagaaagtatctatgtcgtagaacttgacaaagaagggaatcgagattttttagaagtcgccaagcttgtttagctaagagagtctggttaaaatgaataaaattcttgaaccccgtttccctgtgcacctttgctttacatagaaaattccaattcttctaatgaattagattacctgaggtagaagagccccactagaaattgtccattagactttctatttgttgacccaacttaattggcaaccgaaaatagctcattgcatatgttggtattgattgcacaatagcctttagaagaacttctttaccaccaattgagaataattgctctttccatgaattaagtagtttccaaatacgatccgtgatgccactaaaaggattcattttttcacggccaataaaagagggcaagcccaattatgtctcatggcaaggttgaacaggcatggcaaaagtgtgttgaaagaattgttgttctgtggcattagtattagttgagaaaggtaagacacacttctctcgattgatttcttgactcaaggcacggttgtataactcaagtgcacgttgaatacatcgagtagattcacgggaggcacgacaaaatagcacactatcatttgcaaaaaatagatgagagatagatggagccgttttggcaaccttcaaaccatggagggaatcatttgattcttcttgccgcagtaaacgagatagcccctcaacacaaataagaaatatgtatggagataatgttcggttttatgccctaaatgaaacccatttcaataaaatcagatttactaattaataaaagatcaaaatttattctatgttgcatagttcacatgatttatttcataattatgtttaatgtataattctattaagtccaaaatacatgtaaatatatacatataaatttgttcatgattatagtgtcgtcagcacagtagaatataatcatgattatatgttcaaaagtttaattcctatgatttgtcagttcactggatttagactgacatgataatcagcgataaggtatacttacacct

SEQ ID NO: 382674 - DNA, 2830 bp, Cannabis indica
aaaaaaatactgaagagagcaatcaagctgaaaaggacaaagaaaaggttgatgaattggataagagccaacaaaaccccaagaaaggtgaaaagcgtcgcaggccaaacaggaatcgaaagaataaagtaaagcaagcagaaacaatcaggagtcctcagactgagaagaaagaaaacattgatgctaagaactctccaactgagaagaaagaaaacgttgatgctaaaagtcctcagacggagaagaaagaaaaaattgattcaaagagccctcagaccgagaagaagaaagaccaaaatgattctaagaaaaagacccctcagactgacaagaagaaagaaaaagttgatggtctgatctttatgtgcaatggaaaaacaaaaccagattgtttccgctaccatgtcatgggtgtttcaaatggaaagaaagacactgtattggctatcagaccaggaatgaaactctttctgtatgattttgatctgaaacttctatatgggatttatagggcttcatcttctggtggcacaaaacttgagccaaaggcttttggtgggaaattccctgctcaggtcatatacacattttcctgtagacccttcttttcgatgtctagttatttagaatgttgtgctgattaattttaaattttaggtacggttcattgtgcatagagattgtcttccactgcctgagagtgttttcaagaaggcaattaaggaaaactacaatgagaaaaacaagttcaaaacagaactttcacgcccacaagtgagcattactcgttttccttttttttacccctttttagcttttttttttttgggtcctgagtgttcgtcattcattacttagcgctaatgatgttcaattttttatatttaggttagaaagcttatgggactttttcgacctgctgaagttcatacttctgtgtccacccgcccaccagcagcagcagctgctcgggacaagggagttcgtgagcaagtgagagaaccacgctcactcccaaaaagaaaaagagaatcacattcacaccgtgagaaaccagttagagattctcggtttcgtcatgatgattctaggtctaatcgtaatcgtcggctatccgatgaaagagatcagaatcttgggcgccgagaagttcagagggaagaaggccatagaaatctgtaccttactgaaaaggaatatcgtacctatggtcttcggggagagagaagaaatttgactcctccttttattcctgatcctaatttggattcttaccatagagatagagaacatcttctaagacaacccaacccaattcgtgctgatccgtatttgaatgaaagagactacccagcctataatcttggtcttaggcatgagttgccaccaccagtggctgctaatgatttggacccttatacaaaggatccatattatgcacgctactttcctggttcatcattggacccttatctaaggagagatgatattccttattctgctggcggaattagagacacttatgtggctgatggtgctgatcacttgagaaggagagaagttgagcacttggacaggagagaagttgagcgcttggacaggagagaagttgagcgcttggataggagagaagttgagcgcttggataggagagaagttgagcgcttggataggagagaaatcgagcgcttggataggctatactctactaatgcttcagatactctatcaggttacagtcaggcatatcagagcagacttgaacctgctcctgctcctgctcctgctccattgtcgtctttgtctcgctaccaccattccggcacatctttcacctatcgctagttatgttgcaaacaagttttatacttatgctcttctgcaggttcaattggttgatagcaagttggaattttaaattattgatgggaggttactgcactatgatatttaaagcttcatgaggcttgcctagattaaatagactggagatttcaatgtagacatttttatattttggattttcttttcctgcttgaatttgagactcccggtatttgagttttagtggcgaaacattcctcatgcttaccattctgttagtattctttactgttattattattatttagaattatgtctatatacgccaagcagggttttttttttttttaagttgtatacaccaaacagttaatcaggaaaatgactttatattttagttaggcttaactgataagtaaataaacgacagcggtgatacatcatcccacccccactccaccatagttttaaaaaagttatttaaattactgaagtaatatatgtatctatgcataaatatttatggtacgagtttttatggtaataaatgagtatatgtataataatactttacacgcattatgtaatttcttcttatattattataataatatttaataattaaatattgaataaatattattttagactcgtgttttgtaaaaattattgattggactctttgttttgttaaatgacaaaatagactttgtatttttcaaattgtaaaaataagatcttgagtttaattttcgacaattttttttttttactactacaactaacttgaagacaattcttaacacgaacagatacaacacttttgatcagattatagttaaattttattttaacaaaaaatcaatttagagttatttgtatcatttagaaaatatgtagtctatattgtcatttatcaaaataaagagtccaattagtattttttgcaatacatagttcaaaatggtatttatctttaaatattcatttttttttaaaaaaa

SEQ ID NO: 382675 - DNA, 2464 bp, Cannabis indica
cttttgtgaaaaaaaatttagtgcttgtcaagctgatatggttctcattctacccataaattatctacctaatttaaggaaccctcaaactatgataattttttttttcagatttttgtaatgaatgtgtctaaatttttatgccataaattaataaattaatggtgttatgtataacaactttttctttttgaatcttttttcatttagaaaaaaaaaaattataataataataataataataataagagaaattattaataaagataagtaaataaatgagagtggtagtggtagaaaagggagagaagagaagagaaaggaaaaagaaaatcaaatggggagggaattcgaggaagaagaagattaatggttcatataattcttctgcttatttccattccaggtaccttaattaattacacagcttaagttcatcttcagctgagcttaattggtaattggttgattcattcttcttcacttttattaattggttggtttggttctcagatctaactgattagatcatcaatattcaattttagtagtcttatctataatattgttaacaagttagaacatatcacatgtaattgacaaatattgtgctaatatataaaatctagattaaattgcgaaaataaacaatatattattatccagttggttgattgaaatcaaatctaatatatacaaaataattaataattaaagctagtagggttattacttgatctcatcatcttaattacttgacttgaattgactagacttgactattgttgttgttgaacctaatgtataccaataatcactcctcttttattcccttccaatgctttactttttatttaattccatttggtttctttaaaccaaacaaaaaagaacaaagtcataggcttcatccccatatttaaccctgcaacaatatttgggtaggataatagattaaattagtggaaaaacttttcttttgtattttttttttctattaaaacatattctgttctgttaatctaagaaaaatgaacattattggcagacactttgattaatctccataattgtaccctcctattaatttattcatttctttatttgtttaaacctacaaatttaaattgaaataccacatgcatgatgcattatctttgtatatactatattctatatgtgttgggttaacaaacacatgtaatgcgatgagcttttctttttcctctgttttcacacctgtacagattccctatgtatggattcctttggttttgtttttcatagatatattttatataggagaaatgttaaaagatattactggtgcctagcactttcctcggtgtcatgcagttattggtgtaattaaatatcgggtcacataaaacttaagagaaatatatcgctaatcaatcataagacgccacctataaaaaatactggcaccactagtgcagcattattaatttgatgagttgctaataactgaccacaaagtcaaccaaaaaatataattaatttgagacaaaaaatgaataaacgcacatatatacatatacatatatagaaagagaaatgctaaaaggcactagtgatgtcaaacaccttcctatgtgtcaatatcgctgttggtccaactaagtatcgggtccatataatttaatataatagattttaaagaatattgctagccaatcgcaacgagacatgttgagaaggtgctaggcaccactagtacctaatagcaatgctcatatagaaagtaccccatgatcatgaagatgaacatatgaagaaactccaattatacctttaattccaaaaacactcgcctcatctctactctactctgccttggcactggcagtgttgtgttgatcatcattattctatacaatacacattaataaaattaacatcgtatattattagagactttcagttagaaaagaagagaattattttattgaattgattgaattgagtggtacaaagatatgagtgtttatatatagtacaaaaccacttgagttggacctaactaacctataatagaaaatataactaacataacagaataagctaacttaacaacaccctcaagatggagtgcagagattttttacacccatcttagacaaaatgttattgaatgaagcaggaaatagaggcttcgttagaatgtcagcaagattggctttggaggatacgtgactcagcttcattgaaccatttgtgattttttttctgaaaatgtggcaatcgatcttgacatgttttgtgcgttgatagaagactgagttctctgatatgtgaattgcaccattgttgtcgcaaaagagaattgaaggaaggctgttgttgatgttgtgtaacgccctgaataaataggcagctacccaaaatacttatgaaaccctaatcccctaaacgggattactaatcaaaatagcgcagattt

SEQ ID NO: 382676 - DNA, 3008 bp, Cannabis indica
caacgtatatgactatgaaaaaatttaaactaaaaatgtaattgccacatactttgaatatgaattactaggataattagttttaattatttatattttatgattatatgtgaatatcttatattatgggtcatattttaaaaaataggcattatggttataatttctcaattttagagattttgttaaactctaagtgtattatttatatcatatgtgaaatttattatttttatgattttattaaactctaattggcataagaatatgttaatttattagagaattcaaccataaatactttggaaaaagaattatgacatgttaaattcctagttgacatcatcaatttataataacagtcatttgcaccattaattcaactttgtatttttatgctaatttaataattctagcttgttttcttctcataatttatgtttgttaatttttacatattcttatcactttattttattgtgttgaaaccaatttgtgagtaattagttttgtaaattagttttcaattttcaatccccgtggagacgatattcgatttatcacttaattacttgttgacgattgcatccacttgcgtatacaattttcacaacattagacttggagagttcgatctcaagatgacttgggcctttattttgtagtcgcagagtgacatgtttatcaaatgtattttagaatgtggttgtaaacctttaagacaggatctcaactttttatgtacggttataaatttataaaagtttaaagtttaattaaaaatttaaatttagtacaatttttgagaaactctttgattagtaaaggcgtgcataggaattagaaaatcattgaagcgtgcctaatcaagtagggcattacgaaaaaattctcccaaataccaaaatagataggggtgaatcggtgcatctcttttaggagtgtgcattgtagaatttttctatattataatactctttaaagaaagttgtaaatttctgttactaaatgggttatttactttagtgaaagtaattctaagatgataataaaaaaaatgcaaaatcttaattaattatatattttttgctcgcccttctctttttttttttacatgaagtcaagaagggtccttgcaaggctcccgttgggatccttgtaagagggtcctcgcaggggttccttgctgcagggtttccattggggtccttggcaagagggttcttgttggggtcctcgaaggagggtccctactataggggtccttgcaaggcccttcggcataggagattgagttttttgatagcattttcactagtgtcttttaagacctctttttgactagatgattcgtccaatctagatttttcttgcaataagaggagctaatccttgtcgactttaaaaaaatctctctcccccttgcccttcaagtgggtagcgttattcatagcgctagccacttgagttatatcactctttttctaaacagaataaacattcacacaatgaaataaatctaacatatcataattcatttcacctttataagaaaagggagttgaaagatcgttgtggtgatctcataattgattacatcaaaattttatgaaaaacgtgattaaactaatggggttgcctaaagggttacctccttgattcactacaaactgaagtaaaaaaaaaacaaaaaggatatcttaagtgctttttctcattggtaatatttcttaagatgcttcgcattccatgctcttggtacatgtgggatatacttaatgtaaggtaccatccaagaggcttcctcactctttaccttccatacttgcacattctctatagtcggttttgccaactattccactggtatccattccatggcttcaatgtctagggtggaggctagcttagcaagtacatcagcgttggagttcctctcacgtggcacttgttcaataatgtaccctttcagatattctaggtagccttttacccttgttagataatcaaccattctcatgcccttcatttgatactcccccttcacttgacaaacaacaagttgtgagtcgctatagatgtgcatccaccttactttcaactccttgaccaattgtagactggttaatagaacttcatattccgctttattattagatgcctcaaagccaaactcgatagcacaatacatattatgtcatccaagggatatcattatgacatcggcccctaagcctccatcattttatgtgttgcctacatatagactccatacttcttccaaatcttgaactctttctccaactactttcatctcctctctcattacttagtatccagccaataagtggtctaccaacacttggttgttgattggcactctcgagacatatgcaatatcaaattggctcagttctatagaccatttcaagagatgacctgaagcccatatttttgtgtcgtgctcaaactcatgtcgtggtttatttgggctagcccatttttcataaatgggtcacccctttttttttatacgaacttgaattaaggcttcactttttcactatttgtttataattaataagttaatcgctaaattatatattttttttatagttttaaattttttatataattgtttaacatattttatacataatcatataaaaaattaactaaaatgattaaaatttgaatatttattagtatatacatatggattattattattaccaaattataagaatttttaacgtgttgtgcgtttggactagtctatttgtgcttacatgtcgtgccttcgggcttgtcgtgttgtgtcgtgcttaagcacatttttttttgtcgtgttgtgctaatttgaaattttgcatcgtgtcgtatccaagttcatattttttgtgtcgggtcgtgctcatgtctcacgggcttgtaccagtttcataccgtgtcaaaaagctcggtctgcatttacagtaccagtgatgaagatgttggaatttatttta

SEQ ID NO: 382677 - DNA, 820 bp, Cannabis indica
cttcgtgcattgctataagacactcagggtacttagttacacgacgaaatatcgtcgtataattagttagcgattttttataatatttactaaaataaactaagtaagattcgatattaaattacactaatagcaatattactacacatcacaataatatactacaggtgccacttaacatttctcgataataaaaagattcttttcttctcattttgattggacttggatataattggttttggtaattggtagttttgaatgatactctctagtctctaccgttttctttctctatcccattaaacggcttgattcataactaagtaattctactactttttttttcactattctattatgtacaaatacaactatgagtcagcatagattgttatattattgaccaaaataaaaaaagaaagaaagatcaaatcagtctaatttgcacaacaaaaaaccgactcaatatatttagcctttttataaccaaattcaactttttccaaacattattcaatcatcaatttccaaaacattatacatgcatacttttaccatactccaaaatttccaactgtatatataaaagaaaaaataggaattattattattattagggtaaatactattttggactctgtgttttgcaaaagttatagattgtaccttgtattttgttaaatgacaaaatggaccttgtattttctaaaatagtaaaaataggaccatgagcttaatttttgacaactttttttttaaacaaccaacttgaagataatacttaatacgaagagatacaaaaaatgtaaacagtttt

SEQ ID NO: 382678 - DNA, 1356 bp, Cannabis indica
tatatatatatatatactttgctatacaaactcatgtctagttgatcatgcatacatttctattctctgatagagaagaaattagtagcttcctttcagaaatgcatgcagggtttataaacaccttcaaattaatgcatgagtaatttatgaaccccacatcttgatacaagacaagatagttttggttctagatatagttaataatcttcagaaagccaattttttttaagcaaatctatatagagcaggctgatctagctatttctagttactgctaataagaggcattgtagtaagttgcatagcttatttcatttataggcaagggatcacagcaaacaagagtttcaattttaaatcagctagattacaaatcaccataactataataccaactgataataatatctataagagtaacaagaacatgaaatgaaattaagcaatgttcagaatctagtaaaattgatcagtaaaggaatgatcttttgtcatttctgttgccttgttagtacaagtcaaactagctagtaatcttttcaaccttcaatagtcatttacaaaatctatgacctttgtttctctgatctatctcttaaatagaattagttcatgttataataccttattctccttccacttttttctctttctagtttctgaatcaataaaatgaaccttatataacaacttctaaagataatatttttcaataatcatatgttgcatatgatacaaagagcaatctaagcctatatatacaaaaggtattaaactaacaggtggccttagttgaagtaaaataaggctatgattaaggagattttcaggacaaaactattgaaaaaggaaaatatctaatgcataattaagaatctaataaaaaaaaaacactttagtctattttaattgacatattttcattaaaatacttttttttttcaatatgtaattattaatgaaaactctttaacttcttttttttcttaaagaaaaattatttaaatatggtttaaaaaaaatccaaaaaccagaaaaatttcccacaaagagaaaaaataatgtagcaaatatagtatttacaagtgagtcttattttgttaggctgaatttaatagtacatataaatatccagatatttcccaaaaaatatgcaaaaacattattattgcaatccttatctagaaaagtaattaataataatacagcttacaacataaacaatagggcacaagtatatctttaatgtgggtatatatatatatatatatgcctacacctacacaatcaatgaaaaacaataaaatttcagtatgtgaaatgaagtttgtatattaacaaaaaaaaaaaaaa

SEQ ID NO: 382679 - DNA, 2426 bp, Cannabis indica
attttgtattggaatagtcattcattttatttgaaaatagaataatcattctaccaaattgatattagaatgacattccaatatattaatgcaacctaacaaaggaatgtaataaaatttaattctattcaatttcattacctccaaccaaacgtgatcttttcttgaatcggaaagctgacccggataactgaaaatttaatattagaaattaacttaacaacaactattaataaactataaaacaactaaaaacaacgagaaaatcaacttcatgacaattataaattaaatataaataaattataaaacaaaaaaaaaaataatcaaacaatttttagaaatctgttttttgtaaataaaaaagtttaatccataaaaatgaaaattttctgtattaatgtatttgtgtaatttatttttttgtcaaatttttagtaaaagtttataaatttattatgctattaatgaagtaaatttattctcatacatatttaaatgttaacaaaatagtaataataccccattattgtgacagataccaaggaacaaagaatacaaaaaagaagaaacatggaggagaatgaaactcgaaagaaaaggagtgtgacatcatagattgaaattaataacaatgttaaaattagtgcattaggtgttatattttttagtatttcttagaatatcttgattttatttggcatggcttagttttgtaaatatagattgtcatctctagcagaagtaaattaatactaatacaactaattttatcttgacagaaagtgaaaaaatgtacatttttcttatgccttaaaattaaaaacaacttcttttctgtacctgatatccccaatggcaggtagagaaggaggtttgtctttgtccgacataaatggtggcacacaggatacgatctcgtctgattcttctgaatcgaaaacgaaaactgaatcatcttcatcttcatcttcatcttcaccttctgtttctaataatcatactaagtttgttgtggatttaagcgttgagccaaatgacacgtgcattaagccctcgcccgaccggattatcttatcctgtaaaaaggtcaccatttatcctgcaacaaaaccaattcctgctggaagcactctgtttaatcttagtgatgagaattgggttgctttctctgctccagaatcaacgagttaagataaaccagtttccgaaactctttaaggctatgtttgaaggttagattttggtaaggaaaatataaagaaaagaaagtgtggagaataagaaaaagaaaatcaaagttttatgtttggtatgaaaaattttattgagtcaaatattttttcattatctttttcttttctcatcgaaattcaactttggaagatagggtaaagcgggaagaatatgcaattgtaacattgatattctgtgtattttgataggttgaatgacacaatgctcattgtaactcaaaattatgttctttctgtttttcttctcaatattatgctggaagcagatttttgtatatacatacaaaaatacttctttgtataaaaaacggtttaagcaatattttaatggaaatttcaactaaatgtctagtaaggtttaagcaatcattcttccaatgagtgtgaagtctcttttcacacgagaaaatcaaaagaaagcgggaacaaacaactctattattcaaactagaaataagagaaataaaataacgatcgattatgtttatgaacttcgacattagagattgagataccatgaaacaaatggctattggggctgccccgaaatctcatagctgaggagaagaacatcgacaccctaacaaaggtcaaccgagccctttggtgtaccaccaaactccccattttcccattagaaactccatctccattagaaaaatggagagtttatcccattccattagttttgttatattaacctttatcggttatctcaaaacattttaacatttttaagaagttataagtggaaataaaaatatctttattggagatataaaactaaaataaattagtaactcaattatcatattgaaacctttaaaataataaaattagaattataattttgttaagagggaagtatgtaaggttatttactaatatatttaaaatgttttattggtggtcatattttcaaaatttcatcataatttttaaatattaatttaatgaagcttaaaatgtgtgaattataaaggtttgcatgtttattcccattttgcaggacaatacaacaaaattaaaatcttttatgtatacattccaggtaaataataaattcctaaaaattgaatattaaaattttaaaaaaaatgttacttttatttattaaattaataaatatttttgattgtacgtatagtatgtataccattggtaagcaag

SEQ ID NO: 382680 - DNA, 3821 bp, Cannabis indica
gcccactttgtttcagggccggtcctatttggtctgggtctggttcggtttggttctgtggtcgtgagtatcagttgggttttgtgagagttagagagagagggaacgagggccaagagaaacagggaaggtacgaggagggtattttgaggtttaattaattttagagtattaaatttctatacattttaatgtgacatattaaaagatcagggataatttttaaaaataaattgtccaatttctctttcacgtctactaaacgtgacaattacactccctagctagcttcctgtgcatccatatgaaaagactagcttgaattaatttataatgtttggtagggcaatgttcatgatatcgtgtgatatttatattaatatacatgatacgtaaacaactatacatgcagtgtaaattcctgattataaatgaaaaactgtagtgaaacttattttggtatataattgtagatagtgaaacttaatcaactcttttctttcacaagaggtagaggagtgttttaatagtaactaaaagagagagagagggggagaattcccattacataattgttggccattggcagttgttaattagtcatttcaagcatcaacttccacgtctctccaccactattcgtttcctaattacatttattattatccactccactaccactactctatattctcctcttttatataatttatactttatagcataaatatgcaaacaaacaaaaaaacaaatccaattattctacttgcatatatgatataatatgtgcataatgataatgtgacgtctaacacaaaaaacaaactcggataaataatgataaataattagtacttcatttcaatatatttaagcaccaaatttggtggttgcatacaataatggaactctctatatataaagtctaaacaaacaaatgaatcccaaccctccctttaatattttataactggaaaaggaaaaatacaataaaattaaaaatcctaatttatttttttttatactaaataaacagctcatcttcttgcgatttccagcaccactattattctgttttatattggtttccgtataaagacatgttaattggattttaatcgaattttgaaagagactctctccgcaagtgtgtggttagacattaattaattgaccggtgagctttttaaatcatgactcgaatccacgtcaccgatgcgaacctcatgaaccaaacaaagtgcggggtccacacgcggtgctacgatattgggcctagagttagatgggaccagaaaccttggaacctaatgctaatgggcctactacactaactaatgaagtgaaaaagttagaagaagggtttccacaactgccaaatagccaacgtgacactgattaatccagctaggccttgaaatcccaacacgtggggacgcgtggacggtgatccgttgatctcttcatcaagggctccttcgtaaatcatcgtgccggtaccgctgcctgcgccggcactatgcggtgatgggtttgcgttctccgtattctgcccttcttgtggttgtgacgctttttggctacaaaaacataataaaaaaaccaacgttcagtaaatttaccgttgaaaaaatatcacaacgtagcagtaataaagtaagaattaaaagactgacaaccagagaatctatactaaagccacaaaatccacgtgttggtatctgattagaataacgttaggctacacttaatttgaccgttacttaaagctgaaattactgattggaatttgtgctcatgaaaatatcaataaagtgataattaatgggtctggggatttgggtttttatttgggatttttgcatttttatgtcagattcagctcctgcatcggagaccaaaattgacaagtccaacgaaacaagcatgaaagccggcttatgtactatcctttattacatggtctaatttgggttagatttgttatgactaaattttattagaatttcactattgccatttatttaccattaaaacagcatctgaattatgaatttcattaaacagtatacatacaaaacaaaatatcgtaggaatttatgttgaatttcaatgcctgaaaaggctttgcgactctttttggtacaactcggtgtataattactagagtgccccagccctaaagagttaaatttaggaacggaacatcatatttaccataacagacttattttccatttaagttttgtttctaccgacgtgagaaaaagttaggctcaaagcaacacaagaacaaaaagtaagattatctcctacatattttcaccaacgctagtaaaaaagaaaaacaaaacaataatagaaaaaaagggtatttctgtaaatttacctggtggtaggggatggacagaaggtgatggtgtaactattaactgaggcgcatgtgaatgtgctggacttatcgtcgtaagcatagctgtaagcgcgtggacacgcattcttaaatatctcagagtacgaagacggtttgcaagtatcgggtgtaccatacgcgccgctacaacagtactgaggttcccgaaaggcctcgcacgcgcttctgcaagcgacgccggcaccaccatcgacgccggtgaccttgagctccgaagggcaagcgtcgttgaggtcagctctgcaaccggtgttggtacaattctgaccggtaccgccctgaggagtgaacatcatagggatgttgtatccatcgaccaagctcacgtcgtagaaatcgagtccaccgtggccgtcgagggtgatctctgccagcgtggcaggtggggttgccccactcccggcgcattccaccttaccggagccacaatcccctgttacgcaagagaatttaccggtggtggaatcctgggtgcaatgggtcctcccccaaaatcggcctccccatgaggttggggccgttagggtcttggactcacccttttggagaacgaaaccagttgtcggaagtggcgaaacgccggcgtttgacaaaatgcctggccatactgtgtaatcgcagttgtttaatattgtgaaacttgttgagaccacacctgtaattaacggtcattaatttcatgaaaacaaataataataataataataatgatgatgatgttttgttgttaaaattgttacctgatatgaacaactgaattgttaataacacaaataaattaacgaataatgttgtcctttgagccattattatttatagctgaaagagtactgaaactgaagaaaaacaaataaataaggatatgagaagattggtgaatctctcaatgtactctaattatcttctcttcttcttattttgttttctctactggattgtaagtgtttgagagattattagagaacagagagatgagattctaaagagcaagaggggaaagtattagtatttataatgaaatgaaacacagggttgcaattgcaatttgctgttgtaggactaggattgtataggtatatgggacccaccaccatctaagtaaaaaaattctgaccagaccagggttatttatagatgtgttaaaattaataataataacaacaaacaaaagaaacggtcactttggaagttggaaggcatttctttgcttaaacgccatgatatacaaattgctgataattacaatattataacttggaaaatttgtagtactttcgtggaatatttgagccccgtatacatatattattgggtgattctacaatgcacttccttaaaatgaatgtactgatacatttttatttgaaaaatttagaataatttacaa

SEQ ID NO: 382681 - DNA, 1636 bp, Cannabis indica
aggtgattggtagagtgaactgccgtaatgggccgtccccgggatgggtccactcattcccggtgacggaacactacgtagtggtacccgagatgccactgaggtattgtgctcagaatctactcaaggctgagccaacacctttgtacaagtttcaatggcatcctgaatctaaagccttcatgcatgtgatgtgcaagagcagtggcaaaattgtaattttacataaaaaaaattattcctctttcttttttattatgatcaaatacatatatatttatatactaattaatgaattatttatataaataaaggtggcgagtgtggaggtgccactattcataacatttcatttcataaatgcttatgaagagaaagatgaagaaggaagagttagggcaatagttgcagattgttgtgagcataatgctgataccacaattcttgataaacttactcttcataatcttcgctcttataacggccaacatgatgttttaccagatgccaggtatataatctgtcgaaactactagaattcaaacagtttattattaacttgcttctacaggttgataaattttaatcatataattatatatgtttttatgtatgtttatgtgcaataagctataattttgattggacactaaataatttataattttctaaaataactataatgaacaccattcaaaaaaattaaaattaaaattttttatgtatttaagtcaaaagagatacaatattaatgcattcattttaagaatccaaccaaataatttactttttgatttatttatttttcatatcatttcataatgtcattttaaaaaataatttttttttttgtcaaaacaattatatgtatgtgtatagaggcggacccaaatagaagtgagatatagggcaatcgcccactaaaaaaattgaaaaaaaaaataaatccatttaattagttaccacatatatttataacaaaatataatatttatagacataatatttattttggtataatagttaatctagattgcataatgaaaaaatcacaccaagattatttatttatttaagtttatttttgtccttgctttaaaaaaattatgccccttaactttaaatcctctgatgtgtagtaagaaaactctctattatacactctttcacacttttcttcagcaactctctattatacactctttcacacttttcttcagcaagacatatgtaattaaacacacattgttattcattaacatgatctcatgattgaatagttgattaataattaattaagatgtacttgattaattaattagcatgagtaatttcagagtgggtaggttcagaattccattggatgggagtccatatgggaagcttgaagcagcattagatgccaatgaacatgggagaggcatggatatgtgtagcataaatccatcttacttaggccaaaaatacagatatgcttatgcttgtggtgctcaacgcccatgcaacttccccaacaccattactaaggtacataattgatgataacaaacaaattaatactatatattaattaccacaaaaaaaaagtgtacaattactaaataattaatatttgaattgcagattgatttagtag

SEQ ID NO: 382682 - DNA, 4453 bp, Cannabis indica
gagaaagaaagagagagaaagagtcttgtttaaacttattatcatttctttacaaaatcctcttttatttatattctaactaagataaatccgaatgaaatcttaggtaaagactctagaactcccactaaatccaaatacatgtaaattataagataaaataaccaatttgccatttacttcactaagaagtaatctaataaattagaagtaaaatagtccaaaatcataaccttgattaatcttgacattccaaatgtctaattatcttgtcccgctaattttaagatattcaatcgtatctaaataactctaatggctaaatcgtagtattccactattactgagcataagatatgaaaaaaaaaaaaatcatatataacatatataatacacataaaattcaataaaatctccgtaattaaaaattaaaagaaccctattttataatgctaatacttgttttagatgtagtcaaaaaaaatgtggttttgtttttttttttttaaacaaatgtggttttgtattattgttagtggaattaactccttaatttgtgctgaataattttatgtttaattagttcgatattttatttagattgagatttgagattttaaggaaaattttaaaatacatctcttaaaagaaatttattgatgcacccattcaacatttttaggacattttgcaaaaattatgagaaattaaaaaaaaaataacacgctaaaaatagagttcaaatttcttttcatatgcatataaaataaaagaattacgcatgcaactgactgaacactactttaaacgttttaatttttctgaattattcaaaattttacagtgtactaaataactataatgtaaataattatgaaaaaaaaaatatgtcaaatattgaaatagatagaaatatttcagtggacccgtgcactataaaagcactctatataaggcaaaaaaaagtaagttaagtacaaacataaccaggatttgtcccaatcacaaagaagacaaaatccaaaaacaaacaacaccatttcatatctatgtgctatattccacaccttttttttcaacacaaaattttgaatgccaatggtaattgagaattttctctgttacaattcggtcttgatacaacctgtgaaggtggatactagaggctgccataaaatattattaatacactcttaacaaatataatttattttttcacagcaaaaaacaacataatttttttaattcaacaaatatattatctgaaattgatattatcttttatttctagattataaatatagcatatgataccttatcagtataagtcaatgcagaaacaattttctgcactaaattttttctctaaattgacaatggctccactaatgagccccaacagattggcatattccacatgccttatgaaggtccagaacaagaacaagattgatctctcttaccaaaacattatcacttatcacaatgaaaaaattgatcccgagctctataaaagacatctaattcatactagtaaataagctcacacctattgacatgtttatggacacactctaccatcccgggtgagacaagtaccatcaagcactttttagtctgcccctggttagcaacagatactttcttattgcaagtatgagaacccatgtagttttggtaatcttttccttgatcatcaaaagcaatgcagaactcaaaactgtcttcaggatctgagcctgcaatcccttgaaaaagccagatatcccttccgatttccaaatggcaaggaaaactgcaggtagtgttttttgcgacttaggtcggggcttactagcaccaccatcatcgtcgtcatctggatctgcagcttgtatcatcactttacacctgtagccagtagacattttaattacatccataatcatgtttatgagtagtaactatcacagtttgagagaacactaatgcacctgattgcaggatatgtgagaaaggtagcaacactcttggagattgcacctaccagaaatgctgaaaatgcagaaagagcttcaggagatgaacccttgtcccgtttatccagcttttcccccagatgtctttgttttagttgatcaaaaactgtatactgaagataaattatgaatcaatatccaatctccacctagtttctctttgattaaatagtgttaagttatagatgacacatgaaaatactaaaaccttgaaagttgaattaaataatctactgaattcttatcttctaagcttgaagaatgctagaaacaacacacctgaatagcagggttcgaagtcagtaacagggagattccaagtccatcaaatgcatcactccaagttccctctgtaagcgtcttccacagtcctttggattttccaaagctagttgtttgcatccttgaggcagctgtatccaagggctacacagaagtaaatggtaagttgaagagtcttaacacattcatagaaaaaagagtagagtcacaatcaactggcaacaacacaatggagtatcacctaacactcgaaaggatgatcatacaggaccacataaaacatagcatgccaaactacatcaatgccaaatcacaattttcattcctttcaaattctaataccaggtaatcaagtaactgcaaaacttgccactcttaatcttaacacagtgccagaacacatgacagcataaagtttgtgaatggcaaacgacaaacattcatcatcataatgagtaatgacaatagtaagccttctcacctgtgtgacaatcgctgtacaagccccagcagctgcagccaaaagcaggtttgccttagttccaatctttatggcaccactctttttcagatacaatcttttgaagtagctgtatccataaaagtaaacgaattgtgcaatgaaggactgcaagtttttagtccccagaccttgatacaacgaaaggacctgccggttagatatggcttcccacaacacatcagaaaggttcctacacaacccagaacaacttcagagtcagtataagcaagaattcaaacacaaaaagccatttgaagattacccttttgcaattagataccttaattgttaataaagtattagtagtagtgatcttgattcctaaggccttcttcacctatcaaccaaattggttccctaaatattataactaaacttcttgacaataatgaattgacacaacaaccaactaccaagtctctcaaaagtcaagccatttttattattaataaaaaaaaaatacccacaaattttaattctactgttacgatacaaatcaaagagaaattgtgtcctgtgaaccaattaatccacatataaaaattcttgagacccagttcgatggacttttgactcggatcaaggacaacagatagaaatatatatctgaattctaaagagagagacagagagaaggggacctgtattttcggcgaccatgagctccaacctcggcttggtatctggttttgcaggtgtcgagtgggtataagagggtggtgctcacaagtgatcctatggcacccgaggtcgcctctgatatcgattccaaatcaatactactcatcatcttcaattctatcgaaacacttttcctttctagaatcgagatgttatatttttctacacgtacactatcttgtatacaaatatataaatatatatatatatattatatatgagagagagagggagagagggggtgatttactagagagatacgtcagatgttgtttggtataaaaagaagtggaatggaaaggaaatttgatgagagaagagaagagaaaatgaaaacgactcgtttcgtttcgtgggaactgggaagaccagaccaatggattggcgttttcttgggatttgaaaaacgtgaaaagctttctcaccgtccagatcaactcttctcccactttcctcgtctttcgtccgcgcgggtcccatctctcaaactctatcaaataaaaattagaatcccaataaattaataaaatggcatacatagaaaaaaaaaaatgtgtaataaaattgtttgtgaacaaattttatcttgctaataaatgataggtaaccagaatctttaaattcagtaaattatcaatttgattaaaataaaacattattaagtagttattttataaggtatatttaaattatcatttaaaatacattggcacacaaatttcacacatacatcgcaggctttgttagcatctttttaaaaacttttaataatattatttctacccctaatgtttttttattcttttaaagtattaaattagagtaaaattttcgtacaaaatactactataatatgggaattccttgtttataaaattcttttacaacacgttacaaaaccgctattataaccacgtcaaaaaaaaaaaaaaaaaccgaaaccgactta

SEQ ID NO: 382683 - DNA, 1682 bp, Cannabis indica
catcttgcattcgccagctttgggttacttgcaaaattttccattcacaaacactagcatgcgcatatataaaaagtaacccaacatatcatataatgttattagtatagtagccatgcatcaatgttttaattttaaaaaaggtcaccatgcggtgagtatatatgtaaaatatatgtattaaaatatactgtttttattaaaataacgtaaggttgaagtttaaataaatgtgattactttttaactgaggatcttaaatcatattttaggtgcacatgtattattactctttggttttttttttttttctcagtagtgtacgtatcatatgcatgcatggagtaatttctttggtaaaaaataaaacaattacttacaagctttggctggatcatctattgctacgcaaaagtcttggagagggcttggatcataggcagaagcaaaagagattgctaaagccaatatagccagagtgagaagaaaactagttcctttcatatcttttaatgtatatgtatatagcaaacctgtctaattaatatgattgggatgagaaattatagcaggagaaaagatgtatttatagatgatttagtatgaagaattattcttattactcatcaactactgaccacgataaggataatttagtcgatagttagtgatcagtgggttattgacgacgttataagtatatattaatataaatttcaagtgtaaataccattattcgagcccactaaaccttagatatatttatttaagttcctcatatttgtttctagcaatgaactaacatggaagtggtcattagtttttaatatatatttctaatcacagcgtgtcaaaattctcttctttttttatttattatcgtgctattgtttatctagttgctgtatcatcagatttccacatatatgacttaatatatatatatatatacatatattatatatattacttaggtatttcgtacatataaacatgcgaaaattatatatgcatgtatttgtttatttttttttttcaagtcaatttgccaaaattccactatgtagtggtgtcctaatagaaaaagattcacttgtagatttttgcttggttaacttatgtataaggcccgagtgcgagtgatttgatgattgattaatccgaacaaataatttaatagagcttcgacttccctacagtgattcttcgactaatcatttagctgtttgaattatgtataaatatatgatgtatatatatactttctttctaatatataatgtcaagaccccagttctaggcatgacaaatatgtattatctataatttgggtagttaaaagtcacactttaactcaagaagataattaaaacttataaatgatcttttaatttatattacaaaagactaatttaaaaataatagattaactcttatattaataagagaattttagtaacaaaattaagaccactcatcaatataaaagaacaataatatctccacagttatgtagtcaccgaatagatagatttaataagtcaataaaatataccaaaataatacctagcatccatcattcctcatttctaattagtacatagctaatttaagtcatttagaccatccatttcagcttaaatacaaaattagtttaatagaaagattaaagagtagaataa

SEQ ID NO: 382684 - DNA, 3025 bp, Cannabis indica
aacaaggatgcttttgacaatttgctaattgtctaaaaacatttttcagccatatataatgaaaaaaaaaaagaaaaattggcttaatttaagtttgtgttttaggtgaaagtttacttgagattgctgtgatatgtttaggaaggcatgttaggtacaacattaaattctttttggtcaaatttacaattaaatccattttccaactttttgtttttggttttgtctctttagattatatttcattcatactcacatgatacactcacatcaaaattcacacgtagacttgtgaaggagtgactgaaacagtaagaagactaggattgattgcaaactaacaactgcctagaattaaacttgctttttgccaatcctcaccgtccaagtgcaaccctttgactgggatgttgaagaagtcattaggttgatatagtagaagtttcattcttttctttttagcattgtttttttatatatatatatatatgtgtgtgttttcatgtttagtcattgagggaaatcattgtggaaatgaaatggttttaagctattctttgcttgtaaagtaaatgggaaaaagaagaaagttggggggaaggtaaatgaataacaaagaaagatgctgacaggggaaaattaaagaaaaagtaaaagagccttgatatttacatcccaccagattgagatcttcaatttcatgtatattcacatgagcagtgtgtgtacatatatacatatataaatatattatctttcttgtaaaagaattatggaaatggtatctgggtttcttctagaattaatcatagctgcatcaaaaatagattttgacacatttagaatgggaaaaaaattaaaagaaggcatgctaaagaatggttaaactatcaatagtagtgagattaagagtgatttttttcatgtgagaactattaagttaacatgcatttacttaagcacaagtaaactagatcatttttttctttttgaagtccatataaaagtaaaatattctttttctagctatttagctaggagtctctttagttcagctttaaattttctaggacccatgtctttagttcttccttacccgaattccctatagccaggggaaccttagagagtgataggtgttacaacttttcatgactcaacatatttatattataatattttttttaagaaggttgcacatctcattacattgagggctgcactttcaataatatatatacatatatattataagaatatattgccaaaaaaggagggaaggcttgaaagaaggataaaatgtcaagtacatcttccctgaagattctatgtatggcccaaggctaaagtaatcaatcaatgaatgcatactgctactaataaaatgatcaactgagttgatctgatctggtctctcatttttccactggctatgaaatatcccattaaactatttttattttgttgtccttataataaggtcaaataatggttaaattaaatcttgtggagttaagcaaaatatttatgggtacacgtcttgtattgtgtcaaataccaaccaactgactaaagttgacaaatcagtagagtaatgaagctacattaccagcaatggctactattttaataatacaatacagttgacttgattatgacagttgatttctttgtgttactgtgtggggacttaatttaagacacttgacattattgggtttaggccctataaatgggaacttggtatacacaaggatggccatccaattcctgtaaaatatctcatcagtattgtacattcctctcttttcatcagttaatttacttcatttatatggagagatttgaaggagaaacatctttgacttcattcgttttttgagtatattacttgtgaaattcatttacactttaaacacattaccaaggaaattatgcagagaaaacaaggacaaattttttatacatataaaatataaaatacaaactaaaactcatatactcaattatgactcaagtgtctctttcatcacttttacctcagatctctacatatctcatgacctttactacttacattacatttatcttctcacaaactcatcaaataactaatgccgtcatatatttacgcaacatataactttgtcaactaaacttctcttttgcacaaactagcaattatcaaaatcatttgaaattgtttggtaatccgaacaataaccgctctggctgtcaaatgattgtatttaacatagaccaatttacacataaaggtatctagggttagtttggtacttataataaattagtaaactactatatttggagtataggttgtattgtattaaatattacggtacttaattttaatacaacccacaacgtattatggaatacataagaaaataattgtatgagcctgtattgtaatatttatgagcttgggttgtattgtggtaaagtcggagttggggtttggggacaacgtcgaactcgaggttggggttcggggctagggttgggattcagggtttggggccggggtcggggccggggtcgaggctggggtcagggtcatcagggttacggttaggattcgggttcgagttcgaggtcgaagtcgggatccagggttgggctttgaggttcgaggtccgtggttgggtccaaaatttgaggtccgatgtcaaggttcgtgttagaatagtatgccttagaaatatgacacctaagcaaccagtttttcactaattttagaagttagttaatctagttagttagagtaggctaactcatgtagcatactcgagattattagctataaatacccatatacttgtaataagttttctgctctctaactttgtaattcagagaaaagcaaataaataaagtgttcatttattttaattttaagttcttacgtgtgttcaatagacattgtagtttttttttgtgctttgaagattgttcttgtttatgttgtgaacctactggtgtgtgagattgagtcttgaatctc

SEQ ID NO: 382685 - DNA, 2192 bp, Cannabis indica
agaagcatctactttttgataactgttaatcccaaaaattgggatctttaatttttgagattattcggtgaagggaagaatgactcgtgatggtgtgccaaattggaatgcacgcccgaggtccacccctcaaaaatagttcttccaatgtcagggctcatccgcatcgttacaagaataaccctgaggggtcccgttgagatagtataggtgtggctagccgtgtggcgagatgcatgcaagcggtgtggtaaaatgcatgcgagctatgtgatggcgagacgtgatggggaaggcgtgtgagaggtgggggctcgcgtgctagcccatgggagctcacacgcgagctgtgagtgctagtagcttgatgatgtgatggggcaggcatgcgagatgtgggcatgcgagacgtgggggcttgcacacgagctatgtgggctagaggtgtgcaagatgtgggcgtgcgagacgtgggcctgcgagacctggggtgcgagacatgggcatgcgagctgtgtgggatgaaggtgtggcgagatgtgagttggagtagggggcatgcgagtgatgagtgggaagtgtgcaagaggggtagtgacgagctgtgagtacactttggagggatgcaagtgtaggaaaagaagtgagggcatatggataacggtgaagttgagtgagaactccggggacacggcatgcaaaggaagcaatatgtccacgccttctaaaacctctgaacacaggggagtacaagtagagacaacaacggaccagcttgctctaaggactcgaccataggtacaccatgaccggtcacctaaggcatgcaagtggggactcccatacctgaaataggggaccatgtaccagtagcttaaaaccgcgcgtctgcaattcaggaccacacacctgcagcttgggatcaccctccagtagttgaggaccactcatctgcaatccagaagcacaggcctccagttggggaccacctgacaccacacaagagtacgaggcacaaggccactccaagcacctgcaacccacaactcgaatgtgatgtgttgataccatttcaccatgttgtaccctttgccactactgcctataagtacccccatttcaaatgtgagggtggttggaagttgattatttgtaactgataaagaaaaggcaatggagagcattaaccattcatgtcacttcttctcttgatctcatcttttaatagttacacattttctgaccactaacttggttgacgagttctaactgccaacagtttggcagcgtatgtgagaacgacaaacttaggaaaagtcgtttctatattatcaataatttcaacaatgcctagacgctcacatcgccttcgagacattgaaatccattttgacaacaatcagctggtacctataaggaggaatgagcctgcccctgtcgtcgaggaagaggcaaccataaatcacgggtctcagtagctcaagggaggtagggacatcctaggctctcaagcagcacaagaaagcaccgccatgaacaagcccccatcggtgaccagtacgatggagcgacaacctccataaccactgccagagaaggtgtgatgtagggacgaagggttcattgaattagacatcctctaccctttacaccaaaggacttaggtacgttgcgtcctagggcagggaaggagatgcgagtctactcagtcacgtcaagctcccgcacccgcatgcataacgacgagatgaataagtaaaagataaacaacttgaggttagaggacaccgtggaaaacatgcagaaggtgttggacaagctcttgaagggacattccgatgcacctttattccaacaaaggagaaagataaaggactatcaaagtattttaccagtaacacactggaagcatcaccatcaaaggcgaggcccaggaaggacttggagccatctctccatcttggaaattattttacaaggatcttagatctactcacaagtacgttgattaacaccctaaatataaactttctaaaacgataaaataaacacatataaagtttagtaaaccttacattgggtgcagcggaatataatgactttttccgttaagatatctagccctcgattcctttctgtagcagagcattatcaatatctgaaccgggatctctttctctgattctttagtg

SEQ ID NO: 382686 - DNA, 3170 bp, Cannabis indica
cattaatcaacaagcaaacatacaaacaccaattctctcttagggatcactaacttgatttcctccactatgagcattgccatttttgaaaaactctcatacatacacttattttgattgatccaaatattatagacagtggcaacaaccactgctataacaatgttcacaaacaaaccctctctcgtacgattcagtcgcactttctagctagagtattcatcgggcaaagccttgaaaccaagccaagtgaacaacatattagaaacaagattggacaaaggacaagaaaataacgaatgctcagagaatcctgcattgtttgacaaacgagacataacaaagaaggtaagttcagattaagccaagctaaaaggtctcttgtgaggagctgaccatatttatgacctgccaaatcacaactctatgttcagggaggctaaatctgctccagacattcgtatgataagtcatttgggcttaagctagggtactattataaagctttgaggccctgaatcttccctgaacctcagcagccatgatagtagccttgatagacactttcatcaaattacacaacttcttccagtaccagctagagtctggctttaattgatgatcccagaagtccccctgctgcaaatagatagagcctatccacttaacccaaaccatatttgtcttttttgttaaggcccaaaccatagctcgattccagaccgaccctttcctgaagccaatacctccgtaaatcttaggaaggaaaactttgtcttaattgacaaagtaaagtttagacatctgaccattagagccccaaagaaaacgtttgcacaatttctccagtttcttagtcacactttgaggtaagacaaaaatactcattcaataatttttgagcccaagtaaaatagtgtgaatcaattgcactcttcctgcaaaagagaggtgcctaaaagcctagttgtgcaacttgagcttgatatttctaatgatgatatcacatcatccattctccattttgttggtcgcatagggactccaagataattaagaggaaagctaccctctccaaactgaatgtcgctaagaataagagctctatcctcttttgaaactcctccaaagtacacttgagttttattcatgctgtcctaaaatcctgacataaggctaaactcatctaaagccctttttaaaactgaagtagcttctcttgaccctttacagaaaagggtcaaatcatctgcaaaacacagagttatgatcttaagtcttttacacatagggtggaacttaaaacctttagagcaagaagctttttggagatgcattgtaaaatattccatcattagcacaatcaagaggggagaggtagggtcctcttgacttagacctttcttccttctgaaacaatccctaaatcctaccattcatagtcagagagtaagcaagtcatagtctattttatgaatctagaagggaagaagagagctatcaagagatattctaacaacaaccaactaacaatgtcataagccttgttgagatcaattttaatggcacatctaggggaggcatttttcctactataatgattaagtcctgaaacatcattatgttatgagctgtagctctacctttaatgaaagctccttggttctaaccctttaataatctcagacatagaagtttagaaatgcatttataaagtgtggagaagcaagttattagtttgtattctacatctttatttggactatcctttttagggatcgaagagatagaagttggatgaagatcttgaggcaattgacctgtcttaaagaagtcccagatagcaatacaaatttccttaccaatttttggctaaatatctttgaagaaagttgaaccataaccatcagggcctgaactcttatggttcaagatgcttaaaaatgccttttttattttctttgtagagaaaggcttcagtaagtagagctaattttacaaagacaatttagcaccataatccgcactttccaagttaaagctggccttagcaagctactacttcccatataccccttaaaatgattgagaaagtgagagactacctttgaataatcatcaacaatttctccctgctcattgatgaaactggctatacgattttcctctctcattttcttaacactggcatggaaataggaggttttctcatcttcatatttaagtcagcttagcttactcttatgcacaaggaaactgtgatacatcttatcctaataatcatactctttgtttgcctccttcccagcttgttgatagctgacatctttgggatgtttctaacaaattgagctttgcttcctaaaattctctcttggcttttagaaattctactccacatctccaacagttttggagttgaaagttctcaaagtaagctttaatctgagcagcttaaaaaacacctttcgatcccctataatgcataggcctcctctaactttccataaccacttccttaaaattcgcatgcttagactagaagttgaaaaacctaaatggcttgatacccaaaattttgatattagtggccttcactagacagtagcaatggtcagaggttgtttcccattgaaaaatggctttagaattaggatcatccaaccagtcatcatttttgagaacatgatcaattcgagaatatattctggcttgaccatcctagttgttagtccaagtataatatgagtcaaaactttttagtttatctgccaatccgagagccaaccagtttttgagaaatcattaatatcggttggagaaacactttggcccccttctctattgtttagattaaaaggagcattaaaatcactaaataaaaaccagagttttaatgaaaaggtaagagtagtcaaaccctatcataactttttcctaaactcaatcgaattttgcccataaacaaagttgatgcataaagcctccttttgccctgcgatcttggcatagcagtgcaaaagtcataatttattatgattaaatataattttagtcacaatatttgttgtgactaaaattaaattaatgacaatttgatatttaaatactatgttttagttacaagtaattttttatgactaaaagttacatttagctaaaaaaaatta

SEQ ID NO: 382687 - DNA, 5529 bp, Cannabis indica
gaagaagaataataatattccaatgaatttttacgaactaataataaagctggagtaattgaaaaaaaattataaggctggaacattgggtgacttcaccgtgatgccatatatatgtaagaattatatatcaggaaataattcatctcaaacatgctctaattttggggaatagctaaacagagttgtgtagagtacataccaactattattagttcataaaatttataactgaattttataagtcgcaacaaaattgtgtgggaatgccttaaatattatgataatcatgtcaattttgttagaagcaagagtcacgaatattgcattgtactataaaatttataagagttatttttggtttttctttgtggggatatcataaatacttgaaaatgataaaaaagtgcaatattttaaatatttttatggattattttttatttttacaaagatatattactatattatattatattgctgcatgaaaataatattgttttttttttcagaaaaatataagtaaaataaaaggcaaaaaaaatatcagtaaaaatgtcaaaaaaaaaaaacaaaaaagaatctgtaaaaaagtttaaatgttatggtcttgttcgttcgaatttcaattgagattacatttgaaactaaacacgtaatcttggtcttgggtttcatggtagaagaaccgagaaacgaaacgatattatgcgaaacaaaaacatatatgataaaacgacagccatataatgaaaacggcaataaaaatttgattcccacacacatatccataaaacgacagtaattacaccacagacggaacaatctttattaaaacagcactggatggaagaaacgacagaattcacaaagaaacggcagtagccaagaaaacgagaaaaggaatacgacgtatacgtaaattgttgcaattttcaagattattctccttattattatgtacacagaaatctcatgataggcctgtattatattgaaacagagtattagtggtaagaaagtaggtaagtagtaggcaagaggcttatatcgatcatcctaaaacgacgtcgtcgtagtagtagtagtcaggtggtatgaaacgacgtcgtcatcgcagtatagtagtagtagtagtaaacgtaaacagctgactaattaattaagatcctgagacgacgtcgtagcatcagttttggagtcgagaataatgagcttggtgcccatttgggaaatgagaaaagcttcaacggtggcatacttaattaggtcttcggaatggaatcgtggtggtcgattaaagttgtcagagactgaccaccaacgaatgttggtgggtttcacaatgttcatctcttttcccaaaaccactttcgccagcttcgctataccaaatcggctaaagtttcttttcatcatcatcaccttcttcgtcatgatcttctttccattatcatgaccgctagtactaccctgaatatctgccttttgggccttggtttgggcctgggcctgggccgccaaatctcgcagttcaaccactttaggcatgaaccaaccgtgatcctcctccaaccgcctcgccacattctctatacccactccgaccaccgtcacgcggctgtcgtgaagcaaatccttcagcacttttgggttgaatttttggccaatgctatctaatttgtagataaggcattgatcttcaatgcaaatctgtaacagctcgtacggttggtctttgtgatctaacacacacacacagtattaaaactaaacttaattagttcttgatgaattttgatcgatcatgattgataatatatacaaaaaagataggtataggtacctttcttgttgtagattagagtattgaagtttccattggggtagttaagactgcgatcggcggagagagcaaggatgatgcgacgtcgtttacggaaaagcttttggatgtatgaaacccatttcttggcgtcgtcttcgatctcagcccagacggtgtgaacagtgaataataatattcggccaccgcccagtatgggtggccatgttgagaatatttgaacgacaaagttaaacaaatcgtttgggaaagtgcgtctgatgcttacttccatggcaacagctacaccttgattatgatgatctcctcttcttgatctttccatggcattgactaattgttccatctctgatgatcttcttttaatgcttccttccacggcttcttcaatttttctcatcatgatcacgcttacttccatggctcaatcttttcttctctctcgtacgtttttgattcttttcgttaaggaattgttgacagttgatattagggagtgtccttatatacatatatatatatatatatatatttatagattgtcatgtaagaagagcgaggcccgtgttgagcgaaaaatccggaatcagttaagctgctgttgagttattgtaacagaaaataataaagaatttgttttcatataatcacgtacaaagagatgttttctttttctttttagtcaattttattattattattattattttatccggtaataataataagtttaaaagaaaaaaatagagtgacttgacttctcacttgaggaggtaagattgagatagctaaaagctagtttagaagtacgtgatatcgtacccttaatgaataaaacatatttaaaagcaattaattatataattattacctaatatttgggtgctcggtttatatagacaatttatgtaattaattaataaagataggaaaattgagtttgtatagttaaggacaaactatacaaagaagaggtctgctctcccatgtaaaaaataataatgtaattgccattgatgttacttgttaggtgggataatttagaaaaaaaaattgatttttcaaggaaaacataagcaccgtgttgcttttttattattttttttatttttatttttgatcttattagataatttgtcattaaattatataaaaaatagaaagacgtgggtcataacaagcaacgttactccctgcatgcataattgtagatacctattgggacactatgattaaaaaaaagtacttcaaattatattatactaaattataattatctttctcttagtatcaaaaatacccctttatttttttaaaattataattatctttctcttaatatcaaaaataccccttattatctctcattctctccttcacgtttccctctctctcatcctctcactacccaagctcacagtagaagccgaaaaagaaattgttttatttatgatgtaatagcatactatctatgtattaatgatcgtctgtagaggagttgctgaaaagttatagggtccggagggattctgcaattggttctcccaatgtattgcaacatcatcgctcaatatttgtcttaatgaaggttgactggaaaatgtagtattcgtcgggggagtcctctttcccatttatcttcatttaggcggccgaaatctattttagattgttggaggaggtgttggacagtggtagaatcaaagggattcaactgagtagggatgcaaagattatctcatattctttccagatgatcttatccttgtaggaagaactaatattgaggaagtccgtaacttttgaaattgtttgaaaaaattttgttcttggtcggaacaaaaagtcaacaagcttaaaatgttaattttttttagcaagaacacgacttaaaaaatcaaaagagttattaaagatattctaggcatagacagtcagtcaaaaggatgttgatttcaattttatcttaacgaacctatcctccaagctccaaggttggaaagtaaaaaccctttccaaagcgagtcgtgccaagcttattaaatcggttggtgtgtcccacccaatttatactacaaaactttttcaatggctgacgaccaaaagtgatggcatggtccagaattttcaatgaggaagtcagaaaggaacagtggtttatgccttaaaagtgtggggtaaaatttgtctctcttagtctcaaggggttaggttttcaaaaaactatgtagatgaatcaagcctttctagcaaaagttatatgaaatgctgactatatgctactctataataaacaaaaataaaaatttattttaatatgcaaaaataaactcataagtttattagcatataagatatggtgagctatataaaaaagttattgttatataaatacgaacataataatttatttttgtcaatttattatggtgttgatgttggtaggctatatacaatggtagactcatgtttaaagcttttggtcttgggcttattaattattgaagtgataagaagaacgatagagatgaatcatgcatcgatgatgataatgacgattcagtaattgccgatcacaatgcgaaatgtaaagttgctttttgtttcaaaattttaccaccttgttgtgtcgactgtttggttgatttgttgcttcgtggttgaagttgtaatttttggtcacgattgaagttttaaatttttattggtttgaatggaatttttcgacaaaattttggatcaattttttgaaagtattgattgagttattcctttatccagcaatgattctttctctaatttttcaggtattgttggtagtttgaggaacaattttggtgctgaactcatgatcgatcctatgttgtttgtggatgaagtttttcttttaaacgttagtggagttttttggtgaaaaatgggtttcaatttgtgatttattgttttacgagaagtaaatttataagtttccattttggtttgtttttcacattcaaagtctcgttgtcataattaatggaggagatggcgcgttcttggtgcaaagtggccaattttcatttttgattctagtaagtaattttttttatattacagtatatggtgcttacaagtcacgttataatatcttatttaattgatgaaagttatttatattattaaaatatatactacgtatatacataaaaaaaaaaaaaattgagtactaattatagcttcctattacaacctctcagtcaatcttcatgacagaaatcacatgtcgaaatatttttattatagcagtatccgttataattatagtatcatcgaatagtttacaatactaaaaacagagttcttgatatttcaatttaccacgcagttcaaaaaatttcgaatgtatttttagcactataaattattcaaaaaaaatttaaaaatttatagggagatattttaagcttaatgaataccgctaaaaaaattgaaaagagtaatttgcggcaaaatcccccaactatcaatttacttgcaaaaaatcatccaacttcatattttggtgggaaaaccctccaaagtacttttctgtttacatttttaaggtgtcgtctgtccagcctcattaagtcctaattttgcacacgtggcaatgacaggtcactaaaaaattatcctacgtggtcatattttacaaaataaaa

SEQ ID NO: 382688 - DNA, 2091 bp, Cannabis indica
attaattttttttttataatcgaatacgttatagatattaaagataattatttttttcaaaaaaattagtattttattgtactaaaaataaaatttaaatattttatcaatttaaaatttatttttagcacggtatattattttgaatttttctagaacaacagatcaaaatacttaaataaataggagtgtctactaaaataccttctaagaattttactacatatttttccaattattattaattaatgaaaagaaaggctgataattttgaaagttcttctcagagcctttctctattattggagccataaaaatatataaatttaaacataaattatactggcaaaagggtagggggcatgtggggaaatttatcccttataattttttacaatataaattttgtatataaatcattatatattttatattttgatctaataaaaattaatatttttatctatgtacttatatatttttaaatttattcccataaattttatatatttttatgtcatatattttttatttgtatcattcttataaaatttatattttttatttttattttcacaaaatttatattatccccattaaaatattaagctaactcctctactattaaagtccgtaccattatctcttcagtactataaagagataattacataaggtattattttttgtaaaaattacattttttatatttataaaatttattttatatttttacgattttccataaaaacaacagaaaaatatgaaactacataaaaacatgaaaataacatttaaattataacatcaaaacaacattaaaaaataacatacagataacaataaattaacaaaagtacaacataaaaaaactgtattttctgtaaataataatcaattaattggtcaaatgctatgtgttttatatttactttaatttggcatgcgttctaaatttttaaagttgttaattaaaaaaatgagattaattattgttgatcacatgttaattaactaaaggtaaaatttagttattataagtaataatttagtatgagagaaagatataataagacagagtggtgcttcttttaatattttaattattcttttaaagtgaatattattctttattaatctcttatttagactaaatggtcatcaagtcaaaacttgataattaattacttttttaatggaatattattctttaatttaaactaaattaatggtcaagtgaaagtacttgtttgtcacttgatcataattagtcactattttaaaaaaatacaaaaaaaaaataatgagattaatattccttatcattataataataaactaattaatagcatgggcagaaatacatgcacaacatatattaaataattttttgatttattaagattttatcttatgattaccactattaattatattaccatttataattaaatatatatataaatatattagtccttcaattattattaggataatattattttggactttgtattttacaaaagttactaattggactttttattttgttaaataataaatggaccttatattttttaaaatggtaaaaataagactataaactcaatttttaataattttattttttaatataaccaactttaagataatttctaacacgaacagatacaaaaaatgtaaccaattttgtcataaaatttttagatcatattattattaagttttattttgacaaaaaatcagttcaaggtcctatttgtacaaatttaaaaaatacagggtctattttatcatttaacaaaacggagggtctaattgataacttttacaaaacacaagatctaaaatggtattttcccttattattactataaaattttgctttttaaaaattaaaaaaaatagaaaattaataaacaaaaaaaccccatttaaattaaatttaaaattacaaactattaaaaattactgataaaaacaaaactatattaaaagttgaagaaatttttgtagtaactcgtaaatcttttatcttatttagcatccaaaaattttaaataagatttaaacagttatctactatgtgta

SEQ ID NO: 382689 - DNA, 2622 bp, Cannabis indica
cactaaaagaggtatttttttagtttttttttttattacttttataaaatttttaaaaaacttttaaaaaaataagattttaaatgcttaataaaaactgtcacacatgcatgatacaaaatatttaaatcttattattcggtactataaatatttagaattttttaaaatttaaatatagtttgagattaatatagtgtacacaattaaaaaaaaaaaaaactaatgaaaaaactcgtaaatttgtcaaaacagataaaagatgtagggaaaaatctctttgaaaatattaccctattattttttagaatttatttgtttatgttttatatgatgattgtaatttgtagttgtttaaataattcttttcacagggtggacatctcacgcagccgacccattataaggcccctgcgtcctcagcatattaataaactaattttgtaagttataccttcccaattatgtcgcactctgacaatctgtcaattcattttagttcaacaatctaatctgaattttctaattcaagcagttatttaataacaaaccccaagtaatcctttcttctctgctttgttttgttgtggttttttgtttcagacctaattacaataaattttttaggacacatttatagttgaatccacgaatattttagaaaagaaaatataataaataaataaataaactacttccaatgtctccaattaaactttagctgtaaatttttttttttaaataataagtacgtaacttaattaaataaagactaagatccaaaaaaataataaataaataataataaaagactaagactaagataagatagatagcttttgagcgaggaatatgatcttaataattgactccaatttagtggagaagatcaatacctaccaattctagagatgagataaaaaccttaaatgaccttttgagattctttaacatccaaacttagaaaagtatgtttaatttaattcaaaggcgaataaaggtacagtattaatattatacgcattgtgccataagtttcaaatgtaaattatatatatattaaaggcaatagtaattgtaggtaatcattttttttttcagcgcaacagccattaataattttaaaggtaaacgtaagttttcaacaatttatccacaacacactttttttttcaacaatttatccattttttttttttgctgaatatccaaatactaattaaaataatgtaatataatttttttaataacatggtaacaaattaaatacacgaggttgtggtgaaaattcaatatatatatacatatatatgccctattatatatttatatatatatattgcgtcagatattctggagcctatccaaatcgtcctaaaaaataaaattttgttaaatttgagacgaatgcataatatataatctgtgatcaacagtagtagctgatgaaggacgaaatgatttcttcaattttagcatatatatttcgatttaattgcaacctttcaaagatttagtatgcttttatggtgggccaattattatacttgctttgtgttataaaataattcgataatttttataattgcgtgttaaagctaaattttgtggataacgtatgtatccctaaaccacatctttgggtgccacaatataaatatattatatattatatattatatatttaatatatatatcacgctgtgtttatttgcaaaattgaccctaacaaagtaagaaatacatctcttttttcatataaatattaggacttctatatacattcttatctccagagtacatactttttctgttttctttggtgtggataaaatataattaaagttttttatacaactgttactgtattcaatttaattattttaagacatatatcttgatgatttataataaatttagaattatttaaagtctcaaaattaaatcagattatataaataacttactgcatatatgtaaggaaaaatcaaagttatgcttctaatagtctatattagaactactataaataatcgacaccttcaatcctaaatcactacaataaagaacatcttataaaaatattagcattattatttcaacacaaaccaaaacaaaaaagaaaaggtctcgagagaatttccatataatatataaaatacatattatcttataaaactcaggtcccatgcatgatcaccatcatgagaatctcatattcatgatataaattattattacaaaaccaaatgccaaattaattttggacttttattgcaaaaactacgatttgatttcgagtacaacctgtgacagaatatttaaattatttaaaaaataaagatactaaaatactaataatacaatggttactgacttacacacgttgtcatgggttatataagaaaacattagagcaactttaattaatgctgtaaaatactgaaaatatgaatgtatttttagcatctttaatagatgtttattattaaagtgaaaaaaaatataagtaataatatacttaaaaatgacatccttgctattttctctttttatttttttattattattttataaatttaatcatttaatatattaaataataatataatagtattttaa

SEQ ID NO: 382690 - DNA, 1971 bp, Cannabis indica
aaattgcttttttttttttcattatccaacactcttagctgtttagcaccttagcttcgatttttataataggaattatatatataatcaagaaaagattgagtttgtctttgtcgaatagttctgtgtaagattattagcaacacaaatacatatcaaaaaagtcatatataataaatatagatgattggtatcttggcgcagtacgaaatttatatttatatgttttattttaagtgacgagattataatatttaatagttaggctagcaatagaagccaattaataatattgattattattgatagttacctctgcaataaaacaaataaatatttatttatttataaattaaatgttcaacttcggatgatgtaagatctttgaattttcatacagtgggaaaaaaactaaaaaggtttgaaaaaatattatttaatttttaatttttgtttccttgctttgtctatagcctttaatttcttcaacatttgattaggaacagtaaccaatgtaatttgtaagcagttctaatgattgttggttgaagttttaagtagtgttgatcatgattcaacgcgtaagacatagaatgtttaattagcacactaataataataatataaacccacttcacttaaaaaaaaaaacgaagttacacaatttttcattattaagtctctttttcagttttttcacacacgcatgcaaagaatcatgtggcttttgtgttcgtcttatgatcttttatataaataactcacttaataatttcatttttaagaaaaagattattaatttgctaataagagtggggttaggcttcatccaacttaggacttgtaatactcaaactaagattatttgtattgaatatctctgttaagagcctcatcaatcatcacgatggcctacaataattaatgattatttgtgaattgtggatcacattacccagttaggctcatcaaagttcaaagttcaaactgtttattatgtggactccgccatgatatgagccacacatgaggtcagttcattttttcactctcttattttttgaatttttatatatataagaaaaaaaaaaagtgacaatgacagtgacagtgataattgaatgcccttttttaatgctacatataattaatcaattgtttccagaagagtattgattgaatgttacagatagcgaatttacattgactcaatttggataaagtaagtaatatatgtttaggaaattgggttatttaacaaaaaaaaaaagaagtagaaatcgatcggaaaaccctttttcattaatatagataaattaaatagtcggtgcatcaacttggcacgccaaatttgaaacttaagaagaaaaagttaagactttaaagataaaagttcgtcatataaaagaaaaaatcaattgaaggacaacgacgctgtattaatatatgattggacaaattaccgtagatgagaattaatttcacaagtaaacaatcttagttatattataagtttggacacatgagagagagtgcttggaaaaaatcttttattttttttgtttaaaaaaaaaaagaactttatgttattttattgatactttaggttactaaaagagcttccaaagtttaagaaaactttaaattaatgaagtagattggatgtagctactatttggtggttatttaatgagaaattaatagtccatggttgaccttcaatatcacaaaaatgtgtggcagttaaaataggatggaaaatatatatttaacagaatacttccgaagagtacttacgcagctacgctgacaattaaattcttaattgatatttttggcatttagttaggatcttgctgctctttcctcatctcttttctcactacaattcttttattttatcttattatttttttactaaaaataaaatttgtagctaaaaataaaaaaattataattaattataaatta

SEQ ID NO: 382691 - DNA, 2468 bp, Cannabis indica
attagagtgttattttctatatccaatataaattcttttttgttaattgtaattattttttgttgcttggcaggggattactagcaagtaagatgtatgaaacagcaaaagcaattgtgaataacctcattttcctcatagaagaacatggatatgtactcaatggtgcaagagcctattacacaaataggaggtatgtgagaaaaagccatatctttcttagtacattttcttctctttttatagtctaaatcgagggtcagccttagatatagacaatgcttatgttgagtgctcgtagttagaaagatctcaagggctcctccgtagaaaggcttcggaaaaaagagagtaatgatacaagcacataaaaatattttacacaagtttaaaataagagttttcatttgaaataaatgtgattagttggatgaatttcgtctgtaatttataagagcattgttattaggtattagtgatgctcaaaactaccataaggtatcttctcatgaatgattgtcaatttttcataataattattaaattaaaatatgttggacctaatatttaattatatcatgtatgatacttcttagtaatatttaccgctcttttaatatatataaatattaaattttgtcttttgcagccaacctccactccttagtgccatggtttgtgaaatatacaagaagactaaagatctagaattggctcaaaaatctctcccttctctaatcaaagaatataaattttggaattctggtattttggcttacaacatacttttattgttaaaattatttgatttttaattttctatctaaaaaatatatttgatcttatcaaatttttttcaataatttgttgttgaaggtatacatggagtgagaattcaagttgatgaaacttgtgatcaaactttaagtcgatattatgctatgtggaacaaacccagacccgagtcttcaactattgtgtgtaataattaacgtattcataagattatgtgttttattattttattaaactagtatttataaactacaatctttttcaggacagagaaaatgctttgatgatctctaacccttatgcaaagcaacaattttattgtgaagtagcttcagctgctgaatctggatgggattttagtacaagatggatgaggtattaaataatttattaacgttaaaatttatttttatatgaaaatataatcaccttcacaatatgaatatcttggtagccggaatatattaggttacattagtttattggactataacacagcaactttaacaaatagatttatacattcttaaaaaattgctaaaattaatcatatttttaaataatttaatattttaacacactttcactttctagctatgtgggatacaaatcatattttttttatcatcctatgtaatgcaattaccacaattaatagtttttcaattcagtggcggaggcaacaatgaatgttaaggggataaaaaagaactttgttctaggaaaataattttttaataaaatatatatattcttatagaaaagaaaaatataaatcttttgaagatataaataaatatatgagaataaaaataaatatttttatagaataaatatgtaaatatgtaaaataaaaatgaaaattataattttacaaagacaaaaataaaaatatggcaaaaaaatgaaaaaatttattttgtggagccaaatatgaaaatatattaaaaaaataattacaaaaaaattaatttattaaaagttgagtggggtcatgtttatgacacacaacgctaactaatatagtagaatctatatttaagatattttattcaagaataatctctgatttgctataaaaaaatcaagttccaatttgaattagttttaaataaaaattacctctaaattataattagttatatattttcttaattttgtataccctctatataagaataattgtattttaataaaatatatgcatatagtttataaatttatttgtgtaaaattaataattttattctaaattgtaatatttgtgttaaagattatagttatttaaaaataattttatcataatataatattaataattgtttattgttattattgttctattgatattttttggtgttttgatttttttataatgtaattctatttagttataattgataatcaaatttcttggagttatagggatcacacagattttactacacttgctacaacttcaattctacccgttgacttgaatgctttcatacttggggtatgtggccaaaagtgatcctaatatatataattaattgggatatttgtgatgaaattcttttaatatttataaagtattttatttttataattttgttgcagtcgtatatttttcggccatcaagtatagcttaaaaaatacatggcgatatattattggaccacgtattaaa

SEQ ID NO: 382692 - DNA, 3113 bp, Cannabis indica
gaccgattttcacccctagtcaattgtacacaattaggcaaaacctttgaatcagcttcaatgacatgtcctctatggtgatacactatccaaccaatcccaaagttattatttctactaataacagaagcattcacattaatctgaattattttttcaacaagtaatgtttaatgctcgctactaacatcagaggaagaagtatacttccctacattagtgtcatcttttgaccacccttccattacttaagataagcaataacagatgaaatgaatccattagcaacaaaacttttacttttccaaactaacccattatgagcacgtcacaaagcccaaaaaactattgacacttgactagctttggtcttcgagaaaatagtcaaaacattagaaaccaattaaaaaaaataggaaactgtgtcctcagaaccaaagtatcaaaatgttgctagcaaagtgaagcaaatagatattcaaccatgatatgaataatagacttaacatcttcacaacacacttgacacatcaatagaacgccacatgtttcccccaaaattgcgtggatgtgggaaaaatacttaagcaagctttccataacacttgctgaacttttggtgggattttaagattccaaagagattgccaaaaaccaaaattattttgctcatcttacttcccattcaaatattgtaggtactagtaggcactcttcacgctatctatacctgaaacctccttattccaatgtcattggtcctctcttaacctatcattaagaacacaatattctgaataagaaatttgtcctgctcattaaaaagattagatagcaaaacaacatcctaaacctaagagcctggggccataagctgagccaccttagaatcgaccaaaccagaatgagtcaaagtaataaaagaattctccgtgctcgccaaccaaggttgatgcaagatatgaatggaagtcccattgacaatgctccaatgacactattccattaacaaactttgagattccatgatagaataccaaaaaaaattttgattatgacccattgtagtagagagaaaagaaccacaaggataatatcaagcttgaaagattcatctaacaagagaattacaatggagtgacaaccgccaatcttattttacaagcatagaaagattaaaatctcgtaaactgcaattacctagtccaccattatcctcgtgaaccactaacttctcccaagatatccaatgaattcccttacttggagagcttgaccgtcaccaatacttacgcatgagttgttccatttcattacataattgggtaggaataagaaaaatattcatggcataacttggaagatcttgagcaatagacttgagaaaaacttcattccctgtccttgaaagccatttcctattccaactctccatctctttttggttctctctttcaaagagcccaaaaaagtcatattgtttcatcctttagtgctaggcaacccaatatatttactatgtacattccccacttgcatgcctaacaccttctgaaccgaccttgattataagtaaagatattagtactaaaaaatatagaagatttagcaacattcactttttgtctcgagactcttttaaaaatagatagtagttctaaaacagtattgacctctaaatcatttcctttgcagtaaagatagttgtcgtcgataaacaatatatgagaaacccttagggcccctcgagcaactttacacccatgtaaccatcttcgcatttcatattttttgatcaaactagcaaggccctcaacacaaatataaaaaagctaatggagatagtggatcatcttgaaaaatgctcctcgtaggaatgatgggacccaaacttttcctatcatgcacaattttataacacccaaaatcaatcccacaaacgactatggaatcccatcttcaacacgatagactaaagaatactttactctatctgatcataagccttgttcatatctagtgatgtaagttcatgcatgacgcgcttgcccaacccgtatttatccgtactttttaaaaacggatcgaactgtgtcttgaccaaagaaaaattggaccgtgtcgtgtcaatatttttaaagagtatgcccgacacgacccgtaggcctgatgttttcgtgtcatgctttgctcgtgtcgactcgtatttcttaaacagaccagctcattttcatatctggacttaaattcatgctttaatttttcatatatatatatatattttataattactaaattatatgtatatttcaaaactttagttatatttttgaataatattttactgctagttacatacaaaaattattaacatcattagaatttgaatatttacttataaatacttaaattattatatcacactctataaataaattaatatataatcttaatttttcatgttttaatagttttaattatagaattataatatttaatattatatttagattttattattattttaaattgataaattcatatcttattattatcattaaattaaaagattttttaatatggtgtgctgtgcttttttggctagtttatttgtgcttacgtatcatacatttcgtgcgtctcgtgtcgtctcgtgcttaagtacatattttttcgtgctgtgtagtgccaatttgtagcatcgtattgtgtcgtgcttaagcttgcatttcttcgtgcctaatcatgcttgtgcctttcggaccagtcccaatttcgtatttacaatcctactcatgtctagtttaatttaaggacttttttcataaatatacaacaaaaataacataattacaaaaaatgtgcaaaaaaaaaaaatttattttaaaaacttatacattttgaaaacttattacatgaaatcatacattttaatcattaaataataaaatatgtttattacaactcaaaataaacaatttcgtaaaattaattaaacaattttataaaaataaacaggttaaattttttttttattaaaaaataaatgtttattatctattttagtatgaatttattataatttaataagattttttttaataaaatacaat

SEQ ID NO: 382693 - DNA, 2372 bp, Cannabis indica
tttaaacagactagcaagtgtgatgtctcagaaaatcggggcgttacaatagctagaagctataggtgagacaggtgatacgcgctttggttgtggtggaaaacacgcgcccaaatgggcctttcgatcaatagctggacgatcagatggagagtgggcttcatctgcaagtggaccttggcatatttgaatttgatttacttttggaatttatgcttttctcctcatttctttaagatttcttcaatctagttctcatccttgttcaataaacgcacttgttaaccctaaaaattagcactactaactctcgaggttagtcaactaataactaaaggactaacaaaagcgcattcaataatcttactcactcatcatgcatttttaaagtcatcgtcgatgcatatgggtctcgggatgcatctaagtaactcgaagaccaactccgtggtaatccacaaacaaaatatggaaaaaggtgaggatgtaagtaagtgaagttaaggatggagaccaagtcgcggatgcatgtgtgagtgtgtgtcgtcgcatgtgcatgaaagtcgtgagtgtgagtgtgtgcatgtgtgtgttgggtacgagaggaggactcgcatgcaagccatggtgtgtgtgtgtgtgtgtgcgagagggggctcgcatacaagccgtggtgtgtgtgcatgtgtgtgttgtgtgtgagaggagggctctcatgcgagcccatgtggggggcttgcatgcgagtcgtggtgtgtgtgtgtgtgtgtgtgtgtgtgtgtgtgtgtgtgtgtgtgtgtgaatatatgcatgtgtgtgttgtgtgcgtgagttgggggctcacacgcgagtcgtgcatacatgtgtgtgtacgagtgttgtggatgtaaggtgaaatacgagtatgcgttgaagggaatgctgttagaggaggaattaaaggacaagacgtgcaaggggaaaacgtacaaccatgcttcctgcaagctctaagagcgaggagatacaagtagtggaagcaacacacctgcaaagtctgaggacccaaccaagggtacgctgcagtcaccacctctgtaacctgggaccatctaatactagactaaggtatgacacacaagaccacctcctgcaccaccatgtacctcaggtcattagagcctatatatactctttctcagatatgagggagggttaaaaaaatcatgattgtaacattaaattgagagaaatagaaagtctatcattttctctccactttgagatagtaatttaaatttatattttctctttctctttatcttaattctgatcttgaagcctaatttaattttttggccaacgagttagttgacgagttctcactgcaaacaacactaaaaaaataaaactaattagaaaattaacttgaaattaaaactaattagcaaatgacatataaaacaaaataactaaaaaaaacacacacacaaaactataaaagataatactaagaataataaattcaaaattacttaaaaccttattaaataaatcaaaagctcaaaaactaaattgattttagcttataaaatatgtaaaataactatttatttagagttatcaagtaggccaaattattggttgtagcatcataaatctgttgcattattttttatattgaaacattccatttcgatgtttcaactttgatttctgttcctacatatcttcatatttaattttaatttctttgattttctcatttaattgtttggtcgtactattttgtggttcaattttttttttcgtattgtgttataaaattacaaactaaggttatgcagttagtgatattttttttttaaaaaaaaaaatgcttaattactatttatattttgaataacaagctttttttgttcccttaattttttaatctaccaagttgtgctccttatagtatacaacttgttaataatatttctcgaaatataacttttacaataacatagttcttctattatattttatttaattttaccatgaaatgagtaaaatgattaatggtatttgatctttatcccttttatgttaataaataataaaataaaaagaatttttttaataataatttatatgtttagttttacatttttaattattaaagtaaaaatgacgaaatttatttaatttgtaccaatttatcaactatcaaccaccgtgtcacttatttcacaacgaaattgaataaaatataatgtaaagactacaagattgtataaattatatttcgagggatattattaatgagtcgtgtgatgagtcaaaccgagtatatatataataactaaataaatataatataatatatatgtatataaaaaaaaaaaatt

SEQ ID NO: 382694 - DNA, 2460 bp, Cannabis indica
gtaaataagtaaaaaaaaaaaaaaacacccattaatatatttagttacacacggttttttttttatgaatttataaaaaatattagattttgagcaaaaatttacccgtaatacgaattttatttataaaaatactatctttttataaaataactgtaaaataacacaatagaaccattaaaacaatagtataaaaactaaaaaaaataatagtaaaataacagtaaaaacttaacattgtatataatataaaacttacaaagtatttctaaaataaattgtacctcacaataaaaaaatagttaaaaattttgagtatgtaatgtaattttttttttacatattttcaatactatataaattattttaaatttttttcaaaacaaaccataactacaaattacacaatcaaataaattctttaattatgatttcaagctaagagaaaagtcttgtgtaaaattttccaatatgatcatatacgaatttatatatatatatgatcactagctgctttcacttgaagggtatccaatgccgtggcgggtattagggaaaagcataaaaacaccaccagaaatgacaccaatcaccggcggcaaaacctgaagaagtattttctgctccgactcaaactcaggatagaaacacttgacggtgttggaatccaacaaagacaaccctgcgaaaacggtcaacgaaaagaaagcgtggacgaaatccccaaacctcagcttgtacttagacaagtcggcggcgggggcagagtcggtagtactgggccagattcctgagacagtgacaacgccgtaatggatgttaccgtcggaatcgacgtaactatcggtgaaacaagcaaagcaacaagagaaggcgcaaagaacgatgaggacggcgtcaaaggacttgttaacggcggagcaagagccgttgttggtgagaactgggttgaggaattggaataggaacactgttccggttgggaggagttttatcaggtttcccactccgctcaacgttttgttcttcactttcgttgtcaacgacgtcgttttggcaccccccattattattattggtaattaacacgtttttttaatatagaagtgttgttttttgttatattggtataatgaagtttgtggatatatatatagagaaagatagaaagagatagaagggtttagcttgtacgtaaaataatggtgatcgatataataagatgatatgagcaatatatattgttggggtttgcttttgctttttgatttggctaaagatgttgggatggatgggcggccttagtttataatccaagcttttgcaagtgtcttatattagtttgctatttttagaatatgaacgtattcaatattgaagtgtatatacatacaccaaaagcatatatagattagtataaatagctttattctaccctaattaatacacataaagtttctcccttcatattttgttgtgtgacgaaaattccctttaaactatcttcaccattacttatgtgttacatattgctaaaattataatatggtcctatttgagacttcacaaaaataatacatattatttaggagatttttacaaaaatactagattttggataaaggtttacatttataatgctacacggtaaaaattacatttttactaccttggttttttttttcttttatactataaacaccgaaaaaacgaggtcttcaacttccacaatcacggacaaaattaccacagcatcactagaataattaaaaaacaatcattaattccacgagatcaagcagaaatattaaaactattaatactggagttgtcatggtttttctaatgttatttttgttggaacttattttactaggatctagatttactagcatgtttatttggttataaactataatctaacatcctaaatataaatttcttaaataataaaataaacacatataaagttatagaaaaccttatgttggtggcagcggaatataatatctcattccatttagatctctaacccttgatcctttctgccgcagagtatgatcaagatctgaacttggatttttttcagttggcaaatttctacacaatcttctacaaaagtctgagtactgacttgaattgtgtgggccattcctcaatttactctagggttcgaaaatgtgaagaagaagagaagtggatttaaatttaaaaaggctcttttatattttctattctactcataaagagagacaattaggttatcaattatcaattatgaaattaagagcatcttattctatttataggattgcttctagatctaggtgaagaattaaatggaattaaaaaaaaaggtaaaattggctttaattgaagcttatggccgatcctattgtgggccctacaaggtttcaattttgtcattttatttaagaaacttatctttttctttcacaa

SEQ ID NO: 382695 - DNA, 2734 bp, Cannabis indica
ttataaaaatataagattttttgtaaaagattgtatgtaacaattaaagtataaattgtatgtaacatttttcaggctagttttttatcttactggaccacaagaattatatggttgaatctcaacaccaattaataatacggggttccatatcaaatgttttggtttagcaacaagctataatataattaagagattatattttatatttataataatataatttttaactctactgctaagaatacttttgtttttgacataggaagaaattatataatatataattttttttgagtgctttaattatggtgcaccttacttttcaattgatgtacttttttcatatttttaatatgtaaataattacaaaatactatatatgatatttatttaagttattttataaaatttaaaataatttattgtacgaaaaattagattcatccgtctatgaaataaaaagaaggcaagtaaattataataataatataaaattaatttaatttttttttctatggtgtgataaatatgattgttgcttttccatatttttttgtgaattactaactaatataatataatatatatgtgtgaaaagattatataataatatatataattttttttgagagaagttttcatatatataattgctacaatattattgacacgtagattcctcaatgttgtgtaaatggaaaaaacagtagagagataaggtggtctcacaatattagccattaattgctttagaaacagtaatataatatatatatatattatatatatagtccatattattatggacccgtagctagcctgttctcacccaaatgtgggttaatcttagccagtttgatcatggcaccattttttttcttgttgggtcatcactcttcaagcagtgaatgaaagctgtttgccaaaataatgcttcagttgctagctaattggggtgtggtccaaccttgtcttcgttttcagtacctttgcttgcataatcattcatgcattaatcaattcattttttacaaatgtatatatatataaattataaatactccatcaaaaaccaaccatgcacactattcacattaatgcaatccttattaattaatagcaaaaatttatcttattatttatgataaaattattaccaaccttgccctcattcaatataattattgtaaatgataatgtgtaaaataactatatagatgctgtttatgtcattggtggtagctcgtcttaggttgcaaattttttattgtgtcataataagacaattggatcaaaaggagatttaataattatttattatgattacataaataaattatcatagtacatatcttggagacatggaaatatttagtgtgggaaactaaaatatatatttatatagaaaaatatagaagacaacatttacaaattaaaaagtaggagtatatatacacaaattctaggaacccaaattaagaagtgggtcctaagtggttatatagtgctggaagttaagataagtaaggacccatctaggctggcagtttggaggcaaagagatatgataagtttcactctacaaagtcagttgtttcagtcgcacatcatcagaaatttatgtggaaacatataaagtttttgtaatattttttttttttgataaatattattattagtttttattttcaaaaaggagagaacgagaacaagaaaagaataaagaatcagaaatagagaaatgaaattggaattcattcatatgaagagttcagtacattacatgctttatatacacagtttatacatataacgaacttaacaacctctaacagacttcctaactagttaaccgaatacaatacaccttacaacaactaacttcaatactcccccttaaggtggagtgtatatgttacaaatttccattttgtctttgagaattttaaattgattaggaagtaaagccttagtacaaatatctgctatctgttctttgctggaggtatgaactgttttgataactccttgttggaccttttctcttactaaatggtaatcgatttctatatgtttggtccttttgtggaacacgggatttgcagcaatttgatgagccgctttgttatcacaatgcacgatggctggtcctaagtggtcaatgcttagttccttcaacagagataacaaccacaccaactcgcatgttgtattcgacatggctctatactcagcttcagctgaggaccttgatacggtatgctgctttttgctttcccaagacaccaaagagttgccaagaagcacgtgaaaacttgttgtggatctcctagtgttgacacctgttgtccaatcagcatccgtgtatgcctcgaattgaatctttgagcttgcagaataaaaaaaggccttgtccaggacttcccttgacatattgcaaagctctaaatgcaacatccatgtgattcattcgaggggtgaccaagaactgtctaagtttgtttactgtataggctagatcaggtctagttattgtgagatattgttgtttaccgataattctcctatatagtttaggatcaacaagtttgtcttctccttcttggctgagtttgagatttatttccatgtgagtattagcaactttacatcccatttgtcctaggtcttcaagttacactacaagaaatgtcccttttgccagcacatttttgtgctggcaaaagttggt

SEQ ID NO: 382696 - DNA, 2481 bp, Cannabis indica
ttttttcttatttttattttgagctgattgatcaaatgaaaagtgacaaatacctcgagctttcttgattgagcttctgcttttgcactttggagattaacccaagcttgaatcttggcttcttccctctgatacctgatgagacttgaaaacattagaactgtcaacacagaacacagtcctctgtatttgaaatgacaaaactcagatatgaatggctccaattattacctgaggcagcatttagttttttcttcctcttcccatgcaacagctctggattcaggaccattttttttggcagccactgacgttgtcaatctcaaaatgcctaaggctctttgatatctcctcctcctcttcttgcctagaactccaattggaagtaacggaatcataatgtgtgccaagttgaagcttggctaaatggcactcctgcaactgagcaatgtcaatggtgctgctggtgctgttagagtgctccaaacccaatggtccagacctatccgctggcgtgttgtgccgcgcaggggatgagatcacgaaaggtgtgtggcaccttgatgttgttgagcttccaagaggagtcatttctgtcccaacatctctgtgttgaaccatttctgtgcctgtgcttttcatggtttcacatgctgagtttttgaataggaatccttctttacttgactctgaggttctgaacttgggcaatactggttctacatcgtccgtgaacttgtctgcatcaaccattttgataagaaatttggccgaaacaaatctaattcatatgctataatcagctgaaaattgaaactatgcaatccccaatttagaagtataatttataataaaattaccttgtttttaccaatagttttactaagttagcaatgattcttattgcagcatagaaaacaacttctcttgttcatttcttggttgaattgttgaaagaaacatgttcatattggtttggcaaatctcatcttaaataaactaaaaacgcatatcttaaacaattgaacagtgtgaaaaagtcaagtgctttattatgttttttagtaagtatatagagaaaagaaaagactgtaactaaagatgaaagtggcacaaaaagggaagaaccatccaagagaagaaaaggcaaaagttgtaaactttccacttcaaatttaaaaatggaagattaccttttagaaagacattatcagttgaacatgataccccatcgaaagctctgacagagttatgattatccaaagacacagagcagtggaagctcgagaattctttttttgagactttttcttctgtgacccttgatttatcagaaaagacctcgacttgttgctgcttatagttatagtcacttggcttggctgttctaacagaatctgggggctttatagtatgagcaggggattcatgacaagagctacttatgagccatttttctgcatcatcccacttcgaaggaaaactttttcttgaaagatttccagcactgaagctaaaaacaggtcttcctggtgtaggaggagcttcaaatcttctctgggtaacaactgagttgactcctactacctctgttctcctctgagttgaactctcacgaaaaaccctgttgctttccgttccaccatgtggcaaaggaaaggacttgacaaactcagaggtttctttaagattaagcttgcaaagtgggtcggggaaggtttctacaaaagggttgctcttggttctcccataaaagcttgcattggtctccaatggttgttcctgaatcattaaaaaaaaaaaaacccatcattagaaaggaatagaggaaagcaaatgtgggaaaaagagtaaaaaagaaagctaccccagtggcagtattagtaaacgtagaagatggagcatgaaagtatctggggctcgtgagatccatggatgattttgtttgaagagagaccaactcaacccaaattttgtttgatgagtgagtacagatgtgttttaataattcctaagtgttaagagcatctgtagtctgataggaaagcgactagggaagcagttgagcagtaatgctaggctgaagaactgaaaattgcaaagcaaactaaagcaaaagcattgactacttagaacgatggtccaaacactgttacttgtgttaacaaaaatcactcacgtgggaggcccagcaaaccagcagttccttcggtaaaattaataaaataaaaatgaaaacttcataaccttgacacaacacatatacacaaaacgacaaaagtatacttaaaaataacattactatagagcaccaagatacttttaacaattttctatcatttttattaaagtaaaattagtaagacttgatattaaattatttcattacatattacaaatatattgagtaaaatgtgcaccctttagcatctttttttttttaaaaaaaagagtaagttaaggttggaaaacaaatatata

SEQ ID NO: 382697 - DNA, 2201 bp, Cannabis indica
aaaaaaaaaatactacataaaagttgtaaagaatgtaaattagaagcaaaatctccaaaacattgtccacataatataaatttgatgagtttatatcagcactcagcagctgaatataaacattttatacaatgtaatatcaagttaaatattaataactattgagataaaaattacattttgccactatgcccaaatagttaaccgttggcgcaggaaataaatagttacctatttgtgaaatggcaaaccgtatttcgttattccagatttatatgaatttaaggactaataaacttataagaaaggcaagtttagaaactattactgttatttttaaatattgaacactaatcctcatcaaaaagcaaattctgaaataacaagttaaatgaaattataagaataggaaaatgaatgagaataaaataaaatttataatgtattaaaaaaattattaaatatatatttttccaaacaaaagaatgaaataaaacttaatttctttacatttaattttattacctacaactaaacataacataagtgttttacctattttattagtacgaggacggttagaaaaatgcctaaaaataaatttataaaaacttaggtctaattcaaacaatatcgaaagcccaaaatttatatactttcctttttgtcattctttttctcagagaaatttatctactttgttattttcatttagtataacttatccattaaaatattttttataaaaaagtataattgtaatttgataaagttaatttaaagccaaccatatgtatcttaaatataaattttttcagaaagcttaaagagatatgatataactcttatgagtaggtagttgattttgttttatattatttattaaattagaatatataaaatttaatattaaattgcatctagtatatttatctcgtttttgggtgtgcttaaacaactaaaatgtaaataaaaatatgtcttatataatacaaatttaatttaaagagacgtatagttgaagaaggaacagctaaatcttgttcgtaccttaaatatatatgtttaataataatagcgtttgtactataacatcatatatatgtaaggaaaataataattttaaaattaaattaaattaaattaaagctgacaaaattaatttgaagaagtattaagtacctttccccaccaaacccaaaccgtataaatatatattatatgtactaatctaaagacttctctagataagcttgacgtctaatatataattgaaaactaacagttaataacaaatttcaaattattttatcataacgtggatcaccaccatggtgctctcaccttgattaagccaaaaatttagatttcgtattcacattatttttcctccccgagatatttatataacttaatatatataaacatattatatatagtgagattatgatatttatatatagaataaactaattaaactgaattaattaacaaagaaaaaagaaatcatgaatcatcaagttaacgccgcagtcaataatatatataattttgtaccaattaagcaagtgcatgataaattaattaaggttatgtattgtcggccgtacactgggtacactgttcgttttgtttaagtatatatcatcaactagctagttaatttcaaataatatatgatatatctatctgatgtcaaaccaatgtatataatatatgtatatgtataatataaatgtatatttattcatatacttatatcatcataaattaattatataaacgcttataattaattcttctattttttatttttttcttaaaaatctcaaccatcacatcaaaaataataacgaaaaaagaggcgaaaatgcattattgagtagcatcctaataagttcttaaaataacttggagaacttgaccaccaaacagtgttagagaacaccgtaagagcgactttaactaaagtgtaggcaagtattaaaatctctaagacaatgtaaaaaataaacatctttaaaaccattaatatcaagacaacctttcacgcgccaaatagcagaaacaagtgttatattatttataataatataatatatagattaaatatgtgtaataaactaataatatgtaacatatgacaatgtatattagttgtcatctttttgtaacatttgagagttacttgttactatgag

SEQ ID NO: 382698 - DNA, 2609 bp, Cannabis indica
caaaataaatatcatatattataacttaactaaaaaggacaatttattaaatagtttaagcattctaattacatttcttgataaaaaaattttgaaaaaaaaaacatttcctgataaattaaacaagataaattataattattttattttcaaataaatttattaaatagcatattacaaatataaaattattcttcatttatctcagtatattttccaattaatttattctaatcttaaataatgtgcagtaaacgtcatgaattcaaacaatagaatttcattcattcctataatgattaggatggtaaatattttgatcatatttgatagcgctgatatgaggcacttatgaagtgtcgaacacaattatgaaatgtctatcattggttaacaattcttgataatatttgttaaagtaaaacaagtggggtctcgtaattaattatactaatcataatattatacttcataaggatgctagacacaatgtaaaatgctactaacataattctttacacattatagtacataagtgttattcaatacaaacacttagacaacaacactttaatgtcaaaaaaaattataacttctaactcattaaagtgcatataagcgttattcaatactaaaactagcgactatcacaagaaagagatgctaggcataatttcatcaaaatagatttcttatgttagtcgcaattttatactgtgacctatggatttgtttatatgctaggcacaataaagagatgtgaccggaagtttagacaacaacactttaatgttagaaatatatgactcctaactcattggagtacatataaacgttattcaatactataactaacaacaatcaaaaattaacttaatcaaggagaacaaaagtacaagcgtaattcattcccatccatagagtcaaagcttttgctagaaatgttgaagaattacctataccacaaactaaaaatatatcgtaaataaatacataagctaaaaatattttgcaaataaacaaccatagtttacaataaactcaatttaacaatctaaacaaccgattaaaatgaaaataaaaaactatttaaccataaaagagatccctttaattacaatcctaaaatgttgtataacttatattgataaaataatttacatgctaaacattatgttacaatctcaactcctaatttaatttagatagtattttttaacataaaaagatttaaattgaattttaaaatttacaacaaaaataacataattcactaccctacggtacttccacccaccataaatggcacaaaccatccaatattttatgttttctccaaaattaaaattaaataaccaattgaaacatcaataaggaaaagatataaatatattatattatatttaatttaaaattattataacattaaagaataagtaataatagataatttatatatttttagaatttttcttaagtgagaacatcacttttggttacatgtaagcagattttttaaacctttaatttttaatctgatggtaatggtttgttgtagtttatttgtagtttttttatttatttttctctaaaatgatgcatgatattattattattttttaccaactttactgagatgatgatgaacgagatgagttgggactagtgcaactaggttcatgcgaatatggtgataaggccatggttcaggtgaagagaagttgaggatgatgatgagatgagagtgaaggtgggcggagggttttcttagctcaagtcaatttctaggttttgtgtggtgggggaaagaagagaggatgattagggtcttacaatggggtttttggcgaatggaggtggtgaagggtagatggtggtggggttggtcatggttcaggcgaggagaaggtagagacaaggtggcaatggtggttaggacgaaaaaagaagacgatgagaaaatagggttttataagaaaaggaaattcacggtatatgagattgttttggttaggatattatttgagaaattatattttggttttgtttgttttttttttaaaaatttcatcacagctcgtaaagaatcctaacttacgcctgttatggtaatattttcgcgaaaatccagcaaaaatattactgattgctcttttaacttgtaccacttatgctaaaattttgctagaaaattgctacagcaggcgaacttctccaaatcagcgacatttgttcaagtcgaattttgatgtagtaaaattcaatcaaaaatctagcaaaaaattcaaacctccaaaaaacatccaaaattccaaattattctctaataacccctaaagcaacacacaaaatggagataaaaaatactagtgaagagatccaaagaatttcacatgaagaggcttcaaacaagcactaaaaaaaaggtgctttagaacaatcattactctatgcgattgtttttctcattcccacatcaacgtctttttctgtgaggggttcaagagcagtcgtctgagggtggttttgttttcatttattaatttactaagtttaattccaattaatgtttatatggggttagaattataaggagttcattccttaat

SEQ ID NO: 382699 - DNA, 1948 bp, Cannabis indica
ttttggagatagcctgctttttactctgtcaaagaagttctcacaaggaagaatgttgcgagaggcttctattatcttggggcttatactggcgaccgcaagctcataattagactgcctaactagacaaattttaaagaaaacatcttttggacgacgggcttatctccaataaacacaactgcctttcgaatgatacataagtttctttcttcgtgaaaccaacaatattaacttgtagtttttaaagttgcttactgaacttttaattttttgcactggttcctcggagaccagtccctaccccacagatagcagagcatcacaagaccttgctgagtctgccatacgggttacgagcttcagatttcttgctaaacgagcagaacctaaagaacgttggcctccttgcctctgaagaatatacttgcgattataaaatacccagttatacttcatggcaaaaggtccccatcctaaaagaagaagaaagtgatgacttcgtggctcacacaaaatatctcaagagagtccctccttgggtagataaaagatcccgagttaatcaatgtgggtgtcaaagtaatacccaatctcataaggagtgggctgaggccagcctaactccttgtacagaaaaaacatcgccaaaaggtacttgatacctttcggggtgaattatattggacacattttgaaataagcagcaacatcttggaagtacacatgaaaaggcagtacatctccttgctcgatgtggtactctgaccacgccatctagttgagagctaacttatgcgctagttgatctgatgggggtatcttacaatggatactgcccactagcctaatagcctctattatctcaaaactgtccttcgagagaaatgatacatgggaaatccacatgtctccttatgaacccgcattgagaatctgaagctctgaggataattcgagacatgatccaagctaagtaccgtaggctcaatgagcttattcagtggattactatcactatcatagtgacctagagggcaattggataggacgtgtgtctcttcctcctaactggtagaacttcctcacaactaaatccagctttgagactctcattctcatggttagttttggagctaatgtcaataggaggctgggtaaccccttctgccatcttaatttgaccctacgcagccaatctaaccgcatgatggtcgcacagggttactctaccaccactctattttgtatcagccataactacaaggtaaacaagatacctatgcagttgtcatctcccctattctacactcggcactacttacatggaagaaataaggtgaggtgagtaacctgacaaagctacaaacacattcaagtcaacagtacccaagggtaccttcttggtaaaacaaaatgtacaagattgatcaatggccaagtaccgtcttaagtacacttactaagaaatatagtaagtcttaagatgtataattgacaataatagacacactaccgagccttatattgagtttccaagagaaaccaactataaggccacaattgtatatgcctccaaggccatcacggggccctacctgaggtcaaaagaaagagaaaaatttggctgcccacttggtgccttggccttggccagctagggttctaggtgttggaaatattttaccaggatctagatttactaccatgtatgtctcattaacatcctaatatgaattctaaaacaatgaaattaaacacatataaagtttaggaaacattacattgggtgcagcggaatataatgactcctcctgttcagatatctagcccttgattcctttttgtagcagagaaaaatcaagatctgaacctggatctctttctctccttccttgatgctaattctccttcttgttgattggattcttcacaatcttccacacta

SEQ ID NO: 382700 - DNA, 3808 bp, Cannabis indica
tgagaacccataaaccaaaggaggaactaatccgaaaataatgaatgatatatggcacaagcgcatgaagagcgaagttttctttcttcccaagaacttcttcataacgatccacatgttcgtctgtgtcactggaaggaatctttgatttgtcatcttttagttcccaaagctgtagtatcacataaaaaagttgattaattttcgctacatggattctctgagtatagttacacaaacacaaaggcgagaaagaatcactcacattgtgaccgataatgaatagtccgccaaccagatttgccaatgccaagcctaagatgttcactgcaattacaaaatacaccgttacagcaatatgcatttctaaacaagattcaacagattgtttcatttgacaaatccttagatgcttacatgttgtggcattgccactagcagccgaagtcacaatgcctaagcttgtaagtgattcagctaaaccaccataaacaatgctctttacgatatcccacgaagcaggactcctttgctgttgaatcagtggagtacgctctgatgtaatagtgatggttgttgagtctgtacgcacatcttcgggtggccctgcatcaaaaaataaaaattcataatcttattagagattatattaaaagttagttcatattgatctaataatctcatacctttctgcttgtctcccactgcagcattcagtttaccttcactagtttctatttctgagtgttgttccggtcctcgagttgttgtaacagttacagtttcagatgttgagggattggttattacatttacagtaacaccagaggaatgatcaggaaatgttatcttatcatcatgtggaactggactttgaaagtcggaaatgttttccacagctttatcttttgcagaatcattgggagaaggcttagttactggagttgtggtagctggaagtagctgttcagtcagttgaggtctagtaccatgaccgggtattatttcagtcttgttaaatggtagaaggcgatcaatccaagtaccgcccctagaaacgttttgttcgggcttagtattgtcacgggcaggttccctagccacaacagattgtttaggtgctgaaggttgggaagtcgcggcttcattgctctgctcatgacttgcaggcgcatcctgtaaggtatatgatggaagctctgctacttctgcattgagaacacttttgtaagaaataggctatagcaacagcattgacaaggatccattttctatggtttactcactgaaaaatacttaatgtcatcataagaccaaaagagaatataatttttaaaaaggttaagaaagaaattaaagaagaaaaagctttctttactccattgataaatgaagccttatgataagaactataattggtgatttcatttttgttaaaaactcgagtttttgattatgattagatccaaactgaaaaactttttgcagctatattcattcagtattctatatgaagtttatgcaaattgctaattataaaactctgcactatttttgttgaaagaatcaaaattagttaccttcatcagaatcattatctgcagcattagaccattttgggatgaaccaacctgtgaaattgaaagcaatggttaaagctacaacctttttaaggaccctgaatataaaaaaatcagatcagttcaaatatattggatttttaacactattcaatatgaattatacctgttccattttatcatcatcatcataatttataatcatgttatgaattctaaaataaacaacacagctagaattcagagtaccaaagagtatacctgcaggaatgagaaggaaactcaagcaagatgtgcatctagatgattgaactcgattagaacgcggtggtgctggagtagaaggtctgatttccacctctctatcgcgaacaagaacctttgtaatgcaggtcttacagttaggacaatagaactcatgaggacccggtttctcctcgcataatttcgcaagatacaattccctcaattcttcagtagttttctctcttaacttggcttcaacacctttgtctttcaagtcaacttcaacatgttgagtcttagtcccatcatttcgagaaaaatggatttcatttccctcttcgtaaggattagaactagtcatcatgtccttactcactatttcatggcttgatgcaacacttaatggaaggtttaagtcatcatttgcttcaaattccagtatttgatcaactggatttcccgttgacatggtcatatcaacaacatcatcttctaagccatgattcccatttaaggatttagtgtctgaaaccatttttaaagtcaatcaaccaagaatttaaccaaaaataaataaaaaatctcagctttagccatggaacaggacatggtacatgtgaagatactctcaaaaagataatttctagcaagttgggatggaaacaaaataattggatataaaacttgagacaataattcaccacaaataataataaaaaaaaaaaaaaatacaggactgaattagtttttaagtacacaaaataaactttaaaggactgatgtaggtccctaaacttttgacgaatcttgtaataaacactaaacagaaccttaaagtaaaacaaaaacattctctttcatttttttttcattgtaaagacagattgtctctactactaaattgattcttccagccaataaaatgagctgtgaacaaaagaatatagatgaaagtgaaacccatgaaaaaaaataaattcttttagccagtactaaagtctgaactcagattaaaatctcaaccccaaccaaaccccaccattggagttggaatttcctcacttgactaatcttcaaaacccagaaaacccaactgagaagaagattacaaaacaaataaagagagaatttttatgtgttactgatattacctcctccatttccttcatgggaaatcccattatttgaatttccattgacattcttctccatggaagactcatcagcgttgtcatcattggtagtagtaacagcagaatcaatgtgctgacgtggcagtcttgttttcagagacaggagttcctctgtctcgggttcaacatcctcccatggcttcactacctccattgttaatgcgtagaagaaagcgcactagagagagcagccacagtctgagacagcccaactttttgtgagtatgacttttttgccttaagcaaaatcaatactatgtccccacttaagtagagtccactctttgattattacttaattaccctttggttaatggttgctactctgcctaaatagaatgttatttttagagaaatgctaaaagcactatttaaaatataatattattgttggtaaaattaagtattgaatctcacttaatttaatttaataattgttatagaatattattaattaagttttaaagcaataccaataaatgatactaaatactactagagaaatgttaaaaggtattaatagtgcttagtattctcttaagtgttaatattgctattagtctaactaaatatcgagtcttatatagtttaatgtaataatttttaaagaatatcgctaactaattacaaggcaatacgtctaaaagatgctaaacaccactagtacctattgtggacaatgtcccacatggaataaatggtagagaattgagccatatataagaacatgagctacttcattcattgccaattggttttgagatggaacccatgattctcaacatggta

SEQ ID NO: 382701 - DNA, 2589 bp, Cannabis indica
atttttttatttaatttttagattttttaatgacttttagtttattttcaaattatatagtattcaaaatatgtcgtaaattgtttttttataacgattattcaattaaatttttttttgggccaatatgaacatgtgtcatttagttaaactttatgattgacttcataacaagaagtcaatgagaacaaattattaatggaataaaattttagtttcaaatattttatatagagcctaaactaatttatttcacaaggtataaaataaactacttagagcagtattattagagatacaaattagtgatttattgttaaaatataacttatcttgtaaataatttgctccgactgccgttcgtaagagaaaaaatcaaatttaatttctcaaaaacaaacaaaggaggttgtgggataaaaaggaaaaaatcttaggtattattaataattatttctcaaatttattctcctcaaattatcctacaatttcttcggatcttgatgagctcttcacaaaaaagattgatactctgacaaatgatcaattggtttatgtttcatctatgtaagtgattaaagaaataactttttgtttacatcttgacccagattcagatggcatgttgggctattttttttttttaaaaaaattgggatatagtgggagaatctttttgtgctactgtttaggaagtattctaaaagggtgagatcgatccaacccttatcccaaagctcgagaattttcaaagaatggagcagtttagacccattagtctctgtaatttcctttataaggtggtggctaagatcatctctaataggttattccctgttatggatgatttagtttcccctctgcaagcggccttcattctaggaagatggatagcagaatcttctattatgactcaagaaattgttcacaagattcaacagaagaaaaggaaaggaggtcttatggagatcaagttggatatgttcaaggcttatgataagatggaatggtcttttattcatcgggttctcttggctaatgggtttgatgagagaagctacaatcttattatgcttgtataaggtgcgtttcctattcagtattactcaatgggagtccacttaagaacataatcccttaaaggggtcttcgacaaggggattctctctctccttttattttccttttatgttaggaagtcctctctaagctcattcaaagagctgaacttagtgggtctattcatgggattaaaattgcgcacttagctcccttgatttctcatcttatgttcgcagacgatactatactattttgccaagccaatgaaggggaagctaaagcattcatacaatgtttatctatttacgagagatggtctggtcatgagtgtagcaaatcaaagtctattgttcttttttctaggaatctgagcaattgtcgaaagcagtctatattgaaattccttgaaatcaaatagtccaatggagaagaacaacacctgggcaatccttttgtcttttaaaggaggaaaaaacaagactatcaaaagctcaagtatagtatgtctaaacatctagaaggatataaactgaagcttttgtcttatgctggtagactaactctaattaaatcagtggtgtcatcattgtcgatttatgttatgtccaccaatttggtccctctttcaatctgtcgtagtctggatgccatgatgagaaaattctggttgacaagtaatatggacaaggataggttcatgtcttataaatcttgggattgcattcgtcaaccaaaaactcatgggggtttgggtctaaggaggtttaaggatatgaacaaagctcttctatccaaacttgcgtgaagcttacccaatgatgttccaaaactgtggcttcaatgcatgttgagaaagtaatgtcgttttcaaaatttttggtttgtggagcataagtctaatgaatctagtatttggaaggatatccttaactctagagatatcattcttaacgagtcagttttcttggctgcatgtggagactctattgatgtttcgaagcaaccttgtattccttggctgaagctaaaggattttcaagatttaatgaggagtttaggaggtagtggccttacaatgaaaatagtggcagatatctcaattaacaatctttggaataaggagatggttttacaaatttggctaacaaagttttggaaattccatgaattctgactcctttcggtgaccaactagtttggaagcataggaaaaatggacagtttactgtcaatgatgcatattatgtggatcaggttctgagatttaggtcaaagcaagagatttaaaaatggatctgcacccgtcaatacatcctaaggttgctatcatgttgtggaaaattctgaatgaagctcttcctaccaggtctaggcttccttttttatcagaaaaagattgtctcttgtgtggtgttgtggaggaaagatgtgttcatcacttcaaagagtgtagttttgtgaaagctatctagttaagatatatttttttaaaatatttattctaaaatagaaatatcttaacttact

SEQ ID NO: 382702 - DNA, 2242 bp, Cannabis indica
gtaattgggcctattctaatatattgctatttcattattattattatttataatctcatcgctttaaagactaaacgttattggttaaaagcgagatcgacagaacagttcaatacactcaaatgaagctttgctatttcattattattcagttacaagaattctcactatgggggattagattgaacattctaatctctcctttacaacactcattgattctcttttctctttctttctctctcaactttggttttctctcctttctcttttgattttggtcttgaattcttgtcttgctcgagtagaataaaggcgtatatagacataggcaagggtagagtgacataaatgtcataacaaaatattaagtgattttgttatgacatggcacttaagagctttaaccgagttagagatagacttcgatatcaaaggtgttgtcgaaatgtgtagccaaacataacaatcatccacttttgattttacatttgagtaatagggactcagttgagtaaagagttattttggtcttggtgaacatagtagttaagtatgtttagcaagttcaaataaagtctaaattttgctagaggaacatacttggttaacatatctgttgggtttctttggttttaatcttcttcacttacctaagaatcttctttatctatagaaaagtcttcatatagaaatcgaatccaatctctcttttttctggacctctctctctacctctcaatctctctctctcaaacacaaagtctcattttaaaactcgtcaatccaacgtacttaaaataataagtgttagtggtgtttataggctctggatgaagattctaagtcggtggttgcacttgataagttattaaattagttatgcaaataataaacttaacacccttagcaccctccacgtaacaaaatcatcacctcagcataagacaatgtgctttcagatgagacatacgtttcttggacaaaagactgaagtgaatgtttaagggacttccggataggaaaagagctagctggagttgacttatctagaactcccttccaggaggaactattagccattaggaactcctttctgaaggaggactagttttcctgaagacaacactcgaagtggacatgatagccattcgaaaacgccattccgaatgggaactatcatttcacgagactcctcttgaatggacaagttaactatctgagaacctacttccaagagacagtcttatggaaatcttttcctttggagaaagtcagtaccatcaccttgctgctttttatgatcagtccagcaaaatcaaataaacagtttgtcttggtttatgctttgggtttgtgatacaccaatttatattatcaaggctgtaaagtaaccatacctcatattaaataatttatacataacaaatagacattatttactcttgatttgtaacctccttatatcaatgacaacgagaatgcacttcttgcgattgtcaactaagtattatacttcagataataatttctactcataatactaaatgttcaaatctaacctgatcaatacaatgttttttttatataattgttatattaatctagtaaagacgttactatataccaagacaaatctcaacaatattaataatgtatgcttatccttattattctgtcatccaatactgtcttccctcgaaagagcttacaccagaacatattctttcaatcatgtctggtgtcttttagaccactcagattatctatctcactgtagcatttatgggacacataaatggggccatgccatggtcccaagtctctcttagctcagtcattacatatatgtgtatactatattagtcctgtggccaccaatgattgtattgacactcgtggccatatttgtgatgattgttcaattctattgtctattggccatgagaaaagtattcataaatctcagacgagatgatctaacaccttactagattatctcagtaaagtaatgtccacaagttagttcctaaaatgagtatgaaataattatcagattgtcaccgatgcccaaataaaatcaacttcaattatgaataaataagattggttcccacactcgaggttgaggaaattacactctataccattttaatattgtcctcttttatttttaccattttttttaaaatctatcatttttacttcttttttaaaataatgtaccaattttgcccctgtc

SEQ ID NO: 382703 - DNA, 4443 bp, Cannabis indica
atttggaatttagtaaataaagagtaatttcatgtaattattaatttgatagtaacgtaaagtaatggaaaaagaaaaagaaaggaaaatgaatcatatgaagatgaatacaaagacaaaatggcctttaattattgactaataatattaacgagaataaatactataaatggccgaacacaattgactttatcgatttaaaacaaagtaaaataaatattacaaaaaatatatacaaaaggtataaattactactaaaaaattaaattaggatttcttggctgaaaaataatcgggtatagtattctcattggtctttaagactgacgcttattcgactatcacaaaactggatagaataaacatcgtgaaaaaatatcagaaaaagtatttcctgacacaagaaaactatcgtcaattttgcacaatcacctatactataagcgaccgcaaaaccgtcagctatactattattgctgacgatttttgcacacatggctatatcactttatagcgtttcaaatattttttttttctaattttttaattttagcggaataaataatatattcagatctatacaatatgaacaatatataattttgatcaaaatatcaaaaaaattacaacttttttttttaatcttacataggaaataaaatatttagatctttacaatatgaacaatatgaacaataagaacaatatataatacaaattcaaaaatctcaaacctatttttttacgcagtgatcagaattatatatgattaacaaagcagctagtggcggacctaggatataatcttagggtgagctaactaaaatttgtagtaaaatttaaaataataattttttttaaaaaaatacatattacattgtttatttaaattttggataaagttgcagcattttgttgagcttgttttcttcagagcactaacaagtggaggaagattgtactgctgctgctgctttgatatctcaatgttatctattctaaatttgttctgatttccaaaattaaataacattcattttaccaaatgaaacaaaacaaagtaataagtattctaactaaaaataataaaataataaaattaaaaaaaaaaacgggtcgggcctaactcggcccgattatctcgggtcaggcttggcccgctaggccaaaagaaggagtcgggccgggccaggccaaagtgatatcgggccgggccgggtttgtggcgggccgggccgagcccggctcgactgacattcctacaacaagttatgcaaggataacaaattcgcagtttccaatcacattaagttaatattgtctcacatggattaaatgtaaaaatattgagccatttacaagaatataagttacttcgctcatcaccaattagttttgagataaaactccataattcttgtcatggtatcaagagtatatccctaactagcattacatccaaacatattcgatcccccaccatcttgagaggagatattgggcatggattaaatgtaaacatattgagttaattataagaatatgaattacttcactcattactaattaattttgagatggactcgatgattgttatatattctaactttgatttgttttcttatttgatcaccctgcaattgataccaaatatcctgttgttgtgggaatgaattgcccatttctagtaaagcatagaatgaaggaatacatgcctgatatgtcgaagctcgaatttgcagaagtgacggcctgtgagagcccacaacctgttgaagctgagaataattcatatcatgcatgccctgtaactgtgatcaaaagaaaactgttaaaagtttaagatgaatctgaataaaacagtgagactattccactcaacaagcaaaacaatagaacaaataacaatttaatttgtcacgtggtttaattttgggggtcaatttataaaataaaacataattatatgcaaaaacaacaaattttataaatctagtggtcaaaatataattaaagtaataactagggtgcaaattaataatcttccaaagtatatatttataacataacataagcccctttctttctcctctctcaaattcataaaaatctgttctttattttttgttagggttttaggaagaagaagaagaaaaatggcgacgtctagggttgctgtgaaggtaaaggggaaggcaagcaaaggatcaaagagctccaatgaacaatcaaccattcaggtcttcaaggaatggactacttggactgtgaagaaggccaaggtcgtcgttcattacggctttattccagctgtgatcatcatcggtatgaattctgagccaaagcctcacctttctcagcttctaagccccgtttgatttgaatcacaagtaacccaggtttcaatttgggattttctgtaatgggtcgttcatccctattagtcgattcgacttcgttttctatagtcttttgagatctcttgttctacatattacttaatatgatttaggtttttttttttaatattatgtaatggatcttatgaaacaaaaaagttcagatttttaatatctaatttcgatttagtgtatgatttttttttattaattttgctttgtacggaataattgagggaattggtgagatgggtgaggtgaaattgtttaaatatatacataaacatctaataatgacttaagtaagttagttatagtattcatattcatgtttttgctttctaagaattacattacttaattgttgttattttgtgaattatgttcaaataatatttgactgatttaggtaagaccttagttatatgcacaatgaatttgttttgttttgtttgtatcttagtttataattgggcttgatgtccttaccttccccatgaaacaaactaattaattgatttatgctttatgccttgatttgatttttgttggctgcctatatacgaggacgtttcctctgtaattctttagttgagttcatttgtgtaaagactccatttttatctaaaggatttctttggttactctcaagtgttcttcattattgttctgctaccctttggtggctgaacctcgcaagcagacttggtgaggctaacaacagattgttcggagcgtgtcaagtgataaacttatttgtgaatcaagttcatttagtattgggaatggagtcagcagctaggagggtagttttgaaatctttaaacattgttaggttaacaatagcaaaagttagctgtggaatgaagttatggaactctggatttgtgtttgtagagactgttacctagttaagaattagctcattttgtcctctgtctagatgatgaggttttaacaggtgtttcattatattatattagatgttcttcttcttctactaggtagttttgtatgctcagcaagcctttttgcttttcctaattccattgaacaagttaatttttgtttcatgttatggtttgaatgggaaaaactagtgaaggtgaagtactatgtgtgtggtttgttttcataaggtttgaggtttgagttattccaagtttctggtgtttgaattttcttaagcattacttgtcattcttatttgtttttgtcttttaccacaacaacatagctctataatatgtctttttgtcctggaaacctaatcaggagaattgattgagtatcatataatgaacaatcttgttcaggctctcattcatatgagacaacaatattcacttcacttcacacaattctatgacatggaaaaagatgaatcttatctaggattgtcagctggacagagtagggtgtggggccaaagttgtcccaaccaaacatgccctatgttgtggcaaaaaacatgcttgcccacttacactctgatcttgtgtttgatgtcccttacccactctcactctaattttgtgtttggatgtaacaaaatcacatgggaaatgatttggaatgttttgtcaacttgtaaccgaaactggaaaagtgtcatctgttgggggcatcagcttcggttagtagctcttttttgcccaactaacacataatttatgatcgataacattcaagtgtttagtggaatttttgagtttgttcgagcatcagtaaactgcactattttttacttcggttgtgagtgagagatcttcatcttactttttgtttacaatgtttgagtttgtagttttgtttctgtcttcatatgcttttcggcaaggtagtaattagaatgagtgggaaagattgtgtcatagtgtggccatgagggacaaaactgttggaaaattttagggtggcatagatagaaaataggagagaaagaaaatctagaggaaagaagagaaaaatatccactttctttgcacagatagccttgatacatgccaaaaattaaagaggaaattacatcttataccctttt

SEQ ID NO: 382704 - DNA, 834 bp, Cannabis indica
ttttgagtccaagtcccaagtcacaaccgaacaaccgctacctctatagtctgttgagaagtccatgtcctgaaagttactttagtttggtttgatgagtctgactcaagccttctctaattaatcacagataggcttctcttacctctctcacctttctcacatttccaaattaatttcatcattctattattcatggtattttttgaggtacttacttggtctagaatgaaaagatccattaaaactaaaaataccactctcacaaaaggttttgataaaatcatagattgggagcttagaccaggtggtatgcttgttcagaagagagacattggggatgatgatgcctcttctggtgctatgatcaagatcaaggtttctcatggttcttatcaccatgatattaatgtacctgctcaatatacttttggtaattttttccattcatcatgattacatctgggtttatgtaatttttacccattttcagtgggtattctgcctacttaaaaaatgtatctttttttttgtctgatatatggtgtaattttattatcatctccttttaagttttgcttctcatgagtatctttcttactttgattaacataattatgaaaggtgatttaaaaagggttctagcccctgagactgggttgcaacccaaggagcagaggttgttgtttagaggaaaagaaaaggaagacaatgaatgtttcgacatggttggagtaaaagacatgtccaagattatactacttgaagacccagctagcaaagagaagaaacttcaagagttaaagaaaatgaaggccttttaaaagcttatga

SEQ ID NO: 382705 - DNA, 1960 bp, Cannabis indica
gctaataggaataaggtccacataagagttgaaggaggttctttctctgacctgcatttgaagtaaatattaagaagaaaaaaaaggcatcatcaataagaattaccaaatggatgcctctggccacaaaatcatgctgcttaacaaaaaaggcacttgcaagatgaaagttttgagcaaaatagagcattctccattaacaactaaaatctttaagcatagagataattttataataataccgtgacacactcactgaccccaaatctaaaagcatattgcttacatcatcagattgagtatgacagaaatacgattggctgttaatttagtatataaagagggcatgaaaaagacaagtcaaatttattccaccaaatcagacaacacaaaacaaagctaaacaaatacagaaaactataaactataaacattttatttcatttggaaatatgtaactttttattgaatgaacattatacttcccaaaaatcaagattcttaaccgagaaaaaatatcacagaatcagagtgaatcaatgaaaggaaatacaaagatgagaatggaggtggaggaagaaaactgcaacctcaataacccaatccgctaatcaactaagccacatccagaagacaactcttatgcaattccatattatggaaatagcattaaattactagaaaatatacttgttaactatttccaaataggcttaagtgaagtcaatgaatgtttcaacgtgaactgcaataatgcaaataattgctgacacagcttacctcccggggaattgaccagttgttctaactgcatgctccagttcaataataagttcctcaagaatatctgcctggaaaagagttgtgacaaaggcataacttaaacctacagaacatactttttctttgctcctaaaaaaatggaaagaatcaagaagaatgaggagcaaccttgccaggatgatcatacaatggagaaagatcagtgaacaatgacgggactccctgaaagcatgaagaatataagctgccataaagtataaaaaaccagttagagtaataagaaaggaaccataaataccttagtaaggaggggcttaatataattgtctgcttcttctcgaaatctgtcaccttgcagaaagtcgagcggtattctctgaaacacccaacccaacaaagattcagtgataagtccagaaacaacaagagcattaaaaaaataatgctcatggtcattctaatgctggaaaaacatagtagctagacgctaatttaattgcattaaccacttaaatcacttgaggaagttgtagccgagcatttctaaaagtaagtaaatgtgacacaaagtcgtgtctgaaatggaacaatggtatctataacatgaagaaatttagaaattaatagtaaatcaaaaggccagccccttgaaactaatttaacagcagtttattaataatcatttaccaaaaacaatctagtgtacaaatttaaaaattaactagtgcagaacacaaagaatctactttacaaaattacagcaaccaaagaacctcaaacttaaagagattacaaacaactccatcacagcagtacacactattgaatagaataaagcccagtgttcttacaagtttgtgcaaaaggcttcatagcaaagacaaaaaggtgaccattgcatggaaagcagagcaaagttaaaataaaatcaaacaactttttaccttgacagcagaagaccaattgtattgctgcctaagggaattgtacaatgaatccagctgttcaatttgatcaggtgaatactgaccattttcagaatagagtccaacacacttatgaagaccttcatagtatctgaaaatgaactcaaaaaatcaataacaaaacatgaagcaaatctccccaaggaattgataaaaataaataaaatcaagcatcataaatacccgtagtt

SEQ ID NO: 382706 - DNA, 800 bp, Cannabis indica
tatatatatatatattatattggaattttgtaaaatttttcaaaagtgaagtttgtgatagtgcattgagttctacataagatagaaacacttcattattaaatatataaggtgtaactatgagatcatagatttgaactctaatggtcacccagttctgtgcgcatgagaacacgcgtgcgtcgccatccgaccatgctgagttggcgggttggttgttatgtcgttttaattctttatataccgaaaattaaaataaatattttttatttattacttaattaattctataatgttaatcaattaaagcagtaaaaacgaatcaggcaatgattcacttttcactgctatgaactaattaatgttcttctcacaatcatatttattgttttcttaccactttattgtgatcgacttctctatataagtcgtatcagaacaaggggagagtacatctttcgaaacacaaaaaaaaaaatctttttttccttatgatttttcgcagagtaattattgaatgtaatcgagcgatattgttcggtacagtgcgattcatatacaaaagttattttatcttgaggacattgtggttgatagaccgtcgtgcacacttcgggaaaatctacaaaacatcttaaagagagtactaacatagtttgcgactcaaccagaaatatcattccataatttgttccaatttatttaatgctgcagaataacaatatatatatatgtattctatataaagtgtgcctatataacagaatttttaatttttgagaaattcatgggtgactttt

SEQ ID NO: 382707 - DNA, 2756 bp, Cannabis indica
tatatcaattatatcatgaagttgtttctagttcctgtttttctcataattcatttttaaaattttgttttttcatttatttaaaaagcattgtagctgtccttttctcaaagtaatatttctgtaactcctttctttcttgacagcagaaatcaaatgctcctggagctgtaggcaccagccttgccttggagactataattcaacattctcctgtagatctgaaacctatcaggtatatgcattaacttatccttatcacttcattcctcaagttgccactgaatccttgaggctttattgtccttttaccattgtttcatattctgtctgttgcagaaatgaagataccattgatattcttgtttgctcaagaggaggtggaggtcttttggaagaacgcatgcaattagttgctgagctttgggaggagaattttaaggtttgaaatggaatatacctttggacatagttacaataagttcttgcatgctaactggtgatcattgttttgtaggctgagtttgttccaaaaccagatccaagccttacagaacaatatgaatatgcaagtgagcatgatataaaatgtcttgttatcataagagacactggtgggtctcataaaggttctgttaaggtaattgctgtctcaatttagttaatttttgttaagttcaataacgggttggttgaacttgtaaatttatttgtgctagttaatgggttggttgaaattgttgtaagttcattagtgtatgtatgttccctggaaggcatgttcactcagtggtatttcttgtttgacctgaataaataggattatggaatatgtgtgggctattgggatagaaaggagatgtaacttttgaaaatattgtagaaactatcaaattatgggttgcattggctaaaagatgtttcaaaattcttttgttttgatgatttcgtaagagattggtaggctgcttgcggtttccatatagtttttggactgcttgtcttcacttgcatgatttgtatttgttagttttggaagaataatacagttcttgtattttagtgaaaagtaactgcaaatagttcaatggtattagatctatttcttgttgattgcaaaatagtttctttaatatatattttttgttatgctttattatcaggtttttctttttcattgttactatttattgttttggatggtctgataccataaatagtaacactatgaagcttcttatgattgaaaatttgatcaattaatttgagaaaatgctaattatgtaatgtaaattgaatggttttttttcataatttggaaaaaaaaaagacacaagcattaaattcatctcacccaatacaatattgtgttaagaaaccatcacactgttgaattccagttctgtttgttgttgactctccaagtgttgtattttttgaggactatttgtttatcaaattcatgaacagctcatgcacaacattgaaaaacaaactgatggaatttctcccctaggtacgccatttggagatcaaaagggagaaggaagtagaaagagaagaccttgtgaagtttctaagcgacgcaatggctgtacagttccgggttccttcaatatggagttagaattgtctatttcatggcaacacgttttgttggttgatcattgatgtatcaagatgtttggagacttcatttcatatttactcaggtaaaggaggagggttttgctaattgttagtgatagcattctttcacttttttattgcacgaacgccttgttgtttgtcgctgcaatgtaaacaggagggagaagtagtagttgttaatgtctgtttcctgattgaggagtcagtacattgcttcaagtttttcaaaattgcacttgcatgctggctacactgttatggggaaagtaaacttttgaatagggagaaagatgggaaaattccattttccctttttcctgtcaattctagtgtgtatagttgtaaatataaaattttgtgagctgtccaatagtctcattattacaatatatgtatagttttaattcatatctctgttgactattctgtgctatgtcgtgttggatttacatattatttccttatttaaaatatctgttgacaaagttccaactaacttaatcagtttcaaaatattaagaataataaacatacagttaggttttaaatctgactgatgtaaatgtagggaaattcagagtcgttaaagttttttttttttttgaaaataaagcgtttttatatagataaaacaagttagattttagtcattacaaaaaatatagtctggtatagaggatagttctaccgtacttgaaatattctaagcaaaagttcacctagctacattatggaccgcaaaattacaacttttaaaaattgtaaccaatttaggttttcagctagaggttaaagcctttatatgggaagcttaaatcctaacttcacaatttaaatcccttgaaaataggatagctaactagatatttacaaaagaccaaaatttctttagattctagatattatttagcctgtctgttgggcttttggggtccaatttgcagctcacttatgatgcccacatgtaggagtgtcctgtgagacctattgagcaatccttggtcggctagggcttggtgctggccagactagccggccatgatgttgtccttagcctggccggccatggggtcggctaggggtggctggccagctcttgagagtga

SEQ ID NO: 382708 - DNA, 1366 bp, Cannabis indica
aatcaagaatcacaaacacaacacagaaccaaatcgaatggaaaccctaacaaagctttgagttttttcttatgaaactcgaagtctgctcaaaccaaaactaaacccctcatatctaaaatgatttgaaacccacacacacaaacaataaacatgtacaaaaaagtaaaggaagagaaaacaccaagacttataaaggtttcccaaaaatcagttggggaaatcttctttcgaactcacctcagaagtcttggctcgattccactattagatttttaagatcaacaaattacaaagatagattctaagtcacaagtaacgattggtaatcctttgaattacaatagtttttctctcagagttttcctttctgtttctctctctctctccaagacttagcactgtaagtctcctcattcttcttgatatgctctcttccgatttgattctgggtatttatagatgtagagagcttgtaacacgagttggaattagttgtaacagtctctgatcttgtaactaactttagttatgaatatgagagtttgttaaagtcacaagccaatttttgtgctgtaataattttatatttttgttctaaaatatttgtatattgttgatttggacagtatatatcggaatttaatccaaaacatattcttcatctcaaaaagtttttaaaaataaacggtttcaccatatatgaagcaaacttctatccaaataatatatcgtccacatgtaaaaatattactcttattaaccttttagtatatataattaatctataaaaatctctatagttatttatgtatacattctcctctatttcggaatgcaactttcacattaatttaattaaattcaatgttgcttaatgattctttatttgcgaaaattcattataatgacctccaccccattaagtaattttatgaaaattctatattgcttttcataatattcatttcttcatgacatcgtacaattctttacaatctatagatgaaaaaaaggatgaaaaaagaacatgatatttttcaaatattgtagttgccagttggagcacataataaaatcattagaaatcactgattttgttattctaatcggtgagagcttgaattcttatttaagaaaaattaattatacttagagttagtgaaagcttaaaacccgaatacccattctaatttttgtcatcttcttttgtaaatccaactttagttgatcaaagttatcaaaatccatagtaaaggttaaaaaaaaaataatgcctccagatttattcattctaacacattctcctggaaaccacttgaggctagctcaagtggacataaatgggtgtgtgtgttggaggtct

SEQ ID NO: 382709 - DNA, 2862 bp, Cannabis indica
aaaaaatataaaattcatgtagttttgctatcccaaactcaatcacagatgttgaattgggtcgctgagcaaattaatatttgaccgtatattgttagtttcttcacgggtagttaaggatagatttcgaaatcgaagcacactattcctatttttgctgtaagagcatctccaactagactctaaaacattaaatatagtgtagttttatactatatttactccaataagacactaaaactatactcataaatgactttgtctaccgtgtcccaccaaattttagtggggcctatagactacttttttttattaattttttaataactaaataatacttttaagtggaaaaattaaataattatatatatttagtattaaaatattcttattatattaataaaataatagaataataaataatataaaatttattataatttttagtgttgtgttagaattaaaaaaaaattattaaaataataattttttagtactaatttaatattaaatttaaattttattattagagattgcctaaaagtaaaaaataaaaaacaaaaaagtagtacagtcggaaaatagggctcggaaatatttcggaaaaaagaaaagaaaaagaaaagaaaagaaagaagctagggcttgaaaataatttcagctttatcgagtttcaaacccagtcactcaagtctccagagtaaccaaaacaactcaactcaactcaacacttttactgcaaaaaaggtaaagctttatggctctcttgctctttagctttctttctattgtggttaattttgatatttttctctgttatgcttttgaaagacttcaattatcattttctgctgtttggaggatattagcactacccatttttcttttcgggattatttgtttgtgaaacttagataatccttctttgtctggtgtttttcttgaattttcaactaaaatgttgctactgcaatgccatattcaacaattatatgatattttttttcgtgaaattgatagattttgtataccattcggattgtgttgggctttctttattttacactagcttgcagttataaatttctgtaaattgaaatttaaatggggtttttaacttgtaggaaaacttgttttaccaaaatcatgtttctttctgtttatctcttttcctttaacaagaaacttgtgtggactgttagcctgttaggtgaaattggttgtagtcaataaaccattgttgttttgagcaaattcttttgagtttttctttcattttattgaactttttttatcgtccagtagtgtatgttaattactgcaattgcaatgtggttcgttgattaggtaggagatatgtcttctgatacggggaaggaaaatgcatctgtggttgactcatcagtcactgaatggaaacaagacatggggaattcagatgaccctggtaataaacgatgaaggtgccttttattttatttgtactttccactttcttgttcttaagttggtaatgggatggactatggtgtggattcatttgatagagtaacggttttttttttttctttttgtatcaaagtaatgatttttttttgtaactaagaaatagggaatggatctctcaatagagattttacagcttctttttctattttctcctttatttatttttatttatttatttgtttttattttcaagattctaggattaatatgctagaacacctgtggccgatgatagtgatattcgtagatggtggctggtgcatcactttgtagcaaccatgccaaataacttttaagagtattttcaccagaaaatacaattatgtcaattaacttggaatgaagaatatggccgtgttgtgtttggattcaataagattttattttaggactcatgttcctgcctcctggtgtgactaattctttgaggccaactttagccgatttcttggcttagaatttgatggtagatgcatctgctggaaaatagtgttatacacatatttccttacaacatctttacttttgtttactcaatcttgaaactgatgatagttttgtcttacctttgtgcttgataattttattttgggatattggccccaaaaccacctaaattatacgatttgtgacacttaaccacataaacagattttttgacgcaaaactacctaaattgtacatctgttttggtctttactcttccgtccaaaatgctccgttagtggacataccacagtgtaccttgatgtactcgtggagaatatttagtggttcacataatattaattatttaaatataaaaaaaaaaatattaaaaaaacaaaaaaaatatatagagaaaaaaaaaaattaaaatacattttgtttttgttctctttcttctggaaccatcagacccccccaccacataacatcttcttcttcttcctccttccttgttgttcgtcttagctttctctagtacctttagagtgacgaagattgtaatgtttctgtccaaggcttcagcgctaagtctagggatgttcaaataatccgtaatccgtggttttaaaccccgaccaatccggacgaaaccatttgagaccgaaccaaatgaattcagtgtgaatgatttgatcaatccggaccattttaaattccctggttcggtcacagttttagaaatctcggtagcggttcaaatcaaactaatccgtataattattatatacacttaacatttttttttggacaaaatgttgatatttgggaacaactttaaatagaatattgatattgagtttatattattacgataataattttttattgttacttatgtattataaacttattaaaagtaaaaaa

SEQ ID NO: 382710 - DNA, 1667 bp, Cannabis indica
agttattagcaacaacttccgggttcttcaaaccatcgaagcccaaggccttaccagccgggccatagttgtagttccaagagagttgaatgggcccacgacccttgtaactcttgccaggggagcagggccattgggtgttgtctgggtcacagtagtcgctgcctgggctgacctcttccttgaaacacaaaccccacgagtatgggccgtcaggggctgttgcccacccaccggttgtctcgtgcgagatttgggcaagaaaggctgcgatttcgcgcttgcgggtgggtaatggtccggttgagccgaaagaagggaaagtcttggcggctttaaggaaagtgtcgtaggtgtagaagttttttagctggacatgcagtgtcgtccttgtgaaggaatatgctgtcgaagacttggtttgagatcaaagaggatatgcagttagaacgtggcgcaactcttcttggtgttgatggtcgagttgcgtcgacaccaacaccattggctgttgctgctattactataacaaggagaagagaattaaggaaggaattgttgaaggccattgttgtcgagtttgtgaataatagtgggtggtttatgttactatatatataaataaataaatatataatatacccgtggaccgtggtggtgttgaccactaaacttagaaaagtttagtaatgttataattaaaaaaaaaagtcagaggttttcgaaaaaaaaaaagtcagaggtcaaaattgctgacttggcttggtcttaagcacaaagagggaagcacaccacctatgaactagctttttctcatggttatggattatgtatctccttctactccgcgatttgtttgtcttctctttgatttgtcttattatttatattagatatgtgtatatatcaaccaaagaaaagaattgcatatatatcatgcccaagcagaaaaaatgaaacgtgttacatgcgtgttttcttttccaattatttcaacttcaggtatatgtataccatcgaaaataattgaggtctcgttggacctttttgtaccatatatttgttcagaaaaaaaatacattcgaacgaaataacaattacaaattattcatgcatacatatattctttagcatttgctccgttaagattcaaattattgtatgaaattaaacatgtgtagtggtgatatataatagtacaatagattttgatgaggcgtgttgtttagtaataactaatggattatgaagtggagcagcattgcatttgcatatttaacaaatagaccattcaaggaatatgtaatgaccactcattctcaccctaagtgcatccttactataaaaaccactgcctgcctcattatcaaacacattgtccattactttgaattgactttgtttttcttccattaacaactagaggtgtgaaaaaaacaaaacgaaaaatacctaggtgtggaatcattaatttagcgatacaggcaccgaaatttggaccctttcaaaactgaggtgtaagtgtagcccatataaataactcattagatggacccaaaataaagcccattgggcctatttggcttgggattgataatgggctgctgtgacatataactgagaaaattacattgtgtacctattttattttatatgttttaattttt

SEQ ID NO: 382711 - DNA, 2448 bp, Cannabis indica
aaaggattgaggttgagggtggctggagctgagttgcctgaatgccacagaggtggttggactgaatagaggaaaggaaacctgctatgatactataaagaatacaatgaagagaaataatatttatattattaaataaaataaaataggaaacaacacaaaattagaaaactcatcgatttcctatctaccaacacaatcaactactacaaacttaaagataagaattgttataaacaacacgacttaaaacagactgaaagaattgtctaagagaagaattcagttggccatacacacttgtgatctgccaaagaataacacccgaaatcttgaccaaaacatcaatatgaccacgggtaaaagagagaaccattatctttcaaaataaaaagagagaaaaccataagatcaacatgctccaatacacataagacgcaaaccacaatttctactaattttttcaattactaacttgtccatgaaacccaatcaaactccaagaatctctatttttgaaacattggcaatagtttcaaaaagaaaaagcacattcggtttgttttttgaaaattgtcgtggagatctcatcctatcattgctcacgccttgaatgttccacgcaacacattcataatgagagccttggttcacagtcgtcgccaagctttcaaaaaccaccccatcactaccgttcatcccgtcgggtgtcacgagagaacccaccaaccacgacaacccctccagtttccccatccgacacaacccaaatctccactacctcacctccaccaacccatcagaacacacagcagctgccacatcgaccactagagccatcctaacgtccttggctcttcttttcgaacccaacttcattattttctccattctcctcttcatcacactccatttcttcactatttctctctttttcttcattgtctcccattacttgttcagctctaaatctatttctcatttctccattttctcgctctctcactcatatttatcttacacaaaatttcaaattatttttgtaaatgttctgttaacatttttttaaaataaaacttttatttttaattttaaaaataaaacatggaacgcattttattttcaaatacaaacaaagcaaaataagaagaaaaaaaatacttttacttttgtattagataaagtagtgtttggtttagttttgttgtatttaggtttgtataaatatatttctttaatgggaaccttctgtataaatatatttctttgataccttattcctctcactgtgatgtgtgattcagtttataatcattgagttggtattttgaaaatcaaaataaggaaagtgaagaagtcctctaatataaattttagctataagtgctgatctcactgtttgattctaacttctgtgcaaaccatgtgctaatcaattaaaggtttgacgttgaccaatagcaagcttagccacttcaacttgaagattttctgctggaaagaccaagtttgaaatttctgttgatcataataggttatgctggtaatattattgttattatgattttttttttaatgcttattatgtttcactcttaattttgaattgtgtattattattattattattattattattattattattattattattattatctaagataaccttataaaatttaaaatatttattaaaaaattattaaaattaattttgaaatttgttttgatttaaaataaattaatactgtaaacaaaatatttctataaaacaatgaatttaaattattactggcgatttttcattacccaaatgtaaatctttatttatcttttaatttggaaaggtcacaaaaaaaaagttaaatttaaaagcattttttattaaaaaaaaatatgtatatattatattactttgagaaataatatagcaagctatctaattatattatatttttaatttatgaatgagttgcaaaataatcactaaggagaggagtgagttgcaatcaaaagagtgagtctcatcatagtagacatggatgagatcatatgtgaagatttgataaacttggtgagagctggtgaggttattcgaattatggcacatttattaaagctcaatcattttaagaataaattaataattaatgggagaaataaaaggaataaaatgttatgaaattaaaattattattttaacatgttatttattaaattgattagaaatggaatcaaattcattttattttgttgggtaaatactaatttagattttatattttgtaaaagttattaattggactctctattttattaaatgacaaaatagatcctgtattttctaaaatagtacaaaaagaactttgaacttatttttttgttcaaataaaatttaataataatttgatcttaaagtgttatgataaactagtttacattttt

SEQ ID NO: 382712 - DNA, 815 bp, Cannabis indica
ataagaggtagctatgcagagtactacatccattgtatatagcggttgttgaggagagcatgcactccacgtacgtacgtaacagatcgaattatatatgaaaagaaaaccctaaacgctattacttagtcttaccaacagtaaattttggtggaaaactcttgtctcttaataagaaatgtcaataaatatcaatgtatattcaatgaagttggttctccaatattcaatagctagctagtatatatatatatatagagagaaatcactatattgcaagcaatgacgaaaacccttcatcacaaaagtgagttgtgggttgagaaattaacataatttttaaaatcgaaagaagtagtactagctagctagtgtcatggttcttattttttttttccttttaattgtttaacatgcatgttacacacaatgttacaaaaatattatacatatttaagatatgaaatgtaaatttagacaactactcatattacaccacagttaataattaaatagtgtacatgattgtttctcgacatcacttccacgtggtagaatttacgataaggtaatcctatttcaaaattaattgatatttttttttttgaagaaaagcgtgctgttatataacataaacatagttagacctcgcggtcggtacagaataagttatcaggcatagaggatagtggcagagaaccaaacctctgaaaagaaaaagcccacttagctacattatgggctataaaattacattgtctactaacatgctgaaaactacaaccaataaaaaaaagagagtttcttttacaaaa

SEQ ID NO: 382713 - DNA, 5514 bp, Cannabis indica
atcactatctttgaaagtttattgttaatcattatgttttatttatgtgcagtgtagtgtagatctaaaactttatggttttgattaaaattaatttttaattaactgtagtacaaataattcaatttaagtttttaaatgtacaaataattcaattatgtagataattggaacaaatggtttagactgaaatgggctgaagttttaagtagcatctctaatggtaaatatcaaattttgtgttaaattaacacaaaaagaataaaattttaacacaatttttttttctttcaattacaatactaaaaattatatttttgattattatattattttgtaatattataaataaacacaaataatataaatacaaaaagtttacttataaatatattatttaaatattaaaaagtaataaaattatatttagtgtagtttatatatattagtgtgtgactatagacaatgctatatataggataggttttagagtgtaattggaatgaatttggtgtaaaattttaacaaatttagcattgtagtgttccattggagttttcctatgaaagaagttgcgcaatcgtttttatttttcttttgctaactgtagatatacaacttggaaatgctacttctacaaggcccaattcaatccagtaaccttaaaccaggcactgagagtcgggttcttagccagatgctgagccagaagttggtccctactaaggactccaacccaataaagcgggaatacagacggttcaaatattttatagaagacaactggaagcgtatttgggtcatgtgcctatggctggccatctgtgcgggccttttcacttggaagttcattcagtacaagaatcgagctgtgtttgaagtgatgggctattgtgttaccactgctaaaggtgctgccgagactctcaagttcaacatggctctaattctcttacctgtttgtagaaataccattactctgctaaggagcaggacaaagttgggagttgtgataccctttgatgacaatattaattttcataaggtaaaatgaccgagctaaattaatttcgttatagtttcttggatgttgtgattgatattaatctccatggttgttgcctttttgtttcttttaataggtgatcgctgctgggattgcaattggagttggtctacatgcaggggctcatttaacgtgtgatttccctaggctattgcatgcaactgaagatcaatacgagccaatggagaaattctttggggaagaacaacccgaaaactattggtggtttgtgaagggtacagaggggtggacaggtgtggtcatggtggtcctaatggctattgctttcatcttagcacaaccttggttccgacgaaacaggttaaacctccctactgctctcaagaggcttactgggttcaacgccttttggtactctcaccacttgtttgtcattgtttacgtcctctttgtcgttcatggttactacctctacctctccaaggagtggtacaaaaagacagtaagttactcaaacaattaatttcgatttatttaatctattatttctttactttaattatatcatctaaattctgatttcaattttctaacattgttgtagacatggatgtatctagctgttccaatccttttatatgcctgtgaacgcttgattcgtgcatttagatctggtaacaaatcagtgaaaattttaaaggtaacttttccttatttaatgattttttgtttttactttctcaatgagtaaaaataataaaataatactttcttcaaatttttaggttgcagtgtatcctggaaatgttctagcactgcatatgtctagaccacagggatttaaatacactagtgggcaatacatatacttgaattgttcggctatatccccatttcagtggtaagctttaacttggaaactacaatattcttaatgttcttgttatgtgattatgatatttgtgtaaattatatgaatgcatatatatattaatgttatcccaggcatcctttttcaattacttcggctcctggagacgattacttgagtgtccatattcgcacagcaggtgactggacatcacaactcaaaactattttctcaaaggtaccaatctttctccaatatgtgactgatctaattcagtcattttccacctcatataatatttatatatatcgtaggtaatcttgctaatcttggcatgtgattattataggtatgccaacctccatctattaatcaaagtggccttctaagagctgacattggtcaaaccaataacataccaaggtatacttattcccattacatcattagtcatcgcttagtatatgtcccgattaattttgagataggttactattacttggctatttttgaacattttcaacttttatttatggtctatactgattgatgttctgtttccaaaatattaggatgccgaggcttctaatcgatgggccatatggtgcaccagcacaagattacaagcagtacgaagttatccttctcgtagggcttggaattggagccactcctttgatcagcattctaaaagatgtgcttaacaacatgaaccaatacaaagagatcgaagatggattagatagtggatttaaaagcaataacaagagaaacccttttgccacgaaacgtgcctatttctactgggtcactcgagaacagggctcatttgagtggttcaagggtgtgatgaatgaggtggctgagaacgaccacgatggtgttattgagctccacaactacttgactagtgtttatgaagaaggagatgctcgatctgctttgatcactatgcttcagtctctcaatcatgctaaaaatggagttgatattgtatcaggcacaagtgtcaagacccattttgcaaggccaaattggcgtaatgttttcaagcacgtagctgttaagcacgttgatcaacgagttggtaagtattttgctttcgttttcaacaactaataaatatattttcttaaattatactcctcttgttgtttgtcaattttaattttgtttagttgttctgaactgaaggtcgttaattttggtattttcatttttgtaggagtgttttattgtggagcacatggattagttgatgagctaaagagcctatctctagacttctctcggaaaacaagcaccaaatttgatttccacaaggaaaatttctaagttaattgaagttacttcttctctgtagttatattattttatgtatatacaacatataatacaagtttaggccccataagggttttggcctattaaggtatagattcaacttgtccgcattcttattagatttattgttttttataattattatttaatgaagatcattgagtataaaatgtagaattaatgtaatggtgattctttacactgaaagtttgattgtaatttttttttttaactaaaagaatgaatattttgttgaaacatgtcagtgtttaatcttgagagagaaagtgaagaagaacagagttgtattattattattcaagagtatggaaaaatagagtttatatacaagatccttaaccaaccaaaagcaacagaaccaataactcttaacagaaagaatacaacagactaactgaaaaacagttaggacagttagcaacaactatcctatgtaacagtgtccttgatagcccccttcaaactgagtgtggattttgtagcaccttgtctcgaacaaaatacaagtcgatttcaataggctttaacctggcgtgtaagacaggattggcagctaaaagcacggtgctttgattgtcacactagacagaaggagctgtaggacaggtaatatgcagttcatgaagaagagactgcagccatgttacctctgaaactgcacttgcaaggcttctaaattctgcttcagtggaagacttgctgattgtggcttgtttttgtgatttccaagtgaccaaatttcccctaaatagatgcaataacctgtcgcggacctcctgtcatcaggatcgaatgcccaatccacatcacagaacacttcaagggagaaatccttaactggtttgagcatgagaccatagtccaatgtaccagcaacatatcttagtatccttttcactgttgtccagtgagaaattaaaggttgatgcaagtattgacacactttgtttacacaaaatactaggtcaggtcgtgtgacagtggcatactataatgctccaacaatggccactattcattggtgtgttctgtttgtttacattttgacaagttcactcccataatttgacagtttaaggtcactattcattggtgtgttctgtttgtttacattttgcatatcagctttgcaaaggagctcttgaagatacttggtttgaggcaaaagaattccatcagaagttcgagtcacttgtatgcccgagaagtaatccaccaaactaagatccttgagagaaaaggtgttgctaagttcttcaatgagctgattgacaagtgtgtcatcacttcccttaactaagatgtcatccacatatgctagaatgtaaatgcagcttgtttttgaatacttcaaaaatagggactgattagcctttgagaactgaaaaccatgttgaaccaacacattggaaagcttttcaaaccaagcacgaggtgcttgtttgagaccatacagtgccttgttgagtttgtaaacatagtttggatattttggatccacaaagccaggtggttgttccatatatattttttcatgcaaatctccattgagaaaatcattgttgatatctaactttcgtattgtccactcatttgttattgccacagttagaaccacctgaatagtgacaaccttgaccacaggaataaatgattctgagaaatcaaaaccagcttgttggtgaaagcctttggccaaaagcctagctttatacctgtttactgatccatcttcgtttaatttaaccctgaatatccatttgcacccaatgggaaccctattagcaggtctgggaacaacaacccatgttttgttcttcttgagagcaacatattctatattcatggtattattccaatggggttcaagaagggatgctcttactatttttggttcacacacagctgacagtgctttgggtttctgataccacatttaagtctggtttgcataggatgtgtggatatattgggtgcagtagggtttgtgtttgtggtgataggcatggtgcttgaactagcattgtggttaattgtaggattggataaaatagaagtgtattggacaggaacattgacaagggtattgttgttgggtttttcatttcaatataatcagatttactaattaataaagatcagaaatcacattttatgttgcatggttcacatgatttatttcatgattgtttaatgtataaattctattaagtccggaacatatgtatttgttcatgattatagtgtcgtc

SEQ ID NO: 382714 - DNA, 3362 bp, Cannabis indica
aatatttttatgttttaagatatttttttttacatttttacagttttctataaaaacaaaatgaaaacaataagaaaactacataaaagtataaaaaaaataacatttaaataatatcaaaacaaaaacaaaaaataacatacagataacaaaaaatcaacaacaaattaacaaaagtacaatataaaaaaatcgtattttctgtaaataaaataaaaaaaaatcgtaaaatatttaaaattctgtgaaaccgtatttttgtaaattttttgtcgtttttgtgtatttgtgaaataatccctttaatattagctctcacatatctattttaaattaaaatataatattttttttggatttgaaaaatttttattccaactattactgaacaatacacactacaaaagcagtaactaaacaattcaaaaattgtttagcctaactattacatttttctctctgaaagatagtttagacaaattataataacaaattatagctttcatttacttccacccatggagagagaaaatgagagtcgcacgtgctgatttttgaatttttagtaaaaatataatacttacttgttataaaaataatatttgtaatattttaattaaaataaataagatttatgctctcgaattatgacattagtagagttttgatcgtgaacattttttcattactaaaattctccttgaactataaaaatcattgtttgtatcactcttcaattatattttgtaatagaattatgtatcttgtattcatggttgttatattggttaaatgatagtcagttaggtagttgggataggtaggttagttaattctttatcctttttttacctttagtttgttaacggcctcttctcttctccctttctgtatatatgtgtgctctttacactacttatattcattaagtaatttttaatttaatataatttttcattctctctcaaagattttcttccgcaatatggtatcaaagcagaaaattcaagctttctcttgatcgatcttgatccttccttccttaacaagtcgtgtcttcttctttgacgaaggtggtgttcttgccttcagctccgatcatcattctgttggtgattcgttcccctgtacctctagaactcgctgattctcttctctctaaaaatgtcgaacgataatcaaatcattccaaccgatgtcagaactactaatctttccataactcaattggtttctagttcgcatagcaatcaaacaattcagactactactacgaaaagtcctctggaagatacaagtgatccatactatcatcaccctggagacaatccaaaaaatatcctagtttctcagcttctcattgggcagcacaactacgcgtcttggagtcgtgctatgcaacttactatctctgttaaaaacaagattggtttcttggactccctaaactctcacctacttatttcaatatgtataatgcttagatttgtaacaactatatagtgatttcttagattcttaattttgtgtctaaagaaatctcttctagtcttcttcaatagcaacgatctggacaaacttgtaagtacattttcaccagagaaatgggcctcacatcttcaatcttagaaaagcgttgatgaatctgaagtaggacaatcaaatgatcaacatgtgctataccaaattgaaaactatttgggaaaaactgtcgaattacagacccacgtgcacatgtaatgcctgcgtttgcggtggagtcaagaagcttcaagaacattatcatatggagtacatcatgtctttcttaatgagactatcaaatcactactctcaagtcagagaaagcattctcttgatggatccactgcctgtagcaaatagagtttttcaccttgttactcaagaagaaaatcagaaagggaacttagctactggtgcaaattctaactccaatatggtctttgtttttcagggtgataaaaactctaccaagtaatgtgatcctcaagatccaaagactcatcctcccaaacgcaacaaacccttttgcactcactataatgtacttggtcatacattagaaatatgttacaagatccacggatacccacctggatacaaagcaaacaagactaaagaaggctatatattgcaaaccaacttcaagcctacagtgatgctaataccaattctgatgagactaacacccttcttcctcaactcattgttgttcagtattagcaacttttgaacttacttgccaatcaacaaactagtattatcatttacaaaaaaaaaactaagtatgatcattttagatcctagcacctcagggagtacaacaagtatcatcttttctcataattttgggtctttgcgttttttctaaactaaataattttaaaaaataaacatttgtgttgttattttttgtaattatgataagtttatttttataaatgtattgtataacattttgtattgtacaaaaaaaaactatatatcatgtaaattattatttaattaaaattatactaatattagtagtttatatatatcctcattattaggagtcaaacgaacattatcaacaccatatgtacaatggacacaataatagacctataataactttgcacattgtcattaattaatatataattattgtgcaatgagatatgatcatatttatgattaatctccatttaataacattaatgatgcaattattaataataacaactatgtacatacatattaaaatgatcatatatatatatatataacatcatgcatagacctagctaatatttgttagaatatttgtaaccgtatatgagttatgatatgaaaatgatgatcacataatatcaatgatacaatatgctttacctggccattgggtcaactagctattgttataaatataaatgtatatatacatgtgtatatgtatgacccatgtggatgtggacctataattatagagtttaaagaggttaagaagtgaataagtgttagctatacacatgtgtagtgtggtggcataataatatggcaaacttgaaattgttttgattatttgaactcaattttggggaagttataaatgcagctcacatgatctgactcctcttttgttttaacagatctatgaatagtcaaaaatgtcacgtgccttcttattatgtacaaacttcaacactttaacacaattttataaaatattaaaatatattttaggaaatttaaacagtatacatttttttttatttagtaaattttttatccgttttgaaaaaaaggttagtttattttttttcataatcacataccttataactatttagaattatttg

SEQ ID NO: 382715 - DNA, 3223 bp, Cannabis indica
atggaatgaacaatacgacatcatcgtctgggaacttcggactcaaagaatgcatcctctagtcggtcttctctctgttcacggtctacaaagtaactaactaccatttcatattaatctcatctaatttttctctttcattcttttctttatattctcatttcaaattattaaaatgcttctctatgttatcataccaattgtaattacagaatcaaataactaaatttctaattataattttgcatgttatttggttacacaattattttttcttaataattataatgttatattttcctgacaatatttttatttctgcttaattatgcttgtaataaataatatatgatctagtgatatatagattttatagatgcatatttcgatttctatatgatataatatatgatgtagtgatatatcattgtatttattgggatcaggtattgcatatggacagaaatgactattatggaggagagtctacttctctcaatcttactcaggttatttttgtcattaatataattttataaatatataaatactagtaatgataggtgaacatatataattatgttttaaaaaattaaatatgaaagaattcaacacagaccaaagagataaaaaaggatgaatgagaaagctcataactaagtttgaaaatcataacttgtttagagatgagagctttatttatatactcaatttaatacaagaaaatgaattttgttataagagagtggacagataactaaatgttaagcctacgaccaactaattaaattgaattagttggttggttatcattccttaaacgaaaagggatgatgacaactttaagtttggttttgagttaatgaaacctattcttaggcaaacatttagtaaacatcggcaatttggttcacatacggcacaaaacgaactgaaagctcattatttaatatttgatcacgtacaaaatgttgattaatcttaatgtgcttgtgtcgagcgtggaagactggattggtagctgaagcagcaactccctgattatcaacccaaataatggggataccagcaacttaacatgaagctgagtaatcagggaaagcagtcacttgacctttgttgcagtgttggttaaagatttaaactttgactctgtagaagatcgtgcaacaacttgttttttggcagaccaagaaataagattaaggctaagaaacactgcatatccccttgtggaacgtctgtcatcaatgcagctgctagcccaatctacatcagagcaaacttttaatggacattcgaggaacaaacctgagaagaagaccttcagagatagtcccttttaagtatcgaaacaatcatttacaagcttcccagtagacaaaagtgggagcatgaatgaactgggaaagtttcttaataatgaaagcaacatctagcctggtaagagtcaagtattgaaaagcacccaaagtgcttctatacagactcttgtcttcaaaaggagaacctgcagtagtaagtgaaagcctacaggcactactggtaagactggaaaaactctaaagtagggcttgaacttcaagtgaaagagtatcacttctagaagttatattagaaacaatagggattgaacttcgaatcaagactattgagtaaatgcaggatcaaatcaaaattagaaataggatgtccagcaacagataaagaatcacataaagacttgatcttaatgttgagattacttttttgaatgttcgagagcttcccttttagttgaattaatctagccttagactgaccggaaaacttctattcgagcgccttccaaacagaatatgaactagtgtagctcgcaacagtatcaagaatgcctttggtcatcgacgatctaagttgtgagagaagtaattgaccttttttttttgccattgagtaaacacaagattaggctctccattgacaagcttgagaggtggcgtaacatcactgaagagaatcttgtccaattcatggccaatgaccgtgggtactacttgagacttttatgctaggaagttagctcgatgtttgagcataagacataaagtgagaattggaaaatagatttcaatgttgactagtagagaacgattgtgtgggttgagtggcctaaggcagaggatcaatgactcctacaggggacgagttgtcgtcggagaaagtcatggatgttggtcagaaatgctctgataccataaaagaattcaacaaagattaaagagagagaaggataaatgagaaacctcataaccaaacttgaacatcatagcttgtttgtagatgagagctctatttatatactcgtgcagtacaagaaaatgataagactaactaattaaattgaattaattagtcagttactaaactaaatataattatttaagataaatctcacttattatgtataaataaaaataagtaacttaccatatatgtatattatttgttagtgtgtactgtgtgtggtaataagtagttctcataaatgtagatcttgaaaaaaaaatatcaattgtgtctttcattttccccattttaaacttgtatcattgttcttcatagctatggaagcgtttcaagggaaatgacacaattgcagaacatttaggctcgagcaaggagtataatgttgatatgatacccaaggtatatacatatctatatatatatatatatattattatagtattgtaattgaatgaaaacaattggctatattagaatggtttattctattatatatttttattcttatgtagttcatgatggcaaatggtgctttggttcgtgttcttatccacacaaatgtcaccaagtacttaaacttcaaggctgtagatggtagttttgtctacaacaaaggaaaggtatactatcactttcaaaatataaactactttaatatctcttacctatgtttgatagaggacaaaagggagtcgaaagaaatgtttggaaggaaaagtggagagaagtaaaaaaaaatgtttgtttggttagaaagaaaattgggaagaagagaaagtagatagaaaaatttgttgtgggacctactaaaaattttctcctttaaattagagagaaaagttttacaaaatattaatgtaaaattactagtttatttttgtaaaaaaataaaaataaatatactaataatttaaaggtaatatagtaattttat

SEQ ID NO: 382716 - DNA, 1768 bp, Cannabis indica
gtgtgatagtgtcggacttggattctgatcatattactgaaaatgacaacaacttaatatttcatgaatatccattcaaatagattgaaaatgacaacttcaaaaattcatattacatatacatatatatgagtcataatcataaataataaataatattacagtactgtatactggaccatataatgtatagcatgtaagaatacaatgcaacattatattagagtcaactataaacgacaaatgaaagttaattataagtgatgggcaaagctatagctataataatactacatccccaccttaatttgtctcacctaaactactttattacttttatcattattatttgtagtttttttatcattatatattatgggatatggtaactctatttgtttgtcatgctatataataccaaatgagaaatataagaatagtggaagaataatattatcatgatgatatattctcgatcgatctctagctaataattatattcttaattagggttttatctttttttctcttcttgttttggccggaagtcaccgttgttgcttggaaggattagggttttatgtcgttggcgttgaaaggatcattcgattttggggtccaaaggagtaacaaattactaggagtgttcaagacacaatctaattcgcaaagtgtgaatatattcactaattaatgcatatcaaattaataataatgttataatttgtacatgtgtggcatgggatgcacttttgatgttgaaatgcaacaaattcaatcacagtactttatgtgttaatggtcatttttctttcttatttattgcaataaacattgttatatatacccatttctcaagcagtaaagtaagtgaggatatctaaatatatgacacatctacaataatgaatataataaagtaaatgttaacacaaaaactgagatataatgacctcctcaaaatatgaaggtcatccacaattttctctaggtaaactgatatatgcaacattaaatgcgagatgattaaacacactcacaatatgaaattgagggtgctaggcatttaagaacattcttgatatcaacattgtaaatgtcgaaagactacttaacttacttaagcttgttcctgctcatcacctcgggaaacatatataattaaagtcaaggtgctctccgagaagtatgccacccaaagcacacatccaagtatcactaaattttccctaatgactacactttgatatgccacaaaacataaagggtcaaccatagcaattattttattttgaatagaaatagttatatgttattttttgcctagctaattaaatgaaacgtaaggaatgttcacgattcataaagagttatgtagataagattaaaggtaattgctatcttaattctataaataataatgaaaatcttgtaaaggcagacacaatttttaacttaggaaaactctgttaaattataatctcaacccaaacatacttataaataatatagactcgtatgtaaattttaactacaaaaccatataattttttttttatcttcttcattatattttacagctaaatatatataatttattatattattaatttcaagcattaattatcaaagtcttatgaatgttaacgaaattttgagttaaacttttttttatactaatatgtaacgtcccgcttcaaacctccattgggccctcacacccacggactaatggctcttatacacgagtacgccactctggctgctt

SEQ ID NO: 382717 - DNA, 1312 bp, Cannabis indica
ttcttttcgaatactgaaaatagatagtgtatcgatccattccgttttaagagagtagatttagtaaaatttttataaaaatagtaatttagtttattttggggctgtatatataatacttgagttttcgcggaagagatgtaagaaaaatttactaatttgatcttttcgattcattttattaagtaatgatcatacttgaaattgaacacataattgacactaaaagaatcagtataggttaattttttttaaaaaaaaaaacagtatactacagtatacatatatatggtaaaaaaattagaacactatataaattgtgtccatatttatatgttactggtttaaaaccagttgagtaacgcaagcatcatagaataatattcatataacattagtgtgtgcaatttgaatagcattataatactctaaaattaatgttcactacatcatgatccaataaatgtacgtacatactgtagacatatggcttcgtaacattttgatccccaatactcattgcatgttcttctacttaaggagtaggattaggcgtaatttgaacctcgtggtggtactatatatagtgtgatatacaaatagcgcaaatagtttaatatgtatgagattacatttatatacatctacatggccatcttaaataacaggtacacttggactaccttaatgctggtgcaaatatcattactagtggatcttatcaggtatataaaatacacaaaatttgcactttgatattgtgagagatgtataattgatattcttctcttttcaatgtgtaaatataaatatatataggggacaattcaaggttttgaggcaaaaggattttcaaaagaagaaggagaaggtttgcttagaaaaagtgtggagattgcttgtgaagcgagggcaatttactatgacagatgcacaaaagattcttgggattatttcacctataacaatgatcaatcctctctaaggcgtcctgttttggttgctgcttcagttggcagttatggcgcttacttggctgatggttctgagtatacgtacgtaagcctacataatataattaattattatttctataattcaatttacatgtaacaagctatttaaagtttgattttgacactataaattatttgtaattactctaaaatctattagatggctattttaatacaactacaataaaatgtaataaaaaaaatggtgtaggggtatgatatataatcagggccggccctgaaaatttttggggcctcaaaaatatatcaaaaaaagagtgtcatgggatttgaac

SEQ ID NO: 382718 - DNA, 2648 bp, Cannabis indica
aaccaaatcaatcagaagaaaaaacaacaacacaaattgactgagcttagcttaatcacatacaaaccataaaaaccaaatcaatcagaagaagaaaaaacaacaaaaatcgaatgcgcttaactttatcactcacaaaccataaaaaccaaatcaatcagaagaaaaagcaacaacaacaacaaaaatcgaatgagcttcgcttaatcacttacgaataactaaaaacaaatcaataatgagaagaaggagtaccttgcgagcagtgggaggagcagcagccatggcggtggcggagaagagaaggaatcggttggtttggggtttgggagtgaagaagagatttggagattttgaattgtaagggagaaaagagagagagtgagaaagaggaggaaaatggagtaatgctgccatttggattggtatttataggatgggtttcattgaagagttttcgagagctcacttaaaaaagagctctaaaacactgttgttggatatggcgaagaacttgattccacgtgtctttttactatataagagagttgtgacacgtgtagtatttatactgtatatattataggctaattagaattttttttttcgaatttttgacgtgtaccaaattttttaaggttgttaaaaatgctccttgaactattgagattgttaaatttacgaatttttgtccaattttagtaaaaaaagtctaatatgatgaaagttcatgaggcatgatttagtacatgtcaaagttcgaggggcataatttggtagatgtcaaagtccgaggagcatgattacataaataattactgaaatagtaaaattaaataaaattagacaaaagtcctaaaatttaagaatctcaataatttatgaggaattttttacggtcagaaaagttcaagggcatgatttgatacatgttaaagtttagggggcgaaaatcctaattagcctatataaaaatgaaatattaaatatcttatttttagaaaacatttattaatattttattagtttttatcaattagcctatagaaaaaattgacttcacttttaactaacgttgagtcaattaaactgataagaataatagataataattaattataatgatatataattaagcaataagaacacataaatttatagaagttcttactcttacttgtgagaaaagaaacaataagttctcgatcactctcgaaagctgacaattttacagcgtaaaaactctgttgaataattaacattgagttccttaatagtgaaatggatctactatttataaaaatgaattgcatcagttaggtctctcgaaacaaataagaaataaaatgggaaatttgcttactttcctaaaacaaataaaactaaagggaaactaggaagattttctcttatttttttgtcggtgcgaatctatcctacaaaatcaagaatgtggtcgagatttgaatgctttaacacttatatagaaagtatcttcgaagatatttcagccgcatttaccctggtcggtgtatgcaagcttattcttttaataagttgtttttgagaaataaccaccctagacgacatgccaaggatagtatcattcgctcaggtcttaaaacgtctcccgtgtcacccaaatgaatatcacgtcacctcatgcataattaatcaagctttaattattattccctcagagaaaaaaaattgttatgataaaattattcttgctcatgtgttgagatatcccaataacacatgagatacaattttatcataactagcccacattaatccttgtgtgtagtgaaagatctggaagatcacagtgtgagttcatcatcactattataggatacaacttacgaaaagattcaatgatgcactgattcgcttcaagaggtaaatatatcctatcatctcttatttcaaatttaatatatgtacatatgtggatcctagagtgtggtacaataataatctattaaatgttttcgctacgcacctgatttagtaccacaaaaccaacaccttctaactttactctcgataccaaataacagaaatgagagtatttttcctctctatccttcctactcctcatcttttctaaaaactccatccatcttactctccttcattgctaccaaacatagcctaagtgttcgagaaggcataaacggatgccccatgaccatgggcccgaaagggtagtagtccaagggatgtcacggaggtcaattcttcgggatggatctgacatggcacacctctgacacagaatctcacagaattagtggtttgtcccccacgtcagacatgtaaaaagcgcacgatacaaaaagcaacctaccttttgtccaacatccactaccatgacatttactgtacacgatcggcggtgcatggacacttgtcaacattagacagtactatgttcatgttgaacggatgacgattatccctcaattaggcttcacctatccgacccaaagtcaacattataatgtattttactcaggggcgttcgcggtgcgggtggtgcagtttttgaacaatttttcaaaccaacctacacataccgtttttctaattttccaaaccgcactcgcaccgtaaaactaaaaaatcgcagaaattgcacc

SEQ ID NO: 382719 - DNA, 2891 bp, Cannabis indica
caatggtgatcccattctcttagccatggctctttcaacttcagtgattccacgcccataaccaatcccggcaatggaacacttgatgaattccattgaattgcaagttaatgttcctgtcttatcagaaaggatagtgtcaacctggccaagttcttcattcaaattcgaggtccgggctcttgctggctggtctgtttcctcatagtacatatggagatcctggttaatgaatatgctctgaagaactttgactatttcaatcgacacgtataaggaaatgggaatcaaataactgtacagcatgagggctgtcaagaagttcaaaattgctgcaactggtgccctatttggatcatagtatactgtggtgtcatctggtcttaggtaccatcttttcattcttccattatcaaggtcctcctcagttgcaacgccaaagaaaatcgccccaatgaatgacatcaccaccaagacaagaaacaagaaatacacaaccttatccatccttttttcaattttgcttctcttagaaggtggtggtgtggaattttgcataacctttgtgtcctgaccagtaaagattactaccccataaataaattctgtgttctttagctttgagtccctgagcagaagctgctgaggagaaagagggagctgctgtccttcaatatccaaattaccaacaaaagaatacaaattggcattagggtcttcacatctgacaactgccttaaagttttggaagctagagtcgtcatggaaatttgcagttgcgtccattgcttgttttagcttcaagttagtctccccatcaaggttggttgtctcaacgtaacaaattgcttcctcaaagtttgatgagagtaacatgagatcagcagggaaaagttctctttttccacctttactacatctccaacttttaaattcttccacttggtatctttgaaattcccatcaccataatgcaccttcacttttcggttgttcacctcgatatcctgataacattttttttccaagaaacaagattaaaaagccagcattagaatgatagaaagacagaaggaattattattaaatcttaagatgcaaccaaatctcggcaaaaatttctataaagtaattaattttgtattctcattgttaagtaatattagttgagcaacaactagaaacagaacagtagttaggtacctgctgttttcgcctccaatcttcaagaatctctttccccatagtaactcccatcacaacgacaagaggaacgacattactcacaggtgagtaaggagaaagttgtgtaaacgacaatattgcacaaatgaggaaatatatatttgccaccctcctgaattgttcgaacaatgatctgggtaagaaagttgccaatgtgtattttgttgttcttacgtagttgcctccataattgagaagactggcttcaaagccttcagggtcattacaatggactacccttgagaacccaggtcctccaatcagtgagtgctcctctgctttaaacgaagcctttccacaatgaaaggcatggattctgctaaactgttgcttttttcttctacctccacccattttcgttaacaacccaaacacataaaaattcctggaatatggaaagaatttgccaccagaaaaaggaaatgagcttccccaaatcaagctatgaagaaaagcttcaaactttgcaacgttgtgaaaccagtgttttgaacaaacagttggtcaacacaaatcccagaaaactttcagacccaaaaactcaatctcccttataaacacagtacgagagctagttctgtaaaggactgtgtacatacaatgagataacaactgttatttcttaattaaaaaaaattataaaattaatcccaaagacccaagaatatgaactaaccaaaagaaataaacaaatcttgaaaactaataagaagcaaaataaagaataaagaatagaggccttcaataccaaagactatgactagttctatatcctttcaaacccaaaataaaaacatctgctttttaaatgaaagggttgaattggaaaaacaggaagtacacaagtggtgttcttagaagaaagaaagcagaaacgtggtgaacagtctttccttactctctttctctctcttttcctcttgtataatcaactttgacttgtaactaagctatgattacaaagtaagaacgtgaataatatttatttgggccatatcccatcttagcatggagtgcatatagttcaacttcatggacagttaaatttatcaaggaaagaaaaaataaaaacacctcaaaagaaatggaaaaaaaagataaaactaacctattagtaaggtaattccgacaaaatggaaaatctcaacagcttctttctttcttttctttctttttttttttttttgaaggcgttctgaattatacgtcaactgatgccagagatacttgtttgattaacgccattgtcaactgctaataatatttaaattttgtatattaatatatacaatatatgtatttatgcgtataaagaaatatggaagtatggactatagagtagagtgatgaccaagtattctagaaggtcaaagaaaactgctataataagaagagaaaaaaaatcctctcgaaaatagaagagaaaaaaaaatccaaattataccaaacctataaattataaaacacggctttagcgataaacaactcacatgattataatttcccattattttcattcattctactcttcaattgtattactattacgctttttttaaaacgaaaagtctacccttcaatttgaaaccaaatctgaatctagagccaaatgaagaaaataaacatagaaataataataataataa

SEQ ID NO: 382720 - DNA, 1080 bp, Cannabis indica
ttcatcttcattaactcatctcaacccacaataatgattgaataaaaagtaggtaaagagttcccactaagaacacgatcagcctccacaagtgaagttctcgcaaaagtatgtgcgagattattagcaaatcgttttacaaaacaaacaaaaatagaacttaaaacatcaagcaaaaccttagaacttaaaacatcaagcaaaaccttacaatcatttaagacatagccataaagagaggctaatttcctattcttacttagatcattcacaagagtaaggcaacctagctctaccaccacttgtgaccattcttttttcttgatccaatttaaagcttctttgagtcccataactttaattatcaaaagaggccaaatcccactgtttagctttaatcactatctcaaaacagtttctagccaccataacaaagccaaaggaacctttattgacaaaaagagcaccattaacattaactttgattgtgaggaaagctagtttagtcgaatacttatctactctctcgcgttggttcaggacctgtggagaattcagggactttgtttagcattattccaatcttcaaaactaagagaagccaatgacactacatcatcaacggagggattccaaaccaaattatttttgtatttttaaagagaccaacataacatggcagcaactaattggtcttccttcttccacacacatagactatctttaaactagggactaaattcagttgcaacaaagataacattcagaataggaggaatttgccaacaattccgagagaaagggcaaccaacaaggatatggaagaataatgtgaaaaaaattaaaaatattaagacaaatttttaaagtttatttaagttaattttttaaaatattggagtgtacttataactttatgggatcactacaaatttttttacttttagtcaaaaaaaaaactagtgactaaaagtaaaaaaattagtagactaattataaattattattcctatgttgtggctaaaaagtccggctaaaggtatcagtcacaaaaattacaatttagttgtgactaaatgt

SEQ ID NO: 382721 - DNA, 2432 bp, Cannabis indica
attcaatacatactacatgttacaagttgtgaaaataacaagagatctcaccttgaaattatcatcttcaatatgaattgtttcactataaaaacaactaattaattggctttgtttcataaacacccatatcatcaaactaattattaaagagaaaatcatcaccatgagcaaaacaagtagtgatgaagtggtaattttggattgttgggcaagcccattttgtgtaagagtgaaaatagctttgaatgagaaaggtattgaatatgaagcaagagaagagaatttgtttggaggaaagagtgaattgttgcttaattcaaacccaatttaccaaaaagtccctgtcctattgcacaatggcaaacctttgtctgagtcaaccattattgttgactatattgatcacacttggaattctacttctccattgctcccatcttcaccatatgatgtagctcaagctaggttttgggctgacttcattgacaaaaaggttaattattatttatttgttaatttaactatatataatatgtatgtgttatgtttggtatgtttggttggagaccatagaattggaaaagttaatccactttcatttcattattcatttgctaattggtgacaatttattaaagtattccaattgaatttttttttcaacatataagaactattctaatatatccactaagggtctgtttgcatgtaagattaaattggattagattaaattagactaaataattttattagttcactgttcgaccttgttggaggactaaattaattcagttaatctcatctgtgtaagattttttattttatttaacagtaattctatttttacgtctataatttaaaattaaaatatatatatacctatttctataaaaatacttaaattaaaaatcaattaataattaaaaaattgcgtaaagttaaattaaaaagataaattattattttttaattaattatgtacatgtggtgttgatataatattttgctaagcaactatgtcatcattttgtttgtcacgtgtgaaaaacatgataaaatgatcaatttactgcactgtgaatagttcgaaaactatttttaacaagctgaaaaattcaaggggcacaataatgcatatgtcatagttcaggggaaaaaattctaaatagccaatatatatttatataaagttaacaaattgtaacatttacaactaataacaataattttagccacattagagttacgatataattttttattttttatttttagtcacaaattttaatattatattataatatcgtgatgagaaggtatttgaagcggggaggaaaatatggaccggccaaactgatgaagtcgtagaagtggctaagaaggacttcatagaaattctaaaacaacttgaagaattagccctagctgataaagccttcttcgggggagagtcgttcgggtacgttgacatcttggccgtagccctaacaagctggttctacacttttgagcaattcggaggatttaaggtggaggatcactgccctaaactctcagcttggatcaacagatgttaccaaagagacactgtttcaaaagttagtcctgacccaataaagatctatgagtttgttgccatgttgaggaaaagatgctaggaattgaataatttatatatatatatatatttatatatttatatattctcagcatttattattctcccaacaatattatatttaatcctaatatgtaatgtatgccttgtgtccttgtaaaatccctagctaattatatatttatgtaaaggacacaaaataatataaggcaattaattaatacttactatcttgtatttcacaaatcaaatacaaaaatattatgaacttggatttaatatgattccatcataattacataagtggatcgatcttaatgaactagataatacagtgtgttagaaaatattgtcaaagaaagaatatattacaatcaaaatatttcaaatataaataaaaatattacatcgaaatttgagaagaaaaataataactcaaaataaatttgaccaagactcaataataatttttgtcttaaaactcatttcctccctcgtataggcacttaagaaaattctaaaaatactcttaagaatttattaagtttcatatgctcagtctagtgtctaaaaatgagtatattctcacaaggttctaaccacaataaatgatttcaactatatctatcacaagtgaacaatatagtctctatttatagaattttcactctcatattaacataaatgaccatcataaagtccttaaatgttactaataataaattgagcatttatggtattaattgagtgatttgaataagttttgagctgttaaaaagactctcaaactttcaaaaatgtatgcaat

SEQ ID NO: 382722 - DNA, 1791 bp, Cannabis indica
agagttttaagtaggggatcatgcattcctatggtgtctgcaatgaaaggtatcaagcgtttcgagaaaagaggcaagttatgccctaggtttacgggaccttttgagattctcgaaaaggttagacaagtggcaagttatgaaaggtgcaaggacttggagctgaatcacttaagtttcgcggatgatgttttgttattttgccatgggaattataagtcaatatacatgttattgcaagggctgaaattattttccaaaacatcggatctccaactgagtgaggaaaaatctaccttctatttttgtgggatgcaaccttcagaaatgcagagaatattgaatgtatcgggaatcataagaagcacccttccattcaaatacttcggctttcctatagtagccagacgctcacaagtgttgaagttgaagtcctgatggaaaaaatgacaaaaagaatcaatacatggagctcgaggaatctttcttttgctggtagctagagtaacaatgattaattctgtattgatttctatacatatgcttacaggtgcctcgcaagtgttgaaggtgaagtcttgattgaaaaaaaatcacaaaaagaatcaatacctggagctcgaggaatctttcctttgctggtagagtaacactgattaactctgtattgatttatatacatgtttattgggcacaaattatgattttgtcaaaaaagattcttacaagagttaactcagtgtgtagagcttttttatggaaaggagtatctgattacttgggtccatgatatgtatcatgagagaaaatttgcaaaccaaaaaaagaagaagactttggttttataagaactattttatgtagtaagcctgtaattggaaagtatgtatgggcaatcgcttccaaacaagcaacttatgagtgaagtggatacatagtgtaaacatcaaagaaaagagttggtgggattatgagatcccactttcgggaagttggtattggaggagaatcatggcagcaaaagattaattaaagaacctttccaatcaccaaatgttcatgacagggaagtacagtatcaaacacggttacacaagactttggttggggaaagggaaagagttcactggacccctgtagtttggaattggctaaacacacccaaacacaatttcattttgtggctagcagtcctgggtagactctcaacatcgcacctgattcaagatgtatggtatgggaaaatcatgatgaaatcattgatcatttatttttttttcccttttcaatatagcttgagatcttttaattcaattaaagaatagttagcatggtggataaatatagcagatctgatcaggattataagggggttgaatcgttcgaagttcaataaattcaggcaaaaagtggttgttactgcaacggcaacttttgaaaagactcggtttgaccgagtcaaatatatttatatatatataaaataataataaaataatatatatatgtatataaaaaaaaaaaaaatttaaattatatacagacttcgttttctctctctctgtttatatatttatctatctttctctctttctctctctttaaaataccaaaaaaataaaacccataaacctccataaccaccacactccggcgacccacctccggccaccgcccgacctcacgcgccggactactccgacctcctagtgccggcgacctcacaccccaagcggcgccgctcctctcgccgccgttgactccggatcgcaagtcaaagtttgggatttc

SEQ ID NO: 382723 - DNA, 1031 bp, Cannabis indica
ttttgtgcttgcgaatgtgaatttcactacaactggccttgaatcttttaggttccatcttccttactaagcttgcgtgtatcaaaatctatacttcccaaagtagatacttttccattttcgaattcttcgaattttctcgaaactctttccctcacacaaaattctatccatcccgacgcgattactttgtttttaaattcttccatgaaccttattgatctcaccttccaagaaaacatcatcaatggttcatttccaaattcctttggccataaagattatcttaggaatgtctatatgtcaaataatgaagttggaagtagtaaaggattattgaaatccttgagaaatctttctaacttaattattttggatatttctatgaacaatattggtggaaccatacatgatctatttgaaaccctatcttcaactaagaattccttggaggttttgcgtttaagttccaacaaacttaaaggtttaattcttgatgatcctgagaaaactttcccatctttgaagtatttagatcttggctataatttggttgaaggtccttttcccaatcgcttgagtcaatttccgaatcttgatgagttgtatttaaacaacaacaacttcactggtctattgcctgatctttcctcaatgttcaacttgaaagttttcaatggagcacataacaacttcaatggtacttcaagttatggtattgctcaactttaccatcttgttaggttagatgtctcttggaattctttcaatggggaatttagcttacaagattgtcctagtttgaaatttcttgacatatcttataattctgtgagattgaaatttaaatccaattgggtaccttcatttcaactctcaaacttaatgttgtcttctagtaagctaggtccaaaattcctcattggctccaaacacaattcaatctctcatacctagacatttccaatgattgaaatttctggtctcattcctagttggtttggtaatataacttccaaattgtactattt

SEQ ID NO: 382724 - DNA, 723 bp, Cannabis indica
tctattagccatttgttgtgtgtgctctcttaatggcaggaaatataatactattactcagtatgtattcacttatgaatttcatattcttactgatgctatatgtggatggttggcgagtctataaactggtatattttatatctatttgtcttatttttaattgtaaatcttattctttcttgcttattatgttttgtcaggtgccttggcgttcttcttagtactgttaatgtgcattcccaaaaaggagatgaccaaaatgtattgcttgacgctgtgatagaatcattttattttcttcacatagtgcagatggtggagattttcatttgtgttgcatcttaatagaacacaagtagtgaggttttagctaggtctcttttattgtttgatttcatatgatgaagtagaacatgcattgtacattatcgagaaagtcatttttttttattttattttatgaaagtggagtgccttaggcaccatatcattaataaagaaaatagaaaatcaacaaagtccaacagacaagaaaaggtctgaaactaaagcaaaatgaaaatacaaaacaaggcttagtcattgtcaaaatctcaatccaactatcattaataggtagagttttccctcaatatggagcatcctaattttatgaaagtgagcatctcaacttttttaaatcattctgatttaattaattttttaaattaatcatttttt

SEQ ID NO: 382725 - DNA, 1300 bp, Cannabis indica
tctctctctctctctccaatcaaaccaacctcactggacgaagcccctcttcttcctctcattctctctttgatcggaccaagacgatagccaccgtcagatgaaacctttctctcttccttttttcatctcttcctcaatgtcggagaattcaccggtacccctgaaccaacgagcccagtcccaaacaaccttcctaccccttgcacgaaccctctcgcataggttgtatgttctctttctctctctcaaatgttcttagtatctttctatctctctctcgatctcatattttttaattgtttttttagggatgtatatagctgatctcatatgcaggatttccatttcgctccatttgactttatttttctagaaaattagtgaaatttatagttgggtgtatataaaattatagctagctttttgtggattggttatcaatgaaaagcaataatattttatttatttttcttcatatgaatgggatctgaattgttgtttgtgtttatttttaattttgtatctatttttgagtttggatgggtcttgaataatcaaaattcttagcttagatttggctcagaatgtttcgtgatcaaatttgattttgttagttgtttttggattgcgtcgattatgaaccaacgccgaaaggatgcacacatttataattatttatgcgttgattgataaaagatgcaaaaaaaagttatgcttcaaaaaaaagtatttgtatctacggctatcatgttagttacaccaaccaacacaaattcttttatatgtcacttcaaaacaaacagaaaaatcccttttatagtagtggccaattaatcccaaaggtctatcattacagaatagaactcttgaatgctcatatatttttaggctaattaggaatttttccctccgaactttgacatttaccaaatcatgtcccctgaacttttttggcagttaaaaattctccctaaactattgagattgttagatttaaggacttttgtctaatttcattcaattttactgtttcaatgattgtttatgtactaaaccatgctcccgactttgatatctaccaaatcatgcccctcaaactttgatatgtactaaatcatgccccctgaactttcatccatgttagaattttttttattaaaattaaaaaaaagtcctcaaacctgctgctttgccccttatggttggttgccttaatgctcctagcaaaaccaatacacaccaaatgacaacaaggtccaagttaggtgtgttcaaaccaaaagcctacttggcttct

SEQ ID NO: 382726 - DNA, 5245 bp, Cannabis indica
tgttgagattggattctggtggaatattttgtctctttaatattttgagttcttgtgatactttacttttatatatatagccttaaaggattgttttcactgtgttttaatgctgaaaattttgatatatgagtaaatgtccacaaacaaaggactcagtcttgtactattgtattgcaatctgcgtttgatttcttaattttctgtttctttttgttgttttttataaaataagattccctaatgttttcctttttggtgatcttttcagggtttggatcttcttttgattgaaagaagttgagcagttagaccacaaaacaaataatttatacttatgttacactcttccagttctacatttgaataatctattgaagtgaataatgggttcatttcctggtaattctgaaattgttgaagcagaagaggagcctagttcaagtcaacacaccaaaggttcatatttatcgaattctggatatagtgcaagagacaaagatctgaagcttcctgttctaaaatttggatacaaggattcacttgaagatgatattaacaaactctttgatgccatcaatcttaaaacttccaaaggtttgggtctttcaagccaagcaggatcaagcccaatgaacaagaatgcctcaaagaagcctataactatgggtgtacctcgttccccaggatatgggaattctgagccagtgactttgaaacaagcactaagggaactttcccttactaaagcatcagaaatggctgctatgaaacggttatcaaagatgacaggcggctctactggaacctctgaagctggaaggatcaagacattgtacaattcggttgtacttgaatcgggtaaatctagtcctcggtttggtgaaggtcggggaaatatggttgagatatctcttgtgccagaagaaagtatgtcaaatgctttagcgaaaactgcagaccatcttcgaatttccaagatgaaatctccaaacatgagtgttgattcttctcctcgctttgcagcaatacagagtgttgggagtaccccagtaccaaatgaaagtgtttccacacccaggaaagttggaattcagacaaagctggtgcagaaagagatggctgcatcagaaccttctccatcttgttctgattgtggtgttgacagtttagaatcgggtaaaactgcttccgccgcaacccaaatatttctggggctacatcaacacaaaatgaaagtacttccacaccaaagaatgttgggattcaaacaattaagtctgcgctaatggaagaagaggacgaaacttgtgaacaactttcatcatcttctcatcacgacgacaaaagtttggattcggttgaaaaaattccagagtcaactaggttaagaaataagccatcagctcaaaaggcagggcagaaagtcaggttgcattcaggttcttcttcgagcacagtcagtgtgagcagagtaagcaagatatcaagaaataatgcacgcttggtgagaccagtcagcagaagcaagaatgtaattaagaagaaaattaagcaggatttaagctctcctgcgagtgcatctagcggatttaacgaatcagctacaaagtccggtccttcatcaggccagctagtttgcgagagatgtcactgtaccttgaagaatgcaggcaaaaagtccagtcaagtttccttgtcacctcaatctaccagttttaattccgaagtgaattctactactgtgaactccagcacaaacaaaccaggccttacttctgataaccgtgttaaaagtggagctggaattattaaagcgaaaaagaactctaaatcaagagacattggtgagttctcacaaagcagtcaaggggagtatagtagtagtacaaccatgagtgatgagagcattcttagtgggtcaagttgtggcaacaggcctcacatgtcgaaggatgtgaggtgggaagcagttcgtcatgctgtgatacaggatggagtcttgggcctgaatcaattcaatcttataaagaagcttggttgtggggacattggtactgtttatcttgcagagctaattggtaccaattgtctgtttgcgataaaggtaatggacaatgaatttttggcgaggcggaagaagatgcctagagctcaaaccgagcgagaaatcttgagaatgctggatcacccttttcttcctacactatatgctcagtttacatcagataatttatcatgtttagttatggagtactgccctggtggagatctgcatgtccttcggcagaagcagcctggtagaaactattctgaagcagcagcaaggtgcaattccatacaattcttatttgtgtctttacaaatactctatgtgatattatatgcaatgaagcaatatattaaaggcaagcaacacatatggaaaactgtcttcatttaagttaaaaactttatatgtattatgtatgtatgtctttatgtatagataaccatatctttatgtttgtttatgcatttgcaagcggggcttaaactcgttattttgtcgtttaagattcagttcttgtgttgctttttgtgagctgcacatccatgttgagaatcatggggttccatctcaaaatcaattgccaagtatttcgtttttcaatgggaaattgaaaccaacgtttgtctattgcttctatcgtcaaagctaagggctagactctaatatgagaaaaaataggctaaagtgaaatatggatggttctttctattcatgtatatctatatcaaatcattcttggttttaactctgaatcttgttatgttttgtaggttttatgttgctgaagttctacttgctttggagtatttgcacatgcttggagttgtttaccgggatctgaaaccagagaatgttcttgttcgggaggatggtcacattatgctcacagattttgatctttcgcttcgttgtagcgtcagtccaacactattaaaatcttcttccgatgtagatccagtgaggatttctggtccttgtacagattctagctgtgtcaatcctttttgcatagaaccgacctgtcaagtcccgtgctttagtccaaggtttctacctgccagtgcaaaagcaagaaaggccaagattgaccatgccgccctggtaagatcattgccacagcttgtggcggagcctacagatgcccggtcgaattcatttgtagggacccacgagtacttggctcctgagatcatcaaaggagagggccatggagctgcagttgattggtggacctttggaatattcctttacgagcttctctacggcaagacacctttcaaaggcctcaacaatgaagaaacattagccaatgtggtgttgcaaacccttaagtttcccgacacctctatcgttagttttcaggcgatggatctcatcaaacggttgttggttaaagaacccgagtatcggtttggatcggagaaaggagctgcagagattaagcagcatcctttctttgagggcctgaactgggcattaattcgatgtgcagttccaccagaaatcccagagtttccggattttgaaatcccgagcttagctcctccagaaacagagagcaagtatttggaatgcaaagccacaggagagcttctggagtttgagttgttttagaaagaaagaaagaaagtcaaagtcaagtgatgtgtatgttatagctcgattgcagaaggtttattccaatgttgtaaattatgtgatgtaaatgtggtaatttacatacacctatggggataaagcttagcttagcttagcttgtcaatcgagagaggctgcttagagattattcagagattactcccaaattccaatattccatacaacaatttagatttcagtcactatgtaacatggtccaattccgagtgtacaaaagcggctttgcaaattgaccacttcaccatcaattttttttaagcatgaaattataaataaataaatttcatttttaaaaaacataaattaaataaatcagggcaaagtataaataaacgaatcttttgtgttgtatttctatttcgttatccacaatttacttttttttttgagcgaaaaaaaaaatctgctcttagagatacttttatggaagattgaagtttatttgaagtatgagagcatagtctaatggcttttatcctatctattttaatacacaacaaattttaataaattaaaagtaataatttttttaagggtaatttgtggttaaatcttgtcttatatttatatttttatgtacttaactcttaatttttttttcttggtaatactcactaatttttatttctgtttgtaaatttaacacgtatgacgtttgttaaatacatctgttaaatgttgattgaaacttttaatgagtataagtgacatggtctcattacttcacacaaatttaataaattaaatattataaaaaattatatatgtgcggatatggtgcattttaagaataagtattggtaaaaaattttgtcgaactcgaggtctaagggtattcaatagatgagttaggatcagttgagtgctcataaactgatcggtggtatggggtttcaaaatatgagggattttaacttaacattattgaaaaaacaagcttggcgactacttacgcagaccaattctcttgttggctgaatctataaagtcagatattattctcatggttcgtttttgaatgctaagttgggtgccaatccaaattttatttggaggagcattttggagtctcaagcttttattaaaagtggtcttcggaagagggtgggatcgggggttgatgttgggattttggaggatgtacgatgaaattctattttttataattacctacttaattatataaacaacttattaaatgcgaaattgtgaataagttgttgaacgaaaatacaacttgatttaacataaactagacttgatgaattaaataagttgtgtaaagtaaaattacacatgaaatttttatacggggtatcaatatttttttggatattactagtccacatgtcacgtctagagataagattaatgcaagtttgagtcccttgtgtcatctgggggacatcgagggtgcttctcgtagtataggggtagagcattgccatgaataggggtgggcatccgatcgaatctaacttttttttcctcatccgatccaatccaattagtaattgaatttgaaaaatcatc

SEQ ID NO: 382727 - DNA, 4496 bp, Cannabis indica
aaaaagagagatattcaccaagaacattctctttaatagacactctcataaataccaaagactcgtggactaaggctcattaattccccaaccacgtaaaaatctcctgcattaaactttctacagctcttctcattctattatttaattggttgccgaaaatctctgtcaacaaaaatattatgaaaagtagaattaaataaatgggaagattgtaatccttaaaccaccatgagtgaatcgtttcaataaaatcagttgacaaattgattgataggagccattgtagactaaaagccaggcctaaagcttctatttattcatatttaaatctgccccgaagaggcttggaaaaagctgcagcaatagcaccagctgagttccttaaaactgcatcaataccaacaatacctttagaattgtcaatggctgcatctgaatttagtttgagtcgtcctgaaggtggagccaaccatctaggcttcgaagagaacctagtagaagtattcggttccatgacagtagctgttgttgtggatagatctttgaatttttgcacgggctgtttggaattcaaggagatatgattgtgcaaattgaagtattgtagtagctgtttttacagcacttccatggaatttagcgtttctttcatgccagatgcaccaacaaagaacaataaaaaaattcaaattgcgaagtggaaggagtgcctgaaagctgtagcaagaaatctgggcatttgcttcgaccaattgaggtaaagtcaattggtaaatttgagagacaacatacatcttatgctctttgatagaaaaataaggcatgctttattgtttcatcatgtgaattgcagagagagcagcgaggagatgatgctatatttcatcgatgaagttcagtagcgactgaaagcgccatgtgaaaagctttccacaaaaaaattcaaatctttaagggaagatttaacttccaaaaagttgttcaccaatattcaatcgaggagctactgttagtatcctcttgtttagctagattaacaacaaagtggtaacctgatttcattgtgtagattcttgtgaaagaattgttccaaatcattgcatcatctgaaggaaaaaggcttagggaaatgcttagtgtgtgatcagtgtttgcttggctgaaatttgattgtaaagccaccatattccattgtctatgctcattgattaagtcagccaccatcaaatttgagtttgagcctttgaataagtaaggtgtgaggcaagtatgtcctaggatccaagggtttgatttacaattgatttactgcttgttcctaccctccatctcaacccttttaacaacaacttttcccctaaacaatactcctccatgtcaaagatggagaagtacccaactcagtagcaagaaaatgaccattaaagaagtatctatgttgaagaattctgcttatgagggaataaatagattccaatagacaccaaacttgctttaccaatagcacttgattaaaatgtataaaattctaaaagcccaaaccaccttaaattttggctttgcaaagaaaattccagttttcctaatggattgaattccttgatgtcgaagaactccactagaatcttgccatcatgctttctatttggcgacataaagtgacaggtaatttgaagcagctcattgcgtaggtatgaatagcttgtaccaccattttcaaaagaacctctttaccaccaactaaaaatagatgttccttccaagcactaagtagcttccaaatcttatctgtgatgccactaaagagtttcattttatcatgcctagcaaaggaggggagtcccatgtactgttcatgacatggctaaattggcataccaaaaagattttgaaagaagatttgatcttgttgtcttgtattatttgagaaagatagaacacatttatggggattgatcaattatcccgatgctttgctgtacaagtcaagagatcttttaatagacatcgttgattgttggctagctcgacaaaatagtatgctgtcatctgcaaagaagagatgcgaaactgatggagcagatctagagactttcaaaccttgcaaagatccaatactttcttcatgttgtaagagacaagagaggccctcaacacaaataagaaagagatatagcaaaagagggtcaccttgtcttatacctcgactaggaaccatatcaccatgaacaactccatttaataaaaataagtatgaaaccgactgcaaacatcgaagaatgagttgttccacagttattatgaagcccatcttcaacattacttgagccacaaaatgccactctactctatcaaatgccttgctcatatctaatttgagtgcaacatagcctttggaacctcgtttcctactttggagagagtgtagtagttcaaaagccacaaggacattgatagttatgagtctctgagacaaaaaagcactctaatatttggaaatgacttttggtaaaaaaaaagggttgtagtcgtagtactatggtctttgacaccagtttgtagagaacgttacataaacttataggactaaattgagtgatatgggttggtttcttaactttaaggatgagggtgatcaaggttttattgaatatggctggatctgcaccattattgagaacatccaagaccaattcagtgactagggggccaacaatgtgctagtaatttgtgtaaaacatgacagacatgccaaccaaactgagacgtttatcactactcatggtttttagagcattagaaacctttgctgcagtgtaaggagctgagattatttttttagaatcaacatctatagtggttgggattgtttccaaaatagcatcaatagaggtttgatcgacaccttagctattgaatatttcttgaaaataggcagtgataatattcaacaaggtcgaagtgcctatttgggtgtttccattagagtcgttcaacttcctaatctgattattgctctgtctagcactcgcacgctagtggtaaatcttagtgtttgaatcacccaattgcagccatgaaattcttgatcgttgatgccaatagtctttctcacgttccaataattcatcaagaatagattcaaagttttgaagagcagcaaaatagtcttggtcagtctttggtgagttttgaagggctgcaacatgttcatgagtttctttaatttactttttcagatgtccaaatttggactggtgccatgattggagtagggtagctcaattagagatattactagtcatttgggaaatgcaattaggagtatcttggtaccaattcttgatgataatgttagcacatgttttctccttcaactagattttttcaaagcaaaatcgtgatttatagtcacgttcagcatgctgatctccaactttagtaataagactttaatagctttatggtctgacttatagaaatcgagatggtgaactgatggtgtgaggaaggtagaatcctagcaatcattgacaaaaccataattaagtctttctttaatattccccaatccttggcttttgttactccaagtagctcgctcacctttaaaagacagttggttaagatgacaaccagccgaagttgatctaaaagcttcaatttgtactacacttcgtgttggaccaccgatcttatcctcattcaaaactatttcattaaaatcacctagaaaaagccaaggtgacaatggagccacatcaaaacatctactcaaaactgtcgaagtatgagatcttagagtaacacaaggatgaccatagaaactagtaaagtgtaaagaaggaccgtcttcactctcaatgaagcaataaatatgattggttgaataattatttagtgaaactgtgatatgagacttttaaaatagcatgagaccaccaccttggccttatcttagaacttctaatgcataaggaacgtgtaacctttggcgaaactatactacctgcatttaatttaaattacataagaaacaacaaatagggagcttgctcggaaataagtaagcgtaaatgtctgaatgcactcaggttcctcaagctctgcgcattccaactaataaaattcatagttgtgggcggtgttgcctagcaactgctgctaaaatatcagaatggtacttagtcgaatctagagaactagaaacatactgagcatatggattagtaggctctaaagttcaaaactaatcattgggggtgttcgatcgacaacgcttgaggacaattcaaagtgaatcagagttgatttggcgtttaaacatcatgttaagatttgaggtaaaaaaataatataaaatgttgttatattaaataagttattataacttaaaaaattagttcataaatagtgtttagctacatgtaaagagacactatttattaagctataaatattatattaattttttaaaatattttataatatat

SEQ ID NO: 382728 - DNA, 3847 bp, Cannabis indica
atatatatatatatttactgtaattatttgaagaaattgtacttttccttttggaactgtaggcttcaattgtggtgaagcagtgaactttgcaattggtgactggtttcccttgggtgctgttgctagccaacgctatgcacttcttagtaggatgcctttgcttcctcatgaagaactactttgcaaagaagcaatgcttctctattcgagtttagagcttgaagatttggatcattcttctgctgatttggcctctcattgttccattaaaacttcttttgtgaagttgatccgtttcttgcatcgagctcgctggttgctaatgaaatcagggatatgtactagtgtgtctgcaaatcagcatggaactatcctgtgcagcttatgtaaacgtgactgttatgttgcttttgtcaactgtagctgttacatgcatcctgtctgccttcgtcatggtatgcttctatccagcctagtgtttgcgtgtttggattatatgagatttcaattgcttatttatcttgaaaagatctgtctctacttgattagagagaagtgtattcatcaccattttaatgggatataaactttttgaattatgacctctacccaatgggacttttgatactgggttgccattcctacttaacagcagcccacagggggattttaccaatgctatatgtttctgccttggattcttacacactcttattttcatctgtttgttgcttttcttgttgcagatatgacgtctttaaatttttcctgtggaagcactgtacgctctgtttaagggaggatatatcagaaatggaagatgcagctagaaagtttgaaatggaggatagagtaccagaaaagaagattaatcagcaatctaatagggttcatgacttgtattcagatccattagcaaacatgtcacataaagttaagcaggaggtatacattccttactgtccgatcaaatttgactcgatcccaaaacttagtgatactactcagtatcaatcaaaagagcaagatcatgtttcgtgtagtgcacaggtgtcaagtagtggaacaatgagtttaaattctgaaatgttaggaacatctatgtcctgtaccacatccactctacattctcttcctgtagaccctatggaagccgcaatcactcccagcaatgtaagatacagatctcctttagttggctacttctgtattctgatatgcatcctttcagaattaatttagagtgcttatgtgtttgaaattctaatttgttgcatctatttattttctccaggtacatgggaacactagctttgatgtgaggagtcttgactctagaaagttttcagaagacttgtcacggagtgcacttgaatctactctgtcttccccgtcatgtgatgaacacttgactgtaaatcaagattattctcatgaaaagctggttaggcctactctagatgaagatagtgatagttctgattcagagatattcagggttaaacgtcgttcaacacagaagatggaaaagaagaacatgaatgataacatattatcgaagcattctgaccaccaggtacttagtttacacgtaaactttagatcttagtttcataaaccagtattgtgtcctaacaattgatgattaacttttctggttgctgaaatttttaatggacaggggttcagacgacttaagaaatttcagcctgacagaagatctgggtcgtcaggttgcaccagaattgtgggatcaaattctaaactaacaactacgctcactaatcatagagctattgacactctttcaacgacagaaagatttgtcaaaggaaggggtaccattccgatctctataaaattcaagaatgtggttaatgagggtagtagtaacagactgagagaacaacccaaaaaggataggtttcagttagagttgggtaagagcacgagggaaccacacccagtagatattggagcaaaacgccttaaagtcagaggcccttcatttctagggtcagagacaggtcacaggttagattgaaagaagaacaggaaaaaagaaaaaccatttcaccatttcattattagattacacaccatttttttattgacctgctctctggagccacaatatcaaactagagcctgactttgctaacttcattttctctaatggggtcctaacaacacgaaaaagatattctgattgatgattctgggagcagtgacagattaaccttaggttttcttttttgaaaaacacaacaaaatttatattctttgtgcagaggcctcaaattggggcaatacgcacggttgatgattcttaaggttctcgggccggagtatttttccttctttggcagggtaaccttcctgcagtagaaagagagattgggtttagtagtgatgtaaatttgtttctgtgggttgggtaattctctttttcattcatctcatcttttaagatttcttttgtttaacgctgcttctaggttatttattctttttgtagcagtgtggtccttgtaccctttgactactacaataaatgcacagaatgttccctctctctctcattacttcgcttttaacctctaaattttacattttcattcatgcggcaaaagtattgctaattcagttgaataccatttcaaaaaaagaaaaaaaatcggttgaatacaaataaaacaaaagaaagagttgaatactgaattcggatacgttgaattatatatatttttttttgccgtttttattgtactaagcacatttcctcataatttgggtcgatttggtccagaacttagtaaaaagttatcatgtttgaaccgtatttaaaattggtttgaattagattctagttggtccaatgtcaaattaccgactttataatggggcccaaaaaagggtaaatacacccaaagactaagttcattcaataaaaaaagaaaaatacttagttcaccctattttaattattaaaatattaatttttatagctacacgtaatttatttttcaaattagcctagccttataaggtgaggctttgaacggctcctgcttccttctttcttagtgactagagtctcttctatttgtttgaaaaatgtaaattatggtaaaatgaacttaaattataaaattatataagtaaatgtttttatttcaaaatttgtaaagaaatgacgctattacattatttattatttatagtcttttaatacattatttttttttatatattttttaaaattaaaaaccaattacttaaaaattatagtataatctatattagttttgttaaaatcttttttattttaaagttatgtcgatttttatttttcttttttataggttgttagtatgtaaattttgttgtacattatatttctgttttgttgcatagtatattattattcatagatgctattttttttttggctatgtataatagtaatatataattttattagcataatacaaatattttaatgcataaatttttattggcatgctatatatatatttaattattatatttatatatttttaattgtataatatattttttattttaaataatatttaattagtttctattttattatatacaatgatagtatataattttgattcatggtatatatattttattctcatatataatttggttagtatattatgcatatatattagtaatatatatatatattattattgttagtatatatattttggtgagtggtatatgtattttttattatataatatatcattttttaaaataataattatgttctattttctattgtacttttattgacgtgacgtat

SEQ ID NO: 382729 - DNA, 1407 bp, Cannabis indica
tttgaactttttagcttaaaaaaatagaaagtagcattggagatactcttaaaccttttctcctttgtctttatttgctcttagaaattaaagttttgagctagaacttttgcttcttttattgctatacaaaccccattacatgatactggttttacattgtaagtttaaaatgatgaatccaacactttgatcacaagactactccgcacatatcacatttttgtgatctgatttatccttacaaaacaccatcatcagtagtaactacaaacaagtggtcattttggactaagtagagagagcattggtgtttttcaggtacatacaatcttcacatttgcagccgatcctgattttctaaagaacgatattcgtgtgaagcccgacctagatgctctcggtgctcttggggacgcagggtggtattgcatccggtcaatcctatggactgcaaattatgagctaccaaagaaagcagtagctatgcctggcgccgtgtttaatgatcatggcgtaatcattgcttgtggcgcctctttacattgggaagatggtaaagtagcaacctttcaatgctctttcttatcaaacatggcaatggacatcactgctgttgggtctaaaggtacattacatgttaatgattttgtgatcccttaccaagagcatgaggcccatttttctgcagccacagaaagttggttcaatgagttagtcaccggttgggttccaaagccaagcaaacacatcattgctgctgatttacctcaggagacaaggatggtgtgtgagttttccaatttggtaagagctattaaaaaggggtctaagcctgagaaacactggccaacaattagtaggaaaacacagctggtaatcgacgcagttaaggcgtcggttgacaaaggttttgagcctgttgaggttggaaattaggcctacattgttgtttaggggagtttggtgtgtgcttgtttatgtcaaataaaagtatggttatgaaaaacagattctgtatgctgtgtgcttattgattctatgcctttgtgaatttaaactcttggcttttgcagtgtctaccaaccaatcatatgatatttataaaaaagaataattaatgtcataattttgtagtggtcaaattataggttagatttagcaaatcttaagtctaaaaatgtattcaaatgatgcatcttgaaatacattattacactttaaactcatgaaaataattcttctctaacattccaaaagaaaaaaaaactagggcaagcttcttcaaaagtgtctcaaactcaaattatgtatcaagtaggataatttcatatgtacaaaaaaaaaaaattataaaaatactgcagaattttaaatatttttatacagtttttaagatttcattta

SEQ ID NO: 382730 - DNA, 1393 bp, Cannabis indica
ggtcccaagttcgaatcccctctacctcaatatcaataaaataaaataaaataaaataaaaattctaacattgatatttatttttttagtgatttaccatttatattagattgagaaatgttatggttatataaatgagggtgcttctgtattaaagaatcactatttgtaatataaatagtaagatcttaatctaaagtcatgtaaagtttgcttgtttgaacggtatagctaccataaatagtttatcattattttttctttttgacaaaagttattattattctttaaatgtttagttgtataggtgattcgttggtaagttgttctatgattagtgattatttggcttcaaaaatcctattctaatagttcatagtcaatgacttattcaccttctctcctaaaacataattttatgttttttctcttctcataaccattctcattttttttaaaaaaaatcttttgagttttgtacttataattcaaattcaaattttaaattaaatatgtgataccacacatgttattgcaatatatttttgagttttttaatgttgacctagctaagtattattttatttgctaagatatacaaatttctatattttcttagtgtaacagcttgtatattttacaatattaaaacattttataagaaaacctctaatacagttacaatgggaagtaattttagttttatcatatgttcggtttatgtcatcttatgttggagagttttagttaaaatagaagatataacactaaatttttgttaaagttttgtaacttgtgatttccagaacaagagaggagagggcattgtcccaaaatacccttatttttttttttaactcttatctctaattttgaatttgtttgattgttatataattttgttgcaagtgtaactcaaaaagacaaaaaaaataattgaatttgaaattcagtgggtctttcctgaattggtcaaccatatgatagttagcaaattgggtggaagttgaaaaaagacctgcttatggagaactgcaagaattgcagttctatgggctgtttggttagagagaaatgacagaatttttcaaggtgcggagagctcaccaaatgtcttatgggataagatttgattttggacagctacttgggtatataagaatttttagaggagttctcatttctagacttaagtagagaatggagagtcttgtggtaatttattatgattatgggttatagtttttccgtttactggttttgtttttcggctcaagtatagttttgatgtttttgtattttgttgttttgagttatagtgtttgtatccaaggctttcaggaaaatatcgggggaaggatcagtctaagacaagtgatctctttctcttttt

SEQ ID NO: 382731 - DNA, 1278 bp, Cannabis indica
aaaaaaaaaaaaaacaaagctaaaatgctacatctaatatcatcaaaacttgaaaggaacgcaccttcaccaacaaataattcagggaagcgattaagatgataaatacaatgcttgcaaaaaagaaagatgagataaaatatcagttttcagttcagcagatgtttgactacatataaaaagaatttgctatgaaaagaaacacacataccaagcaccatgaagatacaagaggtatgccaaagatattacaacccatataagagacatacccttttgctttaaaatgaaaaagggtcctcgaaacattagccagaagagcaaaaatggtgaaaacgattgtgagaataggtaaatttgcacgaaagttcctccattgagcatccgagacatcctaagttacaaaacataaaaatgtaatcacatatctaagcccatgcaaggagaaaaacaccaaggcagagaaataaaaagagaaagagaaagagggtgtgtgtgtacattgaggcgttgagatatgagccatccaggacgcaaaccaaagagtttggtgtggtgatctgcactgccaatatgaagcattagaacacatgaatatatatgtatagaataagtaagaaaaaagacattgggcattaccgcgagaaagttgaacagatctatgaatgatgaaggcatagaaagcaacagcataagcaagaagaaagaacaactctgtggacttcatatcctcaaggcgaccttttgggtttataataatgataaagaagtgagtgaattgaattaacaaacaaagaaattcatctgaaaaactatacaagcatccaaataaaattgccaaaaaaagaaaaagaaaaaacaaaccaattatggggctgaatcaccaaatggtatcaccaattcacagacttcaattaaaccccaaatctctcgttccatcccattatgacattaagttcacttgaagcttggccagttatggtagatgatataatactgaaggactattaaaaatgtaattaagttatggcaatcgcatccttatacattttcccattcgatcgttggaatcctagtcaataaacagttggaacccagtgggagaagagtaaaatgggtctgtcgaatcccaagctatctaagaattcagaaattggaataacatacctttcacggcgagggagacgacggaggtacgcacggcgatggaattggagaacgacggagacgtatagggatttttattttatttatttatatttatttttagaaaaatta

SEQ ID NO: 382732 - DNA, 1006 bp, Cannabis indica
ttatttttatacatatataatgtattatttttaaatttcaatttataatatcttaattatttaaatatactgtaattgaatgctttaaactcaattttttgatttttgaaatttagttagactttttttttaatgggtgagatgctttacataattataaattataaatgcaatcaaaaaaaaatctgcttattcattgtttttgattatctctcatataatgatagaatttctcctgattgcaatgactctaataaatttcaataaattataatagtgaatttgatcataacaggaatgcgagtcaactcgagtgaagagctatgtaagaaacaacaacagttttgaaggaaaaattcctagcttggagttcaccttaggcagaccaggctggcaaggagaagaaatatgacaactcgctaattttttttattctcatcttcttcttccttttttccctagaatgtatctttccatataaatatatataaaatcgatcttctactcaaatcagaagaaaaaaatgatcttctacttcttcaacacattttacaatattctagaactgcttttacaatattcgttgatgaaaattataggtcatgaacaaaagggtggatattgatattggtgaaatagtcttcgttatgtatatgtatatatatgagctaaatttgcaagaagtcaactgagggtagttatttatgtaatacaacttaatttttgaggatttttttttttttgcttttttacaagtatttaattagtttgttgtgatctctaagtagacttgaaaaaagtatattatttacaaagaaatgattatatgagaaataaatgagaatgtgttgaatacacaaccataacaattatgttactatatatgctctcaaggagctcgcttgaatgattcaagtattttattagtcaattagtcaatctattatgttattaaatagtgtgattatgtcaaagaaaaagacaaacatgttggatatattttacc

SEQ ID NO: 382733 - DNA, 1891 bp, Cannabis indica
tctcctttttttttcaatttgttttactaaaaatggttttttaagttttttatggtctctttctctttttctttgaccgaataaaaatagtttttactattggagttttatatttatattgagttaaatgtattgtgttaggttacacatttatttgatctattgatattgttagggcatggtaaagttgttatttaaaccatttgtctattttatgtggattataggttttaactggcatatgagaatctttgctcatggttctaagctatatgacacccactttattgtaattttttgttgttggcgggtttatattttagtgtaaatatgcaccatgtgagttctttgctcaataaaaatagttttggaacaatatgcggctggtattgtgatcgagtttgacaagtgtcatatttatttgtttaatataatagaactaggaggaatgcttttgcatatcaatggtgccatggttatgttcttttttttttttgtcatggtcactttaattgattagaaaaagtaagaaccagacaaataactaaatgatggatttgagattaaaagtggcaatgatttgttggctatgttcgaggacgtgagaagaaatagatataagaaggttggggtctatgttgatatatctagtacttttgaagtaaacattgttgaattagcactttttttgtggtcaagttccttagacaacagtatacagtacaccagttagacttaagttgaaaagatgcataataaaagagttaccagatgatgcaaatgctactcttgatgctcgggtaataaccaaactagatgactatattatgagtaatgcagaactgatggagcttgaggaggaattgacaaataatttagaggatgacagtggtgattccaatggtggatacaatgagttttttatgtacatgccagatgctgacatggaagatattgaacaaggaagtgatagtgataataaagaaactgtctttagtaatagtgattcaagtgtgcaaaagaatatggataaaattggagattttttttttgggagtaaagatgttcatgttgattatgaagatgaaagcccaacatatgaggcccaacttaaacatacaacaacccgtaccacttccaatgaggcccaagcacaacctaatatgtcaatacaataatccataccacttcaagcaaggcacataccacttgccatgcccaaaacaacttccaaacaccatccaaaaagaagagataaaataggacatacagtagcccaaacaacatgtaaaacaccacaaagaaccaggaaaaaaaacactaccaaaaccagcaaaacaccatgtaaaacaccaccaagaactaggaaaaaaataggccaattaaatctctgcccatcaccccaaactagatctcaaacaccatccaaaacacctacagaaaccagaaaaaaataggccactcatatttgtaaaaatcaccccagaccagatctcaaacaacatctaaaccacgagtgtgagagattttggaaatcagagtacaatgaaacttcttgaaccacgaaagacgaagaagagggaaggctctcgagtgggcagtgacttgcgtgcaacaaagtgagtagggaggaggtccgcctgggccattggtggtcggaggcagcagatcggagtcggggttggattttaggcctcaaccataaactggagatttcatacgatatctagatagcgttgccccaagtgtggctgtaaaattaaaaaattatacaaactgaactttagcagactaaattaacggacaagcaactcaccaacaatttcgaccctagttttgttggaatttattttaccaggatcttagatctactcacaagtatgttgtttaa

SEQ ID NO: 382734 - DNA, 1868 bp, Cannabis indica
caatcactaaaatagttaaattgaataaaattagacaaaaatccttaaatctaacaatctcaatagttgaggaagaatttttaatggccaaaaaatttcaaaagcataatttggtacatgttaaagtttaggaggaaaaaaatcttaattagcctaaagaatattgtaaaaaaaacctaatgggatgaaagagcgggacgggttaccggtatcactcctctttttttttttgggcgtaagagagatccaatttggccaacatcctacctaggatggagggtgtcttgaactctaaccgaatattaggttaaatccctttaaaatgaataacatcaaaggtgattgatcgattagtactaaatattgtccttcatttaagctttttcaaataagcaaatcaactaggattaaacataaaacatacaatccttattttctcaaacataggatataggactattattatgtcatatattatgtcttcttcaccacaagaacaggacatttagcattgcttaagcaatactcacttaaagaacttcccagcaaagccctgtaaaataaattaaataattctaatttttaatcacaacccatgtaataattatatagtaataataatatttctatgtgagtttgactaacctctcaatgattcctttagacttttgaccaagaacaagtaaatcaatattgtgttcttcaacagctttacaaatagccattttaggatcaccaccctctgtaaattgttttcactttcacctgtcaaactcaaatatgtgttattaaaactcaaattcttttcctttaattactctttttaagtatatataaatacataaatattactattattattaccccatgtttggcacagattctctttgatttttctaaaagtcccaatgaaatcttcatgttttgttgttgattctggctaatcaaatccatagctgttgaaaaaataaatataaaattaaattataagaaaaatgaagcaattaattagaagattattaattaaaataatatattatataataattaactgggtgaaagatggaagtgaaaatgagccaagcctaatgatggtaaaactgctgttgtgagggactgagttgcaaatataaaaagatgattgtctttgaatgactctttgagattttcaagaacccaaatcaatgcatcataactcaattcagactcatctatgcccaccatgatcaacttcttcctcaactcttttctttgcttctccattttcattaattgatgactaaatatgtatatcacatacatatatatatatatacaagtctaagtcctaataaagccaaaaaaatttcttggtaaataggtgttgttgacttgaaactttacctactcataaattgctgcaaagagtacttaatactatagccacgtgtcataaaattattggtgtaattaagttttgaatcatattttaattcaataattattattgaatattattaattattgaataatagtggtaataacaatacattttttggtgtcaaacactacaagaaattttatatgctattgatataattaatattaagttctacaaattttgatttactaaataatataaaagactgctaatcactcataataggccatatcaatactaatatggtgttggagatgttacaatagttaatattatagtattgttattaagtattagtagtgtttaacactttttagacgtgtcaccttataattagtataattagttagcgatatcttttaaaagttatacattaaattatatgggagtcaataattaattacactaataagaatattaacacataagataatactaagattttttt

SEQ ID NO: 382735 - DNA, 3651 bp, Cannabis indica
aaaaaaaaagacaccgaacctatgtctaatgtctaacatcataagtaactaatactttataattaattaataatcttttatattatttattaatttaaaataagatatttacggcaaaattcttttaatatttataattattacatatataatcataaaaaaaaaataatagtaaaagttactatttttattgcattaagctcaaaaatacataacaatatattaattgattacttatttaataaactaaaaaaaatatgtcttgggtgtttttatgtagatatttaacagacttaatttaaaatcgtaagataaattacttttgtcattatttttttattagaatcgtaacaatttaaaatattaaaaaaaattcgagacaaatatcacaattaaaatatacaatataccgtatgcaatatgtggtattactaaagtgttttttcgtttttggttctttaagatgccaaataaatgaaaagtactttggaagatatataatataattgattcatgtaaagcacgaattgatctcttcgtgtttcatgcaaagcacacctataaaaaggtttggttcctgttaggtcgctggctgggtccacatccacatccactctatatatatatatgtatataactaagtcaaactatatgccaaaagaaaaggaagaacaaaaagttggtcaaatatctaagctatgtgagactcagactcagactgactgtgtttgaagaccacgtgcttgagatgtggattaatcgatctaccactctaccaaatgaaatgtatgtacagagtttggccttttttttactttttcaaaatatagtttggtctttggtttggtgcatagatgaattataacgtgtcataaaagtatttatttaatttaatattaagtatttaagtctcacctactttataaaaaatcagtaattaattacattatagcaaatcaaaaaataataataaaaaaattacattatagcaattctattgtgaaaataaacggttaattagtatttcaacaaatgaacaagctattagggagtagggagtgtaacggcgaaagtttaaaacatgcaatttttagtggtttgaaatactaattagagcacccaagagttctaattaacaatttatattgttatttttgtagtgtaaattaataaatatggggttatgtacatgattagacttgtatatcaaatagggatcggcttactttctattatttttgacaaaacattgcaagattattattattttttttttttgataatattgatgtgtgataccatatgctgccgacaaagcaaaattgctcaaatatttatattctaaatttaaatatatgaatccttttaaaatacgaaattaaaagaaatgtttggccttggactggacacaatattttttttcaatgttactttccaatatatatttttaaattttttgttaaaatagtcttcctaatatacttgagagttgatacattttgtaacacatattatacaatgttgaatttacttgactcttattgggatgctatttcacaaaataaattagtaaactatataatactttgcgaaaattaaataaaataaagtaaactaatatatttttagaagaaaaaaaagaagatataatttctaccaatcactcataaaataacatatatactaatactagtgaaatgaaagttattttttttaatgtaaatagtagaaatgaaagttattaataatgagtataaaacataaaaactaattaaattaatcacagtgtcaataacggggcccttactatggctaaatttaagggcccaattcgaaaatgggtacactatgaactgagtccctccctccctttagtgggaaaaaccccaataaatggtttcattgaagggtagttgtagtagtagtcaccagctatatttgggcttcacttgtttagaagaggctgcttcttctccccccatttctccaatcgactcttggccttatccacctgagacaatttcacttgaaataaatcatttcttacttttagcctttttcttctaaatttcatgcttttatgagaatatatataagtttaaatttatttatgttgagtgttctattttaccaccaaactgggaattataaattatttatggggattatttcacaattcaaaaatgacaaaaaatttacattttacaagtttataattattttcttttacattcttatagattttaagtttttatttttataaaactaccgagtgttatttttaccttgctgttataaaaaaatcaaatgtaaacgtttttttttaaaagtataacttgtaaaaagatgtagattttgcaaaaaataaaaaaaaatccgtaaaaaaatcttaaacaaaatcctgtaacacattttttttcttaataaaatggttataatagaaaaaaagaaagggtaatttttcctttacctctttattccaatctgtgcgaaaagtcacccatagtagaataaaagtctgcatcatagtccctccaatcattccagaccatattccctgtatatttatatgggattgtgattatttactaataataaaatcattttacataataatagttatttaatttcattttttttttcaaagaacaaatggacttcttggacataccttaacaccaaggtcaaatttaaagcccagcaaacagcccaaaggaacccccactacataataacaacccacattcacgtatgccacaaatgcttgccatccacacccaacagccacccctacatttcataattaacaattaatattagaggtatgtgtcaagcattatataaaaagtagtattttgtctatatttttttaaaattattatattaaattatatgattataaccacttataatatttaattacatcaatattaatattatgatttaaaaaatgatagacaccactaatgttaccgtcaacttcttaattaattttcgtgttcgaaaacatatgccgcaatattttttttcaaaattctttcatggtgatgttcgttatacttataccatcatctttgtaaatttttaaatttttttgaataatttataatgacaaaaataaatttaaattttttttaaacagtcgtggtaagctggattataggaattctattttcggtattgtaaattatttaaaaaattttaaaattttaaaagataatattatagctataacaaatcattataaaaaaaatttaaaaatattcttgtatatgattttgaacataaagactcactgcaaaattgtaattagtaatattttattttaatattaatataattatcatttacttaattaataattaataacacagttttagagatcaattgatcaatacatacatatttaattaataactgtctttgttaatcatatacattttttatatatattatacattctgtcttatcacttttatatagggataataaaatagaatggaataggaaaaaaatatttatttgattgtatattaaaatattagaaagttaataaaatgattaactattttggtagaattattattctattttaaaataataaaaaaaaaaactaatctaatgcatgtgaaaaaaaaaattaataatttt

SEQ ID NO: 382736 - DNA, 1802 bp, Cannabis indica
ttttttttttttttacaaatttctgcaaaatcttctaaaaccatacataccttgctccgacggcccagatctttggatccagtataattttccctctcagtttcaaccccagactcctgcaattaactcgatcaatacacaatttatccacaagtgcgtgcagaagaggtagaaagaaaacaaacctgagcagaggcagttgtaaaaatgagtaacagaagaagaaaaaagagagagagggaattcatagtagggtctctaaatcgaacacccgtagtttcttgaatccgtttggttgggggaagaaaattgtatctgaatctggatttggagaaaatgaaaaggagaatcgggtggtgagattgtttgaaatgggtgagatcttgttagagatctaaaaagctgagtgtaaagaggttgtgatatatggagaaaagggaagcccggaggtcgaggtcggagttgggtgggcttacaccaccgacaccccgttgaagcttttgactatactaaaaaaaaattaaatcaacttcaattatatattaactctaattattatgtaaaaactaattatattgtatcattcttttctaattcaaaattttcataaaataggggaataagtaaaaggtctagactttattgttacaaaaaaaaaaaaagtaaaaggtctagtccaaataatgtgtctattaataaaaatgagttttgttttttatttttaactcgaaaacaaatttgtatttggtgcgatttttttttaccgtaattgtaatttttttagattgttagtttttgtgctaaaatattttttttttgaatggaaaatccaactttattaaccatcaaaatccgctaccaaatatggtagcaagtcgaatggaacagattccatatcgaaagtacaaccaggataaaatatagaagctcttgcacagttatgagctaccatatttgttgatcggttaacaaataaaacaaaaacagttttcaaacttggccaattagagaaatcatgtccaccgagcttcttagcgcttgaaccaccgtaagacaatcggtttcaagtgtaacatgctgtcacccaagtgtttttatccaactcaacgcttcccgtacgcctatggattcaactagttcaggagatgtcgtacctgtgaaaaggagtgttttaccttcaactagcataccatgatgatctttggccacaaaaccacaaccatacttgttaccaccatcaaagaaagcagcgtcgacattgaccttaattttatttttacttggaaccatccattgctcagcttcgtcacctatcgtataacccgaccatgacgtctcaatgagaattctgagcattactccactgatcaaggaatctcgttgccaacactgcaatagcagcaccagtaacatatattttctaccaaccaaagtcattacgggcgctccaaatcgcccaacaaagcaccgacaacaacttcctttttttctgcatcaatagctgcaaaagattggatgcaccagtccagaaaactgctcgcaccagtagctacgattggagtcccaatgccaacccgttcccatacctgcttggctcttgtacacgtgattaaggcatgtttgattgtctcttctgcatcacgaaaaatcgggcaaagagtttggacattcaccctctttaatctcagttgtttcaaggtgggcaaacactctctgccagcacgccaaaccacatttttaaccttgggggggatttttagtttccaaaactgttgtgatattttgcacacgcaagtgtacgt

SEQ ID NO: 382737 - DNA, 1221 bp, Cannabis indica
ggatgactctaaaagaaaaattgttaaaatggtttttttttaaaaaaataaataaataaataactcgtaaaaaaatcaacttttcttagaatttttttaaaccatattgtatttgtttgtgatgttgatctacttttaagattaactggttaacacatgcatgtaacttttgacttcttgatgattagtatatttgaaaactgtatcaacccgaaaaaaaaataaccaaatataaaatgaaactcatatttaaattattcaaaagcataatcaagaacaatttaatacctgccattggctaagctcgagtaattatttgaaaatttaaatatatttatcaataagtagaattatatttttgcattttatttagtattatcaatggttggtagaaaaattaattataaatttaaaattttgtcgctctaacactataattattctatatatttaaagagcatctagtctacataatttattctatatgtgttcatcgagtagtagaggccgaaaaaatctcaaaaaaatactgaatcataggttcttcaaccccgaatcccaagcaacccagcgccactttcatatttcaacttatggaatgtattatgtcttttacgagtactagcggaggcatagaaatacgtactattttggtcaccttccttaagctaaagttactttgatctttgttctcaaaaaacttcccgcttagtaagaacttcaaaaacctccttctcgcttctccataccacgccacataatcttcatctttcctacccttaagccgacacaactgagctttacattccataattttattcttggtaaatgttgatggaacaatctttgataatgaaagaaagtttggggcagttggtgtggctcgtgatcacaacaatcggtttattgaggatttactgcctcatttgttggtcgtgttgatccggtatggttgaggtcgtgagggttaatgaggctttgaattggataaaacaaaaatattggaagcaattacaagttgaaactggctctttggttgtcgttcaggaagtccaaggctctttgaatatcctatctccttttggtcaacattttgggttcaaaaaaatgaaactgaattctgacccggacccgaacaaggcacgggttggcgagtttgcgggtttcgggttcgcgggtttcggttggccgggttggcgagttgatccggtcaactcggtc

SEQ ID NO: 382738 - DNA, 2406 bp, Cannabis indica
tgcttgatgggatccgtttcgaaactattttcatcaagtaacttctccacagcctgcccttctggtgacatttttgcagaacgtgctctaactcgagcttgaactctaacaagtgcctgcatgcaccttagagtaacagcagcttgctttctcacttgtcttccacgaaatattgcttgaatccttaccactgctctcaaggcccttaaagcttgccttgcctgaaaaaagtattacatgatctattaacaaaaacaataaaaagaggagaaataaagcatataaaacttatgtttgtttacacaattctgataccatattaggtgaaatgcttctatctttattcaaagagattccaaaatgagtcaaccttacaatggaagagtcataatccttgtatagaggattaaggtcggtgatagaaattagttagataaaaaagaaaactaacagaaaataataacccaactaacaatattcctactaacaaatgatagagttcatcaaaatccacaggaatcattgaacaagggtgcgtaccaaattacaaattctccgaaatgggcaacaaaatttacttccaacattccataattggctcgttcaagttaaaatgggcgtaattttaagcgtaattgagttcaattttctggtcttctgttctttatatttgaaagcttatgactttggttataattgaacccaagttggcaaattgtgcaaataaaataggtcattgtgatctgaaaagcttaagtctacttatgcacaaaaggactctaacaccataattgagcaaaacaaagaaatgaaatacttaaaaagagaacaggagggaaaaacagagtcgtgtaccagaaagccccggaaaaatgcctggatccgaatagcagcccattctcgtttgacaaccttaaaatctttaggctgagcgcggactacagcagccatggcagcagcgaatgcatcatcagaaaccaaggactcaacagacgcctcgaatgtcgtcatgttggtccttttcatacccgttttgacagacgatccaaaaccttccgatgcgctcctccatagcttccatttcttctttcccttctcctgaaaaccctagaaaagaaaaaagcgaaaattcagtacaagagcaaaaaagaacagaacagaacagaagatgagaaaataaggttacttggtcttcatctgcagaagacttcttggaagcaataagggatttcagccattttccagaaacacccattggatcagaatacaatgaagatcagcgggtgtttattgtttgaattgaagaaaatagagaaattgagaacagagagggaaagcttcgttaatgttaaagtgtttgggctatactatagtctatattctgtaaagaaaaaagagacgtttggattttgaatttcgaaaaaaaggtaaaaggtcaaacatatttaataaatgaaagtaactacctataacggatatatatctatttatttatttaattaaaggcgctccatctctcttaattttaaaaactttactctatttctgtagaattaatgttacaggatcaacccaccagattacataaaaatattttttattttttgaggtaaaaattgggtgtctaatttaattggaaattataatttgattatagttttgaaaaaaaagaatacaaaaaaatacagaagggagtataataattgtataattgtaattatggagtttatttttctatgaacaaaaaggttactaatttgtaatacaactattttgatcaaatcgtacgaatttataaccatgcattataattctgtaacaatatttacaaactaaataaaaacaaacaagaaaatatttgttaaaaattattatagaatttttgtaaagtttactttttttttttttttttattatataattaattgcaaatgtcgatggaaatttataaatgatatttaattttgaaaaatgaccaaatgcttaggtgactatatacttcatttgttgaattggctaaaataataaacattagaaagactctcagttgatttaaaaataaagaatgatcagttatatagtgctaaatacgaattatttaatagtgattgaaactattcctaacctgattttttaaatgtattgaacatttggtgaaactaatgcacaaaactacacatacactgacaagattcctgtatctagagtgtgaagacaaagtaacaactgtccatgacagttattacagttagttgtttttctaactgtttttctgttatgagttagttacagatagtttggttgttagctctatttctgttgtaaccaattcttgttgtgatcacctagagctactgattgtgtatataagatcatgttgattcattcatcaataagattctcttt

SEQ ID NO: 382739 - DNA, 1861 bp, Cannabis indica
aaaaaataatcatacaactttcaattaaaatccatgtattagatcatatatcattcagtttatagttctactactaccaccctacctaaataactgccattaatcccaatcaaactctccctcactaaaccaactaactaaacccaaactcttagttgaagacggatattccaaaaaccaaatattcaaacacatccagttctgaaaaaagaaaaggttcaaaattacaaattcaaacatgggccatttgaaataaaagtaacctaattaattaatcaaatatcaatcttacatgtgttttacagtaaaaacctctgtttcattagaacaagagattctttaaacagcaaacgaaaccgaactgtgatgatcaatgacaccaaccaaattcctcaccttaaccttaacagctccagtaagcttctgaacccttcgagcaatcccggataaatgttcttctgccattctatttttggacgaaaccagaaccatttgagtccccaaaatctcatcataaacccactcgaattcgtccaaaacttcacctaaaagacccaccttgttttttccaaccaacatttttactatacgcaccaaatgcctattaaaccttcctttctccactaaccccttaaccacacgacccttttcttcctcttccagaaacgggtcggacaaaacagcccgaacccggttgttctttagaagcttagacaatctctccacatctttcccaaccgagtcaaccgagttgttgagttgagctacgtcgagcagagccgcggcgtaaccggcggaggctttcctgtgaatcgccgcaaaagatggggatgagggccgagatgaggattggaaaatggggttgttgaaagagttgggcttggtggagattgagttggtgttgttgatgggcttgtgggttgagaagaggagggagtttggggtgtatagtgtagaagtagacttgaaatgagtgagttcacgagaagaagaattggaatgaaaggtaggaactttaatggtggaaactgagctcgatagagtatccatgggagaggagaaagatagtttctttatgatttattttattttttcttgtttctatgtcattttggaagatagggttttccagcaagtgggagtattcaagttggagagggcttataattgatgataaggatgttgttgagtttgatgggagttgaaatcaaaccataattattttgtctttaataatttgtgattcacaggaagcactgacgtggttaggtgattctccttgcttattcattattcaatttcattacattttcttctctttaatcttgtaccattgctatttaccaggatagaactcatatttaattactagaatataatattagaaaacagtattaagtactaataatatcttttaatatttcttctaaccttattaaatgtaattgttgtttcttattgcaatgactttggtggttaatatatcacattagcgatttaccaaagtaaaaaaaaaaaaaaaaacaattatacccaattaaagatgattttcattttattaattaaaatcaatcttaaaagggacttataatataatttatgtcaagtttgtgtgtaagtatcatagttcataaatatatattatataaatggtaagaggaaagataaggatttgtaccaataaaaagtaaaagtggtcagaattattgacaaattacagaataatgaatttttacggaaaaatacctaaaattatatttagtatgaaattttaaaagttcttatgataaatatattatatttaagtttgaccaatttatatggtattttttgtttttagatttttttatagtatttgata

SEQ ID NO: 382740 - DNA, 1953 bp, Cannabis indica
caatatcggtcccttccaatgtatactccatacatccgatactggtaaactttgccaatgccctggaaaggacataacacttatccaaggtgtaagtatacctatcgctgattatcatgccagtctaaatccagtgaactgacaaatcagggaattaaacttttgaacatataatcatgattatattccactgtgctgacaacactataatcatgaacaaatacatatgttctggacttaatagaatttatacattaaacaatcatgaaataaatcatgtgaaccatgcaacataaaatgatttctgatctttattaattagtaaatctgattatattgaaatgggttttatttagggcacaaaacccaacaaggaattgtccaagggtggtgccgaagttgaggccctaaagatgtggctgagggaagctcaagatgggcctttccaaggcgagtacaccggaaaggtatgggatctgaacttaaatcctatgacagactggttcaagcgcttcttgggccctaatctggcaccatttgcttcggagatggtaagtcacttcactgttaatttgacccagcttcccatgaagagatatgcggtctgtgcttcctctaaccctgtctaccagatccaagacatgagtgttgctttaactgcagtaagtgttaggcttctgcgcccctatttataattttttattgtttgaagttctaaccttatttttctttgttagattgatgtagaggccggtcgactttccaaaactttgatcaatcaagtattcaccgtgttaaagttgggtggcatgggtggggttatgaaaaaactcagggagtcggaggatcgggtggaggctcttcgcgacgatgctctggcagagaaggctctcatggagcaggaccatcaagaggcgcttaaggcaaaagatgatataatcgcctcaggcatgaaggatctccaggatgctcgggaggaaatccaggaactctctgtgaagctcaagtctcttgaagagttacatcaaactgacttggagaccaccgccaatatgactgttcagctgaaggagctgcgcgagttccaggagcagactcaaaaggaggccgccagggctgcgagggaggctttgctagcttcggttacttgcaagaactgtgagaagcacttcaagggtggggtgttcataatgaaataagtttttcattacaattcatcttcttaaaattactatatcataaactttattgaaaggattcatgactgatgactattttctaatgggtaaattgtgttacaggctttattggtatgtagttttccaaggagaaggatatgattaagacgggcccaagatgttagactacctatcacgaggatcttctcagggtcgttgccctttgtgatggctttagagtcatccacaatgtaccagattaagatggattttatttgtctgaaaagtaatcagatataatggttatactctcagcaatagagactttacagataaattataattatcacattataataaaaaaaattcatattttattatttacttaacttgatattcatctatcttttcttttgcagatatgttggtgggacagaaatatttcaaagaaatttcttttcttatattaaagttttattgtttagcgacatctctttcttatgtaagtcgcaaagctaatattgcgggccataaattagtttagcatacccttaatatagacaataagcctttaagaagctattcccaattataatggtaacctaaaaaataaattgagaataaaaataaaataataaacttaatacataagcttctagttggagggaggggtcactcttttgattactcaataaaagattctatttttttttttttttgaaatttttacaaaaaaattaaaataatagattttaagtaaaagtttacaatttta

SEQ ID NO: 382741 - DNA, 4722 bp, Cannabis indica
tctattcaccattctctacatggcatcagcgccttaagattagaattgttatttgaaatttaaaattagggttcataaacaagaaaaaaaaaaggattagggcttgagtttaggcttattttttggaaaccctatatggagtgaaagttttttctcaccgctcacatagaaggattgcccagctgccaaactgcaaaaccccaaatttcagcatccagattcaccgtgcgtgagccccacgcgccgccgtttgtcgctgtccaaattcccacacatcgacgcgtctgatatcttcttcggtgacggtcaacacccgtcacactctttgcccttccatgtcctgcacctgcatcttcatcatcagattcggaactcaaagataatctccccatttcactacgtaaaggtaaacgccaatgtacttttcataattattcttttgtttcttataatcatctctgtcttttattgcttctcttcattctattactattcctaaaactgttcatgaactaatgtctcatcttttagcttgctgaaatgatagaagaaatgaatgctttagttgcaagtagtacttggatcttggttagtttaccttcaggaaaataggccatagggtgtaaatgggtgtttacaattgaaatcaatcaagatggaacaattactcgcttaaaggtctgtcttattgccaagggttatgctcaaacctatggagtggactattgtgatgttttttctcctgttgctaaactcacatttgttcggctgtttatttccatggcagctactcatcattggcctttgcatcagcttgatataaaaaatatttttcttcatggagatcttaaggaagaagtgtatatggagcaacctcctgggtttattgctgagggagagttaaggcgagtttgtcgtctttacaaatctttatatggattgaaataaagtcatcgtgcttggtttagtaaatttagttaggttgttgagaaatttagtttgttgaaaagtaagtcagatcattctgtgttttataaaagatcaattgctggtattattttattgtggtgcatgttgatgacatcattattactggaaatgatgttgaaggcatctcattccctaagtctttcattcatacccagtttcacacgaaggatttaggggagctcaagtatttattaggtattgaagttactctgtgtaaaaaggtatttttttttgtctcaaagaaagtatgtacttgatttgttaactgagataggaaaattaagaacaaaatcttgtaatgctccaatgaatcaagttgtgcatcttacacgtgatgggaaaccattttaagattttgagaattatcgcatattggttggaaagttgaattatctaactgtgactcatccaaatattagtatcattagtcagtttatgtcttctccaacaatttatcattggacaacactagagcaaattttacgttacttgaaaggagtaccaggaggaggtatagtttacaaggatcatggacatacccagattgagtacttctctaatgaaaattaagtaggctccaaggtagatagacgatccactttaagatattgtatatttgttgggagcaatttgatctcttagaagagtaagaaataaaatattgtgtctagatctagtgttgaatcagaatatagagctatgacacagtctgtgtgtgaggtaatatggatttatcaatttttaactgaattcggatttaagacttctattctaacaaaattatgatgtgataattaagctgctcttcatatcgcctcaaatcccatgtaccacgagcgaactaagcatattgagattgattgtcattttgttcattagaaaattcaacaaggtctgatctccgcagaatatgtgaacaccaaagaacaattaagagatattttaaaaatactttgaatggggtgcagtttgattatctttgtaacaagctaggcatgattaacatctatgcttcagcttaaagatgaatgttagaatattagttgtaaaaattagggtaacttgcatttagtagttttctatttgtatttactagtttctcatttagtctcaagtgtgtactattttatggaatataatatacaattctagtcaccattttctacagaggatttgttagtgaacaatttatgagaatgtaaacacaaaaaataaagaaaaaactaaaactaaaacaaaacaaaaaacatgaagaaaaaaattaaaagaatgatacaatgtcgaaataaaaaaaaaaattgtgtaaaattatcattgaaaaaaatataattaatagtttataaaaataaaaaataaacaagtaaataagatgagtcatttaattatcatcaacaaaaactaaatgagagtaaaattgtaattatcattaaatataatttataaggttacacatgttattcaattagaaaaagagtgcaaaaagaatttatttaatactccttttaattacagtaatatttgttgggtaaatattattttagaccttgaatttcgtaaaagttgttgattgtactctctgttttgttaaatgataaaatagatagtacaaataaccctgaattgattttttttattaaaataaaacttaataataacctgatctagaagtgttatgacaaaactgaatatatttttgcatctctttatgcgaggaattgtcttcaagttgattatattaaaaaaattgtcgaaaattaagctaagggtcctatttgtaccattttagaaaatacatggtctatttagtcatttaacaaaatagatagtccaatcgataatttttacaaaacacaaggtctaaaatagtatttatccatatttagtccaaactccaaatccaacatctaataccaaaggaaggagactgtgtcgaccaccgcctatactgaattatatatatatatatttgtaaggagaaatttcattctccaatccttttacccattaacatcttagaagatttcacaaaacccttatcgcttaatttttgacttttcggaaatatattagctgatgaattagtagttgttgttcttgtttttttagtacctttagtggttcatatacctgtcgtgttcctgggattaaaggcttacaatgagacaaagttgcacaaatcttacttggagatgactcagctatagaccaatcgtacccaaaaaaaaatgagcaatgagcttatagcatatgcaggagctactaaaaagacaaaccccacaaaaatggctcaaagccaacgccactaaagacataaagtgcaaaacactacaaaaaaactaaaaaaaaaaaaaaatgaaaaaaatgcaaaacaaataaagaaatataacaaaacagcccaaaaaaacccccctagtacaaagaatgagccactaaggcaaccaaaaacagaccatcaaagtgcaaagaggcgctaccaacttctgagaagaaaagcctacagtcaacctcctaaaaagtttcaaaatggtgaaggacacaaggcaaggaacacacaaccctttgagtaaaactcgactccccaccttttatatctacaaaacattgagagctcaaaacaagtctaagtgcactataggtagaatgcttaaaatgaaactcaggagcacaaactgagatctaacaaccaaagaagaaaaaaatcactctaaagcccacacacccgtctgaaaagggccaccacacagctctaataacaaaatcggcaaggggaggaccaatggaagcctaccaccaccatcaccaagcatcctgcaagactgaagccaacaaattctcccatctgttggtcggaggcgcctcacttgagaccgatggccacccccaacagatgacctactccagtgaaaaccacaacaacacgacataccccaatggaagagaacaaagcttgacgcacaacctattaagatccatcattaagaccacctatgaaaagaaaaaaaaaaggctcttgaggcgccactaggccaaatcgagtcgacgatgcccaaggaaggtgaagaaaccctaggaaacgagtgggagagaagaaagggtcagaaacccttgaaagaaaacgtagtgaggtccattaattgagaggaaccaaattggatattatttatttatgattttgtaatgtttagttcactccgtaacgttttatacattattactatttttgatgaaattagagtccaaaatatcttgtaatacaaattaaaattgtatttttatacgctatttgaaattacctttttcttatgaggtgtttggagtaagagtttcacttggtagattttaaagagtttaagattacctaaaaataaacttaaaaatggaactcacttaataataagttctccaccaaaattataccaaacataatagtttggatttacattcaatttcaccctctcatttataaattatttatgcacaaaataaaaaacaatctctccaacatataaatggttagaaatatacattttcattattttttataaaattaaatctatcgtaaaggtatttataaactactttactgtaattcttagcagataacctcctattctttgtttatttattttagaaaatggagataacctcctattcctaagactccaaacattccttatagtcttagaattgttaatagttttacacacctattagtaaaattagtcttatctt

SEQ ID NO: 382742 - DNA, 2459 bp, Cannabis indica
ctacaaaaccacgtaaaactcttactgtttcgtacatatatacatatattagttataaatagttaatttttatttaaaaggcttcatttattgttaacaaaaatctaggttaacatatatcaacaaaccatcaatataatgtaaataatccagatctcatgaaaaaaaaccagatcctgccattttaaaaaaaaaaagcaaaataataccaatgtaaataataaccacgcaaacctactgaaaatgaactacatactcttttaaatatttaagaacgtcaactactacttttctattatactgtcctgttaagctcttctgtactttgttactttgattataaagaaaggatctcgatgagaagcatgtaacttttacaaagcttccttcacaactttctctaatagtgttttctccatactctatatattgataagttcttttataataaacaaattactatttttctagctagtttctgtatttgggtgtaattaatgagtttatagctttactcaaccataaatactcacggaaaaacttatagcaccctccctcctctcctaaaagttgtttcaataaactctctattttttcagcattcagagatttttaatccattttttagtttccataatcgagtacattgtagtcttatatgactacttgtaaattttcaaaaaattgtaaatagtttagagcactgaaataaaattcaaacaattttttgctacgtttataagaataatcggttataaatgcaataaaatatttaagttttatttttgtcactaaactattgaatattttttgaaaatttacaaataattctacaacatacacgataactacaacaaacaatatgcatgttcataaaaaaaaaaaaaaagaataaaaggctttctcatatgcgaaaacaaatagaaattgtacccagacgactcttttaaagagtatactatagaattacccaatatttttttttggtttaagttccattatttctacaaacaaaatgattatatgttttgattctttgccaaaataataataatttgaccggataagttatatcaaattaccatgtatatttttataatatataaattaccatattagtgatttttataaggacttttttcatttttacatttctaaattttttttttttggaatttttttatagaattctacatagaaactcctattgcaactagcgctgcaacctaaatcgcaacaaaaaattgtatagaaacccctattgcaactaacgctgcaaccactttagaaacccaaaccgtaaatttagaaaaaaaaaaaattttaaaaatatgagataattcatctttttttaattcaattataaaaaaattgaatatttttcaatatttgtatttaccaaaataatttattctatcgattgttcttttgtttttgaaaaacttacttttctttgaaagtgaaatttgccaaattaataatataaaataatctcacttaatttattttatgcgaccatgatagtcgcatagtgtaaatttatagtcgtttatggtcacacattataattcataattgcttctgcgaccatacaagactattttgctaatcaatttcttttataaagttattttgttaataaataaaatctatttttacaaaatattcttttataatttttataaaatataatgatcaaagtgatatttatcctagagtccaggacctgacggtatgactccggccttctatcaaaggtgctggaatattgtgaaacatgatgtggtgatggtggttaagaggttctttactacgggtgtctttgatggaaattgtagtgaagctaatgcggttttgattccaaagaagaaaggacccgagactatgaaagatttgcgtcctatagctctgtgtaatgtgctttacaagattgttacgaaggttatgacaaatcgaatgaagcctttcatggattctattgttgcaaactctcaaagtgcctttattcccggccgccttatctcagacaacataatggtctcctttgaggttctgcactatttaaaacgaaagcggcaaggaaagaccggttgtatggccttaaaacttgacatgagcaaggcatatgatcgcattgaatggagattcttggaagttgttctgaggaaactgggctttgttgaaagttgggtgcgccttattatgcaatgtgtttcaacggctcattacaagattttacatgggtggcatgagatgggtcctattgttccaactaggggaatctgacaaggtgatccgctctctccatatttgtttattctctgtgctgaaggcctctctgccttattgagaaagtacgaacggctggggtagattcatggttgtaaagtggctaatggtgcaccgcgagtttctcacatgctatttgcggatgacagctacttatattgccaagctac

SEQ ID NO: 382743 - DNA, 1334 bp, Cannabis indica
aaaataattccaacaacaacacctaaacaacctaaaatagatacttggtaccaccccaagccaaaaacaaaacttgaggaaaaactaaaaatttctcctagaggacaaccgatcgatcggttctgttgcactagaaccaaccggtcggccggtcctggcaggccaaaactcttgggttttcatccctaaattcaaaccaaaacccttccaaacctgaccatcaactcccaaatagtataatatcacaaatataagatattcaaaccctcgattcataataattcaatcaaataccaattttaccatggttgaaccaaaactaagctccttaatcaaaacttcccattctaaaccaagcagccccaaattcacatcaattgaatcctaaacactcttaaaattaaaaccaaacaaactctaaaactagactaaacatacaaccatgaaatcttggtaaaacctaaccaaaacaagcctacaactagaaaaatccataaatagcatagcaagaagcttacctcaagattttgacagcagctaaggtaaattttctagcaaaatctaagctaaaatatgatgaacaagattgatccccctggttccttctatggccgaaagagaggagagagaaagagcaaaaatggtttctcttaatttgatctttatcctattaaatgttctttctttctttcatttatgtaaaccctactaaattaataaatttaaaataataatcaaccaaaatagcaaaacacctaacctggcataatgactaaactacccctctcccaaaagctaagctaaacacatcctaagggtattttggaaattttaactaatccaccaaactgacatcttaaaattctaaactagtctgatataattacaatttaattcatcatttattatcgtgacatttctgaccactccatcaagttccacggtcgtcgggcctgaaaatattttatctcataaatagtgtttactattcccacaatatccaataaaatcttcgtaattaataaattacgctttattaatcacttattaaatttactctaattatcaaacactagcttaagtaagatcataatcttactccagtatcaacaaatcacatatttaataaaatatgtccaattaaatataataatattttctgagatattacaactatctcctccttacaaaaaatttgtcctcaaaattcacatgaatagctcgggatactactcttgcatctgcgactctaacacctgttggaaattattttaccaggatctagatttactaacaagtatgtttgattatcaccctaatatgaattctaaaac

SEQ ID NO: 382744 - DNA, 1514 bp, Cannabis indica
atatatatatatacttaattaataaacaaaagatttaagaaataatcaagaaaaaagtttttcatttccataacattattaaaatgcttatgtatatatgttcaagggctgattaggaccactgagaactctagttacatatgtggatataatttatattgtcacagtttttgtggtccactttacaaatagtattcccaccaaagctaaaacacttgtgttcagaatcagcaattaaagacactcctcattaactaatagttatacactcaaaactatctttatcaccccaataatgaataataatataggcaatagacacctttaaaggatgttttcatacacaacccaaatagtttatttttattggttgaaaaatagagtgaacccaatctctatttcagcagctattttcggacccgactcgacccaggtttttcaatttttcagtttttttggcagcggatcgagacgggtggttgggtttttcattacagtgaaggtcacttgaaatttagtggaccattgtaataaaaaatatttttgaacttttatttaaaaaataaatattgtatttttaaaaattaatatagaaaagtataattttaaaaggattttttttttaaatctcggttagatggactctaaacacagacttaacttacttatgtcgaataccgagcctaagtacagtgatgattacaagctatatatatataattaaggattaattaagaatattgagcatgtcaaaaactatctttgatttattagctaatgtatataaataattaagaaaagaagagtagtgcgcaatgcgcatgcaactaagaacattatacttatatatgaaaatgataaaagtgtgtaaagcatacaaagacttcaattttatgtatatatagaatccaatacagtactgagtactattgcttcaagattcttcctccaaagtcaatgaatcaataaatgaatagtattattgtccttccttattatgcttattgttcatatataaataactcttttatattcatttctttttcatgaaagtttactcctttatataactttctatggatatttaaagaaattatttcaatcaaatagagctacatttgagtcatgagaatatgacaatttaggaaataccattaccaattttgggatatacagttgaacaatttaaatgggccttcataagtaatttttgggctttggcgaaaataccaagctataagacccaattttgggatttacagttggaccatttaaatgggccttcataagtgatttttgggaggggtaagttgaaaaatgcctcttttattcatcaattaatcaaatttacctctaattttatatttatttgaaacatacctctttttatatgtattgtacccaaaatacccttacataagagaatcacatggagagtatcttgaagtgacaggggcaaaattggtacaatgtttaaaaaaagaggtaaaaatgatagattttaaaaaagaagg

SEQ ID NO: 382745 - DNA, 1946 bp, Cannabis indica
aaaataatttccaacagttaaatgataaattggacgttgtatttttcaaaatagtacactgaattaattttttgtcaaaataaaacttaataataaactgatctagatgtgttattacaaatctggttacgttttatgtatttgtttatgctatgaattgtcttgaagttgattatattaaaataattgtctaaaattaagctcagggtcttttttgtttgaagaaagcagagagtcctatttgtaccattttaaaaaatatagggtctatttttttatttaacaaaacagagggtccaatcagtaacttttacaaaaatgaaagtctaaaatggtattaacccaattgttgaccgagatttttgacaactccttaatcaaatattaaaagaattagttataagtagatgaagatatttttacgtgatcttggtgttaattaatcgtccacgagtcacttttattagaggtcaaaatgttctatagttcagaaaatattcagtttacagtataaggagttcactatgtttgtgaacccaaaaatcccctttacatttacagtctttgtatatttatataggagaatgagatcagtggagaaagggggacctttgctcccttacctctaggtactatctagtctttatagtaggagtttggtgtgagataagatttatcttgtatgcagttgatgtgacaatacaagattagccgccactttatctatatacgcaaatggggtgtcagaataatatggctctctaatgataattaccttacattgaactagttgtctatagtgatctaacttggaacttgtgttatttgcattatggactcccagatggcatatgatttgggaggctaccacctcttggaggcctatttcatagcactttggatattcttataagtttatttgagcccatcccagacgcgtctcttgctttaggaatttggtcaaagaatttacaagataataatcagtcttcccgtgtgcggttggccctttctgtcacgttgtgccttatttacgtggccacgtattttgattcaaaaaaatatatacaacatttacctccaagttttggctcataaattttgagctgggatttgcattaattctcgactctttagtttcctctcggagggctcgaggtatgacgacgtgggtaggcgagacacccccatttgtacgaataagccacgtggtgtatagcgaaaggttattacattagcgtgttttttgttcctcaattttagcaatgccaattctcttccttgacattaattcctaaggaggtcataattgcagaatgtcagttagatactcgagtaccgaaacgtctcctcataatgtgcttgtttaaacttcctcccaattgttggattgtggtgtgcttcttggaattttaaggggggcataagatcattaaatgaacaagatcacgaccctcagcctataaatagccattttctcctcactcttcacacttttccttctactccattttttaaagcttttgaactgaaagaatatccgagcaaacaagattttctcatactctttctcagacgttgccaagcctcgtattaccaccattgccttttggtgccaccgtccctaaatcaatctcaaatttataagtattcacacttctgtatattctctttgatgtaatttgattatgtgtgcatttttccttttgggcgtttagtccagtgaccgcattgaaggcatgaaggccatttttcctttgataatcgggcctttgatcatatcttttgctagatgattttttaaaaatgtgcagtccccctctttctcctctctctctctttctctctcgtttgtgtgtgagtagaccatttaagtgttgggctttgtgccctaaataaaactctattttaatgtaatcttttttaatcaattatcaataaagaaa

SEQ ID NO: 382746 - DNA, 2050 bp, Cannabis indica
ttgttcttctcattatcggtttctgatattgaatacaacagaccgagagtaaagaaatagacagagataaagagcatacaaagaaataaaacacatacacacagactgagtaccaaccgtttctattagaccaaagcatttgtcgtcaccccatcaattgcagacatctaccaaatcacgaatatcgttcggatgaactgtaactaactgtagaattctgatccttatccttataaacaactaggcgtggctctttcaagccttcgccactttcctgttacaaaatagtaaggcaattccaaaacagtagaaaaaaaaaatgaaagcacatccagataacgctaatgaatcattactctacctgttgaatagatttaagtctcaaatcatctcttctatatttctgcaaaaaaaaaaaataaacaaacccatcctcaatcttcacaattcatcaaaatggaaaacagaaacccgaaaaaggcagctggaatgtaataaaaaaaacctaagaacggagttgataactttcatctaacgacagtctagaccaattagcaacacaatgaaatttcttatgagttcaaacagagacttaaatttgcttgcactaaattataatcaattcaggattctgaaatccatttttctatttctctcatttcgattagcaatccagtagagaaaatcgcattattgaacaacaaaaaatgagattaaggaagaaagattcatacgatagtcgccaaatcttcaataaactctttccgccctgcgaagcaagttaacaagtgcacagatcaatacataaatattcatatctatattcacaagaatgaaatgcatgtcatagatgaatattcaatagtgaatatgtatacaagtaaaaagaacataatgtcaataccaacggaagcgagattcttgagcctatgggagacgaaaaatacgggagctaaaacagagagggaaagcagagagaggatgagaatcctctggcatcgtctaaactgcttcatcaatgatccaatggcagactgcgaataatcacaatgacactactcgctcttcgctctccactcttccaaaaacacatctcacaaacttctcagatcacagagaattcgatgcttcgatcacaagcaaaccaaaaatatcaaaatcaaataaaatcgaaacctagggtttctgatatttcttttcgggctctgcgttttcaagaagagagagaaggaaagagaaatagagaaagatggctccgtcggccatgttctgtgcctgtaaggaaggtggtttttcctccttggactttttttttaaataataataaattttttttttattttattttttcaagacctccacaaaaaaaatatattttaaaaatattaatttggatgtatgtagtttagaggggtttgccttgagattgaggacaacggacggtgatgttgggtcctacgtgtaaccatctggattataacactgataatcacaacaaaggttccgcgaatcggcaaatttcgggtcccacctatcaccgctttacacgtgtcaactgtactcataccttttttttttttcctttcttgtagtaatactgtagtcttttctgtttgattgatcagaagaattgccttttttatcttttaagaaatatttatggcctaaccgttttcttaggcaaaatattttggacagaactcaagcaaatgtgtttttttttttcttttttttttgtaaacaaatgtgtttttcctaatacatcagaggagatgcagtagctttttacagaaattttgaaaaatgactgaaactattaaaaaatatttaggtctgcccataataggtgggaggaacgaatgtatgcttttcataccaataaagaataaaatatgcacaaaattacatgtttatcaagtaaaaattttctggcaaagggtaaggaagctttagtaaaagttgttatcctagaaatgtcaaattaccaaatgtcatgttttattattccaaaggaaattggtgaagagtttattggtggggatcaatccat

SEQ ID NO: 382747 - DNA, 2741 bp, Cannabis indica
caagtactagaggtaatttgaagcttgccaaactgattggaacttcacatggtagagaaaaacattgatttcactacataacctcacttggatagtgacagaagtttttaagtttaccctactgatccttcaagcttcaggctcatcagttggtttacctcagcaccgaactcgtcaggaagttcgttgaagacatcacggcaaaaaccagaaatcatggcagccatggctttttcatagtcaattcccctctgttgaaagtaaaatagctggtcttcaccaattttagaggtactggcttcgtgttcaatgcgagctgtgggattctttacctgttgaacaaatattattaattcatcaactcatatccaataaggatttaacaagagattaggaaggtaaaatgagaatatacaaagccctgcagatcattaagtcactgactaatccaaacataatcatgagtttttttaagccttccttttttgcagttattgataagataccccaacttgagctggattcaagtggctatttcaaacctacatggtccaaaagagctcctcaagttcatacttacaataggaggcaacatacgtcattttaatgtggactgccagtaattacttttctatttcacaattcaaactcaactcaatatgcatttacaacatcaaccagagtcatgctatctaaaggatgataagcaataatttgttacactccaagataatagaatatggtattagagaataaataataaaaggtatatgagtctttgaatgagagggtagtcattgagtgagaaatcggtactgtataatataggcgggtaaggaaaaaggaagatatgcaagaattaagtcttgctctgcatcacagatatattcaatatcactcttctatacttctctaccatttggcttactgttctattgttattgagattaattgagcgcaagaggttaatcggtaattatcataatcatctaatagttaagaatgtacctcaatgtaggggtaagtgttggcagccgcattatcaccaataagcattgaatcacactgtgaagagtttcgagcattctctgcccctgaaagcaccttaacaaggcccctgtaacaatttcttgacttgccagctgatatacccttagaaataatcctacttctcgtgttcttccctttgtgaatcatcttcgtccctgtgtctgcctgctgataattgttagtcaaagccactgaatagaattcaccaacagtatcatctccctctaatataacactcgggtacttccaagtaatagcagaccctgtctccacttgtgtccaagatatctttgaacgagccccagcacaaaggcctcgcttcgtaacaaagttataaattcctccccttccttcctcatccccagcataccaattctgcacagtggagtacttaatctctgctccttcagcacaatataactccaccacagcagcatgaagctggttcttgtcataagagggagccgtacagccctctaaatactccacaaaactcctatcctcagcaactatcaatgttctctcaaactgcccagtttccatagcatttatccgaaaataagtggaaatttgcattggacactttgtatccttcggtatataacaaaacgacccatcactgaaaactgctgaattcagagctgcatagtagttatcctccacaggcactacttttcctagatacttcctaatcaaatcagggtactctttaatggcctcagaaatggaacaaaagataacacccgcagcctccaaagtcttcctatgggttgtggcaatcgacacactgtcaagaacagcatcgaccgcaacattggccaatcgattttgctcattcagaggcactcctagtctatcaaagtacctaataagttcagggtcagcctcatctaagctattcaaagtgggtttcttcgtaggagccgaataataacaaaggtcttggaaattaatgggtgggtattggttatccgaccatttaggttctttcatcttcaaaaacctatcataagcattcaatctaaactcaagcatccaatcaggttcatctttcagtgtagatattaatctaattgtttccttcgataaccctttgggaattgaaaacgaatctatatctacactaaaaccaaatttcttatcgtaatcacggttacgaagaatttcttggattttttcatcggaggtagtagaagaagttgagagcttaccagaagttgtatcaggattgatggttttctgttcgtaatcaacatcggctcgaacccttaggaccctttttgaggaagaggaagctttcagattgagaagcttcaaattatcgagttttggatgaaacccctttgggaatttaggggattcggaagtgggttggggagagaagcttgaaataccgttagccaagagagaagccatggatgagggttggttcaaagagaaggaaactcttttgtttgtttgtactattttttttccttataattttggtgggttgaaagaaagtgaagttatttttgtggccacatattttgataggtatcttgtgcacaacacgttccatacaaatctttctgggttgatgctgaccgttggattgagtcgattagatttgaagcatttagtttatatgttttaaaactctccctcaaatcttgtaattttcatttctcatatttattgactttggtttt

SEQ ID NO: 382748 - DNA, 4514 bp, Cannabis indica
tccttataactgcacggttggcatttataccaatttacagtctattattaatcggatggtggaggaacggccgcagcatttaagcttatgaatctattcattcatttaacgactcacgagtaatgttatatattaattaataattcaaaatagtcaaatgttcaataccgtatagatagtttatctagatagctcctcagtcaattaatatataaagtcatttcactaaactttaggacaattacctgcaccaataaatatatatgtagctttggcaatcaattgggaaatgacaaagacatatgaccataatatctgataaaaatataattttgataataacaatgattaaccaagcaacagcctaagatccttttagaatattttatataaatatatattatatatatacaagcacaaaacaggttgtttccacctgttatgctagcttatcatggttagtactgtattaacgcggttaatcattacgcttattattattaaacacgggaatgatattaatcatattatgatcgataacgttacgtaatattacttaacatgggaaatgatataaatcttcatttcatgtgctccccaattttaagcaacaatgttttttattaacttcgtttcttcagatcatcacatatgaatgttttccaaatgccatattattagatctcattccacaaatgaaaacaaattactacataattaacattaaaaaaaaatgatgactaaaattaattaagagaataagttacaaattctaaaaattacaaagaaaaaatgctctgtcgaggcaagaaacaacctcagaaatttcaggcctatcccttccttccaatttcacacaacgaacagcagtatcagccaaaatctcaacagcctcggcctcattgatccactcaggcgaccccaccctattatccaacaccccttccccaagcaacctccgccgttcccttgcatagtccacaacgctcgtcagtccttcctcaccatctttgaacacagctttcttccccgtcaaaagctccaacatcaccactccaagtccgtacacatcgctcttagcagtcaacacattcagaacgtaatattccggatcaatatacccaaccgttccgacagccttggccgaaacggcgtcgcgatggccacgtttcatcagcttagagagcccgaaatcggaaaccctggcggtccagtcagaatccaagagtatgttggaggattttatgtctctatgaataacgggtgggacagcgtagttgtggagatactcgattcctttggctgcgtccaaagcaattttgatcctcgctctccatgaattgataacggaaacgctgtcgtttctcttgtcgtggaggatattgtgaagggagccatttttccatgtaatcgtaaactaaaatcctctcttcgttttcttgacagaatccaactaacgacaccaagtgcttgtggttaagccttgataaagaaactagttctgaatcgaaagcgctttccttctcttgaaattgctttatcatcatcctagtaatggtttgagatgaggaaatatgaccccttttaatggccacatctcgaccgtccgatagctttcccttatagacaacgccgaaactcccaccgccgattttgttttctaatgaaaagctgtgagtagctgttgcaagctctgaaagtgagaaaatctctggattcatagatcctaccctgttgagtacggtaacaatattattagctgtagtaggctcattatgatcagtagaaggagtagtaatagtactatttcttggctcgtcataattactagtggtgcgatgataagaacgaacaatcttattacgccataaacaataaacaatgctgctgaaaccaactgaagaaccgattgaaccaacgatcaaaaacgccaacaaaagcttcttgtcagcctttgatgagagagatgaatcacgaagctggtaattattatcagggtcattatcagacagtgatgaaggaggtagaatcggcgggagtggcacggctagtggaagattttcgacctggcatactctgcatataacatcccctgtataatgacagaggaaatccgagttcggataagtgccgcacttgctgcattgttcgggtttcacgcacggacctggaataatcattctcatcggaagaacaccgtaatgtcctgaatcagaccaacacatcagcgatagattactcgtcgttaacccgcatacgaaatcagaaccagaaacgatcagctcgaatgagatatttttaatcatgctgtaattagggattggcttagtttcccccaacatgcgacatgtccgttctgtcttttaataccacatgtgaaggttgaccctaatgctagatcagaaaactcataagctgaattgttattagaaactgaagaaggcacgtccaattggcctgaaccgttctctcccgtgcagaccaaaaatccggttgtagtcaatccacaagcgtgtgactctcccgctactaaacttgacattgagaaattctcgaaccccatttgaattacatctgcaatagccaaaccccaacaaacaactctgctgtcgtttctcaatatcccacatgtgaatccgctcccacacgtaatcgcttggaaccttaatgatttcccaggtgaggggaaaacaccattgtcgttccacactttttcattgtcgtttgaggaccctcctgttcctctccagcacctggctatacctgtggccagttcgagagcgcaaacttgagagtcaccaactgctatattggtcaacgcaacggtgcggctatgataaacgcgcttaggttgaagggtattagtgactgtgcagttagatgtatcccagcagtggaggctgaagccaccgtatctgaggccgcagaagaagctccggccgccggagatttcttgaaaggaaacattgggaaggactgaaacaaaaaggagttggtttttgggattataacattgtatgctctgatttggttggccagctacaatgccacaaacggtgctggtgccgtacacgaccgcagctgtcgatgctgagccaaggccatcgacgagtacaaaggtggtagtgaagattatgacagtgttaatgatgatgatgatgatgagcaggggaagtgtcatttaattagactaatgttttgaaaatttttcttcttcatttgggtgaaaagaaagatatcgtgcatggcagaactagttttgggaaacctattgaggaagttggtggtgagaatgtgagtgaagctagctctatctgatgatgagagttattattcagcagttaacaaaaccgttgtggtctgggtgaggagcgtacgtatagttgatcatgtcccgtgaaaattaatggtgatattacttgttgactcgaatgagaggaaattaaagagataggagtaatggtgttaatagtagtagtaaatagtaatagtctagttgattggagatttggaaattttatattgattcttgtacaactatttgttatgctgtcctcgctgtttcattattctggccctaatatgtgctatagaatgtgaccatgtttaagtccattcattaaaaaatatagaaaccccttctaagtactataaattatacgtataagaaatatgtatttttcgttaggtacgtataaaaatatttgtttacaaacaaatcattacgcttttattaaaaaaatttgatagtgtatacttttatatatatctatattatatatagacatatatatatacatagagttgactctagagtttagaccactcacctacacccaacgaaagactgtttcgattcaagatagttgataaatattatcaataatattagatgacattttataataacttttaaattgtaggataatgtaggaatttatgctctgtaggaaggaattagcttttgtaattccagcttcatcacatttaaacaactaaaatagttaaatccaaacaaataaacaaatataagggttttttcaatattatacctaaaattgattttatttataaaaataccattagaacaattatttgcacaaataccgttgtgccacgtcagcatacataccaaaattcaaaacaattaccgaaaatggaaaaaattggaaaaaatctcgttttcaaacattttcgctttttgggagttttgaaaaaagtaattatttagttgcttttgatgttaataagatatcaattggttactttttccattaaaaatttatttcagaattttatacatataaaaataataaaataatcaaaatttatttcagaattttatacatatataaataataaaataaaatatatgagaaacatatatttctctgtctccaataaaagacaactaataaaattttttttgttttctttctttattatttttaggttattattatgttattttatttatttaagtatacctttgaggtttactttttttttttttt

SEQ ID NO: 382749 - DNA, 3152 bp, Cannabis indica
atataatttcaaatttcccaataggaattgcaaatatatggctttgtttaataggctttacacaaatatataaaaaccattaaactatgcttatatgcttatgactactttaaaaaaataattaattaattaatttaaccgtatttattttaagtttaataataaaggaattaaatttcttaacccaataattttattttaatataaatatatttacttttttcctgtgggaagtgctgtgtgattgcttagccatctttactttttcatatataccattctatgaaccttcttcaccttccttccttccccacttaccaaaaactcacttcaaaatctccaaagtgttcacctttaacttcattcccctggtaattatcttcttctctttacaatttcattactttctggtttcccatttatgttcttcgtatgcttataattgtttgtatatagaaattagaaactgggaatagtgtatttttttatgcaatttcttaatttggagtttatgggtggcattgtttctaacttttagtagttgggtagttagtaatttcgattcatgaaaattggaattaagcaaaatgccaaattgggttcttttggggtctctaattttatattcgtgtataagtttgggagtgtgaaagttggggttttgtgggatttttttagaaattcttaatattttgattgggatgaaaagatgacatttttgtagcttatctttggtgttggaccatttatgatgccattatagctaatttagtcacttcttttctcttatatttatgatggtcagttcttacatcggtcagtttggtcgggttataatccagtttgatccttttgagactcatttgatctttatattcatgcttgaatgaaacacaaccagggtttcacagttgataacaaaacttatttgctaggaaatagaacaactaaacccgaaagccatagaatttatccaagtagggataccaataccatgcctggaaatgaactctggaatgatggattaatttgcgcttttgaatttattcgaggccaaaataaatcaaccaaccccaaacccggttctaaaaccccgcatagacaacacatcaatggcgataatcagtcaaggactgagcaaagagccagtagtgttccttcctttgatgacgatagaggtagcccggttcgtcagccaggacaagttcaaagctttgaaaaatatgatgttggtagccattgggtacctatagggtggagtaggatttctgagcttgtacagaccgtacaagttgatgatggttgggcatctcagctgctcgattcgatggatgatgaatacaacttcactgttgcagagttagctgctccctattgggagcgtcctgcagggcccgtgtggtggtgtcatgtgtctgcaggtcacccttctatcgacagttggctcggtaatgctcagtggttgcatcctgccattagtttggcattgagagatgagagtaaattgataagtgaaaaaatgaaacacctactttatgaggtaaatttactttttatgctttaacaattgtagttattttgctactatatttgtttaataacactctataatagaaatatttcatatggaagtgtttgggggtgaaaagggtgcttttttatcaccatttgcctatgtaaaaatttataatggtgcaatgcaacactaattgtaaaacttctatactttgagagtctttacttttgatctctagtctttacttgtatttttgatggagtttcttaggtaagggcttttgctcccatcgtaggggcgttttatatttctcgtaattatatcccaattttttagtatgatgttgtatattgtagttgtaataggcattcggtttgttttcggaaaattctgaataatttacaataaagttcaaaatagccagttacacgcgtatagaataaaacatgcactcgtgcaaatgactgtttgaattccattttcggctatgcaaattattccaaatttcccgaaagtatgcaggaagactagtataactataacgtacatcatgatataaaaaaatttgtttgtagtttttcaaattattctcaacatttttctttatatagttatcctaacactatccactttcaggtcccagttagagttgctggaggactgttattcgagctgttgggacaatcagccggcgatccatttattgacgaagatgacatcccggttgtgcttcgatcgtggcaagcacaaaactttttagttactgtactccatctaaaaggacctgtgtcaaacataaatgtgcttggtattacagaagttcaggtaaatcaaattggtgaaaataaaaactaatgactagtctagaagaattgtaatttcatataacatactaaatatctttttggctctgcattggttaggaatttctttcagctggaggttacaatacaccaagaacagtgcacgaaatcatagcacatcttacttctcgattaactcgatgggacgataggtacgtatatagatgttatggcgattgttatatcctcagttacttgatgttaaatcttttgggcatgttcctttgttgtaggttatttcgtaaatccatatttggtgcagcagatgaaatcgaactgaagtttatgaacaggttttcccgtaaccactaaacactttcgggttttctgttggtttcgcaataactacattgttgacacaaaaatttccttttgaataggagaaaccaagaggatatgaatctttttagtgtaattctaaatcaagaaatcagaaagttatcaagacaggtatatgtcacttctaatatttgatttgaaataaattttctttgcatttgacttggctcattgtcaatttttccaatgttgtgtttcttttatatttttaaatgatagaacaaaacaaaagcatgaaaaagaggtctttcattttcattaaagatccaatttatgtttcgtaattccacaattcaatttgtaattgacactttgatataaatcacaagaatgtatatttttccttgaattttccgttgagaggaaaagggtttaatttttttttatcggaatggaatattcatcaaaccgaaaaaccccttaactatataagg

SEQ ID NO: 382750 - DNA, 2361 bp, Cannabis indica
ccttacaggtaaagtcgctgcacaaaatcgcagagaggaactgctccctggtcattcaacttgcttatgacctggaggtgttaagggtggagcatgccactgctgtgatgagaagagaagaagcagacaggcatttagctgaagctaatgccaagatggaggctaccataaagaaaaaggtatctaactctttggacaagactctagcccgtgaaaggaaggcaactaaaatggaaagggatcgtggaaataggtataaagacttgcactctaaggctcttttacaaatcaaagatttggaagccaacctgaagcaggcctagataatgttcaagaggaagagtaaaggattaccaccttatctcgagagtacgataagaaggctaaaattattgaagacaaatttttcaatgagacaattctagagaaaaaggtgaagcataatcttgacatgctgtagaaggtagaggcagctgaggcagaggctattaagagtgctgagcagggtgagagtaaattggttgcatttatgaaggctctcgtggaatcccaaaagagaatcaccaaagtggagggtgaaagctaaaatttaaagggacatcttcaggagtaggaaactcagcatgacaaggctttggaataggccttcatcttttaaatgtatatcctttagcaacataacaaatcggtaattgatctcctcaatgatgaagacaagaaagagcttttgcgaaagattctggtactggaggaggcagacaaagctaagaatgcacctaaggaatcttgaacggtccatcatggaactaacattcctattggtgataaggtggatgactctgctcttctcgcttctgaagttcctatccttgttgagtctgcgatcctcgaggccccatctaatgctcaaacacaagatatgcaattattgaataatctcgctcagccttgattattcttaactatctcaaataacattatctttatttttactctttatttttctttttaggggacaagggtccctctttttacgtatgcagaaataatattttatacccttgccccagggtttttaagtacttggtaccatcttattaattccttttatatttacgttttatatcatagaatttgttaagtttaatgtttccagccttgtgacgttcttgttccaaaggcctgaacgtttagtcttttgattaaatgcttagacttaaatatttttcttgtgagaatgttcttacataaaggtttctttggaacctcaattaactaattaacctgacctaattaattatttgggatgtgaactttttttttgtcatttatcactttttttcagggtttttcaaacttaattctttaattgaactgaatcaactaatttaagtaccctgaatactgtggctgtgttagcctgggttaactttgaagcctgaacttctattttaagttaattaatcaagattttggataatctctttaattagcaacgagatgcacagtaagttaaaaatcacgttaacatgcctaaaatagtcagggtgttacagttactcccctcaacttatttcttgaaaccacaaatcatgttggagaaacatcgacaccggcagccaccgtgggacgattcctgcctatcacaccagatgtggtgtccgaaggaatcattcaactgaccatggcctagtatacaaccctacaagagaaaatacaggctttgtaggcttaggtcaacggaaaggttagggctcgacgtcctcctcgagtaccaaacacgtgtttggataacctgtaggtaacaaacactaagcggcaaactaattatcattctcatggagaacaccgaactggacaggagggacacgacttcaactagcctatgcagagggaacaagtcccaaaagatgctaacggcaaggtgccgcaagaagaggatcctgagcaacacaatcctcaaagtagggcccaaccgcgtaatgaggtaaatgatgttgtatcttattcttcatcctcacaaagtcgttttcctggtgtctataccaggtctggctctctggagacaccacgaggaagaagatattaacgtagatgcaatgtgtcaaaggttggttaacatgatgttcgtggatttgataggtgagacgatggaagtatatgttgacgatatgctcgtaaaatatcaacatgcataagactatgtcacccatcttgcaaccattttcgaatcttgagacagtataaaatgcgactcaatcccctcaaatgtgtctttggagtgggttcaggaaaattcctcagttttatggtgaattgttaggctaaaattagtctaagtttcgggtcgtattttcggtt

SEQ ID NO: 382751 - DNA, 1967 bp, Cannabis indica
ttgagctcttaacagagcaggtcctattagaaatgggctatacacgtagggtcatactggttgttttgttgctgttgtatgtttctttgcttattaccattgctcttaacattttctagctgacttttgcagtatggagttcctttctagatccaatgccggagatgtcccactagtagcttttggtggatcggatggtgtcattagagttctatcgatgatatcatggaaggtgcagcttttgtcaaaattttgttctttcacaaatatgagtgtaaatttagttttatgacactacacatatcttgcagctagtacgaagatacactggaggacataaaggttcaatttcttgtctgatgacgtttatggcttcttccggtgaggtagattttaattgtagaaaatgaaattcagtcaattttattttgaagtgtttgcatcttgcataactgtgttatttaaaagtatccccattctgtagtgttggatgttgactgaatgctttttgaaaattaatagacgataaataggaaacaaaaaggcttaagttttaatttggatttcgtattttcagccttttgatgaactatagaaaattattcattttaatggaaggatctagttgctgttgcaatgcctcaattctttatataacttttggtgtacagtcaggctttgtaatgtaattcttgtatatataaacacaggcatgctaatgtagagtgatagctacccattgtcacgagcactctaagcatgaatatttgtttctttatgtcatatataacttctgcatacttgcatgggtctttctaagttaaactccacttaactacactacattctcctgcttgcagtcacttctggtttcgggggctagcgatggattgcttgtcctttggagtgcagatcacggccaagactcacgagaactagtaccaaaattaagcttaaaggtatcaatctatattttattatttattcaattgctctttaatcttgtaatagtattcataaatttgactttcctgaaagttatgcttggatttcacatttattgagatgttacatagactaggtatgtccaacaatcctttttgtagagatataataatgtggacattacttaaatttgttctagatttaattttaataatttttttcatctctctttctctcctttcttttttcattgtttctcctgtgatgtgcttggactaaggagtttgatgtgctcaaatatttgctggttgcatagggtatatgtgttgtattccattaaatttaaatgctttcaaaacttttaatgtgcctatgtgtttatgaattcttgcaggcacatgatggtggtgttgtggctgttgagctttctagaatcattggaggtgctccacagcttgttacaattggtgccgataagacattagctatatgggacacaatctcttttaaggtgctcttctgacgtcatggttttttattcaccaatgcaagtatttcttagtttgggcctaaatcctttattttcccttggtttaccaggaattacggcggattaaacctgttcctaggctagcatgtcatagtgtggcatcttggtcccatccacgagctccaaatctcgatattttaacctgtgttaaagattctcatatatggtacgcagtatttgttctagtgctccattgattgaaattctcccattaatcaatgtctaccgactgaatttttttggataaaatatcaacagtgaatttttgaaatggatatgtacaatatgaaagatgagcattatgtatatctgattttgttttcttgattctctttggcagggctattgaacaccccacttactcagcgctaacaaggccattatgtgagctatcatctcttcttcctccacatgtgcttgcgcctaacaagaaaattagggtgagcttttatatatatataaatacatatat

SEQ ID NO: 382752 - DNA, 1952 bp, Cannabis indica
ctaacgatgtttgttttgactgtttccatggtggttgtgaactcagggatgaaagtgaatggtggatttttcctgctggactggttttgtgtaaaatatttcaatcccaactcgtcaattggcatgtggcaaatctagagattcaagatcgttccttgtacagcaatgattttgagctgttctggcagtcgtgatattattcgactagaagatatactcattaacctgtttttattttctttcttattttataatgaaaaaaaatcatttatcttgaacgtagttgagtgatagaaaaaaaaaaaaaaaaaaagaaaaaaaaaaaaaaaaaaaaaaaaaccctgaaaattgcgaaagagaaaaaaggagagagagatacacagagagaaaaagaaaggtattcattattgtaatcacttttcagcaatgtgcagtttatttctatcatgtatatattgagccagtttacctgtatgctcttagagatggagacatttattattgtaatggatctttttgtctactatgttctctgctgcatttaattcagtgcttacacatactttctaaatgtaattggcgctaaagattaactacagtttggaatcataatgagatgtttttgttttctttattggaaactaataaagtgcttggctaagttttgtctatattttatttgagtttgtacacagaaattgcactcaactttgacccaaaacttgtggcagctcaattaattgtatttatttaaagatgattactagttaaaagtgattgcctcataaatgttaagtttgtgtgtaatttatgtgagtacttattattattcatttattttgtaaatgtaccaacttcgggtttgtttgaatttatttatttaaaactgaagtgaataatgttacccctaaaagaaatgtcgcaaaatgtgcctttcaaatgtcgcaaaactttttgttctgcactaatgtgtcattttgtaacaaagtaacaaaatacataaacatgattatttttatgtgttctttagtttataaaattaaccatttcattttgtatgatttttgcaacgcatttttaagtcgccaaaagtatgtatatttttatttataaaatataattaaattttctttttttataaaatgcattttgtttcaaatataattggccatttatttttgtacgatgtttagcgacgtgtttttgcgtcacaaatagcatgttgtttctatttataaaatatatattaatagaagtgtagtgatatcatatgcaacacaaatttcataatgaacagtttattataaattaaaattatatcctagcaactaaaacaaaaatacaaccatttccatatattttgtatctagcagaaaataaactgaaataatcaaagtttgagattacctcttgtctcagtacttcagcagaattttctctgaatgcaaaattgaatttcaactcctatgcgtgtggggtgtaacgtattaaccacgtgtcttccaagctatttcttgcacaatataaagaggaagagtggtcttatttttcaatattgaatataaaacactttgatatctcaacatgagagtatgtattcttgtgtgtttgtaaaatctaacacacaaggtgcataaattcttatgcgttcaacgtggacaaacaaatcaaacacacaaggtgtataaatacttatacgttcagcataggcagagggagaggaagtgagaaaaaatgctattctttctttagacaataatagggactaaacattttttttacaattcatgatttatttataaattctttttgagtggagagcagaccctaaaaatatatgggcctaaagtaaattaaattttgggaccctcaaaaatatatatataaaaaagggaaatttacatggtatactaacttttgccatttttttacaaaaatactgccagacggta

SEQ ID NO: 382753 - DNA, 1606 bp, Cannabis indica
atatattacaagtattagtcactattaaatacatctacaagctaatgaacttgtgggagtttaaaaagaccacactccaaatctgaatactaatcaattgggttgtgaataagggctcctgttaatataatggctgagagcctactgcaactcaatatttaatttcttcttgcaatacccatttcatactacaaaagtggaaatgcaggtgtatgaaaatattattgtatatatatatatatatatatagatatactaaatagttctatattagacaaaaaaataattacaaaaaaaaacatataagagaatggtctgtaaataagtaaataccagcatctgataagataattagtgctgaatcaatgaaataaaagcatatcactttcctaaagtacgttaagtgattataatccttgaaagaaacagaataagtgattggaacaatccactattgaacagaaagctaaagcctgtaaatcacaacgtatccttaatccaaattaataaaaatgcttaatcaaataagatcattcaaaaacaactaaaagtgatcgattacgatcaaaatccctggcccgtgatgaagcaaaccaaaataaaatatccagatataaatcatgccaaaatatacatagctactaaaatatatcaaacgccagaatacaaatccttctggatcggcacatcacatcttataaagaatccgttacagcttctgtcagaatcgtgaaatgatttaacacatcaattaatatttaaacaaaagttactgaagaatagaatttccatttccatgaaactacgatccaagtattaaaaaaagactcatttcctgaatcgatttgtcaaatctccactagtgactgagaaattatttttataaaatccaactaaatgaagaaatatacataagcattattattattattattattattattattattattattattattagaagaagaagaacctgagtgaagaagatgatgatgaagaagaaggaggagctaatttcggctatggataaagataaggaaccctaaaaaagaaagctctgaaaactgtgtaattgtatagccaaaccttaaaacagatgataccacgcgccaaacatggcttacgtgtaacccagttttcattttctaataaaataaataaaaataaaagtacagaatctgtgatatataagattataataataaagagcacagttgtataattgtataatccaacattactaatactactattaattatcttattaaatacttaattacaccaataaactttaataataaagtattgaaagctctaaagtgttgtccaaaaccaaaatttattcaggccgttgatacctgatgatgatgatgatgatgatgatgaggttggataagtggataatattagcatctaaacctaccactaaataattattaagtctatcttatttaaatataattattaagacaatcttatttaattcttttgattatttttaatataatatggattgaatgtcactttctgaaaaaccgtgtttttgcaaatgtcagttatatataaaaaaatataaaaactgtaagcgtttgcagcagcagaa

SEQ ID NO: 382754 - DNA, 3920 bp, Cannabis indica
taagtgcaaatagatgtattaactttttttcaatctacataaaaagattttagcaattattattaataaaaaaattattaattataactatttatgttttaataagttggaaagtaagaaagagaatggtttgtttacagcttgaagaaagaaaatattttattcatttagtgagagtcttatctagctataattatttttaatatttagtcactttttaatgatcaatggcttaattgtgcaattctatggattattattataattaatattttgattaattttttttttaaaaaaaatacatgtaattaattagtcttttcatcatagcaattatttgtaaagaatttttatgaaatgacattaccttttcaatttattcctatattaatgtttcgtttcacagaatcacattaattaggaaccaattattgagaacaagaaataaaataaataataagaataaaagacaattgtgtttgctaattacttatttacccctcattcacttaaattattgatttgatttgacatagtcgctcgaaactcttaaaggcaatttaatgactaagtcgacaattttaatatttagttgaagcaattagtatacataaagtattatatatttgttatttaacaaatatataataaagattgaaatatgacatattatatattaatatgagattaatatatattatgtgttagagattgtattatatcatatataatataataatacacatgaaaattgtaacatatgagaagttacaaaatataaaaatagattgtaacctaatgatcacaattgataatatgtaaaaaattgagtaattattacatatgaaaaatatagaatctagatattaaaaattgttacaatactcatttttatatcatttatttgagtgttggaacattgggaattaatgtagctcggagaggagttacaaaactcaaaattgagttttttaaaaaattgttgttttatggttgataaccagttattttatggttgttttaatcacatagagccaattttgaaataacgtccatgaacatgcatggatttatcaagcacattaccaattctctccttaatatttttatcctattaaacacatattaaagtcctcgtaacagccatggggtaaagggaatttgattttctaaagtgatcctcaaacactataaataaaggtctaaactgctcatttaatgacaattagttttctatcaacaagtacttgctagaaaacacaagacttgataattcacaaatccatttcccagagagttcccttagtgcttagagatggaggaaaataagtttttagacaaatgtgtaatacctcgttcaagtcatggtgatcccctctcatctacactcaagattgtgagtaagtattctatacatattcttcagtttcaatgcctggaatgaagtgctagcttatgctttcctaattgctatggaactcatcaacacaaagcctaactcctatgaagaagctctacaatccaaatatgcaaaaaaatggaataaggcaatgggacaagagatgacatctctcaagaagaacaagacacggacactagtggagaaaccaaaacgactaattattgttgcttgtaagtggttatccaagcataaggaatgaatcagaggtaaagacccaattagatacaagagaaggcttttaggtaaaagattcacacaaaaagaaggaatagactatactagaatttttgtacctataactaagtataaaaccattacatttatgcttgctttaggtacaaagtacaacctaattgtggaacagatggacgtcaccactgcattccttcatggagagttagaggaagagatttacatggatcagccaaaaggatttatgagaaaaggcaaagaataccttgtgtgtaacttagaaaaattcctatatggattaaaacagtcctctaggcaatggaacaacaaaattgactctttcatggtcaaacatgaattcataaagagtttattatgatacacgtctgtatctaaaaggagcaatcatcatgtcaaccacatatttattgttgtatgtggatgatatgttgttgataagtaagaaaaatgctaagattaagaacttaaagaacatgttgaagacaaaatttaaaatgaaagatttgaaggctgttgctaagatcctaggaatgggcattaagagaaacaaggaaaaggaaaagcttgtactgcatcaaacagattatatggagaaactgattgacaagtttttcatgagagagagaaagagaagaatattagagagtaaaacaagattcttcattgttgagagaaaaagaaatattaagagaacaagagagattgattaccttctgagacgtggttggaatcgttaaactttgttacaatcttggcctgagaaataagattgactgagtaatccagtgtggcacgctcaatagaggatgtaccccaaataatgtggacgaacctcgataatttgtttgttcttctctgattccctctctgtttgattcaatttttgttaatttttaatttatgcatgaatgttgtttgctaacctctgagtttggtaacattgttttattcgatgatgattatagaataagaaaatgaaacttgattagtaaagtgcatttatgtgtgtgtggtgtttaaaaaataaacatggttgtttactttgatgccacgtgtgaaaattgaaggtcaaacgttgaccttgaattttctaattattttgtgagttggtgtaggtgtgtgtctttaaaatcctacataaacccaaatcaatgaaagagctttagaccagagccagagaaaagatccaaagagaaacagagaaagagagagacgagtgtgagagaagtccattcgtgttgtaagagagaaaatatagaaaagtattagggcaaaattttctgtaagaagaaaaatacagaaaaataaaaactttgattatcattcaatgaatgtgactcgaaatcaaatgaagatgatgtaatccatacatgttggtaatgggaaaattgagtatctcagtggcgagcttgataaggccaggacgtagcccatctttgtaagggtgatccttgagaaaatcgtggtgttcttaacctatgtttgattttcctaaccctatttctcttgatttcgcatgaattttcttggtgatttgtgtgtgaatctctaaccctagcagctcgtgaatgttctaagggtttctcaaagattatttgaaccttagaatacaatattgattagtctgatagggtttgtttttaattcaagggtttcatgctttattttgttggactcatactgtttcaattgagctcacagatgcatgagttataaaattttgcaacataccgagatttgttaactaaaataagcctaaataccaattgtatgtttttcttagaagattagctaccttccaacaaatagatattgtccaattacaagcactaatcgtaacaaagctaacaatttaaacaaaactagaaaatacccttccttgtgatccactcaagaacccttacttcaaatctcttaaaacttattgtatgaaattcctcaaatagtgtagtcccgaaaccccttaagatagattgaaaacaataaattgttcttcaaaacatctcaaaactgaaaaactcaattaaacaagattcttataattatatcacacttaatttgtacactaaaacaccttaacaaaattcagatactattaaaattttaacatataattaatagggatattggcggctaaaccacctgaactttacggtttgtaacacttaaccacaaaaactgaatttttggcggctaaactacctaaaccctgatttcgttttgctctgcacacctccgtctaaaa

SEQ ID NO: 382755 - DNA, 2332 bp, Cannabis indica
aagacaatttttaatacgaacacatatagaaaatataaccagttttgtcataacatctagttcaaattattgttaagttttattttgacaaaaaattaattcagggtgctgtttgtataattttaaaaaatatagggtccaaaataatatttatacatttttttgtgagtaactcacatgcggagcacgtattatttcactagtacttccaaaatcttacatcacagagacaggctaccggttaataaattccagccccactttgccaagaaagcatgattcatttctttgattttgcagaaacccaacccaccaagagatttaggaaagcatagtctgtcctaagtcttaatatgcgatccatagttcccttttttaaaccccatcaaacatctcacaaaatttcataaaccttagaaacaaatgttagttttagggttcatatcagagtcgcagtggaagagaataaaaataagatttaatttaaaaaaaaaaaattgaatccaatatgaaccataaactccagatatcaacaaaattatacaaacaaaaacctaactattagtttagagattttttacttcttgttgcctatcaaggtttcctctttatctttttcgtattaaagaaacgatcatccaatcctttgagatttgttgaagagttcacaccagggtcttccaagtcaccctcaacactccataaataaagtgggctattatattcaatttagatgaaagtaatttagtaatcacagtgtattctcaactcatactgtaatagagatagggaagaatcactcacacaatacctacaagatagagaggtgtgtgtgagagagcttagagagagagagatacgagtaggagagagagaaagattttgaaagttagttttcaattttctgttctctctttcagtttttcagtgtatatattgttttgtatctcttgttgtatatcatatatataatgttataaataaactctttatttaattctataaaataaaagataatatttattttgaattcaaatttaaatataaatattatataactaattaacaaaaatcagttataatcttttgtttaatattatcttcttaattttaaataaattatttaataatatattaaatataataattaaaagataattattaatttaatttgatttattttaataatgaaataatcaaacaaaattttcatgggcctttacatgtcaccctacacgtgcgggccatgttttaaggtcgaaaattgatttctcaattttaccacaaataaaatttattatttattttactaataaataaaaattaattgattctcattaatctcttatttgactagtattaaaataaatattattttcaataaaataatatatttttctcgtcaatattatttaagaataatattacatttaattaatatagttttatcaaataaaactaaatagttaaatactattttaattataacatttataattgatataattattcaaaatgataattttcataaaattactattttgttgttaagaattatttctcatagaaattgattcttctccaattcgttcattaaattaaatttttatttgtacagtgttgtatagatgtgttgcccttaattttgcccaaaatacgttgaccaatgcgactgcgacacgtggagttgagaaatatggttctgggataatttgactaagtctttttagatcaagtgtatcaacaagaaaatacctctcggagaagatatgaggggtccacgtactcccgaaagatagagctatggtaaagcacctccaggaggcaccagatctcatttgaacagtcacctcgcatttaataccgcatgggagaagacgtattgaaactgccataagcattatgtctaacggcgtaacccctcttctgcagctattacactatgattagcctagtgacggctactttatgagggatcacatcagtcaagaagggataaaagattatatccacctaacccctaaggtacctagggtataggccatgtatttcccatgatatatctgctaggaatgtgtgcccctactaaaaaaatacacagaaagtctagaagtacggttctagggatcactcctgaaaaacactataaataccccccaaaccaacatttagacgggggtcggagaattctgggttccgataagaatcaaagagagaaaaactaccaagaacattctctgtaataaatattctcattaatacaaaagactcgtagactaaggctcattaatgcccgaaccacgtaaaaatctcatgcattaaacttcctaca

SEQ ID NO: 382756 - DNA, 1674 bp, Cannabis indica
tacttatataaagtataatattattattatattagtgtaaacacaaataaaaataaaaattatagaagactattaattataagacaccgtgatgaacacattgacacgttggtacccaaaacaataatctttatttatggaccataagcaaagaaaactaactcgccaatgaaacaggcaagttttgtaatttaaaaagaaaagttgggaaaaatatgctgggagtgaaaaatcaattttttttcaacaaaacatgattcaaacttataaagaagaactacgctacactaaattaaagattgtcgtgtgttttaagtctgcagttaaccttgaatggtgtttgtaaaaactggattaatcgattttgttaattgatgtgtgtgtttgtttttttttaggaagggattaattgatgtgttaacatcatacatttataaatgtaactaccaaccataatttaagttaatatgatttttatgaattattaacatttaaagataagagtaatataaaaaccaaaaaacaactattccaatttggcagctcccgcagccgtcttgaaagaaaacgatagaccccattattataatattatttgtgtgatgaacatactttttcaggccagttcaaacgtcaatttctgaaatcattgtcattgttgttatatcaacataattactcactgcacaaaccacaagcatcaacacctatattttcatgacacatcccacattaataaatgattttcttttctttatagtttttttaaggttgagatgaacagtggataaatatccttgtaaatcgaaaaaaatttctacccaagttaaatttctataatctagtatgaaaaattacagctgggacttgtcaagcttagaaatcaagtagtactcctccagctaaattttgtagcttattatccccctcttttcttgtataatgattctcaagttctttactcgaacatgcccaaaaaaatcaaaagcctgtaaacttgaaaatagaagcaatactttaaatataaaccatccaaaatgttagattgctatagaaaattaatttaaaagtaaccaattttgagatgatatagattttttaagaggctagtgtgagagagtgatttgggaaaacaaactttatgaaccaaagatttacctgagaagattagagtttggcaaaacgagaaatcttggcaagtacagttcttaaacttcggataccagctccagattttgagcttaccatcatctgaaattataaccaaaccagagaatttagattgcttactattatgatgtgcataccaaaatatagttaaaacaaatatgatctttgtaccaggggttgaacaaccgacttgtgtgccttgaggctctgtaaaatcaaaagataatcagatcaattggctcgcatagattaagaaggaatgctaattttaatttagtgtcacttttaaaaatttaggggtgcaacacgaggacttcccaggaggtcacccatcctagtactactctcgcccaagcacgcttaactgcggagttctgatgggatccggtgcattagtgctggtatgatcgcacccgaaatgtattgtgcggaatagtcatttatagcgaacccctctcctccctcaagccaagtacacaaatttcccgattacaataatcattc

SEQ ID NO: 382757 - DNA, 1427 bp, Cannabis indica
gaatctgtagaactccatttcactttttctgcatgcacagattttttcacttggttttcatccagcactgaattaatgcatactttctccaagtttgagctttacttcaatacacaaatagattgtgaattttctctgaagtttgaccattacctttgatattgaaatagatcgtaaagggcatcgatgcagtcacaagggaacagttggtgcgtacaatggcactccttggacttggaaatactacccctatcttcagtatggcccctactttcggaccattcaaaccggcagggcttctaccaacagtaaccgaagaagacaaagttatattaaacaatgtccaaaaagttgttgagtttttaactgctggaacttcaataccaaaaccatcaaatgaggtaaattaatcaaaacttatatatcactttcagacatcatttaacttatgaagttccatctcaatactaattatcctgtttgtgttggggtggggatgtcaacagagtttgaatattcctcgggtttttcaagagcttctcccggtgttgccaggcatctccaccacaatacttccggaagttatcaaccgattaacttctagagtattagctcgcgtcattcgagacacatttttgtagaaaacattcttaatcttaactttggttgctgcatgaaggcctcaattgtttatatatataattgtaaaacagtatcccatatatatgtaagtgccatatccaaatccaaccaacactaccaaggaactgaagaaaacctcatcattgtatataacaagttccattcaaatcactatatacttaaatctgtatatagtaaaaggtaattttatattattttattttccatttaaacaaacagcttagctttattactttccttctcttctttcattcttttgattaatatgatatactatactaacaagagtgatttggtcttgtctagtgaggtagcaaattgaaggaggaggagttgttgttgggcccacataaaaaactttttgtctctcttaggtggagaacaagcagagagaagggacataaatatttgtgttgtgtcttttaaattttcttttttcaccatttacttccttccagacagctggaatcatttcatgtctaaatatctaaccaatcaacacaccattgttcaactttccttgtcataataatcaaatagcagagttcagtcaggagtagagcccgcgtgccctaacaatacggaccaaaaaaaaagtgaattttcatttcaccacaagaaaaaggggtccttttctttctcaaatcagctcaatatctgataaaataaaaagcctaaagttaacactatggttaaaatggtggaatgaatgaggagtggaaggaaagagatggaggataggtgaaattatttgtttggcaaaa

SEQ ID NO: 382758 - DNA, 3688 bp, Cannabis indica
ttaaaaaaatatatattatatttacttatatgtgtgtgttaggtatacgtaggatatataagctctaaggtgtggttaataaatactaaaataaaattttactgatattattttcccactacacaattattatgaggtacttatagtatgagaaatgagtgtcataaataataaaaataaaagaaataatgtaccaatcaataaaatcttagacaaactagaaatattgttcattaatttgttctttaattttccctttagagcttgtttgggcagaacaaatgtgacaatagaacattttataataccatttaaaaaaaaaagaacattttataatagacgcaactttaagagtttttgtctaattaagtaactttactaaatcatccacgatctactttctccacctcatatcgaggatgatttgactacattaggtgcttgagaaattaaaacatataattcttaagttttcttattatgagcgtttcaaaggtgtcctttattatatttttttatataattaaattaattagtagttagctatcacactagctacactcaatatatatattttctatataaatgtttcaaaaaaaacagaaaaattaacttttttgtgcacatgttgcacccagcaaatatttgcaaatctaggaaagaaatatcctgtaaatattaactaaaataatacctaataattaatttgcgatttatgacggtagatgtagcctagtttacttataatttctatgggacatagaattactgttattttaatcatgaaatacattatataatatagatattattatagagatagtactctttcctaaaattattagtgggtgttgttaatgggcaaccacgtaagtgctattaaaatgttttttttttctttttattaacggttgcaattgcttttacatggtttacttgtcgatcattatccctttggcaaaatcataaattaaactttgattatatttcaaattagtatcaaaaagtattgagaacatgatagcatgctcgatccatttgaattttttgatggggcagtaaagcattagatgattaatatataacagattttccaccgttttcatgtatatccatataatctatttttgaggttgtatcatatggctacagccttgaaagtgcctaattactttagatgaaattttgtgtgcttttttagcgaaaagaaaaacataacagtaacacgtgttgggtttcaattacgtccaacgagcattttatcttacaaaatacttttctttctttttttctttacaaaactgatatatattaaaaaaaataaaaatattaaaagagaaaaagtgagagtacaggtttattattattagtagaaaaaaacccaatgtggcggcccatcctttattagtgatttaatatggcaggcaccaccaaattcagtggactcccaccttaatagcaccaacactggtcagcttttgcgaaagcttgttaaaatcagctatatggtctgttcttattattataaaaacaaatataatgtattctatttagtcgtgttagtgcatttcttacgtctctacctagtaaattattactttgtcaaagaaaattcaagtgtcatattatttaattagtggaccaataatgtcattccaccgcactaaatggtgttttgtttttgtcaaaataagttttgtctgcctactcgccatttttcataggcaaacacatcttatatattattatgtttatagttgcttttaagataatgcataacatgcatgggacactattttcttccactagaaaacaaataatacttctagagtacagaaaatgaaagtgcagaaagtgtgaagtacgtacagagatatatatatatatatatatatatatttcgttcccaatcttttgctatagcgtttaattaattaattgctcaacaactcatctacagtacatatagtcccaattgttacatagatggtagtttgtacgttatgatcgattaattaacaaattaactaatccaatattatcctattagaatatatgcagttatatatttaagttctactctcgacagtagtagcgagtttcacttttaagttctattttatgtacgtgcctcttaattaagggttcttaaatgaaataataaaataataaagcagttacatagaatgacatgatcatgatactaatggttttaattaaaagcttcaattaatttaaccgctctcctaattaattgggtccttaatttatatcactcacggaaaattgcaggtgctttccaactccaaggttctaatattaacgaaagagataaatcggcgagtgtgaagcaacacctagtgtcttcttacaacgctttgttagctccaaaggtcaaatctgcttgcctggaaaccccaaataataatgcttcgaccaaagaattaccaggcttcagcagtgagataattcttagccataataatcattccaccaataaagactcattatccagatcaagaagatcatcaatatcatgctgtgatataattatagggtttcccacatggctaagccatttcagcattttgctgcagagaagcctcaaagagagaaagcacgaatctttcaacgctctaagagttttccaagtaatcacagctgcattgttagccggcctaatgtggtggcactcggattatctcaacgtccaagaccgactcggccttctcttcttcataaccatattttggggtgttctgccctctttcaattcagtctttgcattccctcaagaacgtgccatcttgatgaaggaacaggcctccggtatgtacactctttcgtcttatttcatggcccgaatcgtgggagacttgcccatggagctcatcctccccactatcttccttgccatcgcttattggatggctggattgaagcctgagttcagtgcttttgttatgacactcttggttctcctagcctatgttctagtctctcaaggccttggccttgctctaggggccgctattatggatgctaaacaggcctccaccttagtaaccgtcactatgctggctttcgttttgactggaggattttatgtccacaaagtgccttattgtttggcttggataaaatacatttccacaactttttacacttacaggcttctcatcaatgtccagtacggccaaggggaggcgatttcggctttgttgggatgctctagacatggaagaagagacagtggtgatatccataatgcaagctgtagattcattgaagaggatattgaagggcagattagtcctttgattagtatatctgttatgttgtttatgtttgtgggctataggttattggcttatcttgctttgaggcgaatcaataaagccttatagctagctaggtaggtactaccacaatatatagttaagtacgtacattaattattgctattattaatactacagatgattatataggtttttattattctacgtgggcaagtactcacaacaattaattgtattattattatcattaataataataaattatgattaaaataaataggatttatccttgatgaattattacgtccattttgagggcataggtcatcccgaaagttttctcttaggacccgtttagtacgcaggattggattggattagacagg

SEQ ID NO: 382759 - DNA, 2816 bp, Cannabis indica
tttattttggaagtagtcatgggaagtgggaactgctccgagtgaaactgaggttattgttaaacttaattaaccattcatattatttaaaatatattttatttatatatatcttacaaaatacaaaattttactaaaaaaaaaatatacttacaaaaaatttaaattattaataataaacatactaaaatataatttatatgaacaaagctttctatagtttatgttctcttaaatatctgttaaatatataagtattttttattttaatttaacaatatccttatgggaattaagtttcaaaaatagctttagttagaaaattttgttatgatgattatgaactatattatttttttatttattcaactataaactaggtacgtttgttttcttttaattaagtgcatatggatattgtaaaattattaatcattttgaaaaacaaaaaataaaataaatacctaaaaaacataattaattgatatgaatgaaatgttctctttcaaaaaaaaatgataaaattaacaaacaataatcaaaacattattaagcaaaaaaaatcacaataacaaaacactttaaaataatttagggcatggagtaggccaaggaggatgagaaagaggtataacatgtatatacttattcattgtaggtggaagatggcaaagatacttaatctcattgtgattttggccaagtattctaaattgtaaaatctcaacatcatcatcactcgtacgattttcgaaaaagaaaacatcttcgtcatctggatggagagctaacacattaaattgcgacgacccactcattttattactttgtatcgtcattttatcgtgataatgcactaaattccatatacacacctcatcgtcatcgtctagtagttcccatgatttgaaaacatacttacccgaattactcagatagagttgcaccacacgcaacttcccatgaaccactccaatacgtgccttgaatttatgtaagaagtttggaggcaaattaataaaataagaattgtttgaaaggggattcactccaataatgccattgatattataattaatgtatgacaagtacacaattccattgcttccaacgacggtcggtctccattgcaacaaataattgaaggtcaccggaaaattaagaatcgaagtgctccatagcttggtctcggaacaaaaaatggataattgaactttccatggtagatttattaaacctctaaccttattttcatttgaacttattttcactactttgtaattatgaaaattacttgatactactaatgcataccaataaagctcatgaaaaccaaatggagatccaggaatctcaacatattgtttcgtaaaaggattgcaaatgtacacgcgagtaggagatcgttccactagcaacaaatcatcgaacgatgaccatatataagcacgccacttgtcacctctccaaggtaaaaagtctaacgctggtttttgaccgtagtcaaaaatctttgatccctccgagaaaaactcgaatgaaaatatattgtttttcaatgatggtggaatttgagatttgaatctcatattggttctaaataataatgtaaaaggagtaaatgaagagttattaagcctattttgacgatgaaagtgattgaatttgcgccaaaaagaagatttagagctagaaataaccgacatccaacgcttacaaacaaaagcacactccataatacatttcaaatcgaaaattcgaagaaatacctcgagtaacatatcatcggagagaatccatatcggcgccactacatcacatttctccttcattattttcttcctcctccgttgttgattgttaagagttttcattttaagtagtgttcttttattttagttggcaaatactagtactatatactatataaatatatatatagttagttacttaattggttaccattttatgagggtatttgttattcttttattcttgaaatatattttaaattttaattatatacatgaaaacgtgtgcttaattagtatgtttgtattcatcaaagtaatcagaaaaacaaaatatttcattacttttcaatattgttttttttttaaataataaatttatatatatttttttgcattatataatcgtaattaaataattacactaatttccattgcaaatttaatttaaaaaattatagtatatcgtatcagtaagtagttggaatttaaaacttgtggaatgactattcatttgacttgagaaaacttattattatttattggtttgtctttatggtgtttaattaactaattaattcctttaattttcttcgaattcgttagctatatatatatatatatttttttctttgaaaggtatgatgtgtttagtttttaagtaaatatataataaagtttgttatggattaatgttgggaatcacgatttaaaaccaaacttttatattttaagtttatttttaagataatgtcaaatttattaagtgcttacaaaatattttaataattataatgtatacaattataaataacaaaaattataaaagaagagatttaaatatttcattacctctaaccaaacacacttttaacataacccaattcgtggatggatttaagggacacaaaagagagaagatggcttctatggtaattgaataagactaaattcctataaaatctcttaagaacataagttatgtatatatatagatcattatctaccgcatacccctatttctttttcatttttcccatttatttgatctaaatcttaccagtg

SEQ ID NO: 382760 - DNA, 3377 bp, Cannabis indica
aaaaaggggtgtaatttttttaaaaggaaaacaaaatattgttattaggtataagtagtgtcttagtccaatatttagcaccacttaaaggtaacatcttgtaaagttgtaataattagtaatattttataatatttattaaattaaattatataaaactcatacataaattgtgatataacacttaagtgcgggtaatttttagcatttttatatatttataggacaaaatataactgttgtagcttaaaaaaatccctcaaattagggggctagagccagtagttagtgggttagaggttgggttaagtactatccatattagaatactttttaatatataatagaagaaaaagaaaaaaagataagggttaaaaatttaatatgatgggatttgtgtggaatgtgaaagcctagagcacaccaccacatgtacacacacatacatataatacacctgctcataagaatgtgaggagtgttgttggtgatgttcaagacaattctcttgagaaagtgactctctccacatgacttcctttggccccttccccttgttccttatacacatacacatatcctttcttcatcttctaataaaaaattatcaattggaccatctgttttgttaaatgataaaatagaccctatattttcgaaaatagtaaaaatatgaccctaagcttaatttttgacaaatttttttaatataacaaacttgaatgcaattcttaacacgaacagatacaaaaaatgtaaacagttttgtcataacacttttaaattagattattattaaattttagtttgacaaaaaatcaggatcttatttgtactattttgaaaaatatagggtttattttgtcatttaacaaaacagaaagttcaattaataatttttgtaaaacacatgatccaaaatagtatttattttttttccacttctatttttatttttccacactattgactctccaatatagccatgtcccaatggtcttccttccccaaaaaagtgggcaaaatccacatttcaatgcctttgattattttttcttcctttcataatcataatttaaacaaaataataataataataataaggtggggctgaacttaagatcatcctcatattatctagcagttttaaattttatttatgtcatttaacacctatctaaatatgctttgaagtataataagtttgtcctataattacatattgtaattttaaaacagctcgactagtacggtaaataaatttcaaccaataaatatagctattggtcaaagttggaagtttacaatacacaactggtaaaaaaaaataatagatatagtaaaaacttggccccaaaaataccacccacctaattttctccaatgttcagcacatacaaataaaatatgtatataaactaggaagagttaaacaccttttaaaaaaagtgttatttcatacacatatttacggctacattatttaaaaatatttatcaaatttacaaaccaacaataaatcaagcaactttcattcaaaagaagaaaaaaaaaattaacccaaaattagtcataattcagcattaatagtacttctaaattttagaatagagcatggacactcatagtatctagcaccacaattaaatgtccctttataataagttagcaattttttataatgtttattaaagtaaaacaaataggacttaatattgagttaaatcaatagcgactactcacaagagtactaagcaccatgagtgacctttaacatttctctttcgggatatgttaggctaaatctaaaccctttaatatttaattaataaataaaaatttagattgggaggatgaataggattaaactggacttttctttagtatgtatttaataatataacatagaatattaatttaccactaaactaatttgttcgttacataatattttagttcatgtatatcattggctagataagaatttcatctttgtttcataattatttatcatttacccataagcaaccaaaagaaagaaaaccattaccatcctattatacaacacaaaatgttaaccattgaattctcttcaaatcattgcaatgagttagtttttcaagggttggtatcaatttggctgttttttctcaagtcctaaatgctacaattaaagtagtcacttatgtatatcaaagcaatacaactcagctattcacattaatgtatccaataccctaacttcaacaattaaaggttgttaaactgcaaagaatgtggaggtcccaagcaaaaacatcccatcagtttttaagaaaaaacagtattcattttggctaggcatctatccacagtccaaagttggttaaaaaaaataataaaaggttttgccaatagaagaaataatgatctgatttaaccccactcatcattacacagctatggcagttgtaaagagaatgaaagcaattgactttactttgcttctccaaacaatgacacagaagacaacagttgaaacaaacacaaaaagtagatacaactcacaaatctatgactcatcatgtatcattcatagtcctttagaattctgcagcaagagttaaaaaatgtcatgtatggcacatagaaagagatgatcatgatagtacagcggtcaaagtgacttgtcaaacaatagatcccctaatatctcagttagtggaagaaaaagattttcttttttcctatataggaatcttttgaaaaaaattattggaagtttggactggtttgcttttgttgcgtacgaaaatcagttgacatttataactgcagtgggtggaaattgaatgtataatgatacagagagattaagaagagtacttgtttagatgaatttgatgtttgcagaaaaggagtactgttagtaagtgtaacaaccgaccattagaatcattgccatgccagattctattttcaaccatttgaaggttcagaaaactatcttattcaactcagttgtaagctactgagttgagccagagactcttcttttgaaggggatttaagatttggctcaaacgaatatttgacaactatagaagtgagtgacaatgggcctcaacccaattaagccatttagaaaaaaaaaccatgtggtgccctccctatgtgtctgttggtgaaagtgaagcaagttcacacacaaatgggttataatttcgactgttaattaggatttttatctcccgatgtaccaaattatacccctggacttttaaggttgttaaaaatgacctatgaactattgagattgttggatttaaagacttttgtctaattttagtaaaaaaagtctaatatggatgaaagttcaggagacgtgatttagtata

SEQ ID NO: 382761 - DNA, 885 bp, Cannabis indica
ctcctattccaatttctaaacaaaaatgaatatttatttatggtccttaaaaacaaaattgctcaacattttgttgagccaaaatattaaattaatgtagccatgaaaatgcgcagagttttatgcttgtatttattaaatcttaatttgattgtttggactagagcaaatttttgtttgtctagctatatatgattaggatataataattttattaaatcaattaaagtcaaacacctaaagtttctaaacttttttatttattaaaatgattacacaagatgccaagtataaattattgttaaatgctttaattaaatatatatgtgtaaatgttggaaatttataattatagtagggttagtaaataacgatttagtacaacatgatttatatcaaattacttaagttttatgtttgattagtaattttttttagtcaatgtaaactaaactatcctcaactacatgttaagtaattgaagcacaagaatttgaaacttatataagattgaaacatgagtaatgtttttttttattgctcaaattaatgattatgagtaatgtttacacatacattaacaattattggagaacttccctacgtcacatttgtgtttttgcatgttgaatagttatatttatacattgtaattatttagaataatattaatttattaggttaaatagaattgttcaaaacatgcttagtttgacatacatgtataaaaaaaataaaatacatgtacacaacaaattatttaagtaaaaaaaaacaaattatttaaaataaatttttgatactataatttttttatactaattataagagggaaatttgattttctatacttaaaaatgttatttttttttaaaccaatacatt

SEQ ID NO: 382762 - DNA, 2665 bp, Cannabis indica
caaccctcattatgtcctataatgcgtcccttaataccaaaatcattgcatcttaatgatgaaggtgaaagttggcatttgactggccatctttgcattccaaatagacgttgttgaatattgcatgcatgcatgcatgcatgccttgtagtacgtgttcttatatgtacactgtacacattcatatagtattcggtcgtccttttcattattgaataaatatatatatctcataataatctctgttattagtaatgatatctcatatcattactaatatataagggaaataaggaataatggctcactcgggtgtatgtgtactcaagtgtagtgtctgttgtaaactttgttctctatctattgagtcatccgttcttaagtaaagagtgtactgtaaactttgttttcataaatatatatatatatttattgtgatttatataagtataataattttcttctatccaatttttcttttattatatatgcttaagtttttttatttctttattcctgtgaaataattgctatactaagctagctgtgtttatagaattataggtgaacccttgtgtttaaatatgtggtgaactaacacctatcaagaattgatcgaaaaacaaagtaataaacaaaaccagaaaatgtaatagactgaagattaaagaaactgacacaagtgtggttcatcgccatttctgtggtgactaatttccgagaggaactactctttggccaagctttattgatgttaacaatggtggaatacaaggttacaatacagaaaaatcactcttctctaataatttcttgcaccttacaaaatagctcacttgagagagttttaagtataagcgttcacattttggtctcagggtggatgtttaaattggcaagctataaggccgtcgaaattggaatcctcagggagtttgtgggtaaaaacttcataccactacaagatcaataaattataagttaactaaggtagacaataaacgaaagttcaagctttcgaaattgcaaattcagagtaatgaaaagggaattcttaaattaaagtgaaaattgaagtccaaagggttcaggccattagaactagaacatcagataatcggaagtaaattggttttgtgagaatttctatcctaaaattgacgggttaaagtaagcacattgaaatccaaaggctcaagccaatggaactggaacctcagggaatccagaagtagataacttaataaaaaccttggaacaataactaagtataagattgaagcctaagatcaagccattggaacctggagccttagagaatccagaaataacttagtaaaaattccataaggttataatgctatatgaatcagaaacagaaaattatattcaaagtaataaaagttgtcttagttcccaggaacttgtcaaaagatagataaaatattacaactataaaagccacgcggttagggcaaaactattgactccgcaaatactaaaacggcgacccaggtcccctaaacaaaaaataaaaggaaaaagttagctaaacttgaggctggacggtcccctccgaatccttcgggtcagtggggttcaaagctagaagatcaataaaatttgtctttttcttgggacagaaggatggcatcgggctcttgtgccggatggataaaagtgagttcctaagatgtggagtcgacacatgtttcttgatatttttcaagtgcttccttccaaagtatatcctgctctcgagcaataaacctagctcccgtctccttatcctttacgccaaactatgcgagagacatgtctcattctacgtgccatttcgtaaaggtttccacctcaaaggcttcttttagctctcgcaccctatccaccttcatgtcagaaatttatctttcgtatcatttaattgaagctcttgatcatctttttcaagctttaggtcttcttttgtagacaaggcattgtctcattccttgttaagggcttggatttgtccttccaagagtcgaacttgctcaagctttgagttgatgtccgtctgaagtgcctcgaacttctccacaagagcctgtaacttgctctccgcctccttatacttggcttcatatgtgatgagttggtaaggggtttgggtataactaagtttgaatttttcagcagtcttaattaatttgtttcattcctctagataggtctatcttgtggattcaattttagcgcccactttcttgttctgaaccttcgcgaagttgtctatcatggcacaattttcttgagtgtcttggtgcagggccttttggctttctctagagttgcattggtactcttcaactcctgcaatactttcgctttcggtggcgttttgctcaacccgaacattttccagctccaaagtcaattttgttattgtgtttgcgcaacactcgaaaagaagagcatcctgaaaagacaaagagaagatacttagcaaaaaattatcaaaccatcaacaattggaaagaaagtgctatagaaccagaacacttaccccgatgaccttgaaatttcatattttgatattcccagttttataatttaattaaatgcggaacaatgaaagtggtactgaaataatttttttgtagctacagaaaacaactctgtaact

SEQ ID NO: 382763 - DNA, 1279 bp, Cannabis indica
cacttacatctcgttcttctacaattccaatcaggcagctatctaaatcattttgatgggtatttaacccagccaaatcacaaacctttcacaagaatttatgtactgtatacctacacccgaagaagagatggcagtgtgtctccaactcctctcacaaaactaataaacaattaccattagtgattaagtcaaacttgaacaaacgatctctggtttagagtctcttccaacaagcaaactaagtaataaatttttgttttggagcacttagcttatcccaaataaaggaaaaccattttctggtctgattgtcccttggccatagcttgaaacaaatgtttgtgatgctaaaatgtaagctagctagaacttcctcaaagccatttttcttctaatcgaattcttgcccatcataatttttctccaatatcagctggaggtttgtggagcttcatagctcgagttttaatgtacacagagcacatccaatgatctcaaagattatcttttttagtagcaatatctcaaatatatttgttaaaagacttatgattggttatgtggattgtttatttgaaaaaatacaaaaataatatacattaaagatacataagtactattatagaaaattgtattgatattatgatattgatgctatttttttaaagaaaaaaaaactatgtatatatataaatattagttctttcttttttcagcacatgtatactattttttcactaaatatttataagttacaacttcctcaaaataatgttaaactattagtatcaaataatgttccacaactgaaatgtcttttgtcctatatggttctatataattatttgttattaattaattaataattaattagtaaatttggtgggtgaactattatcgtgtttctccccaaaggcgccaacgtgaaaaataacactattctctttagattacgagtcatgtgattcatataattaaccctgttcatctctggttgtatatataaactaattaattgtataatatatatatattgaatgggaaaataagcaacctaagtcaaactatatatactataatagcaaaagacatggtactgagaaagtaattaataagctagctaggtcaaagtatatataataatatatctattttatataaagtgtggctatataactaaaattcttggtttatgagaaattcatgggtgattttttattttatttaataaataataaaatattatttatatagaataaaataataataaaacaaa

SEQ ID NO: 382764 - DNA, 2444 bp, Cannabis indica
agttttttctctcactttctcggttgaatcttacaaatctttgtgtttagtttatcttgatttttgaagttattaatttctgaacttcatgaatgattgtttgcagataattaatcaatctcgaagatcgtaatattcggggttttggagttcgattaagcttggagaatattgtgttcttatcaactgtttcaagttatgaatactagaaggtttgattcaattgtagtattaactctatatttctttttcatttctaggtgaatcggtatttactatttggtaatatagttatatttggatttgtgagactaatttagatctgtgagtaagcttaacggccttatttattaactcgatctgcatttgtttgtaaaatgaaatttgtatgttttatgtttagttcgaagttcaattctaatgtgtttagattagtattgattagaacaattatgtttgatcgattttgggtgcctcctgttggtccccgcagaacaaggaatgttgaagatattttatgtatgtataatttggaaattggttttgagtgaaggaatattatgctagtcttttcgtatatttagggttctgtgagaagattaactttcaacctaatgttttcaaatgtaatttgggtgatattcaaggtattaaaatggtaaatgttgatgcgttaatgattctttgatttctttagatttttctggatttgtgttcttgttgaactggggatatttctttttaagtaaccattatgttttgtgttcgttaataatgtttttgcgaccattatggcaattcaatgagacgagatctctgtgtgcagggacattcgtggtaacagagctgctctttttgatggcattgaggagggtggaatcagagcttcatcatcatactcctcccacgaaatcgatgaacatgataacgaaagggccatggaaggattgcaagacagagttattctgctgaagagagtgagttttttcatcttttttctgtttcttttattggaagaaggggcttctttattttcctcttgtgtatatgtgtgtgtgttagattcttagctacaactttcatatcattaagatcatgatttgactttgtttgaattgtttagattcattgggaaagagtaatctatgaaacattttaagtccattcattttccttgtctcctttactaactctaactgcataggaattgacattgtagaaatgccaatggtgaaactttgtttacaatacttctctctcttctgtttttttttgtgaaaccgtagtatttgattaaactttgtacatgttttttcagtcataataattgacttgaaattctgaaggtttaacaagtaacggaatgatgttcaaaacagaaaaaaagaaaaaagaaaaagtaatggaatgatgttgtagattagaatctcttctgttatttcatgtattcacgtccagattttcctattgtttgtacttaaggaaatactaacacatgtattttcaacagttgtcaggtgatatcaacgaggaagtggataatcataaccgcatgcttgaccggatggtatgtagtatgtacgacaccaacttgtttttctaatgttttacggtgttagtattgtttacattgttacaatcttggcctagggcaatgatatggattcgtctaggggagtgctatcaggaaccatggatcgatttaagacggtacttatagacttatcattaatcgaattttcatcaaagtactctattatgctgtatcatttatttttattttcctgggtgttgttttctcctcaaggttttcgagaccaaatcaagccggagaatgtttacgctagtggcatcattcgtggttgtttttctagtcatttactatctcaccaggtaaaatccatatgatgaatttgatgcacaacacaactactagattcatattgaagctaagttggagaagaaaaaccttacctcttttctgtttgcaaaaatcaatctttaccatccttgcttgtaagataaatcattctggcttggcatatgtaaaaaggatatttcacaatgtaatgaatggatttgaatgaatgcataaaaaaaaaaattggtattgagttttttctgctcgtcttctcaactcccccaaagcaaccaatcctttttacttggagtgtttttggttgctttttgacgctaaaaatacaagcattagttttttggtcaaatagacaggcttatgtttaaggcaattttaataaattgatcataaattgtgcttatgaaattgatcataaattgtttaaaggtctaactaatgagtcgaaaaatagtcatgcctgcaaattcaattgtcagaagaagaatggtatatattgtggacaatgtcccacatggaataaatggtagagaattgagtcatatataagaacatggactactccact

SEQ ID NO: 382765 - DNA, 3993 bp, Cannabis indica
gtttccttcagagaaaaagccatgcatcactttcctctctcttttcttctctctagatttcgaaaccttgagtgaatgagagtgcccacacacatcaagtggtacctcaatcatagtatgtaagactatggaaattctgcatcaaagaaggagaaaagaagatccaggttcagatcttggtgatgctctgcacagaaaggaatcaagggctagagatctgaacggaaggagtcatattattccgctgcacccactgtaaggttttctaactttatatgtgtttattttcattgttttagaattcatattaggttgttaatccaacatacatgatagtaaatagatcctggtaaaataatttccaacattcatacattatgtacatataatcatgaaataaatcatgtgaaccatgcaacattaaatgttatttctgatctatattaataagtaaatctgattatattgaaatgagttttatttagggcataaaacccaacaatcagtatatctataagaaatataaaagtgtcgaagtggggaactttccaaatcttagcagcactggaacaatctagcaaggcatgagtaaccgtttcacttggacaatgacaaagagagcaagaagggtttggaagagattttttgaggaacaaattgagggcagcatggagaatgtgatgataagccctccaagagaaagttttaattttaggaggaagattcagggtccagagcgcagtccaccactttttgatgaaagaagagttagaggtagaaggagggagagacacaccgttagctaaatgataggctgatttgacaaaaaaaatgcttgtggggtctttattccagataagatggtcatctttatgcagccaccaatagggacttggaggatcgaagagactgtatgattgtcaaaataaagatcaagtttgcacgattccaatgaccattctcatcaatgaagaaatttactttatcagaaggaggctgatcattacttttaaaattaggaaatctaagcccagtgatccaatagtcttccaaagttcagatagaacatccattcccaaccttccacatcaaaccttttttaaggagatccctacccccaaagaagactagaccgaaagagggggagtgcccaagactagcctcaagaaaactagtgtgtttaaaatacttggctttaaagacagcaacaagaagggaatttggattaaagaagacacgccatgattgctaactaaagacctgaaacccaaaccaccaaagaattttgaggtacaaaggttatgccatgctttccaatgaattttagattcccaccaaaactgagccatcattttttcaattctatgacaaacagagattggaagtttaaagcaggacattgtattagagggaatggcctagattactgctttcaaaagcacctccttaccatccttggaaaataatctttcattctaaattgagagttgagaactaacatgttgaagtataaaatcaaaactagattttttagacctgccaaaacgttgaggaacccctaaatacttgctaatgaaaggtttcggctccagtccaagggtatcaaaaaataagctgagatagcagggggagtattgggagaaaagagaatagaggacttggtgtaatttactttttgtccaaatgcaaggttataaaggttaagagcctctttaagagaattacaggaggaaatagaggcagtagtgaagataagagtgtcatctgcaaagagcagatgagaaatagcaggggtcgtgcaagctatagaaatacccttgaaaaaacccaagttttcctggatacgcaaagcagcagttaaaccctcagaacagagctggaaaagatagggtgtaaaggatccccctgtctaatgccacgggatgagaagatttgatcagagatttgaccattgatactaaaacggattcatgttgtggacacacactgataaattaagttagtgaatttagagggaaaatggaagtgctggagaacagcagtaagaaaattccattcaacacggtcaaatgctttcttaatatcaagcttaagtccaacccaaccttgcttaccctactttctatgattaatggcatgaacaagctcttgggcgatataaatattgtcaaagatgactcgttcaaaaaggaaagcaccgtaagaaggggagataagacttccaagtacaagtttgagcctatttacagttatcttagccacaattttggaaatggtagaacataggcttataggtctgaagtctttaaaagtagaagcattataatttttgaggattaaaacaatgattgtattattaatggaggaaaaactggcattgccattgagaatatcaagaataaccatggtaaggtcctgcccaataacagaccaatttttctaataaaaagcagggttgaggccatccaaacttggagctttatctccagaaagttggaagagagcttgctgcacctcaagagcatcaaaatgggtgtccaaaaaactaatctgttgaggagacaaggttttatcaatggctgtaacaagttctaaaaatatgcacagacctcatgacagatgctaggaaaagaagtaatctgcctcccatcctcacatttaagtgtccggatataattctttttttcctggatgtggccttgttgtgaaaatatcttgtattcttatcaccagctttaagccaatggattttggaccgctgcttccaaaaaatctcattcttataaaggagacagcctaacttagattgcaaggtagagataagcttaacgtcctctctagtgttaggcaaattagaatgtatagcattgatggaaatctcaagagcattgatacaataagatagacttttaaaagaagaactccaatctttaatagcagcaatacaagactgctacttggagagaaaatgactgagggaagtgtttatagaatggagagggggcttggtccaagtttccttaaccatgtcaaaaaaagatggctcggtaagcaagaaattttcaaacatgaacctattattcttattaatatacagcctgtcatcatcaagcacaaccttaagaaccctatgatccaaaccatagaaaccaagatgataaagagcaaccctaggaaagagattttgccaatttttattaacaattccccaatccaatctctcacataaagggccatgtttctaagtaaacttattaccaataggatggaggagaaacagaaaaaacttattgacaaagtttcgaaaattagtcatagcatacaaagggggattattagagcatgagcgatcacttatggacaaataatcattaaaatcccctaagatgagccacgggagagagggggcattatcataaaatctctctaaaagtgtccaggtgtgaattttatcatgagcataaggagaaccgtaaaagcaagaaacatgagcatttatattatcattaaaggttacaatgcagtcaatatgattaagagagtaattcaaaatattaacattgacatcagatttctaaaatagcaaaatacccctccttaacccttcctagggacctcaaaacatggtcaaaaggtagcttataacaaaagttgtccccacggccagcaggacatttagtttccatgacaaaaagaaagttaggcctactcttttttataaaaagggagaggttacagaatgcttcaggactcctcaaccctcaagcattccaacacaagagatgcattcatagcagatgagacttcagcaatagtaggaccagcccgagcacgtttgagaatgtttcttaaggagtcaccaaccaccatagtttgaggaagaaaaatatctcttttaacaccagccacatctttacctttagctttattagtaattctaggtaggtgattagcaaaggcttcaacatcactgctgtgacagtcagtagtccc

SEQ ID NO: 382766 - DNA, 1816 bp, Cannabis indica
gagcagagtcaatcatgaagttcacgaaggttctgcagagaccacacattcggacctagcttggcaaaaagcttaggcaagggtatttctggcggtaaacaatagtgaagagaattgtatgttgtattccatagaaatggtatatattatatacaaagctaggagactaaatagaaaattactaaataaaaataggaaactactaaatacaagttaccttattttttatacaactaattctaacacaccccctcaagctggatcatagatgttaatcatgtccaacatgttactaagataatcaacccgcaacccattcaaagtctttgtaaaaatatcttttcattgttctttgatcttcacattttctatggagatcaggccttgttgaattttttcacgaacaaaatgacaatcaatctaaatgtgctaagttttcttgtggaacatgagatttgaggctatataaagagcatcttaattattacaccacaactttacttgaatagaagtctttaacccaaattcaattattacataaagcctcgcggttaaggcaaaaccaattatctcctcaatcataaaaaaagggacttgtcatttcaatgttatattaacctttcttttataggggcaaaaactagcaggttaaatataaaatcattcccacatcttattttttccaataagttgagcgtgctccatatctttcatttcgtcgagttatatggtacatgtaattaattttccaaataatcaagctccatcaaccaccatatggtccatatcttactgccatgagccacatttgtcaaatattttttaatgtatcgagtaaatgaaaaagtaaatccttgtttaaaataattcaaagatttaactttttctttacaatgtttcgttttcatgaattaacaatgcttgtaacatacactaatagatgagagaaaattttaagaatagatttatgtaatatatataatactgcattaaaaaataattaaaaaaattaaatattagagtaaattctttttagttataggtttgggagtgtatagttgcttatagtggcatgctaccccttggcacacccataaagggttattttgtaacatgagaatgcattgatgcttaattattagtcaagtattacacttagcactttattaggaagggaagccaccttagtggtagtgattgaacttttgtaattagttttgtttgtagtttcattcatatgcaagctaatattatatatatatatatatatttgagatctcttgaaatcatactaagctctttaaaggtagtgacttgataacttataaaacaccttatcaccagtatgatagaagttaattgtatattcttttgttctatcaaagtcatatactaataaaacgatgtttatctatacttctttatatataaacttatatggtctaagtgttatctgtttgttgcttattgcgccattgtgtatcatttgcctattgtttacttgtgagttgtagaatattgatcttcgaaatgactaactttgaatttactcatacttcatggctatactcaatatgtgaggatatgtatcgtgcctaattattgaattatttatctacaagcgcatttaggttttgccaacgaatgtcgcacgtcccaactacttagttaggtcgtgacactcatcaaagtattcaagcaagcatgtggctctcgcaaattgtaataaggtacatatgttatgagaggcttagtggatgtttggcatcataactaaaaaactattttttatttttaaaaacagaaaactattttt

SEQ ID NO: 382767 - DNA, 2371 bp, Cannabis indica
acttgcattgtttagcctttgagatgaaattcttgaatctcgatgatttatgctttaaaaaattatttaggcaatttctttagaacgtttctttaaaattgttatttttttttttattatacttaatctaaaaaaaagttcactcatttattatttttctttgttcatgtttttgaataaatttggggaattgtaattaggtattgtattctctgaagttaaaagcttaatgagaaagttgtaatatgttgcaatcttttttttcaatatgaaaaaataaataaataaaaagaagaaaaaagaaaaataaaatgaatagtaaataattcttcattgaattataaattaaaaaaaaactattttgcattgtattaaatggggaatgagatagttttgtaatgaagttgagattttctgaatgtaaaaaatttatgatatagtcgagcctaaatgacatatgagatatgttttcatttggacaattagttatgatcaattttatttacttcctcctttaattaagcatctaatgttatacatttaaattagaatcaaagtcaattgtattgcatgaattcatactaacattcatggtacaagaccaaccacctttctgaattctatctttttcttattcacatacaaaaaatcattttcttgctgatacacatggcaaggaaagatcaaatccaaacctcatcaaaatctaaagttaataagtttgatgatccaaatgatcctctttaaacagaacccacttcaacaaaagcatgtttaaattaataacaaaagctaaagttaagcttagaagataataacattaagagaaactaaatataagtatcatcaataagaactcactatacttttaataatggagactttgagcaaggctggcttcctagacagaaactcgaaaacacatgcatctccagtgtttacagagttagcgtctagaaaggcagcccatcccttggagaaaaagaagccactcttgcaatttagaagtttcacatcccatttcttagtcccaactttaagagatatgaattgagtctttgatccaagatgactctcaacgaaactatctggtagacgctgcagcaaaaacagaagaagaactaatggttttagctgtctcaaaactcaaaaatcatacagataagtttataaagaaaaatttataaacaatatgtgagcttaatttactactcaccagattataacgacgtttgcctttaactcttataattcttttgaataaaggatttcttgaatagactttgctagcttctttgtaagcattagtatctttgtacatattgtatggcccttcatacctcttcttcctctgcttcatcttcttcggtgtgtcatcttcaatttcttcactaattttggacttgcctacatttgaaaacataagcaataaagtatttaacatactctatttctcatttcatttcatatttaagatgtttcaagttcacctacctttacaggccgagttagaatccaagtcagaatctgaataagaagagagctcctcgcttgatgctagacaaatcacaggtgctttgccattcttcttcccatcagaatggaaaggaaagtgactgtaatcaatctcgcatgaactttcatctgttatggaaacatcaaactttgaattccctctataatcaaatatcagtagatatctatttgtaattatcccgtaatgttgaacaaattttggccactttttttgtagaaatatcttgttatcacgtctaaccaaaccaatcttccatgtatggccacatggaagaataagggatgcacaactggccaatgaatctctatacaactctacaaacttgactggaagaacctacatgaatgacaccggtatagttagtattattgcctatttaatatatagcaaaactaaaggaggaaaaacctgaaattaactctatacacataactataagaatgcttaccagttgaatctttgagtgttcactcccaacaaccctgacaaatttaaagctagccatatccctttgtcttgcttcttttgggtctgcacacaagaatagaccaggttggaaaagaaatatcccagagaaaatgcaacattcatatatttgataaatactctgcactgaaatgctggatcaaacttgacctatacatatatcattggggactaaaatggctggtcacaaaacgaagaaaaaattcatgcatatataatatattgggataattacattagacaccttaaattagatcttaatatcaaaaataacttggtcatttaactattctattttaacgttaaatataacgttgccacataattacgtgcccttttttcttgtta

SEQ ID NO: 382768 - DNA, 1025 bp, Cannabis indica
tttttttttttctttcttttgatgttatgcctgatcatgttgatatctttaactgcatggtcttagttggcataattaagggattttgataatctgcacttgtgatttattatgttactatctgtactgtactcctaatcattctagtatctcaagattgtatatgccttatgtccatgcaacatttttactgaaataactcgggaaatgttctctttttgctataacagttctcgaagacatcgttcccgcttctacgacaattaggtatggattgcattatctctctttttgattttgtaggatttacttatttataatatgaaattatatttaatccattttttacattcctcctcctggttggtattgaacacactctactcattcttcatttaacttggcagtgtttgaaatttgaatagaagcgaaagcatgggggaatgatagaagatgcaaatggaagtaaaaaaacactggatttgttgctatggtttcctcatatgacatataaaaagctgcatctggatcatgacttgttaagttttagtacaatgtcttatgtctatccccatggatttggaactttcaatgacaatcccatagtttgttattttcttttattttccgcttagtaaattttggtattgttcatggctgctgacatccattctctcatcgatacttgattaatcgttcttaatccatcggtgataatggatgattatgctgggtcctaatctgtttgtgataatgtgatcgaactccatggatgtatagaaatcagttttaggcttttttcattatttttttatctcgtgataattcctcattgcttgctgctgatgaaaaatgatatgtgtttgctcaatgtcatgttttaatgaaaagcttttcttaaaccattttcttggacaagtgatcttcaagtcatttaattatggtgccgtttggtaacacttttgttttctaattttttaatcacaaaatgaaagtaaaatttttgtttttaaaaattttgtttt

SEQ ID NO: 382769 - DNA, 2090 bp, Cannabis indica
aacaaaccgacctctctttcctatctttttcctttttcttatgactttatttctttttcctttttcatatatatttccttttccttttttaaggttttggacaaattactatataaacatatatttaaaaaattaattttgtcacaacacaacatgcatgtgaaaaattatgacgtcaaagatcagaacgtgtcaaatagtgtgatcagtgtagtaacgagtgaaattgtacatttatgtcattaatataatattacgtgtattgttatggtttattctatatatatatatatacagtacgtatcactataacatatcctccaatttagatatatgtgaaaatatttatacatttttttctcttcctcatcttctaatttcttatttgttttaaatgataaaaaacaaaaatacttgtaaagatgatcccaagcgcgtaattatattttaaaacagaatgatctttaggaaaaaaataattattaaagagtgggaatagaatcatccttatacaaaaatggtgtccaattaatttggtgctctcttaatattttccatttacgacatatattcatctaaaaaagtaccatacataatttctatagctcattttcttttgctttattattttgattatattataaaaattcattgtggggtttcaagttttgaatgtgtgaaagcacaataagattctttcaaaacacacacacacaaaagaaagaaaactcaatcaatatcataactttacacctattcatattcatggccaccccaacccactatgatttgttatctataaatatcataacaaataggcgtgtgtcctccacactccaaatatatccatccataattccctctcttttctctttcttccttaatataattaccttccaccatggccgccaccacccaatcttcatctgagcctaaaccctccgccgtattccccttaaaagacattgaaaaacaacaaccacttaaacttgagtcccaggcggtggactacaccgccagggctcagtggctccgagcagcagtgctcggagctaacgacggactcctctccacagcatcattgatgatgggagtaggagccgtaaaaaccgacgttaaaacgatggtgctaaccggcatagccggcatggtggccggcgcgtgcagcatggcgattggagagtttgtttcggtttactctcagtacgatattgagctggcccaaatggacagagatggtgggcgtgataaggagaggatgaagaagctgccgagcccatggcaggcggccgcggcttcggcgttggcgttcggtgttggggctgcggtgccgctccttggggctgcgtttgttaaggagtataaggtgagattaggagtgattgttgctgtagtgagcttagctttgttagggtttggagctttggctgccatattagggaaggctcatcctgttaagtcttcattgagggttttgtttggaggttggattgccatggctgttacttttggtttaactaagcttgttggttctactggactataggaattaacttatcatttttaatatattattattacatatatagatacggaagaggtttcaatggttacatttttattgtaaccatcatggttacatttttttaagccattggattactattaaatggttgtgattaatttagaaattaaataaaaataaataataaataacttgtaacctgaaagtaacctaatcatttatttccttataaaactttaattaagattaattatattttaaaattaaattaattataattattaattaattttttgcaatttattactatataaggatcttttagcaatttattttttatacttaaattatttaaaatttatagcaaaacttttataatttaaaattatacacatataatttcataatttaaattttattatacttgtaattttaattttaaattattacacttaattatttaatttttttatttaaatatttaaaaagtaaaaaatagaaataagttgaaggatttttagtaaaaaaagtaggttgcacttgttatcgattgattagcttgagg

SEQ ID NO: 382770 - DNA, 2791 bp, Cannabis indica
aaaagtaactattttttgtagtagatggagacttaccccaggtctacaaacttcgttacttgcaccgtcgccggtgctctagtactatttcaaaaaataaaacttaattttattaaaaataatatatataaaataaatttatctatactatttaatacgcatacatgtatatatactaataaagaaagagtggtatatacgtatagagaaagagagagagagatattgaaagtagtaccaaccagagccgcagtggaggttggtgggtggtgctcgttggaggtgaagtaggtgctctgcaatggtgaccgctgcagaagcgagagggaagagagagaaaacaaagagaaggtgatgagagatagagagacacagagagagagagaatggggaagaaatgtgtctgagttctttttattaatgcaaaatatctttttcattaatgcgaaatatttgtgacgactttgtcgtccttaatagaatgcaagaccacccgagatactattactaggggtgactttgtagtgtattaggggatgacaaagtcgttcctaatgtataggagggaaaattttagcctaaatttaacagttaaatttcaaaaaaaaaaacaacgtaaaattattaggaacgatattgttgtccctgtagagttcatgtcgacactataatacaccatttaataaaaaaaaaaatattttatcaaggacgacatgtcagtgtcgtcactaatacccctaccttcagtgaaaatttcttgtcattcttgcatacctttagtgacaacttcttgtcatacctgatacccttacctttaatgacaacctcttgtcgtcgttgatattagcattcgcgatatccactcactacaagaaaaaaaaaaagatatagctaggcacgaccaaattagtaccaaaaagctcaaactttcgtgcctagggagttattgacacaactcgtcgtgccccatttgtcgtgccaaatgatcggtgccctaaaatctaaatgggcgcgacatactgcgtcgtgctcttaagcttctctttaggcacaacagatgttcgcgctagaagcttcatatgtcctaacatacatatcaacaaaatataattggataaacacaaaccttttgataatttttaataaacaacaaacacatatattcatacattcacatttataaacggctcatcatatatatacatacatatattcacatttcttttttcttaattttaagttctccatctcaaggagaaaatgttttgttctataaccaagttcaagcatcatattgaaatttaatactcaaatgaaaataatcgaaatcaaggaacaatatttctaacaaaatccaaccaactttttacaagtaataactgaaatgaaaacaataaactcaaataatctatgtaatttttataaatcagacaaaaatatttaacttcacttcgacatacaaaacgaattgatctcattcaaaataaagaaattggcagcggagcgtcagttggagtaccaatccatttttgtatatcccaaaattcatgttttcaatttagaaatacaaacaagacccaatcccaaaagaaaacaagaaaaaaaactttcatttaattcttgaaaaaaaaaaacttcactattatttatcaaaattccaataacatattaccatcacaatttatcattacagaaaaaaaaaaggcatactttatgattgaaacataacttgtaaaacaaatctcaaagccaatcttttagaataaaagattttgtccaaaaaaattgatatcaaacttttaaaaaaaatattcaaggagattacttatttttatgcatacaaaattaatgaaaattaaacagtgtaaaaaaaatactacgaagaaaaaaaaaactcacagagatggatggtggcatatacaaaaatggattagtactctgactgacactccgctacgaaccgaaggatcctacgccctctactccacactgaacgaccctacaccctccactgcccaccgaacaaccctatagccacaacctgcaacccaaaacacggggccaaacaagaatgaaaatgaaaaggaaagagaaagaagacccaaatgagaagaaacataccaattcccagagaagaaaaagatcagcgttgtgagtgcttgagagaggaagaatgccaatattttgagggtctgagaagaagaacgtctgagaagaagaaggctaaaagtgtttaagaggaaatggaaatgggttctctcgatttagttttttttaaaaaaaaaaatggtgaaaaagctaggcctgtgacatttccatgcccaagcgtcgtgccctttaggtcaattggcacaccatgtcagggagtggggcccgaccatgtcgtgcccaactgttaattgcgggacaattcctacctgaatcaacgttcatctttaatatttagggcgcgacaatatcgtgcccattgaatatatgtcgcgctcagttgtctccaaaattaaaaaaaaaaaagaattggcacgacattcactacaaaaaatagcttcctttagtgacaactttttggttacaatataattttttttgtgtcgactaaatgttatttttagttacaaaaataagttaattgtgactaaaacatagtatttagacaagttgtcactaaattagttttagttgtgactaaaaacacatttagtcacaataaattatgatttttgtaactaatacctttagtcacaacatagcaatgctgatttataattagttacaaattttgttgtgacta

SEQ ID NO: 382771 - DNA, 2277 bp, Cannabis indica
caagcattccaataagacccttcagtcatcattgacatcatcatttggtgatgattcaatttctctgaagtctgtcattatattttattttgtaaaacataatatttaaattgaaattaactaaatagagagaactgacaattttttataaaacacatgatcaaaatttatattcactctattacaaagcgattactagtaatactatacaagaatgggatccgttttgcatgaaagtattcacactatattagtgctaggaaacagagaatgtattcacacgctatatatttcactttcttttagaatgaatatgcttttaaaagtccttggagttcgatacacatgacattatacatagttatagacaagattaattcttaataatcaagtttgcttaatttactattagcactaaacctttgattggcatcaaatttcacaccaatagaggtgcacatttgagtttccgtctcccttttcaattcaagtcaattgcctttggacctgaatcaatgtcattctgatattgactattcagatcaaacgttcccactaatccatattttctcaaatggttactgtttttgtctaaatgtgttggtgatctcttagaatttggttgctcaacactaataccatcagacatggtacctccattccttttcctcccactaacttgattgcttgtagcattgttccgtagattgtgttctggatgaacttccattagttgtagttcaatggtgttcctgctagacttttggggatcaccattgttatccattggtttcttctcttcttctcgccctgagctttcagaagaagtcagtgaactctccatggaacacattgtgcctctcatttgtttcctttcaatgccttctaagcttaaatctcttgtctctgttatttctgagaaagaagagctggggcatccattgttaaccatcgataataatcgagaaagctcggctttcgtgagctctacacccactgaagaagagctatatccagcaagagtttcttgagctttcttcagtacagactgtagatactttccttgagcttcaattctcagctgcagatgtctttgcacctgaaatacagtacggatttattctgaatatactcttgcatctaatcttattttaaagaaaggcagctgagttgggatttgtgttattggtcctacctcaagctgttcatggagtttcctttgtacttccatttgcaattggagagcctgagctatatgcaagcctctgatcaaacacaacattttgttaataggaactccttcaattataacttccataaataagaaagaaaagaaaaatgggatctatttctaactattactcattcatctgactctgagttccatcattgatttctccattaaaatgcccatcactcccctgaatctctttgaaatctgaaacaaggatgacactatcagaaatatgtagccaaaaaaaaaattgagcatcatattctgtaatagcatagccaatatataatatatatattacctgatccattgaagctaccttcttgcttattgtccgagcaggcttcagattgttggctcttacccaacctgtatttctgcataagaacagaaaatggttttcaatatgattttttactatactatacaaaaatgattggacagttatctctatgggagaaaatatgtacaatacctgtaaatggctctttagatggtacaaagtaagtcctggaattcccatcaccctcatcaaactctttggagtagcctctgcccatattataaaaagaaagatacacattagatctttcgtactaagaagatgaagattattttgtaaattaatatttatgtatactcaactatctgctcctccaagctgattgatagcatcaacaaatctttgatgaagttctgatgtccatttgagccttggttttgcatcagtggataagactaaattcatattctgattttgcatattcagaataacaatttgtgtgtattccaggtgagacagatagatagagagctagggacttttcctaaggtggtgcttgaatatgtggcagctgtagttctctttataaattggagttgttgggctgtcctattttctcactccatatctggaaacataagtggggttatgttggagaggggaatatatgccatgagctgtggctcttttcttctcccatcttccatttcatacctaactttttctttaaaaaaagaaaaaaaaaaacaattattgttat

SEQ ID NO: 382772 - DNA, 2590 bp, Cannabis indica
gaagaagaggagacacaaacttcagtagaagatgatgcaagcatggctaaagatgtaggtgaggttttatgcaaacctacaaaatcttgcaacatatctgatgataatgttgaaattaagctcattcgaattcaaggtattgaaccgaaaccagagatacccttctcttgggtcgccaacagcttgatgaatcctgattattttcttcacatctgtgtctgcttgaaagttccaaggttaaagattcagtaatattcgcacgtgaaaatggccattacatctgcatgaaaatgtatagaaatgtttcttcttttaacctgtaaatatggtcttcattcattgtgatttctgtttatcattcttttttctaatacaagactcagcttcatgcacagcaactatttatcttaattcccggggtagttactagttaccagaaacaattaaataaaagcaatataatttagcattcattaggaacaatacagaactataaagtcgaagatttataaaacgaacaaattaatacaaattagtattttagtattaaaaggatgtaataaaaaaaaataacaataaaaatattgggttcaataattaagacactaattataagttttattggtagaggttcaaaaagtaaaatacaaattctaaaataaacatgttttattggaattaaaacttatgacttctattatatacataaaataactttgttattataccaaaacttgttttatgtttataaatattacttttatttataaatatatgtggtaactagctaaaatgtgtatgcaatttttttttttcggatttttttagggggtgactgcgctccctcgcctttatgtgggtctgcccctatcatactatgaatgtcagtttattcgttttgagcaaagaaattcagttattaaatagtagagaagggataataccattaatactttggtatgtttatttttagggagtgtttggtataaagcggagaatataattatttgtattgtgactggttatgtatgggaatatctagttagattactattaattgaattacattgttcgactgaatcaggaacttgatatattatatttttggaaaattatgtagaatggatttaagatattctaatagaaaataatcttatttttactgtaataattttttcttaaaatgtaaaaaccctataacaaacagagtattggaatatctttacttctactattgttgtggaatggttacttcttcgaaaagtatgagaaagtcattcccttttaataaagaataaaaaaagatagatcatgttattacttttccattttcattcttttccttcattttttttttttttttttattactgtaacatccaaacataaagcatatttggtagaagggaatgaaaattggaatggaaattggaatggactgaaaaaatgtattctataatttgctttgcattttaagccttggtactgcaagtaaaaaaatgaaatagaatggaattctttcgtttgtttgcatattaaaataaataaataattttttcaacattttaatggaactactattctatttaaaaatgaaaggaaaaactattctaatgcaagtgaaaaaaaaattattaatttcttatcaaatttttatgttttctttatttattccacttgtggaaaaatatttttattaggctaattaagatttttgcctctcgaactttgatgtatactaaattatatcccttttatttttggaacaaggaagaaaattttattccaacaaccactaaacaatacacacttcaagcagcaacccaacaaatcaaagactattcagaatagccattacatatttatatcttaaattacgaatcgacaaggtacaagagtgaaatctagccttaagacaaagcttggcatgtttacttaacatctgaaccgagtgacaaacaccttcaaaaacacaacaattacaattataccaaataaaataaagaattgttgttatgatagtcgaagctaacaatgcagttagctcattctccttctccaccgaggcattcaacaaatcactgaggttagaaggccaaacaaaactaccaaaccaggaggaaatctctgccatcaacaaatgttaaaaaatgcagctaaagaagggatgacaatgagattcaggaacaagctcacatatcgggcattaagacaaaatccattaaaattaatattactagtaaatttttcattaacagcttgccaaagtataaaatggtgcttacaatttatgccagactaacttatgataagtcaccttctcagctgagataagcgaaagatgaaatttttttagctttcaacttcctagtaggggtgagcatcggtcggtttggtcggttttttctatataaaaatccaaaattcggttttcggtttagattggtgcaatcctaaaaccgaccaaccaatccagaacctatcttaaaaccgaccgttttgaacctcggtttggtcggtttaaaccgcccaaaccgaactttttttaaaaaaaataatccaatttattctataaatatattattctacat

SEQ ID NO: 382773 - DNA, 3124 bp, Cannabis indica
gtttaagtagattacatatatgctagaggtcaaaggttcaaatcccattaacaaggtccgttgtataagaatcaataattatttgcatattatcaactcagaaacacgtggcgacatatttttttagcttattaaatacttggtccaataatatgtcgccacatatttttgagttgacacttaacgaccaaaaaaaagtacgacaataacaaaatagtaaaataaaatattttgccgccactatttttaattaaggtcatatgtgtaacaattgtaaatgtcaaaagagtttcactactaatatccctaatataatttataattttttactattttatatatatttaataaagattttatatgctttacaaataaaaatttaatatttttattgtacttttttatattttttttcatgaaaaatgattaattttacccctaatacattagagtattattataaaatttaagtgaaatataatattaatttttttttaagttaaatttaacttagatggtcttagttacaaggtcacctcattaaattagtaaggcccattagtataaaagaatattcaataagtgttggatattaaagatttgaactttaaagccttaaatctaaaagaaaaataacatagacaaataatgagaacaaacttcatctccacatttatgaatgctgcaccttacacaaccaaaataggacttgttgaattagaaaaaaggggagaaaaaaaagacttggtttgaattccataaggattggaataggagtagttggtttctagtcactttcacaatttattcacttgtattatgttttcaaaataaaaaagaaatattgtatagttaaacccttttattcaaagttcatttatgcaacttttgtttaaagtttcttagctttgtaacaatcaatggaagagaaacaaatggctttaacatatagcaacttttaatgtgaaaatattatgaccaaacaacttggccccaaagtgtgcatcattacatgagctgagatgagatgaagttccacatttccactcatatgaaactactgaaaagctcctttcgaaaactgaagctaccaacactcactcctctccagtcctctgaactaaactctgtaacaagaaacaaaataactgttataataaacaaaaccccttctaaaaacaagaccaagaccaaactttgaaaatgaactttaggtatgtcattacacagcagatatgacacttgtagcttgattcaaacacagtaatcacaattcacaagcaacccaaaactagatcaaaataggaagagaaagttgatgttaaaacaagtgcagttgtattgacacaactcaaaccgaaacatttaatatgttcgggccagccaccaatacacatgatcacaaaagccatataaattactaaaggcattgcaatcatttgatacttcccaagcataagtggatgatctatttcattgttaaagataactatgcttttgtagagaagaatgaatattagagcttaaaggctgatttttttattgagttacattttaaaatttagagaagtgctaaagtgaagcattaagtgcccaacactctaaaatttagaatattggtttccaacagatggattagctacaactaattccatgtaccttatatcaatgctcttaaatatatggagttccatgataaaccccaagttagtagaataggatacaaagggtatttgggccattgtattaagagtactgtttgggaaggaatacaatagtatatatagaatactaaggagaatagaagggtatgcaatgtatgagtgttctctttgcatcaaaggtccaaaagggccattccttttgtgtagtgttcctttttcagtaatacaaagaaggccatagctgtaatggccatagtttgttgctctgttattgttcgatcggtttggttcttaacatttggtatcaggtttttcgggtcttatcattccaactcaaaagaaatggggtgaccccatgatctcataaccaattaacatgtttacatctactcaatgtgctatctcattcattcaatatctcattacacattccaaattgcaaatccacccttctctaacagtcaatgatcttcatcaagtattaccacaatcaatcctaaaatcatgttgaatatctcttcagacaatccataattctctaagctaaatcacatcttaacttatcaaaagcaaaacacacaaaaccaagaaattaatgcacaagtttataacagttgttttaaaaaaacaaaccttgaagaatcagcattcatattccgatgtagaattcgaccctgaccaaccccaccatcatcgattaattccctaagccccaaattcacaactttctcctcttcgaccaccaccacctcttcttcttcttcttcttcttcctcttcctttctcttactcttcccctgaactctctcaaagtaattcccatatatatactcaggagtatacccattatcttcatcaaaaagcatgatatgaccatgccactcccaaaccctatattcagaatccttctcctgatgaaacccaacacagacgtggttttcagcgatggtgacagcctggccagattaggcttgagttggtctgtctttccggttaggatgaggcgaattatctccttctcgagcttggattcttctttggcgagctgggttttggaactgtcgtcatcttcgtaatcttcgtcggagaaattggcggagtcgaagagaaggtcttcggagggattgggattgggattgggattgggattgagagagggagaataaagggttattgggtggtcgaatacggagtctgcccatgagggtttggaggagaaggttgtctatgttgctgccgttgttgttgaaagaagccatttttgcagagagaaagagaataagggttttaggaagaagaaagggtttttggggaaatatatttatatgtgatgtgaattagggaggaagaagaattatcatacaataaaataaaataaaattagagatattttcaaggttttcaattttatttctagagtaaataaatacactaaaacctctatttaagaatactctatt

SEQ ID NO: 382774 - DNA, 1908 bp, Cannabis indica
tcaatgaagtgaatgtagtatttataatttgtgtgtgaggtaacaggtgccggaccccaaagatccatgtgaacaacatctaggatagctttggctctactattagaatttgtgaatggtaaaacatgagacttcccaaactgacaagcatcacaaaaacacggtttttcattcattgaaacttttacattagacaacttaaaaacttgatttaaagtagacaaagatggatgtcctagccttcgatgccaggtatcctttagggaaaataaacttttctttttggatggttgagtttgagcaataaacaaacttgctggttttgggctatgtatatcatggctggtgttatctgatgaggcttggattcagtagagtccatccttaagaactcctctcagtatcaccttccctgttagatccttcacacaacaagagccagtagaaaactcaattgagacattattatcatgagtcaacttagacacacttatggcaatattagggacatataaaacagtttttcagaagcaaagaggaatatgaaatagtattaagtgtgctattttccaactttcgagatatgaaaaagtttgactaccatcacctattgtaaccttctccttaccaccatagttgcttttgttgctcatttttccagcttcagaggtgatatgattactcgcaccgctgtccgcataccacccctcatcattgagcgtgtttggtgttgcaacagagcaaactgctgctgtttgtcactttgagagtcagagtttggaggctggccattgtagttctcatcataccgattgtaacagagcgctgcagagtgcccatattttccacaaacttgacaggttggtttagagttattatacctgccacctcttcctctgcctcgattgcctcctcttcctctcagttggccagaatattggttatttccacatccctgagatggataacttccagatcttccatgctgatttgagttgttgctgggagagtatggcttttgagccatattagcagtggggctatcaagaggtttggtatttgaggagaaagtggtgagtctttccaacttgctgtcaaagcttaagagagtgcttgatagttcctgccatgtcattgttgtgcgagcttcaagaggaacaacaatggttaaatacttagcactaagaccagataaaacattacctcgaagcaggttgtctggatatggttcaccagctaatgcaaaagtatcagcccacatccttttttgcttcaaataatctgtcattgattgagaaccctttcgaactgtctgcaacttggtgcgtagttcatccatgttagccctagaatgggctccataaagttcttcaagtgcagtccacaagcttgctgcagatctgcatcccataacttcagaggcgataccttcagtcatggatccatacaactagcccattaagagttggtcatgagtaatccatacttcaaattcggcgttcatcacgagtgtttctcgttgagcagcatcagtattatttagaaattctggtggacacggtttcgagccgtttaagaacccatccagacgatgccctgttatgatggttgagaccattgtcttctacaaagggaatttgtttctatccaacttcagggtaaacggctgactcaatgtgttgctgaagggagtccccatgactgttggattgactgaagttgaagctgctgtgttgactcctgagctagcagaactgccatctgctgctggtgtggttgggaagggagttcgagcagctggagtctgagattcgtgtgaggccatgggaaaagccttgcagctctgataccaagtgaagaaaacagagtttgcacacacacaatatgtaagaactattattttctgta

SEQ ID NO: 382775 - DNA, 2320 bp, Cannabis indica
tttagttgatgttaaataatgttagaaaattgtaccataattatttatatattaaaaatataaaaagataaatcagtatacctattttttttaatgaaccctattaaaccaccaaaaatttatattgtctagttaaaaaatagattcaactaattaaaaaaccgttccacaaaaactataatcaaattgatagaattactaaaaaaactcaatattttaaatataaaactaaattcgatctcataacatttttattaaacacaaacaaacaaaagaaacatgataagtgattttattattattcaagaagattcaaactaatgatttttttaatttttcttttgtaaactaaagtagtgaagtgttatgtgatagcaatcattattggatttttacacatgaaaaatattatattatgttgttttacatatatactaatctaattaatatattattattcatttattcttacatatcattatagtttgacacataaaatcatcaatccaaccaacccaattacgtttcaaactcattcttatccatttaaagataaaattgtaaacacataaaataaataaaaatagtaaactaaattaaattttccatccttcaaaatttcaacgatatcatatcatgtgcaaaccccactttagtcacgtgctttggccagtggcctagccgacacacgtgcgggttgcaacccccggagtagcagggaccaaccatggggtctagcgaattaacgaatatacccctgaaaaatgggcacatggggcatattaagtaagggtattatggtaatttgaagggcaaggaaatctgtagacgtggtacggttggtgaataaaatcttagggtcacgtgacactgaacagtggtggaggtttccttttgcctttttttatatgtggggtgtttgggaatgagtgcaagaataaaccgggttaggattattaaatttgtactataattctttatttgtgtggtcggtccatcttttaaatctacttattaaaattttatttatttttaaatatgtgttcacatatataatattgtcgattggtaggttttgagtgattatattaatgcaataagctcaagtgaatgactccaattcttatgtaattttaatacgtattaaattatatttttaaaatttttaattattaaaaattatttatgaattactgagattgttaaatttaaatttttttctccaattttaataatgaaagtttaacggtgagtatgatttagtacctattaaaattagaaagacataatttggtagatataaaagtttagaaagtataatttaacacattaacaatcactgaaataataaaattaaatgaaattagacaaaaattattaaatctaacaatttctttaatttagaataaattttttaaatgaaaatattaaatgtgctcatataaacgtgcaaaaagttcacacataaatagtgctaaataaatttgaactttgatagtattaagttcaaataaagcgataattgaaagggtttatagacgccaaaaactctctaattaattatatttaaataaattaactaaactagctacgtgctatatatgtaaatagtattatttccttactaaattaattactttgctataaattaatattactttaattatacattaagtagtaaagaagatatggcgtatatgtgtatttatagtttgatttatttgttgtctacgttagaatattatttattataccgtacaataaacgtaattaactaattaatttaaccatgcacattaattattttccattgtagttgtatcttgcatgtactttttttttaaggttattattattattattatacagttatgtgggggctattgtttttttaagcattttggtttaaatttttggaaaatattgtaataataattagagtcccatataagaaataaaatattcaattatatagtctcaaggaattaaacagacttatacctagcctagctagacgaacaatataatttacgaaactaatttttgtaaatctcttcaatataatcaattttgtgggattaactactacaccatttgaacttgcaataataactattaatagctcttatcaaagattccaaataatatcaatattctgttggaacttaaaactttaatgaaattttataaaaaaaaataaatatatgagaagtgaaatataagaacactttataaatagaagtgtatataatgtgtaaatttagaatatgaatagggcccaagaggtacttagttttgtgtgcatgggtgaggactcaca

SEQ ID NO: 382776 - DNA, 2337 bp, Cannabis indica
tgagacgcgttgactgacgcaaatagttacttttgtagtagtgataattagtatttttacacccttagctttgaccaataataatatttttcttgtttattgaaaatattaatgataaaagttataattttatattaattcttaaaaaaattaaaaaaaattattaaaattctaataaaatgattaaaattaataaattaattaattaattaaaataagagattaagtttacgtaccaaaactaaaaaagctcgttgcctagcctaagagcattcttagtcaattatgagatgcaatattgattatgactaacatgaaaaagagatgctcttgaagttttgacataggggtatgccaatctaattacagccgaccgtcaaatattagatatccgatatgattagatcagaccagactagatgttattctataatatccaattagatcagatcgattgttagatggggtgtccaaatatcaaatatccaatttaactaattagtatttttatttggtttagataattatatagatttatattgttatacttaatatatatgcggatatgaaattaggattaaaattttactctttcttttttgagattggcaatccaatactagcacagagtcacacaatgcttattccccaaataccagcattgcttcttctctgagaaaagaagttcatgacttttaggccttctacctctacgtgacattgctcggttaggatttcacccattatggaaaattccccattgccgcctcccgtaagagtctgtgtcatgtctaagtcccactgtagctaatcatcctctcagactatctactgatcatcgccttggtatgatatttccaaaataaatagctgataatatgcgagcccctccttggctagattcctcatttttctccttagcttattatattagaaaacaagtaaaatgattagtgagtatcgtctccacaggaattgattagcaattaattgtgcaaaaaattggtattgtacaattttgaacaaaccaaatgataagatttgattgaagctaagaaattgacaagaaagtaaataaaacaaataaaaaggcacgaacaagataacaaagatgagctagaataattaattgttaggatttatgccttataagtaagtatttaatgaataatattagagaatatatgaaatgtaagtataagataaataaatatattaattatagaaatataattaataaatgtatgaaattccatattaatatagagtagaaatgatcttgtaaggtaggacaagagaattaagtcagtagtgtactaaagtatggaatctttaatatgaaattacaaagtacaatttactaagcactatactctagtgcgtgtgattttgattcggatcacatatggatagacattttgtaaaggtactatatataatttgattatgaatgattggattgatatgaactaacatcttttatcaacgtgttgtttatcaactttagtgtcatatcctctctttttcctcaaacaaaaacaaaataaatcaaatcaaactgagacaagagagaatatgacactaaagttggtgatttataaatattcttcaaagattgatgggtgaacatagcttaatgtaaaatacataaattgtccaaagattgcaataaattcaagagcatgtctccctccaattttgattactctaagtgtgtgtatgtgaaatccctttctcaaatcattgaatgcaacttagactactacaaaaaatctcttctatggccattaaagtttgacatgaaaaatctttcatgttatttttggtactagacatgatatccatggacatgaaaattaaaatatatttttcatgttgagcaacgctggacatgatatattattcatgtccagcaatgttagacgtgaaagtggccacacatttgaaattttatgatgtccaacattgctagacgtgaagcataataatttaatattattatacctcaagtcaagcaatactgaacattaattacttttttttgtatatatatattttaattttacatattaaatgaatataaaaatattaattttcattaaaaataatataaattgaaattaataaaaataacatattttcgtatttaaatctaataactcattaaaattattccaaatcaagcattatcacacccgtaaaatagaaaattttcatatttcacaaaccttttaaaatattacataatacaataccagtaacaatacaaatgcagatgatgtattcctccccctgttaaattatacacatcattgaattgatgatagtgattcctga

SEQ ID NO: 382777 - DNA, 779 bp, Cannabis indica
acaaaaataagttgttttgaattctaatttatagattattaaaaaattcaactacatgctatcatatatttatatataaaaaatttaaactataattcttttacaagctaaaaacaaaacacatagaaactcttaccaatggagcaaaataaccatgcccatactaaaagaatttttcaatgaccctaccaaaaaaatttcaatatactatattttcctatgtggttttaatgcttggattcaatttgattggtgggatatattaggattgttcaaagacttttcagtttagtatgatgattagatagatgttaacatgcattttcaaaggaaatgtttttgaatgatgacacatttaaaaaaataatgggtaaacgaaagtttgaacaaaatattttctttatttctttatttactttaccaattttttcggtcgtttattctaagtaataagtgaatgatgattggtattagactaacttatagaattttcgttggtaagtacatagtaataagtgattccacgtataaaaattttggtgttttacacacacatctttattttcatttatgatgccaataataacatcatcaaatgtgttttctaaatattactttagcaataagtaagaaaaagagaaaactcaattttctctcttcttctcattattattatttttttttatatttacaaaaatataaaaaaaaaaaaaagttttagatatatatgacatgtaaagttttttttttgtaactaataaaattaatttttattaaat

SEQ ID NO: 382778 - DNA, 1195 bp, Cannabis indica
atttatattataatataaaaatatgtaaattataattataggaaagtcttcatggatcacccctcaaaagtatttacgaaaaatctaactaatcaaattgaaaaccccatttttcaaataattaattaattaaataaaagttggatgggttcttgagcttggaatcaaaggcaagcttgacgtggttacgcgtaaagaacatctacgacaaaaatgggagaatgttaagttcgatttggagaagtttaaaaccaaaaatgatttcagattatatggtgaaaatgagagctttgttagtgcaccaaggaattaaggaagcttcgcttggtgaggataacatcaaaggaaagacagggaaagagaaggatgaaattcttaagatgacacataatgtcatcattctcagtcttggtgacaaagttttgagagaagtgtcaaaggagacaacagttgttgacttattagaaaagcttgaaagtttgtatatgacaaagtcccttgtgaatcggttattcttgaagcatgagttgtatgctttcaaaatgcaattgggaaaatctgttgaagatgatttggatgatttcaacaagataaatcttgaacttcaaaacataggcatcaagattgaggatgaggataattaggccataattgtttggaaggtaatcgttgacattagaagaagttttggagtgctttaatgttaaaagaattgaagaagaagacagggaggaaaactcttcagatggtttgctggtagctcagggaagaattgatcaatgagagaacatgaatcatggaagcttgaacataggaaaatctcaaataaagtataatgaaaagtgttacatgtcataagccttcacatgtgaaagagatttgtcaaaactaaagaaaggagattacaaaaagtatggcaatacaaatgtgacttctaatgatggatatgagagtgctgatgtaatggtggtgacaaatggttctataaatactaattaggtgattgattctggatgctcattttatttttgtccagatatagaacaatttcttaattacaagaaaattgatgaaggaagtgtcagacttgggaacaatagatcatgtccaataatagtgtaacgctcttacttacttaaaacaagatgccataaataactggcgttaagatactaatgttgcctttatttaaaaa

SEQ ID NO: 382779 - DNA, 2051 bp, Cannabis indica
actcatagcagaaggttttatattgctaagaggaggttctatggaaaccttggaggatgtggcgtatgattggttaagcgagttggtggagagaagcatgattcaggtaaaagaaatgagttcgacaggaaggataaaatcattttgcattcatgatctcatgcgagatttgtgcgtgtctaaagctcaagatgaaaactttatgcattttattgattggaggaataaaggagaagaaccaacagaaacaaatgttagaagaattgccatctatgttaatggaagttctgattatgattttattcgtatgggtcgaaatatagatgtctctttgaggtgccttactgtacatggtgggagacttgcattcaaacaaggagtgttgagatatgtatgcaatcactttttgatacttagagttttgattattcataacaaatgtagggatggatttaacatgaagctgcctaaacaaattgggaatttgatccatctaaggttattaagtcttccttgttgggagattgtaaagattccatcttcttttggcaatttaagatacctccaaactttgagaatatgttttgattatgctacaataccaaactcaatgtgcaaattagaacagttgaggcatctacattttttaaatagtgctggtggcatagaattcggtcaattcttgaggtcaactaagtcaagaagtttacaaacattggtaaatattagtaccaagaatctttttatgagtgatcttctacagctggagaatctaaggaaattacaacttcatgtggacggaaactttgacacattcttacacaatccccaaactctcacattcactagtcttctctctttacaagtgaggaattataatcatgatgccatcacgatagatattgttccattgatattatgctgtcctcaaatgtataagcttagagtgaactcgcctgttgtaagattaccacaagccaaccaattctcccaaaatctgatgaagctaaccttgattaatctaagacttgaggatgatccaatgccaacattagaaaagctgccaaagttaagagtccttgtcattagaactaatagctttatgggggaagagatggtgtgctcaacacgaggtttccctcgacttgaatctcttcagcttagtagtctatattacttgaaagagtggaaagtggaggagagtgcattgcctacacttacctatttgtgtatgtgtaattgcgagagattgagaagagtcccagatggactaaaaacatcaagacactcaatgagatggtgataaagttgatgcctaagaaattcaaagaaaggatggaggaaggaggagatgatttcttcaaagtcaagcacatcacatctcgtgtatttaccgactgtgatacaggtacatctatctatcttgttcaagttttgatttgaactctgttatacctttgttatctgtatatttatatattttttttacttatttactcttgcattttgtgtattgacattactatatatgaatgcagattgagagtaggcaacatcttcgggctatagaatcaaatcaaatcaacatttggaggatacaatcagtctgttaaatgttaaatgtgtgttttaattccctgcaaggtctggcttttttgtttctactattgaaaaatatttaaattgtgttgtgttgttgtgtgtcttaattaatgtttcacaactccaaacttgaagtgaagcatgatcttgtcctttaaatatatataaatattatgtcctttaaaaacaacatacccttttgtccctctaatggctctgattcattatcaaaagtttggccatactcatcaagaagtatgttttgaggccttatatcacaatgtaaatataagagctcttttgcaattcctaaagtaagtttgcatcttatgttatgttatgttatgttgtaactagtacaaacactatatatgtgaaaaaccaatctaatcagatgttactaattgaaacaatgacattcaatcacacaatataaagttgaatgtaaa

SEQ ID NO: 382780 - DNA, 1692 bp, Cannabis indica
ttgatattgtaaggtcaatatgggaattaacgtctatttagctcgagaataggctgtcacaaggcaataaaatcaactcgagttcactaatatacgtactgtgcttttaaagagcatttatgagaacattctatatttagttatgttagagtctttcacattctcacattgctgtgaaaatataataacatatataaaatttatgaattactcttctcatgattgttaattaattttaacatagagagtcccatgcatcatatatttctaacaaaccctgatcatcaagctatgatcaagaacaactctaaacagggcaaaagtaacattgcttaggtggatttaacctctaagccacataagaaatcctattgtgtgttaattataaggttttaccaaatttgagttttcattatttttagttgatgagaaaccatgctattggaattaaatccaactaaaactgtcctaaccataaatcaattacaagaaattagaaacaacttgcacaattaacatacttataaaatagttacatcaagattctaacagaaaaaatacaaaatagactaaagtatttacctgccagctcaccaatccagacatcttcatttcacattgctccacttttataaatagatgcttatggttttagtttctatctagatctgaagactagagagagagagatcatgtaattgctctgagttcaaagataagaactcagagttgggaaaaagtgagattatgaaaagttgagagaaaataaagagaggacttgagtaagaaagaaggagaaacagagctgagagttatcgagacttaccagttgaatttgtagctggaagctccatcaatttgtactggatcttgattgaaattagtgcaaggaccatactcattcctgaggcgagctcaaagaggaagtatcccatcaactcagggggaacctctataaaactctgtgtttgattctcttcttccttactcttctcttctacataatcgaaacacattcactcaatattgtttgcattttctaattctaactctaacaaaatacaataaagaaactgatcaattttctttcttttaattttggtaaagttagaatttcttgagtaactgttgtgtgtttgtttctaatagtaaatcaaaagtgatacggggacatttttggtacatttgttggtttgttaaaaggtcgaatttgaccttgtgatctatgtgttagagttgacttgagtagggacattctaggaattcccaacacatgctaacacattgcaagattcttgtcgaagttaaaagaggataaaaagctggccacccgcttggaaccaaggcctaggccaaccagggttccgaagccttaagagggtcggccagggtcccatgacccagccaagaatcggccagggtcaccaaacccaggcatacaagctctaattttgtagggtgaaacccttgggctagccaactccaatgattaataagtcctaggactggccaagtctcaagcaagacccctagggtcgaccagggttagttttgaatcaaaattaatgtgtgttctttcaaagctcgaatatctgcctcgtattctttatgtctcaaagagtcaagaatcacaatgaaggccaaaattgaatcttttccaatcaggaaatcacacattatacattctaaaac

SEQ ID NO: 382781 - DNA, 4943 bp, Cannabis indica
tctctctctctctctctcagtcaacacccatttgtcaactcagttggggattttagcttctaaagctctcatatgaaaaaatgggttatgttggaaatttgttctggtttaataatgtaaacagtaagaagaagaagaagcttcagcagttgagtttgaagagcctcttttttagactgaaagctgcattgaagaaagctaccaagaataatggctccaaaagacatttctcatttcagtatgacccttctagctatgctcttaactttgatgatggttcttcttcatcttctgatatcaaaaacattcaatgggtttatgttctttggatcaaatgtgagtgtgagtaagtgaaagagtgatatatatatatgggaagaaattaagttgaagattctcttttgtagttagttatgattttcttctcttccttccaatgttttctctctaatatttcttttcttttctatttattgttaatgaaaatagataaagaagagaaatgacatgaaaatagtgatgttacattcaagaggaaaatcagagacaagagtcacttttttttctttttcattttcattttcatcaattaaggtacatacatgaatttggaaactcaaaagtatctcatatcaattcaatcaatcatcatcatcatcatcatcataacaacaacaagttgagttctttctttttaatcaaactgaagggtcttctaatgtggctttggataaatcgtttatcctaggatatgctgctttctcatcaagctgattctgtgcccatataagcatcttcaacaaacttggaagcttaggatctgtttgtttacgaaaagaaaaagaaaactcttaatcagaaataaagttttatcataatcacatatcaaacacaccaaagtggtggcgccttgtatttagttacagatattctataataattactaacactttagtcggtgttgggcgccactggtgtcttttagcaacctctaaagacttttaagtttcactaagtgcaaattactctaccataggcatggcaagcctatattataaaacacaagagaccaacttccaatacaattaaattatgaaattatatttctaatgtcaatagggctaataatctctttagttatttgggttttgcttttcgtgtgtgtgtgtgtatgtgcatgcgcattagagtccttgagatctgtaataaagtacttttagtcacaatgacaaactttatgtgaaatataatacatatttacacttagagatattcattacatcttggtgactaaatgttacttcttttttagtttttatatacaataatgatataaacttaacatctcatgcaaccaaatacatacattctccaattaatttgcgatgtcaaagataattagaagaacagagataccaaccttttttcatgactctggctagttaggatggctgcatttacttcgcttgctgtcttgaggcgctgcgatatgttcaaaagctcaccaacgggacagtttgagacatcttcaaaagctagaagagcgaccgtcttctccaactcttctaaaaagctttgctgttaaagacaatagataaaaatcggatgttactttcgccatgtcttaagactaatggcagatacataggaatacaatcataaaagcttctcatgaaaacaaaactaatcttgcatagttattttttattggcactgagcttcaggtgagtaaatacggctgaagaccaccaaatccagatagaacttcctattgaaaaagaatgacattggtattcacttaacatattttatagaatgtgaaatcttacattttcttccccccttggtgctaactcttcctgagcaaactcgagagcctcttcgacttttccatttctgattagttcgattaacctttgctgttgaagatggaaaaacaactggggatttgtatccaatatctgcacacaaaattttggagatatccaaaaatttagtgaaatatgaaaacaatggttgctctcagtgtaacctttttgcaaagagaacaagaatttgaagtaaggagtgaaaaatatagttatctttatgttacaatcatcaacctgagacaaatacaaaaaaagaagaagagtttgaaaggttgcaaaaacaagaacaatcttattacctctggatttagatcattcactttctcaatagcatcctcaacattgccacattgtacagccttcttaacagccattcgatcagtaatcgttgcaagatctatatctgctatttcttcataaggagaaacacaaaatccattccatccaaataccatataatcaaagcaaaatttctagttcccccactgattacatttcacaacaaaaacaaagacataaaataaaggatacgttcagttccagattctgcccggaatttctcagcagcatcaacatacccttcagtgacaagaaaattcatcaccaacctattcatgtcttctttcctaatccttacatcattgagcttcttctcccactcttccctagtaatcactttcttcgacgtagcctataaacaagtaatttgaaagaaaagaaacatactcaatcaaacacacacatgtatgtgtataagcaagtcacttttaacgagtgagactcatcttaaataaagatgatcggttaaaattagtaaattactgatttatgtgttcacatatcattgctcggttcaacaaacacataggtagagagcctcaatagaactaaactaatcgtcagtaactgaactcaaactacttcaattccttgccatggaaattctaagtttgaaagtcaaagtttgacactcaaactcaatcaaaccaaaatgagggtatcattacatcattcttcttcttatttttcttagtttggtttaataatcttaaacaagaaaatcaagtccaaaattaaaacaaacagaacctaattaaaatttaccatttcttcgatctctgcaagttgacgaatcacaatccagaacaatgacatcagttcaccgccctcaatcccatttcttcttaaatctcactctgcatttcacacaaaatccaattcaaattccaaattccaaattctaaaaaattaaaaatcttcaaatccacagtgttatctaatcccaaaacaccatcaattttcaccacctactaatcatttgcaagaacactaaattcccttaccctagccctaaaaattctaaaaaacaaaataataaaaaacagcgaacgaaatgtaatgaaaaacttggaaaaagaagcgattaagaatttcgaagaaaatacctgaatctatggtgtggattgaagtggataatacttggaatcgagtgggtttcttgcctgtttcgtactccggcgatctcactggtcagattttccttccccgttttggttcagctctttttattcggagctaaacccgatttctgttatccgggttgaccctaattatgctctctgagctctgggccccagcccggcccagtatcatgcttgggctggaaacttctttttttttctggcccaacattttaaagcaccgaagttttaggtaccaagaccctaaaccaattagaattttttttggtattatttcacaaatacacaaaaataacaaaaaaattaacaaaaatacagtttcatagaattttaaatatttttaccaatttttttattttatttataaaaaatacggttttttatgttatacttttgttaatttgttattgatttttgtaatctgtatgttattttttgttgttgttttgatgttattttcatgttactttgatgtagtttttttgttgttttcatattgtttttatgaaaactgtaaaaatataaaagaaaaaaattaaacgtaaaaatgtaatttttttataaaaaatggtgccttatgtaattatctcattttttgttgtagtagacctcctaaatgctcattttggtagagtttttatttgttttaggagaactttttttacgttttttttttcatgattgtgtacgttatagttatttaagattatttataaattttagaaaaattatgaatagtttacagtactgaaagtaaggtttaaactgttacttaccaaacgtataagaaatttttttggcattgtacaatattcaaaactttctaaaactttataaatggtcctaaacaattacaacatatgcgattgtgaaaagaaaattagactaaaatgttcttcttaaaaaaaaatatataggatttactgaaacactcttttaagaggtgcactgtatacttaccttaccaattattaaaaaaagttacaaatataaaggtttttttttctttaaaaaatttaaaaacaaataatagattttcatagaaaatctttcacttagccagagcaccacttgaacttttgtgttggtggtgttgtggtgagaggttgtgttgtttctagggctgttcatataaattgggaaaccgcagtttaaatccggaccactacaatccgaaccattgtaaaccctaatcggagaaaccgtttatgatggttttgtcaattcggaccgtttacatcataatggttcggttgcggttcgtaatatataattaacggttaaaccggaccggaccgtttatagtaaataattaatttatatattttttatatatgactatatgtataatttagaacttttttgtgtgtcaagttttttattgcataaattttagatttttatgttatgtttgacttttgagaatgtttttatatcattatttatatcttatagatctattacttatcatgttaaatatatattttgaaaaataaaattaaaaacttagtaaaaatagtacaattactaaaaaaatatgaataattatcaattctacataaaccgtggtttcgaaccaaaccaaaccgtt

SEQ ID NO: 382782 - DNA, 3123 bp, Cannabis indica
actgggtcgggtcaacatggataactgagttccatatatccacacatcccttgtagaatcccagctcttcaccgatctcaaacccagttttcatacccacttgtttaccatcttctttaccagagtcaagaccatctttgtagcccccattgaagccttctttcaaatgggcttcttctaaatttagagatgaatcaaatatgtcgtcgtccatgaaagatgtaaactaattagtttgaagatttgaatctttctttccgtgaaaactgttccaaatctaaaggaagtaaatattggaaacccagttagattgaaagaaatctcaccacccagcagtagagttgtggggattgaaatatgtcagctaattttttttcatatataaagaaatcttacccgtatatataaaactcaacaagacttaccaaaatgctcataattaaatcaaacaaaaaaagaaaaaacaagcaagcttggacagatataaacttttctgagatgtgttcatgcacaaaacattaaaatataactagtcactagtaaggaatatgtatttctatatacaagatttgtgagtttgaccaagaccaaaaaactaagagcaagaaattgttacagattctaagagcccaagaccaatcaaagattggatctttatgagcttaaaaaaaatagataaaaatgaagatgggtgtttcaaaaaaaatgcaagctttgaatatttaacaaaaaacgaaaaaaaaaaggcaaattattatactgtaaatgctacttaattaattttttttttcagacattcggtagcccaatttgaacacccgattgggccatttctttaacttgaatcacagaatgcaattttgaaccctctggaattcccaatggaggatctgcacatgaacaattatcaactgtataaagctcccattcctcaattccacatttctctaaagcagaaaccaatctcttcctctccatctcatttgggtatgctccatctggactcacaagcactgccccagtataagattgtcctgcaactcgagcagctccactgtaatgaaacaaaccccaactaagatcatctggtgcatccactatggtccaaaactcattagacacaaccccattgtccaacacactgaagtaaaatgtcccaacaacttttccccttttaactctatactttctcctcctccaaaccattttcccctcaagagttttgacctgaaacactggctcataccaaaacgacccttttgcctttccccggtaaaatagctggtattgacaggggaattgatcataagctgggttctgtcccgccactacacgccaactccaatccaaaccccccaaccagccaacaaaaacatcctcagcaacttcatggcacaattcttcccctcgaaatttcgacatgggaggcacataaggcctttcaggaatcttagcatctaatccaaggcaattgtgcttctgcaatacacacaaggaaaatgcttccaatgtaggactttcatatgaagcaatgcaccgatagttacacacttgatccacaggactacaattattcaagcactgcaatgcttttctacagtcaggatccaatagacaatttagtatctggctcccacaattcttcaccatgcaactgagagtagagaacccctttgatctcagattctttaaaattgagactggccttataaaagcattgattataactaatatacaaaatcttatatcatcagaattatgcctttcccaagcctcagacacagtcttgaccacttctacagtttcattacttatctttgtttggccccaaaatggcctccctttattttgactctctacatatgaacctcccaatttattcaccaaattgggagaagattcaaagcaaataatgtttctaatattcccactattgctttgaatccaattcactgactcttggtttttcacacccacaatcaccaaaatatcagcacagctcaattcccttttcaaattcacacaattttcagtatctaattgagtcaaatcatcagtaaacactatcatttcatacccttcatcaacccatttcagtctcttcgcctaaaattcaattacccaattatcagcaaatatgtaaaacccaaatattaccataaaacaaagaattcaacacagtacttacagtgtggagcatgacctcctgccaaggtgcggattttagaggactgagggttccatggcctactaaggcgacaattctgaccggaggttcagataagtggtcgggggtggtgatggcgccggagcttgagtccaaaatggccggaatgtgagttaatctggaggtttgaagtttaagagcaggagttgtgagaagaggagaagcaagggttctgaaatggcgaaatggaagagagaaaacagtggcagaagtggtaaagcgccgagcttgagagaaaccgaagcaagtttgtggtttgagtaatggcggagcttcgagagaagacattactaatttagaagttaatagaatatatgagactactctgtttatttaatttttttttattgttttgtctaattttttttttttattataaaaaattagataaacattaataatacgtggaggaataagatcccataaaataatttgactcatatttatttatttatttatttttttgaaaaaaaaaacttaattgattaatatataataagttagacctcgcgattattaaataacatgtgtaatgggatagtgatagcaaaatatcactaataatttgtaggtaaacgcctacttagttatgagcgacaaaattacaagtctgacttctaataaatatgtctacgaaaatttggaattgttcacacttctgagtttctcacaagtcacatgtacaatttaagattgggaaaattttaaatttggaagaaaattaaatttaaagatgatgtacataaatattactggtcgggtcgaactgggatagtgacctgaataaaactattcttagatgaaacgaatgaaaccattgaggttgtacactacaatagtgtttagtgtaaatttgaaaatatttgcacaataaacaacataagcattaatcaaat

SEQ ID NO: 382783 - DNA, 1624 bp, Cannabis indica
aacttttcaaccttaaatataagatataaggagctacgcttctgtcattttttttttctttcaattagttagttttttaatattttattttaaaaaaatagaataaaaaagacattcaccaatgtaactagggttggagctagcctaaccgtatgataccaagtactataaagtgtggcatattattattattatcaagtatcatataatttaatttaataaaagctaattaaaatttttatctctgaatttcgacatataacaaatatcccttaaatattttagtcattaaaaattcattatgaacttttgagattattgtattgaaagatttttgtccaattctatttaattttactaattcgataattttctatgtaataaattatgctctcaaactttgacttgtaccaaattatatctcttaaaaactttcattcatgttaaacctcccttactaaaattggataaaagtcattaaatctaataatattttcaatagttcagagagaatttttaacggtcttaaaagttgaagccaaaggtatgatttggtacattcatgtcaaaattcgaaaacaaaaatcctaactaacttttaataaataatataagaaaccgctaatcaatatcacaacgtgcggtatccgtatgcatgtattaggcggcaaagtaactaataatgctcatactaaaatataattatattgtttttcttcagtagagaaactaagtgactcgctttatagaatggtacatcaatcgatccactatcacctctactttaccaggacttcaatcacttatttataaaaaacttaaccatatatagttcatcacacttaagctagcttaaaaaagtaggaaggaaaacatgaacatacacatatataataaaacaaatagattcaagagatgaagtcaatcttgatcccatcgatcttaactttgcccttaccactcttgggaactaaagtcactttcaccttgtcatcatcatcagctccgatatcctccaaaagctcagttatccctaaattcagctcagtcttgatattagtagcaccagaatcagtcgaatgtggcaccgtagcaaagctccccgcaaactccgacttctcaggcccagtaacggcatcatcatcctcatcgttaatataaacgtcaaacttaacaggcacgttattggcatagtcaatcccttgaataaccaaaacctcttcttcatcctccttctcgaacttgctcctcgatttctttggtctctccaccaccgtcttcaccgtcttgtccaacgttatcgggaactggctaagtggaattatattaacgtcatcagcacgtgcaattccatgctttctcaacattttaacgatctttgacttagtagctttaggcttatacttaagccagtcaataggaacatcttcgtaaacgtaacctagttttctactgtcaagtgagtctcccactttaacgctaaccaactgagcattctcgtcgtagaagacgaaggaagagttgagataatctgggtcggatatatcgactcttttgggtcccgggagagttttccagatattccacatgttagagattttataacaatggaagaaaatcaaga

SEQ ID NO: 382784 - DNA, 1625 bp, Cannabis indica
ctctttcctcatctgttccacatggactaaagcaaactaatttggagtttgaaaactttgctttccacaattcttcaattgttcttccaattaaggttaatttttacaaaacaattcatttcttttcaaaattttcttttccttctcctcttgtaaagattagtttaaggattctaaatcttgttggagatccttaaactcctttgaagccctttgaaaaaaaaaaataagattttcatgtcagttgtttgagctgaaattattcattcctgcaaggtgcagttttcataattttcttaaaaatatctattttgaactgaattacattgatattcagctggtcaaagtcgatgagaactgagttaaaatcaaaaattcctcatgtgagaagaacgtgtagaaaacctaaagaatatgattgacacacaacccaattcatatttacaacgcttacagtgccaaagcctaaggatttagacaaggctcatggtggaaaagttttggccactcagttgctcactgggactattgaaagtgaggacccaagagatggaacctttgaactaatacctcttgtctttagttctattactcaacaccaagttgaacttatcaaagatgagtattccgtacctaatcttattgtcaaaagatacagaattggatgtccttttggttcttgaaatccttgttgtagtgcttggtcaaggtttcatatgaatgcaggtgcattttatcctctacaaccatggctttttaattgcttattactttgaggtcctcccatatcatataaattttaatgggtaccaaattttgtcaacattattcatcttttatcacttgtgggactggccttttctagctccccattagataacatttttctatgatgcaaaaagaagtaccactcgtactgaatacttttatactccccattagtgtgtacattgacaacatctctaaaagtaactacagcatttaccatgaagagtaatcctatactccaatagtcccttcatgacatgaaacctttcaaaaggctagctgtttcaaaagacttgctccattgatagacatatagtgtagagaagatgacatggtcactaatattaacatacgagaaagtgatagaactatgttgtttactgatgacaaccttcgtcacataggtttgatagcaacttacaaacaattgtatatttatgctcactttgttgatgagtcttggataacacacctcttgatgacgaagagagtaaattatttccaagaaagaaacaacctccacttgtactttttcgatcatcagcattgcctgcccaatctgcatcactaaaacaagctaagttagaatttgtatctttagaacaccaaattccataatcaagagtactgttaacatatcgaataatcctttttacagcagatacatgagattccataggattactttgatatctagcacaaactcccacactgtaacaaatattaggacaactagcagttaaatacaatagactaccaatcatactacgataaagagtagtgtctaccttcactccattctcatcttttgtcaatttcaaagtggtgctcataggagtacttacctgcttagccga

SEQ ID NO: 382785 - DNA, 2529 bp, Cannabis indica
gtttttttttttgtgagcgtgtgatgtatctgcttcatgcactctttcattttgatttggaaaacagtaatattataaatacaaaaaatcaaactatatatagcgtaggtataataagtaaatataattttgctttagtgaaaaagaaattttttatattaattttatgcttttccgtccatcaatgcaaacaaaaatggaaacgcttgccatatgctgagcaatttgactaaaaacagctaaaccaagagtaacataatctgctgatattagcatataaatctttaaccatatcacaaataatttttctcaatgtcacagaatactgaaaaagactgaaatataaaatattatttgaaataaatagtgttgtatatcataaaagtatccaatggatcatttgtggactcaccccactaattacttcattgaccaattctttagctgaatcaatttgttcttctgatccatctatatacacatttctctctgttgaggtatccccaggaggaagatgcaatggtacaatctgaaaggattacaaatgatcaacaaccaccacattgtgtaatatagaaacattgacacacatagccttccccaatagacaattcaatttccaaaatgtgtgcataagtgccaacaaagtgaatttgaagtgattaacatatccattttgacagtgacactttcgccaactatattgaggcattccagtgacataactactgtttaactttttctcgacatagaaaacagacaatcttaacggaaaaaataaccacaacaacaaatgaagctaaaaggtctaagaatctatgcaaattgtttattgcctcaaaatttcaaaacctgaatacgagctcctgacttgctttgcatattccttatagtctcgccacccttgccaatgagcaacgcaacctacaacaatcagcaatgtaaattaagattacttctctaaacttcttcaataaaagacacaccagattttagcagatggtgctgtgacaaatggcgatgaactatctttcggaaaaaaaaaagtattagtagcttataagccatgggaggttctttgtaccttgttgttaggaactttcatgataaactgtcctgctccaggctgaactgggttccctccctgatttgctgatggagcagagttccctgtatctgtctgttccaacaatgttgtgaaccaaattgtagcgagcagaccattttgatcatcaaacaataacatcaatgcagaaagcattactatacctgtgatatcacatcattaataagttgttctgctctactaatctgttcggatgtccccgtcaattccacgtctcttgagagagaataaggatcagcctccgagtccctagtaatctgaatctttgctcctgactgactttgcagatatttaattgtttctcctcctttcccaataatgagccccacctgcgtaacagaattccacagaatcaaactctaagcaatatcatgataataatgagttagcagagcaactagatggtgacaaattaccttgccatttggaatacttattttcttgcccggtccttgagaagcctgatattgtcctgtttgagcaacaaaaggaactgaaccaaagttgtgaaaggtcagcttaggtaggtttaacaaactgaaatcattaaaagctttattgcttcaacagtattaccttcctaaattataaaataaatatgaatgaaatctatatatatatttttttttcttttttgtcttttcccctaaagatattcttcaatcatatttggcatacataaacttcaataatttagtggtaaatcccagagtgaaatgatttcaaacgaccaaacatggaacccaaaaacaaaatccacaaaaattattttgaatgaacgggtaaagttaaagtaattaagaaaaatatatgaagctcaatctaatataaggctaaatttttaacgtgcaaataaattagagtaaaagagatttaaaaagaatccctagaaatatattaccaggaaagggagggttggaggatagagagtcagagtatgggagaggttcagaggagttggaatcatctgtgtcgagtcgagggcgctttgactcagcattactgacgagtcgggcggcgatttcttgagctttctgcttggcgaggaggatgttgtcgtcgagctttcgcttggtactgctgtctatgggagaagaatcttgttgggcatgctccccttggtcttctttcatggcggtggcgggtggtggttgcgctcactgcttaaacagacagaagaagagatattaagaagaagagggaaaccagtccacaactctacatttgcagcgtagaagattacatagtacattgcctcataatagggctcaaattttggaattcagtcatccttctctcacgacgtcgtttcaatctatacaaataataataataataataataaacatggggatttatgtaatccctcacttttcatttgaagtgtgagatccctcacataa

SEQ ID NO: 382786 - DNA, 2305 bp, Cannabis indica
aaaattaaataaaataagggttaaaatcaccctaaattagtgtagattcaaaatctaacactattaatattgtagaattagcgcacactaatttggtacataatttgatgtgttattaaagtaaaataatgtaaagatttcacaccgattaggtaaaatgatgcaccattaatggtaaaactatttgagaccataaaggcggggtggggcagtcgccctcttgaaaaaaaaaatcgaaaaaaatatatatatatatatctattatagctaattacaacatatatttctaaataaaagtgatatttatgaacataatacaagctttggtataatggtaaaactatttcgtacatataatgaaggtcatgagtttaaattccaataaaaacatgttactttattatttaaattttactttttcaatttctatctataaaatttatatttagtgtgttaataattaaattcaatatttttcttgttactttatactatatttaacattgaaatacaaatttgtatcaattaaaaagatgctcttcagtaaaattcctgagtctaccattaatattagagatgttcttatttcaataagtttgatttattgttagaagaagttgcaaatttattgtttatatttctaggagtgtctaaattcatgtacgcgtgacaatcaatgttactatacatgaattagcaatgtatattttttgaattaatgaataatttatttagctaaatgactttcctttttcattttgaaatttatatgacattatttaattttcaacaaaaaaaaaaaaaaactattttaaaatattcataaaggacgatgtaatcctaataaattctacaaaaagaaaatttaatattagtaaaaattgagagtcaaaaatcataaaatagccaataaataacagaggcaaaacctactatcataagttgccgccgaccttattttattgaatttgatattctagaaaaattatataatcaatatgtgtgttgtctcttcattaaaagtcaccaattaagactccccacacaccttaaatacttcttaaagaataaattttttattctttataactctgctgactttatcatctattcattttttcttttcttcatccaaatcttttatagtttctcgaaactatctcgtttaagaaaattcaaaacttgctagaaattacaaaacagaccaccctttaatccaatctaactatttatattaatatatttatttcactcaaaacaccctttaaaaaaaaacacaaaatgcacattacatcattattaatattgttgatgcagagaatcaagtattggctatcggaacaccccaaaatcgtcggcttcaggtggagccccactcaatcatggggctccacgtggtccttcgtattcggagcaatagccacctacgtcgtcaccgccatcgctctccacctcatcctctccctcctactcaggcgccgacctaaacccgtctcactcgggccaatcccagcagtccacagcctcgccatggcagtaatctcagctaccatcttcgtcggaatgctggtctccgccgccgccgagattcgagacacgcggtggttgtggccacgtacaaagaccacaacccctcttcagtggctgctctgtttcccaataggcacaagatcttcagggcgcgtgttcttctggtcgtacgtgttctacctctctcggttcctccacctgctacgcacattcatcacaatcctccgttaccggaagctgagctcgtcaaaccttatccggcagtcgatcctggttctgacgccgtttctgtggctggaattctcacagtcgtttcaagttctggctataattttcactacctcggttaacacggtagtgtacggttaccgtttctgggtgggaggtggcgcgagcttcacactcccagtcccagtggttgaacttgaagtgaattgtcaggttttgtcagtgggattcaatgtgatatgccatattggggttgttgttctccatttccggaaaggtgggtgtaatgggattggagcttgggtgtgtaactcaattctcaacgctgtaatccttgtacagttctacctccaaaatgtgaatatcaaatcaaccaagctgctacgggaacaggacgctgctatattggaaccaaataaaaatatttagttaagttaacccctaattaattatacaaaccttttttaacccaaaaaaaaaaaaaaaaatacatacaaacgtttccttttttaagttgaccaaataatagaaaagtgaaaatatacga

SEQ ID NO: 382787 - DNA, 1815 bp, Cannabis indica
aaacaaactaagataaggggaacttacagaggaacaaacaaatatacacccttagataacttgacaggtccaaagagaatagagaaaaaaccctatctataaatgaccttcataaaactaagtgaagaagaaggcaacgatagaaataggcattcaactcgagcgaagcaattctaaatcgcctatacagagaaaaaaccctttccgcgagaacctaaaaaaatccatttcttgagtagtcccaaaatagatagcagaaagaggtagaagaacactcgttagaatcacgaacaaatttgaaaaatccctgcctttgcttagcagaatcacaggagaagcaatcagttggatgtcgtattgagagattttgaaatcgcctataccacctatacagagagcattttttgaaatcatctatcataaaaattgacccaaaaaagctaacatatagttgacctacattccatattcttaaaaaagtaaacaaaagaccaattgtccaatacaatataaatacatactccatacatataaagttcaaacaacttcagcaataaaaggcaataaataaatatacatacactaaataatatattctttttatgtataatagtctcaatactactaaaaggtgtcattttgtaaatagttagtaatttttttattataactattattaaattaaaatatataaaatcttataatcaattctttacaccaagataaatatgacatctcgtaatggtgttaggctccactaatacgttttaccatctaacatttctctttacattatgattgtcaacaaaagctaaaggagggaagtgaaatttaatacatataacactggtattttttgttttataagaatttccacacttgaaaataaacgtacctttgatttttatgtttgtgaaatgaaatccaaaggacttgatttataacaacaaatacaatacctaaactaataccttactttaaattacataacgaatctttgtctgattcaatatctgattagattctccaaaccaaacaatatgctcgaataatagtatttatccttttattttttaggaaaaatacataaagcaagaaaggttattaccttatattaatttagtgataaagaaagtgaaattaaagagtatgatgaggtaccacaatttaatgtgcgggaaacacggatatatccctgtgaaatttgatgggttaaagagagaagatcacaatggtccacctaaattaaaagttagtacttaccctattcatctaatggcccacattaaaattcttttatatggccagagcccactgctaaattattacatcgattggtatggtatatatccaaacctatcgccagatgaaagccagagaaattgaagcaaacttatttaactatatcataacatcaatagattgaatcaattgttacaaaatctattgcatagtagttttattttctataaataaaacatatattaaaagacaaagtttaaaccaaactagtgaacacaaagatgcaacttcccttagaaatccaacagcagcaactagctcagtacacgcccaacaagccaggcgatcagaatacaaactatcgaaacaaaatcaaaattcttaaacagggaaagtcaataataaaattacggaagggactcgatcctgaaaccacgagccaccaattctgatattggaaggaataaaaatgaataggaatgagaataaaaatatgaataagaataaatttaaataaaatttaaaatgtataaaaaaaattataaaagaataattattattttttttatatat

SEQ ID NO: 382788 - DNA, 1219 bp, Cannabis indica
aagtcacacaatcaattagttatcggggaaatcaaaaataagatttttgaactaacgatttcaacactattagttgaatgactgagataacagttataacagttcctaaaaataaaatcctaatacatcgtcatagattgtgagacaacctatccactatgaacataaatctatattctttgtctttgacacaaacaaagacgatccattgacttacaaagaagcaatggatgaccttgaccaaagatgatccattgacttaaaaagttaagttttagaatgcattttaaatgatagactagagaattgatagagtgctcaaacctacaaaaaattgggtattaaaaatgagctttgctatgaggcaccaatcagggtgcctaataatattatgaggtgacgctctataaataattaaagattttctataacttttactaaagtaaaataattaaaatttaatattaaattgtatcaataacgatgttatacctcataatggtatcagatatcatgggtgcaccaatcagggtgcctaataatattatgaggtgacgctctataaataattaaagattttctataacttttactaaagtaaaataattaaaatttaatattaaattgtatcaataacgatgttatacctcataatggtatcagatatcatgggtgcacttaagcatttctcattaaaaataaaacattattatttagtaccttaagaacaccaatatcacactgatgtgacaccttataattaattaatattgttatttggcatcttaagaacaccaatatcacactgatgtgacaccttataattaattagcagtttttatattatttattaaattaaaatgtgtaaaacctaatgtgaaaatatatcaatattatcttttggtgcttggtcctttaagatgcccaataacatttctcttacaaaataagatgctcttaccttctttcaatataaacataatttatagaagcttaaatggtataatttgtcaaaaaattgtaaaatggtaccattttgaaacaaattttgatagattggataaattaaccatttattagtatggaacactaccttctccgatgaacacctcctcccattgttcctttccgaacaaattttgaagtcctaataaccctgatagatgtatcccctgaatcatcaagatgatgatgatgatgttgttgatgatgatgatga

SEQ ID NO: 382789 - DNA, 2612 bp, Cannabis indica
ctatgcattgttttaatatttgtgtaattgacctccaatcatatatttatgccctaaattattttatctttatatttgagtaagaataaaaataattttagatcatgtattttgtaaaatttatttactgcactatctatttagttaaaccacaatttaaatttttattattcaaaataataccctgagttcaatttttgattttttttttaatataatcaattttaaactagtttctatgtaatcaacctgatcatagcacctccaagtttctatgtaatcttaaatgtacgctggtaaacgtttgcaaactgcactggcaaagaggtcaaagtttaccagcgtacatttgtagtggctaaaatctaacttttaccagtgcatttacgcgctgggaaaagttatttttgccagcgcttttcattttatgctggcaaaagttctaataccaacattgatttgccaacccccttttgccaaaacatcacaagtataaattctattttaccagtgcaatactaacttttgctagcacatttcttgtagtgatagcacatgtattaaatcagaaagcaacaattagtaataaaagaattttgttttcttatcatcatctcagcattttcctttattcctttctcttcaattagttaattctattcaattttttttcaaagcaaggtaattaagattttttttttttaacttttagttatctcttcttctttccttaaaacaataagctaagaatattattttcttttcttttctatatgcttttttgttcttcttgatcatgaccttccaattttcttctccctcttcttttttctttatatatatacattcaacttattcatacatatattaatataattatcattgtcactcctttatataaatatacatatatctccttcaacatttgtctgtatcaaatttcactagacatcttctaaaacatttctcctaattgttgatcaatctctcaaccttctttcttatatcttagcctgtaagtctatttcaacatttagttgtactttaattttgtgtatgacaataccttcagctatatttcttttattagtataatatgaacttttttatttcttatatacttaatggaagctagttttgttatcttataatcttttgatgcttacaataagattatctttttatttgttattaggatgtttcattgattcttttttttaattgttgtttgtttgttttttacaggagaatacaagttaaaaataaatggagatgatccaacacttgacacattggaagcatgagcatcctttgctattagttaaggatggcatgaccacaagtaacatgtctattaaatgtaaattgtgttcacgttctaccattgcaggagatcctttttatggttgtgattcatgccaattttacttgcacaaatcatgtgctgagttgcctccacaaatatatcactcttttcatcttgcccaccctctcaccttgtccactttaacttacacatcgttttgtgactcttgtgaaagagttgtctcgacttctcttttctacatatgtattaactgcaatgtttatttagatgtgaattgtgcatggacgacacccataacattaaaaaaaactgatgaagatagcattattcagcattccggtcatcatcatccattgcatgtacttgataagatcgatgcgattaattgcttcggatgtcagtcaaaaatatgctcaatggatcatgtttatggttgtaccgaatgcaattatttccttcataaatcatgtgcagagtctcccaaagaaattcaatatcctttccattgggaccatgctcctctttctcttaatctccaatacttttggtttgatcaatgtacactatgtaaggaaactttgaaaaatagtttcacttacaaatgtggtgagtgtacttttcgattgtgtttgaaatgcagtgcaatcaaaatgagaggaagtattaagtttgaaaatcatgagcactctctttgttacatggataacatgatgcccatgaataatcattgtagcatccaagattgctatggtaagaaaccatctacttcccattgtaaagaactttcttacacgtcttcttgtgcaatattttgcttggaatgcaacttcagaatccacctactctgtggaccattgccacccatgatcaaagatgagtcccacattcatcctcttattttggtcgattcggtggttgaggacagttatgaagacttctattgtgatatttgtgaaaatgaacgagatcctcgaatacgtgtttattattgtgagccctgcaaatttattggacatgtacattgtctcaagtctaaggtatgctaatcataatcaaaattttatttttcaataataaatgccttcattttcttgtttggtatattacatgtatgtagattcatgcatgattatagtattacattttattttctttaaataatatttgctcattttaataatatagagaaatatataatacttgaattaaaatctagaagcctaagtggcgtttgataacacttttttaaggatttttttttatataaatgtacaacaaaaataaa

SEQ ID NO: 382790 - DNA, 938 bp, Cannabis indica
ctctttaattgataatagatttggcctcaaagttctaaatgagcttttttttttatttgtctttatctttaattaatacatgaaaaggataacaacacatatgccatgcacataacattcaaacttagtggttagtaatgctgagctgtatttagttttttatgactgatgatgagatattgaatcggataatgttgtgttgaatcggatatgaaacatacacacttttccttaattgtgaacaatagacagacaagttacaagtaaaaactatcaaacattttttttatcacatttatttgtataataatgtgttaaatattgagcgacgggttcttttaaaagctctgtttttaaaggaaaggagatattatcgaagagagtgaaagaagaattaattataatagctttgagggtttggtttctgcttcttagtaggatctcgtaggtattgaagatttggacctcaggatcagctttgggaggcccgacatttccagcccactgtgactgtagcctattggcatggcacgggaacctatatatattatactatatatctatcactttttatttttattatttcagaagaaattatgattttcatcttcaaatattcaagaaagaataaaaaaaattagagatatatagactctaatttttgagatggacatggacaatgttggaacttttatacaaagtaagtgaaactaaaggaaaataaataagagaactgcatattgtgggataaagaaagatccagtcacacctggaatagaagttattgggtacatataaacaagggtacatatattgcaactttgccacttgggggtcgaattttgttttacaaaattatgtattttctaaaatatcataaaatagtattttgagattttttatcaaaaaaaaaatttaataataacttaatttagagt

SEQ ID NO: 382791 - DNA, 2078 bp, Cannabis indica
aaattctctttattccatttttatcccaaaatatatggattaggctattccaagaaaataataatccggaatacatgttaagcgccttgaatggaaaaatatgtacaggaaagtaacctagtgaagtgttacagaatcccctaaaatacaccactttcttttttgtttttggtttcgaattatttctataatttgaaacttccctaaagtaatatccccagaaaaatatctgtgtgggaaaaaatattagttgaactttacatgaagaatcattatgggaaaaagaattaagtgaacaagtgcaattcctaatgcaagaaaggaaaaaaaaaaggtgtaaaaaattttctgctaagaattgtcatggtattgtactctccctccattgattgattgacagtcttgcaaatgttcaattattcgtggatgttgcattgttgcaaataagggtgatcaaacttgacaaatttgttccaatattgcttgtacttcccaattgctatatctaaccaaggcttcataattccatcgaagtgtaacactgctgctctctccacctccatactaattaattcagactcataacccaatccagtgatatgccatcttctatccaaagccactgttttcttataaaaggtaacccaccctaagggcaaactcccagccatccacaaaggtcgttcagaaccctgcaacaaaacacacccgaaaaagataagcattagattataattaacttttaaggcttaattgaaactaagtagatgtgtgaagagattttgatgtaccatttgtaagtatctgtggtaaagggcagtcagattttgttttctccactcctgtagatcaaatagattcaacccaaatgcccaagtgcaggcattgatataaaactcttggctacaaaagggtcggaaaagttgagaaaggagtccatccggcgatatgaagattttcctttcagacaagtttgtaccgctccaactacttttcccttcatgtcaagatgccatagaccagttaggtctttttgtaccaccacatcatggtcaaagagtactaccttatccagtgcagggaagatctcaggcagatagaaacgaaggtggttgagttgaaatgtaaatctagaatcactggactcttgcttcaatagtggattgttatacttggtgaacaaccagtcaaaactgtctatgttctggatctggattgtagctttgcctggagggttcaatatgaaccacattgagattgctgggaaattgagggaatcagtcaccacatggaaaacaattttctttggttcctgcacaatttcatgacaacaaacaacgatcaaggtttgatgtgaatatctcataccaacaataccatggaatccagaatcagtagtttcaagtgcagaatgacataaacgccaaaaagctgcagcacaaccttttaccttggctcaaaatcttcatatttggaagaggaaacatagaatattaggacttacaaaaaaaacctataattagaataaaagattgatagagatcattcaaattaccgctgctgcagaaacagtggagctgacaaccactgcacatgccagaatattatcagagaagacaacgtaatgataaaggttcggatcatgcaagtttcttagcttctgttggctgggaagctgcctctcttctggctccaaagcgaagtattcggaagtgaggcgcatagcaagacaatggagccctttcggggttgtacgcgcagcaagatggacaagatatgttgcttgtttcttttgcgaccgaacttgctcttcggttgtgtgagccatggcacggagcttagcagtcatagcagaacagtcggggtacaccgcactggctttagacaatgaggcttccatgtgtctcattttctgcaaagcactgtaacatcatgggtcttagaatgaaatgaaactctggaactcactacatcagagaacaaattaaaaaaaaaaaaccaggactatatacctccttgacaactctgaatctttcgtacgctcaccaactgctcgttccacctctttaattcgtagt

SEQ ID NO: 382792 - DNA, 1483 bp, Cannabis indica
agagagagagagagaaaaatatacacacaactaacgtaaaacacatccataaggcgattaattaattaatgaatgtataatgcttcataatattataaattatgtaatgtaatgcaatccacgttgatactcatatttatatattttatataaatatattattatagtcttggcccttccatgatcatattacacaaacgtacgtatacaactcaacttatattattatatatgtcggtcagtatatatatatatatcgatctataatataatataagaaaagcttatttgcgtctttttcttcttctcctaattgaacactatatattataccaaataattaaatgattaaataatatataatgagaacaaattgaagttgatgagacaatgaattcttcatataaagtcatattgaaatcttcttctaagttctaccctatacttacttaattcttcgatttctctctctctctctattattattattattattatacttctaagtctacctaaccttcaatgatttgcttggataagcaaatgcactatatatatttaatatattcttattgagtatagtgatgtctgatagtgttccataatataatgatattttcaaaaaattattttcattcgatacgtaattacacaaataacattatgatactgaaaaaaatattaaacacaagtggtataaaacaattctctatatatatataagtgttatttgtatacgaattcaaacaaatttgttattttttattaataatatcacaacttattattctaccaatttaaatactttgaatgttatcaatttggtggcatgggagtgtcaaaactcaaatatcttctttaattcattaataatagtaataacaataaataaataaataaggtaatagaattttaattttcaaagatatttttgtcgatttatttattaattcaaaactcgtgtccggtctaatcaagttgggttgtaaagtactttgggcttggcataagcaataaattccaataataaataataattaaaggtcttttcaatcacacgtgtggtggagccacgtggagactacccattgtaaccaaatggtgacaatgattggccatgttaattggtcagtggaccccacccccacccgcacgagtggttacctacaaacatgcctttattaatctctgctaattttttggctaattaaccctaataataattataatttgtataattaatcatctttttctttaattattattacaatgacaggttgttttgcattgtggtttgtaatgccataccacgtggaatttcttttttttcttttttgtaatattattatctatctttatataatataggtgattctacatgcactctcttaaaatgaatgtactgatacactcttaacttatttcggtctcgagaaaatttttttagtctgattttttttcatattcatgtacgttataacta

SEQ ID NO: 382793 - DNA, 1145 bp, Cannabis indica
aaaaaatgcatatatatacataaaacctagaattcatactcataaacattaaaaaaattaaaatgaaagaatgatgatcaagaactaccaaacaatacaggaataaaatgcaaaccaaagtgggatttacatttttgttttactagactttttaatacccttgttgctggtaattgtattgttagttggatttcacgtgtgtttaatgagactgctcatgctcttgtgagttggggtctgcctcattcttgtaatggtttgctttatttttgggaggtgagtccccatgtacttaccaaatttttcgttttagcttaatgaatatgtagttttcagcaaaaaaaatgatagagaaagtgcaaaaaaaatttaaaaccgtgaccaaactataaaaaacgatctagattgactaaactattgacaccaaatttactattggttcagtctcaaatgatttggtccggattaattagggtttaaaagcactgattatgaattatatgaacaatcctacttaatacttatgccacaaaatatttcttttaaaaataatgtgtactagggggtgtacatcggtcggtttagttaggttatagtatatttttatcaacccaatataaatatcgagttgcaaatatttaattgtaacccgcctaattaaaaattagaaaaagttcaacccatctaatgattttgtcggtttggtcgggttaacccgtccaaactgttattcactttttttatataattattattgatcttagtttcgatctgattcaaaaaattagattttaaaaaataaaatacattatttatatttcaagttaaaaaatgttataatctaaattaattttaaaaactttaatataaaataatataattgagtaaacatgaaataattgaataaaataataaaaaaagtaataatactttatagattttaaactttaacttcaatatttaaatacaataaaaattattaactataaagtctagattttaagttaaacactaaaatgtccaaactttaaatacaaaatagtttgactaataaatataatttatgtaatatattatatacacttttattaaaaaaatatattaatcggtttaattcaatttattcgggttaattggacggttta

SEQ ID NO: 382794 - DNA, 1460 bp, Cannabis indica
atcatcatcatcatcatattcagcatcacctggctgttgaaaatcttgaaagaaagaccccttcttcttctgagtttagataaccttctgacatccacatttcaattagttttctcttctcaatcaaatgatcttttggataaatggcacaatgcaacaaacaacgttttcctaaagatgataaatcaaggtaacttagtaacaatggaccaaagagatattgttcaacttcacaaacatttaactcccacaaatgactacacaaaacatcttcccattcttttctacttctcttgaaactcataagaccacccaaagtctttgctgctagaggtaaacctttacacttgctcacaattttgatacctatgtctctcaattctatgatttcttcttcattatttctacccttaaatgcatgcctttcaaatattaattgacactcattttggctcaactcttttaacttaatcatattgaaagtactacctcccatcacacttgctacactctcttttctaatttcttcaaacatatctctaatggttcccacttactataatcttcattccaaacatcatctagcacaagtagaaatctagatccgcctagacaactcaagatccaattaaaggctgcttctaaggtttggaatttgggtggcacagctagagatgattcatgatgatgatgatgatctttaagaaggctctcagtaattgctgatgcaatattgagtaaatcaaaagggtcagaaacactaacccatattttttaggaaagtgattcttaattgcttcattattaaatgctaattgtgcaagagtggtcttgccaagtcctcccatacccacaacagatatcacctctagtggtccatcatgaccatgagtaatggtatcattgggcattagcatttgtaacaaggctttcttatccaaatctcgaccatgaatttctatttcatcaacaaatgaagtagtctctaatgctctagtcaaaacttgatcattagtcactaatttctctactaggcctaaagagcttatttgaccaacagctacatttactttttcttctatttcttcaatttggtgaagaatggcatggtgtgaaatcacgcgctggcggatttgaactctaaacctcgaagctattactccaagcaaattaccactgaactgcaacatacatacattaatgtgttaatgtgtgtattatttcttttattttaggctaattagaattttttgtcccccctgaactattgagattgttggatttaaagacttttatctaattttattcaatttaactatttcaatgattgtttatgtactaaaccatgttcctcagattttgaaatatctaccaaatcatgcccttcgaactttgacatgtactaattatgtcccttgaactttcatccatgttagactttttactaaaaattagaaaaa

SEQ ID NO: 382795 - DNA, 817 bp, Cannabis indica
tatatctctgtgttgattttattgtttcttgctttgttttcatttctgactttccatactctgttcatctttttttttctctgattattgtttattatttattaatcgtatcattactaattatttagttatttaaagttaataattgatctgattctccaccactagtagtaatttctcacagggggtatatcttcatcttaatgtactgttgttcttacaatgttttaagcttttctttatgtattttctctattattcagttcatgttgtgtagctttggtgttgacttaacattacaatataggaaaatagcacggattggaaaatataaaaactcacaatattctaattcatataacaacaaattaaatataaaataaaatggaagatgcctatcattccaaatccataaaaatattcaaaaggagagatataacactataaaaacaataaaaaaaatataagaaaataatagttctggtgtttcttgttggtggtaaagaagatcattctaagctaaacagatactctttacgtctcttcttgatcaaacatttctattgtaaatcatggtccaagttgttgaaatatagggaatactataatgcttatttcatagtggagggcttgttcctggaaattttgtggagtcaaccaaatatatttaataaaattgactacattgaaaaaattattatattaatatatttaaaattggttttaaactcattctatattggcaactaatcaaagagagaggtgagatatcacacacaccataacaaatgtcaattgccacttggcacgcgtcaag

SEQ ID NO: 382796 - DNA, 1014 bp, Cannabis indica
tatttgtgcaattttagaaaatattgactctattttgtcatttaacaaaaaaaaacagtccaattgataacttttataaaatacgtaatccaaaaaagtatttactctacaattaataaaagtaaaagatatgattataacacacatatttggacgggtattaggtgcctctactaaaagatgataaatgttatgtgcgtataataaattattgatttgatggcctcaactacttttctatctatatatctaattaattattactttgtatatggtgcggtagtgttacgtacttatctatgtcgggaaacaatattgggtccctcgctggctctatagacaatatagacaatactgactatactccattccatatcgaacaatcactgttcgaattgtataataaaaacccatatattttataataattaaattttctgcattcatttctaaaaacccctatatatgtaaatgcgcaaagaatgtaagcgtgcatatgttatataataattaatgaacatatttatatgatacttatttaatactttgctttaatttttctattgattatttattaccttttgtatcttgatcaatcaatgccattattataaattcaagtagtattaatggtcggcttgctacgaagatcctttcttatttaaaaccatacaattaatgtgtatatatatggaacattataattattaatgtttgttccaaaaatttataatagatataattgggatattattctaaatcctcttctcttatatgatcaccatcacaatagaatacaacaattgaaatccctagtttatttatttgttgatctctgcaaattggacattagaaatataatgatacatcgatcacagctgaaagagtatattgtttataattttagttataattaaatttattttatgtttctcattaaaaaaagaaaaagttagtatcattttttaatttaatttttttcgttaaaactttttttttagtcacaataaaatt

SEQ ID NO: 382797 - DNA, 1394 bp, Cannabis indica
tgaagatttcttgaatcaaggatatggacctttcctacgtttccaagctaccatagatgtttctaaacctctgcttagaggaaagatggctaagatttgtgattttagggaggaattctgggtggaattttgttatgagcggctccctgaatttggttttaaatgtggtatcataggccaccctttgaaaattgccttattttccttaattaactttacaatgggatagaaccatctctttcttatggaccttaaatgataggctccccctaccatcttcaggttatgatcgttacagaattgactttgggaagggtaatgtttggcctcttatgacccgattggcaaaaaaatctttcactgctgttgtcccacaccttgctgataggtcgtctcctcatccttttcctttaactgcatttgaatcttcctcttctccgaacaacaacttgcttggccatcattccatcaacaataggtcctatccacaatcacatgcttcatctgatgacaccaagaagttttttgaaatgccttttccttcctacttacctttatctattcctactgtaacctcaaggatatcatctatttccatttctacttatcctccatcaacctacacaggcagcactagttcacatttatataatgctttcaattctctgccccagccaactgttactgaggctacaactgtcttaactttttctcttcatatggccaatcaaatcaattttcaaagaagtaacttggacgtccatgaccctactgctatgaataatctcaaagagaatatgtatcctaataaagttcgtaagaggcatgttaaaattgaatcctttcgaagtgctcttaaccaatgtcgtttcaacaactctggtcatttaaatccctcaatatcaactaactcttcgaatgaatgcaagtttttggttttccatcagattcggcacagcagtagtttgaaaattctacagtgattgttgaagatcattgcggttcgccatgaatatccttagttagaatgttaggggtttggggaacccgtttgcattctgacatttacgattgcttgttggttggagtcttaaatctctacttcatctgcatggtcacataattgaaactgactctcttctggcagttcaaggattgaagaattcgactaattacctttcagcgtttcaagccattctcaatgatatttaccttcttgtttccaatttctcacgagcacaaatgttttatgtttatagatttgctaataataaaacctacttattggctaagtcagaaggtatttagttggaaaaaattccatctctatttatgacacttatgtaatttattttaaaattaatataattatcttctctcaaaaaaaaaaaaaa

SEQ ID NO: 382798 - DNA, 2004 bp, Cannabis indica
aatcaggctctctcaaatcctacagtcacataacaaaatatcaacaaactcaataactctcctatttctattttctagcaaaacatttccttggtgctaatcaaagataacctccctttaatatacatctacaaatcatcttctctatgcagacaattgtagaacactttttctcaaaagtaataaaggttcctattgtaccatatacaataaacagctccaaccgatgctaaagaagctatctctgtcaccaagctcttcactctagcttgattcgcccaagcaatccaatcttcaaactatgatggccaaattgctcctctaagccaactttcaaccgattccataactctctttgagaaagaacaatcaaaaaataaatatgagtgattctcctcagcctcctcacaaacagggcaaagtagagatttaacaggaacatgcctcctagcaagcaaatccctagtcaaaagacgagaatggatggtctattatagaataaaatgatattttgaaatgccattctattctaaaccacctttgtatattgcacttttgaatcactagctaaaaagcattcatacattagcatactcttaaatttcccactcttacatgcattgagtagttctgccatggagaaattttctcgaagtttcatcaacttcctctaataccagcttacatttggttgaagctcgtgaaaccatacatgttgaccctttaaatagatactattgatctatttgacccataaaatgtcttgtttttgtactagagcccacaaatattttgccaatgaagccttattccacttcacactatcttaaaaccctaacccttcgtactgtttgggcttacaaaccagattccatgaagtcacaaggaatctacttgtattccctttctatctccaaagaaaattcctacatagcttatccacttttttttttaccacttttttaggtaaaataaaaatactcatccaataactcgaattctaatgaggaccaagttaataagttgagttttacccgcataagataagtgcttacttccccaacaattcagcataagtcgaatcttactaacaattgcttcacagtcttcatatctccatttagtaggcctcatctaaaccttcaggtacctaagtggaaaagttccctccctaaactgaataaggtcctattttttaatctttttatcactgtttacccccacgaagtaaatatgagatttggccttattatcattcaatcctgaacaagcactgaattccctatatgaatcaaaaatacacttaatggactccacagaacccttacaaaagacattaaggtcatccacaaagcataaaattgtcaacttaagctgtttgcaaagtggatgaaacttaaacttcttgactttagtcttcaacatcagtaatcttgtgagatactccatcaccgatacaaaaagtagcaaagacatcggatccccttgtcgtaatcctttagcaccttggaatttcttttgaactttgccattaaaaaccaaagaataagatgttcccctcacacagaccatgatccatttaatgaattgagatggaaagctaaaggctttcaaaagcttttgaagaaactctcaatcaattcataagctttacaagatcaatcttcattaagcatcttggagaaactatcgttcgggtataacctttgagaagatcttgcaaaattagaacattgtgagccaaaactctattcttcacaaacgcaccttgattgctatgaataatgaaggaagaatcacaaccattattttacataacaactcggggatgcacttgtaaattgtgttgcaataagctattgggcgataatccactgctcgagaaggggtgtaaaactttaggtatgtttttcttattttttgcactataacgtggcatctagctggatgacacatgtcctacattcctcaacttggatggatggttttgttgggttttgtgcc

SEQ ID NO: 382799 - DNA, 991 bp, Cannabis indica
cgtggactgcagtgttagggggcttacgcgcagttatttttcttttaatgtttttaaatgttaaacattgtggatctgttattttgatttgactagttcttatttaagtttagggtactaaaaaagttttttttaaacagtgagatctcatgcttagatatttttcaataaagaagtattttattgtctttatcttaataaattgttttatacggactatcttatgtgacatcttgagaaattgggatgttacaatgtcccgacaaactcatttcaagcactaaaacataacaaacagctcaaattataaaatcaccattagagggcatggcttgagttcttcaactcaaaccttagccaaactcatcaaagcttaccaatgcagcccaaatcaatcaacgaaaacttaatctaaccccaagacacaaaatcaaaccactccaatctatatagtgacctaatactcaaaattcatgcaatacacaaacaaaaacttaagagaactaggaattgatgtgttaaaagggtataccttagattgaagcacctaaatcttgctacaaagccttgaattgcagcttgaaaattccttccccttgctggttctagttggttcgacaaagagagaaaaagaaagaggaacaagtgtatgtatatgatatgtgggtttctagtttcatccatgaatataggattattctaatttaattaacttttatttactctacctataccttacacaaaagccacaaaaagacaaaggacattttaataaaatacccttttacccctagtcaaaggtcaaatattaaataataaccaagggtagtttggtcaattcaaaccctgttaaaaaaccaacaccttcaatgtttaacaataatgggttaatttcacaaatgtacaaaaacaacaaaaaaaaataacaaaaatacggtttcacggaattttaaacattttaacaatttttttgattttatttacataaaat

SEQ ID NO: 382800 - DNA, 5028 bp, Cannabis indica
tgttgatttaacagcaaatttgagagagatgatctaaaatcgaatttagaattgcatggcataggaaaagtataagattgagagatttcactaattctatgagtttcatttaaagagaatcatattgctttattattacgtaattgattaacattgaataaagatatatttttagttaattaagttaattttattattattcgagagaggttaagagactatattaggattcttgaaactacaaattatagaataaattagaataattggtaaactgagaatcataatttaaaatagaaaaattaatgctctaggtctttattttctgattaaaatcgttgtttgtctgtttacttttttagttattttattattttatttttaattattatttattttgaattttctaattaaagtataaaccaaaaaatatagtaattagtgaaatttagcaatcaatttttgtaggtttgttaactattttaaaattaaaactttgttataataacgttgcacggttgtagtcaaattgtatatcaaacattaacaatatttgtattgtttaaattagtagctgagattttttcttattgttgcaatcttagaattgttttgttttgtttttagcatacatattttaactttctcacttaaggtctaagattgctttagatattaactttttttttgcatgtagaatggaaggtcttcccttgttgcttgtcatgacacgcttgttcctttgtaatttgcatataatgaattccctttaaaaaaagtagaaatcttaaatgaagtaataagttcttcaattaacattctattctagaatgagtagttaaattgaccgtagaatgagccaactaagattgtattgtaccaaatcattttgagtacatttaatctatactatattatagttacatgtgatgcttaattttagtttggattttatattttactttttaaatgtcgtgtttaagttaaaaataaatgaagtttgatgtagaatgtttaaaggaaaaaacattataatagtttgaaaaaacaaaatcaagtaaaatagtgtaaaaagtttgatcttcagccaatctattttgttggtaatcgttttactaggaagcatagctcattttttgagcgtcttgattgagccattgcttccaaaaaatagtttgatctctttcctaatgctaccctttcagcatcaaaatttttatggttctgatcattgagtgttaaattttattcttaatgatgattgtatgaataataagcataaaaggaggtttgtttttgagaatcactggcttaacgagccttttttttatcacactgttaataattcttggtccagtgccacgggtagtaatgttgttaatcctttagagaagcttattgccaaacaaacttgttgtgttaactctattaagacctggaggcattcggtagataactttatctagaattaaacatattgatgatatcctcacctctctctactctaatcttcccatttccaatgaagatctcactgatgctaggcacttgcaatctcaattggatagtttgatgcataagtaagaacttgttttggaaataaagatccgaaattcactggcttcaagccggggataagaatactaggttctttcatagtaaagcctctgccaggaaaaggaataaccatataagatcacttaatcttagtgatggtaaagtgatctcttcctttctagatctgtggtttgagattaaggactattatgctaacttattcagcacccaaaacgttaacttagatgttgtttatgatatcatttcagtggtggatagaagggttagtgatagctaattttcttttctgtctgagccttttacttcggaggaggttaaatttgttctttttaatatctctggagtcaaggcaactgaccctaatggactcaatgctagtttttatcaaaagaattggaatatcgtaggggtggatttttgtaatgccattcttagcatccttaataatgatgcggacatggctcctattaatagtacccttgttttccttattgccaaaaggtctaatgcatcccatattagtgactttcgtcccattagtttgcgttctactttttataaagtttttgccaaagtcattgctaataggattagacctgtgctttgtgatctgatatcccctacccaaagtgcttttcttactaaccgtgttattttttataacatcatcattgctcaggagcttattcatgccattaaccataaaaagcatgggaggttaggatgggtagggcttaaagttgatatggaaaaggcttttgataaggttcagtgggattttattgaagctattcttcagcattttgggtttcctaataggttagttggatttatcttaacactgttactattagattcaacattaatggtactatccctgattcgatagtgccttcctggggtattaggcaagggaatccactttcgtcctatttcttcttgctttgttttgaaggtctttctcatgcttttaggctcgaggagaaatactctaggtttaaaagtatatctatatctcataatgctcccttggtttctcatctcctttttgctgatgatactcttgttttttccactgctacccagcaagcttgtaaatctattagggaggcttttgatatttataaactggccacaggccaggaggttaactactctaaatcgtctgcgctttttttgccttatacccctttcagtattttggatttcttttatatcactttaaggctgaaacctaagccctttattagtaattaccttggtgttcctctttgctttgagcgttccaaaaagattaacttcaattttctcctggataggatgtctttatatctcaatgtttggaaccataggcttttctctagagctggaaaagaggttcttttaaaagctgttatccaagccattccttcctacgtaatgtcatgttttagaattcttgtttctatttgtcaaaaaaattgaaagtcttatggctaacttttggtaggggtcgattgggaaaatttttaaaactcatgaaaaactggtcttttctttgtaactgaaatttttttggggggttaggctttcgatcacttattagttttaactaagtcatgttagccaaacaaacttggagaattttctctaatcctcagtctcttttagcatccattttgaaagcaaagtactttaaaaataattccatattagaggcttctttagggcattccctttcatatacctagagaagtttactttggggaaaagatcttcttaaaaagggtcttgtatggaaagtttgtaatgggtgcactattagaactttagaggatttttggattcttaataataaaattgttcactaaaagaataattttcatcctccctcaaatactattaattatttcatcaaccacttggggaattgggacttggacaaacttaattatcactttgatgatgacaccatttctcaaattcttctagtgccgattggtgacacatctaagcctgattgtctaatatgaaactttcattccttggctgtgttttctgtcaaatctacctatcattatgctaaagtggcttctcttcccccatccccttcgaatttccctttagttaaaaaatagtggactactctttggagtttgcataaccctcaaaaaattaagcacttcatttggcgtgcctttcatcatgttcttctcactgcctctaacctcttttccaaacacattacccctagccctaactattcattttgtagctatcttatggaaattgtgacacattccttgctagattattccagagttagtaaattttggtgtgagtctccttttaaaagtttctacatgaataataagctttgtgatattaaagactttatttttaatgcttttgagtctctgaataaggatgatttgggttttgtgttggggtttttatgggtaacctgggataataggaataagactctttttagtaaaaattatttgtctgcttctaacactgttgtgtggttaagatcttatcttaaagattacaggaatgctcaaataaagtcccctgatgtcactcaaccttcttccatgggggatcatgatcctgcggttgttgatcggggttctttcaaactttgtactgatactacaatagattacaaaagaagcaaattaggattgggagtagttgtcaaagatgatcatgataatatcattgcagggttggccattccaatttcaggattgtttgattcaactcatgctgaagctttggctctcaattttgctttaagatggtgttcagcagtgaatctcccagttttaaaggtggtttcagattcaaaaaatcttgtgaataaaataacaaactgtaatcatgatctatctgttctttctgatttagtgagaaatatttgtaattctttatcaaactttcttaaagtttcagttaactttgtctctagaaataataatattgatgctcattgtattgcaaaaaaaagttttgggacttgataagaagttagtgtggaatgactctcttcaactttgattacactataacttgtatttcatttatttatcaatgaaagttacagttaaaaaaaaaagtaaattagtgtaaagttttgtgaaataaaaattgaacacaaaatgttagtaaaatatatataataaaagcaattaataattgaaaacaaaataacgtgtgatgttttgatgattaatgaaaaaaaaaatacagtgcaaagctttgataatcaaaagacattatataaaattttgaaattaaaagaaataatattttgaaaatcaaagagaaaaaactacataaagtttaaaaattattgtatatatccataaaatatgatttacatttaaaaagcataagtgtcatttggtaacacttttgttttctaattttttaatcacaaaatgaaagtaaaatttttatttt

SEQ ID NO: 382801 - DNA, 1780 bp, Cannabis indica
aaaatcaaatttcccatacttaatcaaataaaaagacaaaaaagttacgctctcgttttctctctttggacatggcgattggcgattcccctatgctctcttcggaagagcctattcaacagaggtgctctgaaagcatggcgcaaatggaagagctgctttcccaaacaagtaaattaacggtcaccgacgaggacggatgggaaatcaacgaggaaggggctgaggatatagggaaattgtgtctcattgcgcgactttgcaccatgaaacaattcacccgttctttactaaagaacatactatgcaggttatggaatttgggggaacttgattgggacctgaaaataaagaaagtaagagataaagctctgttcttgatcctttctttcaaacagaacattacgctcgaaaggatattgtgaagaatcccttgggttttgaattcagggttcctgatacttgaaaggatgaaaggaatacccacgaattgggagaagactttgacttcgttcaccatatctgggagagtgcttaacttaccaatcaaagcaatcacaaggactaatatgctttgattggctggtatggctggagaagtggtggacatacaagaaccggacatcaaccgaatcacaatcaatgggttctttaaattcatagtaaagaactccattgaatccaaaatattccctggctatttgttcccccatgatggacggcgtagatggcttcaattccagtatgacagattgccctatatgtgcttcaattgtggaaagattgggcatgaattacgccaatgctcagaaattcgagctactgtgatgaaggaaaatggagatgtggctccagcgtatggtgcgtggctcaaagtcgatacgacggggagaatcgaatcaactagtaaaaaagagacccaactaataaatcaaacaaatggccaaggagtagacaaaataccaccatcccaggtgatagaacaacattccaaagaggaagagagatcaattcaacaagcagatcaattgaaaggtaaccccatccatacttctgacattaataattatcaacaatctattacaaataaagaggatactattctaaccataaactctattcctacatatcaaaatcggactgaggattgcatccaagaaaccatgactatcagccaggaacagaccgaaatgaccatcaggaaaagaatgggaacatatatggggaatgaggcaccaatgaacccaatcatgaatagatcttgcaaggccagattcaatgagacaaaaagcatggagtcggggtcgagcagaatcctttttgatgtccctatcacttatgatgctggaaaaaacatacagcagaaaaggcaacgagaaaaaagaagaaaatttgtgctaaaatcgggaattcgatccaagattcaagcaacagagactaaagaatggggaaccagatttgatgctatagcaggggaagtttctatgccaaatgattcaactcctgagcagactaatgaagcggcgaactctgcggagcaagatcgccgaggacaatgaattcacttatttggaatgtccaagggattggcaacccttggacagtgaatgctcttgccactcatgtgaaagactttaatcctggttttgttttcctttccgaaactcgttcgaaaagccattacatggagacgatccgtattcggttggggtttgaagggtgcttttgtgtggatgctaaaggtaagagtggggggctggctctcctttggaaggctcct

SEQ ID NO: 382802 - DNA, 2411 bp, Cannabis indica
attattattattattattattattggagaaattacaatatctattaacaataaattggacaaagttaaaattatagtccaaagagaaaattattgaaaatagacatacaagccatttaccaccagcaatcaaacattaaagaaatgtgaaatacactaagttttcaaatcaatttatcttatcacagaaacctgattatcaatcaataatcattcaataaaaattaaaaaataagaccaccgactaatgaaagattgaagcacataataaaagaccaataagtgcgttatttttcagtttttgttgcactgtgagttttttttttttgttttttggatagattagcgaatgcatgcaaataaatgtctaattaatcaaaagtacaataaatctgaaatatatatcatcactagtataaatgagcatacttttaatatgtttggtttctatcatgatggagaacttgacaatgccactaataattaagagctttggcaagcgaataagccaaaaaaaaaaacaagaaaaacaaataatattaatattaaggtaactaaactagctagtagcagtacgtagagtaaaaatctagtgtccactcaaaagtgacatgaggcgggaccggaccatgaaaattcaagctagaactagacacagttaacattatattatgtattaagataaagtcagaatgtttcgaaaaatatattccgattgataattgcatttgtttatatatacacttaataaacaatacttgagatataatttgaaggtgactaatgtacacaaacatatatgtgtgtatatatatatatatcgctacttagctaggcttctttttacctacatgggaaacctcattgaactttcccggaaatttatgtgggccatacctgctctacctatatataaatatatatacacttttcatctacattattaattaagtggtataccgtacaattagcctcgatttgttgagccaaaagtaactttgtttggttctaatgatgaaaagcagaagacaaacaaagagaatttggccaaggaataatataatcaaacttaattgtacatacatgtatttttgcaaaaaaattgtctatttgcatttttcctgaactgcctccctctctctctcgactctcacacacacaattaattactattttaaatgctattaaatgcagaagcatatatttgcaagaatacgttaccaatattaaaggctcaccctttaggtttagtttgggaagcagtttggattgaggatgacccatatcctcttttttgtatcttggagttatatatgcgatttcttcaatgcatactttacatttcctaaaaaaaaatgcttatacattcatacatcgatatatatcactgtgaaaaaatgtttaaatgcagatgataatgcaaaaatttgattagagaataagagtttcacatattataagcaggggcacatacatgaacagataagttctaatacagtgttcttcctaactttgtactcaatatcgtgtttaatttccattaaaaatgacatgtatagatgtatattcttctattccttgtacattaattcgaggatatataccacaataaaccaaaaacacatactggccttgtggaaaatcagtggtacagatatattgttctgtatatatcagttgtcggcagtaacaatatcatgtcgatggacagtattctcctttaacaatacccgtactagtattaactaaattctacatttgtaacagtatacttcttattaaggcgcgacagcttaattactcttgtcatgaagtgtacaaactaattaaaaactagaggtgtcgaaatataaattgtgttttagctggatgaaacaacacggcatgattaattaataataatatattgttgcttcgggaagtaaaagatgaacgaaaatatcaaattttggttgagttctttactaagaggttctctttaattcgttcttagtaaataaataaagaactgattatcatcgtggccaaagatttttaaacatcccgagagctccatcgaatgacttcaaattgatgcaatcattggcctttttctatatgtggaatagactgttagcatttataaaacacttagcgtgcgtttggaaagtcacattgtaattggatttgtgtgtaattggaggtaattacacaatttggcatgtttgtctgaccatgtaattacactgtaactgtgtaattggaagtaattaaggggttccaattacactctccaattctcatggccccccatgagaattgaatgtaattacactgtgtaattactaaaactttccatattaaacattaactactaaaaaatattattttcccatgtaattactaactattttgccaaacaagatattagga

SEQ ID NO: 382803 - DNA, 4798 bp, Cannabis indica
tataattcatcgtgagaagtacatttttaagatttagcataattcacaaaccacattatttcgtattaagaaaaagaaatggccttatgagcagttcattcgttttattcatttccaataattataggcgaatataaacgcttaaatgaatcacaagctctatgcttttgtacacctgtcactctcttcaactcaaaaactaaagcaaatttattggttaacaaacatcatagagagcctgcttaagagtccaattttgtatttaggcaatctggttgacttaaaagcctgagaattgaatttatttatacaaagtacaaactcaattatgacaaagaagagtgacagaaccaatgttgctacttatcccacttaattctttcactcttcctaagccaaaagaaagaactacactattactcagtacacaactctaatgaactatcaaactcaaaatgattgttcattgaacctgaatccggttgctacaacttcattgctcgtgtccgacgtctccccaccgaaccttgtatcttgctgcaagataatgggctccaacaggacccctgcttccatagggataatattctgggattatctttttctcttcaagctctttcaagaaaggtgtaaacaatgaccaagcagcatccaattcatcacttcggataaacaaacgcctttctccttctatagcatccagcaataacctctcgtaagcatctggaatctctttcgagtatctacaaggaaaatgccagagacatttttataaccataaacaatatattccactggaatagaatagataactatctgtacaatattaataataaagttaccgggctgcatagtgaaggttcagattactacggtcaagtttcattccaagaccaggaaccttgttattgatcttcaaataaattgcttcatcaggttgtactcgaataacaagctcattagtagctcgatcaagatctgttccaaaatttcggttatataagtttccaggaacatgcctaaactgtacccttatctcagccctggaaaagatgaacagaaaattgaatatcagaaggaaatatgaattgtcaatcaaaaactagaaaaactaaagacaatggagtattttccttaaaaaaacaccaaccccttagtatgtaatgcttttccagccttcataagaaaaggcactccatcccatcttgcattgtctatgaagagggcagctgctgcaaatgttggagttaagctgcccttagggacagtttcgtcatctgtgtaagatgggtaattgatacctcctcttgtatggcttttatattgccctacaacaacatcgtcaagtttcaccggccgcattgaacgcaaaactttcacctggcaccaagcagcttaattgttcagaagcatagaatataaggaaaatcaattacaagtgaatcaaaatgtcaaaaaaattacagtagcctgcttttaagatatgcataaaatgaagtgaaaaaaccttctcatttctgatatcttcagcatccaagctgactggtgtttccattgcaaagagcgctagtatctgaagcaagtgattctgcattatgtctcttattatcccataattgtcgaagtagctacataaaaacaagaaagaatctaagacataaactcttgccaaagatcagggcaaaaagttaccagtaattggcaaaagaaaagtaccctccacgaccctcagtgccaaaatcttcagagaatattaattggacattcctaatatactgccttgaccacagaggttcaaaaataaggttagaaaatctgagaacggagagattttctaccagctcctttcccagataatggtctatcctgaatatttgatcctcttctaggtactgctttagggctttcgtcaaagcagcagaggattctgaatctcggccaaagggtttctcgacaatgaccctggtccaaccattaccagaggaagctgacaaacttgcacacttcacagcatctatgaaaatgttcggaggaatagatagatagaagaggcgattggataccctaccaacctacaaatatatgaaatcaaacaagtcactaatggaatttgatgattagtttcacaatcgttagaaaattataaaatgtacattatgcaagcccattcaccaattacctcatgttcctttaatttcttgtctagctctgcaaagtttttctctgaatcatactgaccagaatgataaaaacatcttccgagaaattgttccatcttctcaccacaattttccctgatatccaagaaccaacgtgtcatgtcccaatcaacttaaatagtacacgagcaacaataacttgggctataataactaaaacaaattaagaatacagagaaaaagagctgactttcacctttgatcaattctgcaagtaagtgttttactaaccataattctaagctctgcatcggtcatcttactccgtgcataaccatacactgtaaaatgctacaacagtaaacaactgcaaattatatactgacattgacaagatagcactagagccacaagttttcacatgacaaataataagaaataaaccttggggaggaaaccctcgtagaaaagtgcgaaaagtgcaggaaaaattttcttcttggcaagatccccagaggctccaacaactgtaatgctaacggttgattcatttccactgccatcaaatccagctgtttctttcaatttgctaaggggagttttattctcaaccgggctgactgttgtagacactgaacctacacccaataagatacatatactatcccaataagacttcagaatagagagaatgtctaaatggtacccccacacacacaccaaaaagaaaacagaaaaaaaagaacaagttacaagttgaacttcacaattaacaagcaaaacaaaaaaaaaattgaatccaatttgtattacttcttcataaatcaactaaccaccaaaattcaaatttaattttctgcctaccccacacacataatataagcaaatttattacactatatgttacatacacacccaaaaaatcgaatccaatttgtaatactctttccacaaaacttcaaattccatttccttcctaatccacacataatataagcagatttattcacaatagtaaataaatgaaataagaacaacaaaaatttgcatagaactctccgcaatacctctagaggttccaaacacattgaccgcaggagcctccacactttgagcaggtgcagcggcactagtttgttccaaaggagtaacctgagctcttacgcaacctgaacccgaatcaatacaatctcagctatattccaacgctacattagaataaattactctctatgaatgagtaaagaagattaccagatgaaatcttggaattggcaagggaaatcgaagtccatggatggaagtttcgaggggcggaggaaggtcggaatgagtagttggaagaaagtcgtgttgatttggaaacgacggcgtttgaagcagcaatggcagccatgggagattgagaatgagaatgagagagagaaagggggggttttgttggtttaaatgaagaagagaagagacttggattgcatcgaaggggtgtttgttaggccctttgggatctccgaaaggatgttttcttcctttcttagctttgtaatttgcattaaccaaaaccaactctctctctctctctctctctactattgcaagaagaaaaataagaagacaactagcttagcttagcttaggtagccaagttcattttggtttatttatttatttttttgttttttttaattggttgtgttcttttttttcttttttgaaaaaaaaaattaagttctgatagattagaccaattggtcgttacaataggtaagtaacatccatattgtgagtgatgtccaaactcaaagcctatttagtaatattatgggtagcaagattaaattactagatattttaaaaaaattacatcccaaaaataatttaaaagaattcaaattagtaaatataattgcatattttctatctaaaagtggtatcttttttttttgacgaaaatgtaacttcagcagaagaaagctacaaaactagaacagattcattccagctcaattctttgtctagccccaaggccttgcgagctaaatgatgagcattgtaattgtacttcctgtttacatgtcgaaggctaatattggggaagaaagacaaagaacttctaatatcatcaaccacatccgtgagagcataaagattttgcttctaaccacaaattcgatctacaagaatcctggaatcagtctcaatgaaagcaagggggattttgatatgatggcaccagactaggcttgctcttaatgttaaggcttcagccatcaaatgttgaaagttactagttgcagggataaaaagaccagccacaaccctgccactccaatctttaataatagccccataaccaagcttgccttgatctgaactcagtgccgcatcagtattaagctgatagaaacccggagagacatgtctcgacttgccaggatagtgtgtggccttagatgtattatgatccctcatattaagttgtgcttctttgtagacatattatgatttgcaaataattttttatttctaaggttccatattgcccagacaatagataacaaaagtgatagatcctctttattcagctaagagaaaccagagaggaaaaagtctttgatatcagtgttggaaattatttt

SEQ ID NO: 382804 - DNA, 4692 bp, Cannabis indica
gaactaaatcaacaaattaagcagagttatcgctttaaaagttgctgaaaaagaaagtcttgataatgaatgtggtgataaaattagagttttgtatagctgtaaaaatgtgatgtggttgtctctaggatttatgagttataaacaggacgtaaagagcagtcaaacgaatttatctattcaagtcttattatcttatatttttatatttgtgtgaagagtattttcttgtgagaaaacctagagtattctactaaattttagtttctgttttattgttctttcactactcttgaaatggggtgaagagttattgaacaagaaaaagaaatcttcgggagaagacttgtccaaaacttacttcgagaggaagtaagtaaatgtatttgtaaatgattttacaaaaaagattgcgacaaagttttagagggagtctaatgtttaagtgtatttgtaatttttgtgactttactaattgatttcattatctgaacgtaatcccatgaattatagttgaaagaacactgataccatgtaatttttaatctgttactacaagtcgttaccgttgcatttttaattacaattttttttttaaaaaaataaattagtatatgcgaaaataccatttttcatatactattgacatgttttcgaaatgggcaatatttttattaagaggatcccaagattttcgtctcaaacaatatctaagaaaggagaaaatagtccagaacataaactttaatatttcagcattaatattaaataataataatttattcagaggctagaattttttagaaggaaattttttttgaaggaacagaggctagaatttaagcaacgactatatattagcacctagaaagataattcaaaatgtactactgtaatttgtgtttcattatacacgtggctcaagtaattataaaccacacatgtaagatcacaaagaacttgaattgtaaagaaacgtatatacataaaaattacgtacacaaccagagttgaaacagattctagattaatatataataaaaacatattcttacgacaactgtaacgggtaaccccatctgtaacgtctactttttatattctctacctaattcacttttacgtttttattattgttcatgctatatgatatctgtaagggttgataataatattggaaatttataaattacctttacttagcctaattaaaatgtacacaaaaataagattcagacaaacacaagtaattaaaatatttatattgcatgtatctgagtatcaatgtgtaataaaatttccacagaagaataataggctgaatattggccgacactactgatgatatagtaatcatatattatcatgtcacaattatttgtgttagcaaaaaaaaaaaaaaaaacaattatttggtttttggcgtttacttatgtatgtgtgccaccatattttttttctgaaaaagaaaatgtatgtgtgaccaagatttatttttaattttgctttcaatttatatgtataaagaatattaattatggtcaaatctttacattattattggttccttaatgatcataatccatttggtgataaaaagcaagcacaacaggacaatagagcccaaaaacaatgtgtccctcccgcccaactaatctctacacaaggattcaattttctttcatttcgttttcccacatggtttagcctttctttccttttctcccttattttcatggcaaacaaacaaacacgtgggtgaagaagcgggagagacgcgataagggctagaaggcccttctatacaatgtatataaaatttggatgatcaccaaccaaggttataatgcaatgtcattaattatatgtgctgccaattaataagtgactcatcgtaatattttctcatctcaaaatatttcgtaatattttcataatgtaatatcagatcatgagaaacaaagtttattttaaaaactcaatcacacatgcaaatttgtgcacatgattaatttctaacgttaattcattgaagagagcctaactatcagatcgattcagtactagaactatacctaaactaaagctttcaactactaatataatgactaatcttaactatataaaataaagactatggtaagtgcatatatttcttatgtgataatatatatatataagatgtaataaaaagatatcaaccagaacatgtatattatcgatcattaaagaagataattagaaaagcaataaaagagtttcatcgagtgttctagtttatatgagtaggttaagcaaaactgacctgatgcaaatggcgactttaattcttctctacagagaccaaaaaggagagctggaaacctggtccctacagactttggtagctgtacacatcttcatgagtatgtatatataaataaacaaagatagcgaatcccaaatgtataagctagacatgtgtacatatatatatatatataaataaaacaaagatagcaaatcacaaatgtataagctagctagacatgtgtacacatatatatatatatatataaataagagatagagagaaattagtaaagagggtatgttttggtactgccaatcaggttgtaccaaaatttatacatataataaaataaaaaaattaaatgttggttgtgatataataaaaataaatagattgtaggatatggaagtttttgagccccatatttaggtagctaaggaaaaagatgagccacctatgtgtgtataatatatatgcaaccgaactggtccctagttgtaaccaaccagcatatctcctcacgatctcttctcgatttcctctcatttaaacccaaaaggtgtgcacgctcatttccccccatttgctcttattttttattttctaattgcaattatatactttttctagggtattattgcaatttacaaaactttaattgtttcactcacatgccaattaatccattttttctttaaattagattttggcattcttgctttcgtatataattatctaaactgactaactagtattcttatactattgttcagatttccaccacgtactacaacttccaatatatgatctgatttcttctatacgtaaggaattattattggattgtttctaaactaaattaattatatatacttcaataaataatatgacaataatgttctgggttggcattagttggttaatattattattaatacatcacttgcatataatatacaatatatataatattaaaatatatgttggtgaatatgtttaaaaatatacatatatatatatatattagtgaatatcgtcaaaattaaatagtcgaaatatcatacaataatttacttatgcatgtgtgagttgtgtaacttttttttttctttttgaaggattcatatgtaacattaagaatcactcaaaagttaagttacaagatcaaaagatacaaacattgaaactattgcaatcccaaattcaatctttatccgttcctaatgcgttttttgctagtgcatgtgcaatggaattgctttctctaggaatatgataaattttggcactaagaaaagataataagatgataacactctactaactaagtctgatagaggagatttgtccttccacttgtgcttgattttattcactaaaactaaacagtcggatctaactgaatccaaaaaaaatttcacatgttcacaccattgaagagctgcaaagagggcttgagcttcaaccagaattggaggaaaaacaccaggcattgaagaacagaaaccagcaacaacctcacccctataatcaatcttaattacaatcctctctactaagtgttgcatcagtacaaaggacatacatcttcttgagctcttgaatattcatgtgagtaatcaagtaactaatttttcacatctgcaatgggagttgtattagtataaaacaatgaatgatttctcccattccaaatggcccaaagtatgctaaaacataaacaaagatcttccttggtcaaattatcaaaacctgctaatagaaaatcttttatgtcatcaagtttatgatcattataaaattaaaaaaatctagttttaccccaaatgtggactgctctggagcaccctaggaggacatgagtaactgtatcaacattattagagcaaatagagcagtttagattatcaagaattttcctattaaacaagttttaagcagtgggaagaacatgtttaaaagccttccgaatggagtgctttattttaggagggatgtgaagattccaaacacttttccacaatcttttaaaataatctgagtttgaggaagaaggagaggaagttgtttggggatctcgagaagaggcaaggtgataggccgaattaacagttaaggttcccgaggaatgatggccccaaataagagagtcttctcgggtaggatcaatggaaatagtgagaatggcatggatgatatgtttggttttatgccctaaataaaataccatttcaatgtaatctttattatttaaatcaataaagaaacaaaagtattttcatcacttatttgtgtgtcatttggttcatgttatcatttatttgtttatttgattaataaattcatccaaatccttatcacatttatattcttgtttattgtgtcgtcagcacagtgga

SEQ ID NO: 382805 - DNA, 5055 bp, Cannabis indica
ctataatcgaattgaatcaacaagaaaaatcacaattgttaattaaactcagtaactataataacataggtctttcatttggtattagagcttgaaaatttagaataattttttcttcaatcctcgtttcttggttactatgttaaatgatcttattgaatttattttcctctttagcatagttacatttcttgaattctggttgatcaagtcaccactaacactctctgggtcttgactctaggagctctcaattgttctggttagttgatatttattttctaggatgaaaatgttcagggaagaaggttctatatcgagccatcgatgttggaagtggccaactacccctattggaaaacaaagacatgtgcgttcttgaaggttgtcgatgaaatagtcaagatggccgttgaagacggctaaagatgtccgactgtgacggaagatgaggtcactaaacctaaaccaatgagtcaatggactcaagaagaaatgtgatggacatggacaatgatgatgtcgttgttctcattgcaaacatagattgagaagctatattgaattaaaaaaaaacaattattttaaaaacgttatagaaaaagatatatattagggtattaaataaaacaacaatatttttgaaatttaattgcttttttaatgttctaaattgtaaatttttcataatttttttaactgtataaatacttaatatttataaaattgtaattttcgtctaattttataaaagctctatttgaatatattaaaagaagatttggacataacttatgttttcacacccaataatttaaaaacatgtgtcatgtgtaagacactaacgaagtatgtaatgataaaaccgaagtaaattattttttattaatattagatatttatgccactaaaaaattatataaatttatgttgcttacaaactcaaaattttaagtatttatgctattatttactcttattgttattaaatacttattttttaggttggtgtcgttgcttcgatataaaaataaagagggagcttttgtgttgcatttttgcaaattaaaaaaaaaaaaaaaaaaactttttgaacaacaaaccccatttcataccaatatcctcttactgttaaatacttaatcattgctggttgaatttacttctcaaaataccaaacttcgacaatatcagcaacttctcaaataaccaaaattttatgaaactaaaacagcttccttttcaactggcaggaaactaaatattttgacattaaaatggcttaaacctttttcaaagggtcacctcaaaaataactccttccaaattactaacagcacgccgagttccaactacttcggttatctgcaagctgcaccgcttagcttcatttggaaccactaaatccatgctagacaggaagaaacataagtatgttatgtaaagaaacaaacaactgggaagaaaagcaaacgagtatatgtacagtgtgatcatctcaaaatacagtttaatcgttgggggtaaagagatttctattataatatctcattatagataagaaccaatgtgagcttcttacaggtaagtagctccagttaatacgtgcagatttagaaccatttttctaaatggaaaatatggcaaatgcctctttcaagaaatgctaaacttaacgctctatttgttcataaaacttgggatgagttatcataaaagaaacttttatagaaatttaagctaaataaatgaaaaaaggaagaaagattaaagaggcgggttagttcttacctcttagcacgggatacgtaggctagtatgaatttgcattctccttggcctctaacttcaaggagtttcttcactgtactgaaaagcaaaggaatgctcgattgttgaaagcttatgtattgtcaaggttttctttcctctccagtttggtcaaagcaatgctaaaagattagaacatgatgaagtacgtgcttgatttactaattagttcagatttcataacaattgaaatgaagtaaaagggaattctagaactgagaataaatcataacaattgaaggtacaagcataagtttaaatccaaatgtaataataaataaatggagaaatagagttcatttataaataaaaaacaaaaagagattataaacttgaagggcccaaaaaaagatcttgtttgatatattaatgcatgagaaaattaatataggaaatgatggtaaattaccttctggtattagcttttatcacgacaccagaagtttctttcagaaatatcgcaatcattagtattattatacctaagtaaaataagcactaacgaaatcaacagcagaccttatagaacctacatcttgtgagaacagaaaactaatacttacaatgcaaagcctagaataggatgatggacctaaatagtttagcatagcttttaacaaataaaacacattactaaatcaatgtcttggcatgtggcaccctttgtaagggtcctcaaggatttgttgctgtatatgtttatgttgctataagctaacaagagcaagatagacaggaaactcaaggatatagatatcagctccaagaataagatcaaatccactcgaatgcttttctaagatatcgcaaatctgctcagaatttccccactctagtttctcaaccaataattctgcgaaaagaattatattaaagaaagattgtaagaagtaatgaactgtaaatacgcatcttattataagaactttctctcaccagcatgagaagatgcatgcagctctacgtttttctcgaggatctgagacacacaaatccacagtcaaaatgcttgaagattacaaatatcctataaatgaagattacaaatatctcagaaatgaattatagtttcatgaccttgccttgattacttcatcgttatgatctgttaacacaaatttatggcaaaatctgctacttagtataccagtaatacctacaaattaaacagacagtcaaactgtggaagttccaacttacaatttagctataaaagaagggaaaacaacacctaaaaggtagaaaggaagataaatgtagtataaatgaatattattgttgcattagcaaaagttctgattgatacacaatacagaaaaatcttatgcataccgagaaaatatcttcctccaaacaccaagaaggagaaaattcacaaatttgctcatctattattgcaattcacgggatataattaaatcagctaaacgatttcccttctgctagagcctaatcaacacatacaattcagtactgagaaaaatctcaagcaataaattttatattgcactgataatatagtaactacttaccaacaccagaacctaattcaataacagagcatccttggagcagattaacattatgtgcaatgtaatcattcaaaagcatagctccaggccataccaattgcccagtcagatcaaaatcagctgcattatccaaataaaaatcccattaagaatagaaattatatagaatatagtatgggcctaaaacaacatacacatatcctaaggctatgttttgatattgaatttacaaaggaagaattctatgaggtaaaaagagtagagaaaaaatgttggaaaatatatttcctgaaatttgatagaagacttttattttcaaaaaatatacatatatacattttccgtttttgaatatgtgtataattgttcccaaatgttataaaaatataatacattaaacttttaaatcttcaagagaaagaattctcaattttttgtttgaatccaaacatgataaaatgagatcctttggaatccacctattcccaatcctataatccaagatccaaacagagggtaaagggatgacttggtgttgcaggcaaaataccctttcaaagaaaaattcaatatgtatgactgataaatgttatattagattcatctgaagaatgtaagaaaaatatgtataataatttagagggtaaaggaagttttttctacaaacttcaaagaaaactatgtataatagatgtcctttcgctatgactcataaaacaaatcttaaaaacgataatagaaatgggttcagaataagtttgaaaagtaccatactattctaagatcactggaaactggaatatcaaactctctgtatgtttctttcttcagtattcaaatggaagtgaaaagccattacaattgattgtatgaaaacacaataacttaaatacttccaaatgatcagtgaacttaaccccaaataccagttaagacttcatcaatatttgatatgtcatacagggtcttttgtagacaaaccaataaaattatcagatcatcatagctacacatcattatttgtttttgttattttaaaattggcttaaaatgactataaagctctaatttcagaacaccttctgtgacatatttacttagtacaagacagcttctataatctatataaattaacatatagttctcaaattatattatctaaaaatatgtgagaaacaaataaaatccatttgtttgcaaagtttgagtaaggaacttactagaagcagattggagacaaaagaggttgatcacttgagagccaaatgtgaattcagctagctggtaactgaaaagtgaaaacaagttgaagaaatagtattcttagcactctacacacttttttttagaaaaaaaatgaataaataacctactcatcattgataaagaaagatcggtctaagcaaactatatcttcttcttcttcttctttcttttctcctcctctttccattttcttttcttcactatgaagccgcttatgttgtatattgaactggagcaggagcactttggtttgtttgcttgcttctccgcttttttatttatttatttattttcaattcaaaagttctgttacatgtgggcttggtctttggcttgggcttgggaattaggtctgattaataagagggaaatttagatggtatactaacttttgccatttttttacaaaaatactgtcaggcggtat

SEQ ID NO: 382806 - DNA, 5969 bp, Cannabis indica
aggtttttcttatgtaatgattattgattagtaagttaatcatatgacatcactggagttactgtgcttatatttgttctgttaatttagtatagatttttttgattttggaggttttattggggggaaagaaacattaaatcttttgacttgattcttttcagttaattcttcataagacttccacagcactggggaatactatagaaaagatgcagaaagtagaaaagaaagatgccaaagtaaacaatcatatagtgcaacctgtaacaagtactactcaaaagacagagaagcttgtgtctcaagattacatcaaggttttaacaattaactatttcttttggctcatgcttgctatgtctcacaatatgtctgctacaaatgcttattgccttttcaaatatctatatgcagcctgtcacaagtattattcagaagacagaagtgtctggggctcaagactacaccaaggtttcaacgatttaattttcctgcatactaatgtttgtcttatctactaaattctgctaggcttgcaatgctcttgtgagatatgaaactctaactaatagtaactgtttatattttaatgtgtgtattgcatttccatcaatatatcttaaattgttttcccttcctagttctgtttcccattttattactcgaatcttttttgtagagaaaacaagtagctagcaagcaagagcttagggaatcagtgcaagagcttgcatctcgagttgcttccaaagtcatggttgaaacagcaaaagacatttcaccccctacttctgcttatcaatttgaggtttcttggcgaagactttgtggtgatcatgctttacaggctagtctcttgaaggtccgtaatgagttatcatggtttagttttagattttcattcttcattgtaaatataaaaaatttacctttcatttaaactgttcatgtcaatgagcttaatttttacttattggtggtcatgttaaaactttttagcggggcctgtagaggactgagaatgaattggtagatttggtattagtaattgatttcgagtcttattttaattctagtttttttttttatgtatgttgacacaacttcttgatgccacagccacaaattatttctcatgtgtccaaaattcatagggtcatcataagaaatatgcacaattcaataaaggatataatcagttgtttacttggtgattttcagtaatggaaaataatctatttattttgtaattctctaacgaaggggtttctttaggctatatctcctgaagctttacctcagatattcaagaatgctttgactgttccagttctagtggacattgtcaagtgcattgcatcctttttcaggtaatgtaatgtttatccccatgatgtttgtgttctgattttagctttttaatgtactcatcatgcacttttggttgacagagaagaaatggatctagcagtaagttttttggagaacttaaccaaggtcccaagattcaacatacttgtcatgtgtcttacatccacagacaaatcaggtatggatactcatacttacattgaattgctcccgaaatttgacatgctagacattctccattcataggacttttcatgttcacatttactaatatggccatatctatcaaatatctttgtgcttctaaaattaaaaggttttccgttactgtatattttagagcattgttgtcgtgattttattgatttaatgtcattgtgaccagatctttttaagatatggaacgaggtatttagtagtgaggcaacaccactcgcgtatgcagagaagctagatagcatgcgttcgaagtactgcatcaagaataaacatgcaatgctgggtagatgttttgagttcaccattttcgcttagccttatctctatgtaaatcattttggtaagacattaaatagctctaatattcttagtctgaatattttataagccatatattttaagttttcaaattgatttttcctctatgtaaatgatttttgaaagagtttatagaggtgcaaactcatttcaaggatgcattctcacaagagaacacactgcgacttgttactttttatcctttttgatgacatagaaatggaatgccttctgcttgtttgggtatcacattgggtgtttcactattcttagatgtataaagtgtgtgctgtgtgtgtgaacataacattttaaccacagttaccgatccattcttttctccagcctccatgtcaattgaatcttgattataaattatgatggttctgttgaaaaccccttctaagatcttgagaatgaagatattttttctttggattgttgcttctctgaacataaacatttggacgcaaaatgatactttgttggttgctagtgggagcagctacagactacagtggtcctgctttactttctcatatttatctgtctttttttaatgccatccaaataacagaggaagagtattaactcttacaccatcttattgcagagttgcctagtggtggaggctgtgatctgaagtcattgaagctaacaaatgattctacatacactgtaagatccagtataagtgaagtccatactcagtattttattattttggtggttctaccattctatacaagtcttatcccaagaaatgaacagaaagggattaattctataatgatagtgcaatctaatcatgtttatcatctatgtttgttacttttatgattaggttctttaattgagctttttgttatcttccactacacttcaacttcactttgtccctttcaaatagagaaaagggttaagtgaattagtttgatgagaattcatgttattctattttatcaggatcagtttatgacgatgtattttaagacatttgtctttaacttgcttaacttgggtcttaattagaagagaaatgctaaaaggcagtagtgttgtttagtaccttcttatgtgttaatattactattggtccaagtaagtatcgaatcccatataatttaatattatagcttttagggagtatcgttagccaatcgtaaggtaatatgtctagaagtgctaggcaccaccggtgcttaatagcaatgctccaactagaatgccaaagtctgtaacattgcctaacttgttaggtggttgatttaatgaaatgcaaatagtaatagtatttatttttagtttatttttggaatgatagataatgggaatgagtggtgtattgattaaagtttttctatatttatttggtaaaggtagaaaagaagggtataagagtcatttgattttatataaatgatgtatagagtgtaatgcttattttatttatataaatagtgtataatagtgattacattgtaattacattacaaagtttccaaaacaaaaccaaataataataattgtaatcataattcaaagattgattacaatctctctctctctcaactctcactgtatgctctagtgtattgtcatgtcatgtatgaatgtctcttttcaagtccagcaaaccctgggagtggaaagttggaccaccctggaaaaatacttttacaacaaacataatgtgcttcactttgttccattccctttttttgtccatctcattatgttttggattggcaagttccaatgttcagtcattatctaatttgggtccaaaattaaaaagccataaccccatccctcgatcattacaatataatttaatttagtttggtataaagcaacaatccaaacaaaaaagtacttgtttatacacataattcttccacatgggtggctatggctaaccttgtagctgtatttccctcgttcccatcactaatattgacaaaatctacacaagtatatctcatgtagagatggattaattctttagggcatttcaagatctaggtccttgtgttaattacttttattattattattattattattattgttatgtgaatagattattactactccattgatgattactacttagtttgtcttcaaagtgtcaaaaacttaattgcttaccaatatcaagacaaaaactttaaatacatagcacccgttacttgcttccaatggaatttaggagagcgacttggtatattttatatacaaatgagcacatatattatacatatatatttgagagaattttgtgtcacgagtttctaaagtttatgttgtaattgactaaataattttgagtattggtggttagtaccttctattattttgcaattaattagttatattctttaaaaattattatatttaattatatgagactcgatacttaattacaccaataacaatattgacaccatttgtacctttaaacatttctcaataatttttgtgagtataaaaagtactcaaagttggtaaaataataagtctgttaggctctatctgttcatctttgttaggtgttgatttaattaactatgtcacttcatagtcaaggttgtcctgagattgggtggattttaagaagaaaaaaattattgggtcttttatttaaaaaatatgtagtatttttaaagggaaaatattttttctagtccctaggcttggtgggccctaggcgcggctctagtctgccttagtccaggcccaaccttattcataattgatccttcacatatattttaactttaagacaatttctaacatgaacgaatacagaaaatataaccagttttgtcataagatctctaaatcagattattattaagttttattttgacaaaaaattagttcaggttcttatttgtacaattttcaaaaatacagggtctattgtcaattaacaaaatagagtgtccaatcggtaacttttataaaatatagggtctaaaatagtatttacctatatttttataatttttatttgtttgttagattaattacaaagtgatatgtagggctgagtattgatcggtgtggtcaattttttttgtataaaaatttatatttcgatttataatcttgattggtgcaatccaaaaaccgacagactaacctagaatttttcttataaccgaccaaagtaaattgtggtttggtcggttcaaaccgcccaaaactgaacttttttttctctttaaaataggggattttctttattgttactaatttattctctcatatctcttctagtttgagttatgtaaaaatagagaaaatgtgtgagagatgagtttgattttgtaatataaatattgaaagaaaaaatacttactcagattgagttatggagtagagtggagatttaagaatgtaatgattacttacaatttttaaacattgtaagattatgattgagaaagaagaaaagtaaagaggagagaagatatctgactttggggatttggttttgatggaaaatagagagactagctagagaagagagtgagtgactaagtgagatagtaacagtaacagaggtgagagagttgagttgatttgattggagattaatttttatttttttttttttttttgacaaagtgattaaaatcactcatgaatttacgacgcccacgtccgccaccggcgctggaaccttctcgaaccaggatagctcatcgtctaaccgcagagcatgctttgccaagccatgggccgctaaattctcagagcgagccacatgggacaaaactgcccccgaaaatttagacaataaagctataacatcttcaaacaatgctcctagctcgttgaaatacttcttccctttgttaatggccgtcaccaaagctaacattattaatctaataatatatttatagggacacaattttgtcccgtgatatatttttaatgtatttcgtagtacattagatgggtctcagggtacgtaataatgtgtctcagagtacgttattattttttaaccctaattacccttagatcaactccagccctcagat

SEQ ID NO: 382807 - DNA, 2228 bp, Cannabis indica
ttacttatccaaactaaatgaaaatactaattagttcgattggatgatagatgtattggatttttagacactccatccaccatctgatctgatctaagtggatatttgaaaataacatccaatttgatccaatcacaattggatatccaatatttagcagtcggttgtaattggatcgaatcaatttatgcacacccctactaaaagatactacaaatttggcacaatatttgttatgatacaaaatttatatcaccataaatacactattttattttattattattttaatagtatatttacctataacattaaattataaactatttatatatttttttattgttgtacataataaacaaaaacctctaactatccggtcgaaaagaaacaaaatctgatccaaaaagaagccaaaaaaagatttaccaaatccaaaaattaatctaaaatttagagtaaaaagtaaataaatagtgatttgtgattcagtaatagtgagccagaaaaagacaccaaaaatttaaaaaattgattcaaaaagtagagttaaaagagccactacttgtgtttcaaggatagtgagccaaaaagaaccagttaatgtaattattttttttaataattaattaattttgagataattttccaacttcttagctagtcataaacaaatagaattggcttatatattattcgatcaacaaatgtagtagttattaaatttacaacaaaagtttttttttttttaaaggaaaatttaccacagaagttggttgattttctatgagtaagattttggagtcttcaaatattgaaaatctatttaaataaaattgtatatgtttatatttttatataaaaatataaaagccacatgtatctagattttagataggaaaaaaccagatctagatcaatgggaatatgagcctttcataaatggatattttttttttcattagaataaaatgaataagaaaatatcctcaataaatagaaagaaaaacctctaaaatatcatagaaatcaatggatacaaacatgcttgataaatatctgtcaaaatgtccaaaattttcaactcaaccacctttttactataacaaatttacacagaaccaacaaattaaaaataattatgtgaatatatataatataggagtactgttatgtacatatatatactattacacaatgttaactgtttatatttttaaataaaaaccacaatacttttaactgtgtgattcacatcaattacacattattgtgtataattgatgtgtctgaacactatgaatatctcccaaaactaagtaattgaactatgaatatcttgaaaaattaagactagaaaactaaatcaatgaacactagatttacaagcttcctctgcattagaaacacattctaaccgaatagtggttgggtccccaagaaccgggtaaggtaacatccactataaaatcaatttaattacatacaccagttctgattttacaaatcaaactacataatttgaaatgactttacacgatgttatctaattcttgggcacaatcaagacaatagatctaaccacacttagatccaagaagataagctctccttgcttccacaaagttgaaattccttcagcagttcagatcgaactctcctcaaacattacagatacgaactccttcttcaacctcttgaagattcaatgaattagcatctgcagttaacaaaaaaacacgaaagaaatagtttgccctagcagagcaagaatcaaagacaattctacgaaagatgagagataggaaaaagcaacatgagcacattatatatatactgagttgtagaagaactgactcagctaactaacttcaacaactcaagccagctggcaccgactcacacttgaataaaagatatataaaagctaaaaggctgacatgggaaacaataaaataaaagagactaagcatatgcaactaagaccaacttagatggtcaattcaaaggaccaggacaataaccagggaaaagctaaaaccttaactgtaacgccctaaataattaggcacgctacccgaaatatttatgaagtcctaatcccctaaatgggattaccaattaaaatagcacagaatttaaacttttgtaataaacagaatgaaaataaaacttgtaataatttacatttgggatcccaaaatatttacaaactttattacaagtct

SEQ ID NO: 382808 - DNA, 1890 bp, Cannabis indica
aaaccttctgccctttcttcactgaaactactctccatctttttgggaaatgtcagctagttcacgatattacgagtgctgctagaatgacacgctggagtttggcgggtggttgtttgattttaaagaccaggacactctttggtgcttgtatctatgaaactatctggaaagaggaatgacatttttttatgaatgaaagaattttgactttcttgccatttatgatgattgctgcggaagagtttctgaattggacaagtttcttggtaccaatggatcgagagataaccttgactcatcctttgctggtgtagatgacttgtttgttgttgcagatggtcttgtagaagattgcgatctgatttacttaaaaaataactcgatcattcaattggactcgtcatttaaaagatcgtctactggtgtggccgtagtctagaaaagatgccaagacttggagaagctgttattgctgtggagtttactgaggttaaaatcaatggttttaaaaaagtggttattgagtcggactctgttttgggagtgaagggtttccaagttggttcaattccttttgagtggggttcttttctattttttatggactgtattaactgttttaaggactatgagtttgtgacagtggtgtctattcttaggttgtctaatcttgtggttaactttctctcccgttgggctcgagaggagaagcttatgtctcttagatgtttaagagaagtggcccctgtcaatatttacttaattttcgctttagaataaagtttggttaaaaaaaaatcaaagatctgtcccttaaatagaaaagaaaaatcaataaatcaataaaagatatcattgaagagtatatatcgagttaactttgggatggatcatggataataatcatatgtcttattctgatatctttatccggataaaacatataataacacaccctcctaagatattcagtatccatatattctataattattatattattttgaagaaatcttgtgaatgatttcctcaaattccctattaccatatttatgtgcgagacacgattttgtcccgtgatgtacttttacggaatgtattccgtagtacattagatgggtctcaaggtacattagatgagtgtcagggtacattactattttttaatcctaattacctctagatcaatctcagccatctgatcaaataactcactctctaacggctgccatatattacggaatacattccgtgaaagtacagtcacagcacaaaatcatgtccctatacgatgtatccttattctaaattgagagttttttttttttttttttttgagaaatgaaattgagatacttcaacatatgccccaaggcaatattatatgtatcatatatggcaacaaagtaatctcatccaagttaaaatgaccgaaatacttttaagctattaagctaatatataattgtaaaataacattacgctacactcaaaaaaaaaacatactcgtccaatttcgagccatacgtactctttaaaaagttttagcaataaataataataataatcataatgattaatgagaattacaataacgttaacttttaataaatgacccccaaaatgaatctgtacgtcttttcttccttctcgtacagagtagttatgaaaaaaataattaggagttctatttataagtctacaaaataataagtacacactatattaaaaaaaattaaataattttataaatcactcttactttttttaaaaaaatttgtcccattattttttatttattttaatacttattttgattttatttttatatattttttttaaaatatttataattttttaatagaattttatataactttttatttt

SEQ ID NO: 382809 - DNA, 1300 bp, Cannabis indica
cgagtagtggtggtggagtcggattgtttgagagtcattagggattttacaaaagtttaaacatatggcttctccttatcggccatatactttctgattgtatgactttgtgtttgggtgttgatgatgttctgttaatttgttaagcgatctgctaataaggttgcgcatgctattgcgcgatcttctcttgttgaggctgattgtacttattctggggatgcattacccatgtaattttgcatctttaattttgaatgatttgatttaataaatttcatcattattacaaaaaaaataaaaaaaaaaaaaacaaaaacaatgcataatactaattagagaagtcagcgcttcttttgacttatcaatatatatattgttgatatacaataattgagattaatttgaaattcataaataaataaaatacaacattattaaacacaaatttcttcaggctatatagtacaaacaatcacacttttattatataacgatcatgtacatatgcataataacgatcatacactttgctattacacatatatatatatatatatatatatagtttagacaaattaacatcataattattaattaaccaaattaataacgacacacacattataaacgatagtactataactaatcgtgatgtgtgtaattttattggactctcaacacaaacagcagaccttgtggagctttataatttaaaacaatgaaaatacatattatatattaatacaacgccatgatcagtgatcactaagcctgttcggctcgacttttctttatgaaaataagcttttttgcgaacctgcaaaaccatgcatccacatccatataaattattattagttttattaaatcaaaacttgtgagacccgatattaaaatatgtaccaataattaatagtataacacctggtattattaatttatcgtatatgtaaatgattagtaaattacttactcttcaagtgcatcttggtaagtttggtttagtttattcataacaatgcgtttaaaggtaggtagatcaaggcgagtaactggcttatgtagcaagtctttggcgtactgctccaatttttcgagattggtagggtcactgttatccatcgcactaagatcttttggtaattccgagtcctttcaaattatataattaatatatagccccatcaattaataaaaatcattaataaaaggaattacatccaagaatacacttggaatcaagtaaattatattgagaggttataactaaatagagttatactaaaaaaaattaaaa

SEQ ID NO: 382810 - DNA, 1839 bp, Cannabis indica
taaaattaaaaccaacatccaatgattacaaggtctaaacttgacatttacaaaccaaaagcatatcttgcaaatactattgataaacatgaacctacaacattcaagggtgatctagctagttctaagtggaatgttgcaatgtagcatgaaaacacttgtttaaggaacaagaaaacatgaacactggttcctagaactttagatatgattgtggtctaaaataagtgggtctactaaataaaattcaatgttaattgcatagttgagagatttaaagccatattttataggcattgatttctttgagacttataaccttgttgttgaaccttgcacaatcagaatcatgttcactttggcatctactaaaggttcggacattcagtagattaacatcaacaaagcattcccgaatggggagcttccagaagatgtctatatggctcaaccacaagattttgtggaccttcaatatccaactcatgtgtgcaaattacacaaagcaatttatgggttaaaacaagctccaagagcttggtttgacactctaaaaagcactctagttaagggggttacactaacagcaggtttgacacacgtttattcattaccaaagaaaatggtaagctccttatgatactggtttatgtggatgatattctcatcactggagaaaattcatctcaagtacaacacgtcatctttaccttacacagtacctttgctctcaaagtgcttggaccagttcactatttcttaggctttgaggtcaatataactgcctcccatttgcttgacacataaaaattacaccagggatcttttggccaaaacacaactcctagactccaagccacagtctactccaatgtgttataccacaaagctcaatgctaagtcacgcacacctatgcaaaatccaacactatataaaagtgtcatttgtgctctacagtatctcacaatgaccaaaccaaacatagcatttgcagttgataaattaagtgagttcatgcaaactccaacctttgaacattgaagtgtatgcaatagagtgttgagatatgtagcaagtactctggatgctggtttaaccttcaaaccatctaataggttggacttataagggtttacatttgcgaattgggtaggcgtcatgatgatagaagattcacatccgactattatatttttcttggaggaaactttatcaactagtgctctaaaaagaagattgtagttgctcgatcaataatcaaagtattgtgttgtggctttggccacttcagaactgatttggatacaatctttactctctgaactcatcatctctttgcctcaatgtcttattctttgttgtgataatcttggtgtattctttagcttcaaatctagtttttcatgcacgaacaaagcacattgaagtttaatttacactttgttcgtgacagggttttagctcaacagttggatgtccaatatgttgagtcagaacatcaaattggagacctgtttatcaagcttctttcaacaatatcttttaattatttgtatgacaagttgacacttggtctaaaccagtgtcacttgaggggaatgttaaagttagtcatgctcttagctcaaagtggcaagttagttaaagttgttagaaattgatcgacttagttagagatattttctctaatttatttagctataatttataactacttttagtataaatatagtgcaagccaaccattgaaagttgagcatttattccactctttccctcccgtcctctcattctccttctttctttcttttttaatcaaagtctaactctaaaactcc

SEQ ID NO: 382811 - DNA, 1762 bp, Cannabis indica
gagcgattggctcgtatgcaacttgactcctcatcacctcatcatcttcaagttgatcactcttcgggaccaccgccgacgggaggagtacttctcgaccgttattggctcgactacggccacggccacggtcacaacccaataccctcttcggccgttcatggcggcggtcactattttggatcgagttctgcctcttttcatcatgctgatcaatatcctctgggttttcacggtggttctacgccggaatctctctctcccacaaccaccggcgatggcggcgctgctgctcctgctcatcatcatcatcaccatcatcatgacctcgtaaaccttgacctttctcttcacttgtgaacgaaaaaagctagttatatatagttatatagttagagttatatatagggctctactgatcatgttctaaccctcatatagtataacttgttctttgattttggtaccttattattaatttctgatattggtttctttacccctttatgataatttttatgttttttcagtatattaatcttgtgttgacaatctttaatttcttgatgatgggttgatcagattgaacttgaagttcaaaagtgggtttttattatttagggttagggtttaaaaattaatgaggggtttattgagtttcagattaaaagcacttgtcacttatcagaactatatatatactaactacaatcttatcttatgttttgagtataacttgtttaagatataatgataaatttggtcattaaatggaaataagttattattttatgtgtttgttgaaaaagttgataggttttttctaatataaaataatatagtattagctaagctttctgtttcttatttaaattattattatgcacgagggaaattgttgatatgccatacatgtagcatgagtatgatatatatatatagtactatatatacatataaatacacaaatatggtagtggtggtgtgggggatatatatatgtcctcttttttgttgcagaaagttaaaacgccaccacaaatatatacgtgggagcaaaatatatatatatatatgtatagtacatgtcagttaaaatttcatatacaatttcatcattaattctttttctttgcatagtattagttttgggattttggcctacaatattgacaagtgagtgactactactactaataataaagccatatcgaacaactctctctacttcagttttgtccatatgcaataaaaatatataaatattattgaaaagagtgaccgtattatttgacggcttagacttcaattttttaaataattataataatgtaaaaaaaaaaaaccccatttttattttgatggaaagatgtgatttttgattgatttatggtacatatattcaaacgaatgggttggtgatgatttggtgaaaatgactgagcataagctatatatatgaaattatagctaagctatgtatatatataggtagcgatgttgttgatcactggttgttttcttccattttgtaagtaccgtaattatcagaagaagaaggaataagatgaagtgtgttactattaattagtattatttcttggtacatatatgtaatattccatgtcaaatttcctttaaaaaaataaataatgcagttaccaaattgtagggttcgttgcatgtaatttttttttttgtttttttttttttttttgttaagaaaagcgtaataatacattaaatgaaattagacctcatg

SEQ ID NO: 382812 - DNA, 4447 bp, Cannabis indica
gcagtgataggtcgccctattttgaaagaaatgaagatcgtgacttcaatctatcatctttcaattgaattccctacacccgcaggtgtaggatcagtaagggaagttcaagcagatttaagggagtgttacaatgctacagttaaaatcacagaaaagaagaagtcagtaaacatgatatacatgctcaaggcaccaccgcctcgacatgaatcatttagaatttaagaaatcccgcatgagaaaaagcttgatctggaccctaaggtcttcaactacacaaacaccgcacaagctgctgaagaaactatagaggtaccaatcgattcccttgataattccaaagttttaaaaattggttttaaattaactttgcagcagcgcaaaggttggtgacctttctctaacaaaatctggatgtcttcgcgtgaaaacattcaaacatgatcagaattccacccgaggtcatgtttcatcgcttgaacatagacccggatgtgcgaggagtacgacaaaagcgtcgcaaaatagaccccacagtgtaccaagcgctaatagaagaagtaaaccgactaatggcatgcggcttcatcaaagagtcattttacccaaactagttagccaatcccgtcttagttctaaagcctaatggctcatggcgcacttgcgtcatttttctagatttaaataaagcttgcctgaaagatagttttcccttacctatgcaaccgcagggcatgagcttctcaactttatgaatgcgtactcaggatacaatcaaatcccgatgtacgaaccaaagcaaaagcacacctcctttattacagaccaagatttgtattgttataaagtaatgtcatttggacttataaatgcaagtgcaacatatcaaaggttagttaacatgattttcgcaaatctgctaggcaaaacgatagaagtatatgttgacaatatgctcgtaaaatttcaacatgctcgtaaaatttcaacatgcaaccgatcatgtcgcgcatctacactcaatgttcaaaatcgtgtgctaatgcaagaagcgactcaacccgctaaaatgcgtctttggagtaggatcatgaaagtttggcttcatggtgaactagcaaggaattgaagcctaccctgcaaagattaaaccttaattagagatgtgatctcctactaagcccaaggaagtacagagcctcacaagtaaggtcgctgccttaaatcattttgtttcgcgttcatctaactaatgtaaagaattcttttcagattctaaaaggtaataaaaaatttcaatgaactgacaaatgtgaagaagcttttcaggctctaaaaatgcacttggggcaactcccaatactctccaagacgttgcctagagaagtactctcaatctacctcgcagtgtctgattatgcgatcagctcagtgcttattcgcgaagaccaggatagacaacaccccgtctactatgtaagcaagcaattgctagatgcaaaatcacatccaatgaatagaaccgatcctatccaacatccaataaatgttgaatcgattggatgattgaaatcatatagatcggatcgaatggtaaaatctaacatccactatataattggataggatctaagcctaaaaatattagatgtggtcaaatgaacacccctaaatacaattaaatatacatataatcaaacattcgatactaataatattaatcaatatttggtgtagataattatagttgacaaatgaacacgataggtcgacatgccaacacaacgggtcgggttaggattaacatttcttgacacaaaatatacatgaatcggctaagggttgaccaattagacatgtcaacatgcataatacaaacacaaaaataacacgtcaacgcagatgtcaacatgcataatagaaacacgaatataacacatcaacgcaaatattacacgtcaacacgaattgtcaccccctaaagcaacggattcgatatgttgagcaatgctcatgccaaaaccatggcaacggcttgtcgcgcttaaagaaagcaaaaagcaagaggaaaccctctaaatgggaacaacaaaatatttgaactttatttttttgcaatattctaaataatttataatgcttaaaatatgattaatatataataatcaataattgtcctattacatttcccaatatattattgctaaaataggatataaggtgattcactatctagtaattatataactaaataagaacaacattccttcttttccctactttttttacataagatacattcgcagggacttgaacttacagtcccgactactcacacacactctcacccatccaacctcaagtgttaatctttttacgaagttacagctactgtcaacaaaatttgaggtgaaaaaccaaggaaacccattttgcatatcaaagcataatgaatttcatctcaaaataataatatagcagttttattactggtaatgatgatcactagagaccaagtttgaatgctgtacatttcatatttccgtgttaatcgtttgatgtgtattcagggagttaaagctcatagctgaattttaattaaccaaataatggaagtataatcagcaactacttacagcgccctgtccttcagtggatggaccacccacaaatgccataattctagctccagtcccaggaaagcaagctcctaacaagctggctgcaataccaagtgctgtgctggtgcaccttggtgcgcgctgatcagctggtaccggccaaggatctttctgcagctcctccaacacctctcagccaacaaaagcaactcaattcacatacgttcatgaaattgggacatcagtgtgatatggaaacaaggactaatctaataccgaattgagtacaaactggcactcggaagcaggcaacaggaaccgagatatggcatctgtggagaggccgtccctagcgcctgcaatgacaccaacggacggcttcggcttcttgaggaagaagctcaattgctcgagaagctgctccttggaaatgtccttggatcccttgaagatgtaagtcttggggatctcgccaaaaccaagctcatgaacatgaacaaatgtcccgaaagtaatgaggccaacgagggagtgatcgggaagaagatcgacagcctgagaaagcgaagactttagataagccatctcttcctcgataatacaagtatcgacgacgaacataaaaacagggggcgaggttggggatccggtggcgctcctgtcgtcatactcaatagtggtgtaatcagggaaaagctcagcggggagattttcgtcggagattgagtcatagttatgagggaaatgattacgctggaagcagaaagggcaagtccagatcttggctgcgaaatcgacaatggagaatggattgaggattgagcgacatgtacgacagcggagaggagtgtaaggaagaagaggcatattggggaaggatttgatgggagtgtagattgcagcaacggggacgacgcaggaagtggaagcctcttgcttggtccccggcatgacgttccagggcattcgaactccgtcttgcgcctccaggttcatgaattccgccattgttgatcaatcgaagcttcttcttcttgttgttcttcttctacttcctcctggattattgaattgcaatatttgttgatagattctttgaatcgaaagaggaaaagattgaaatttgggttagatagagggaccttgaatcttacttcacaaacaatcacaagaagtttgtttctttctttctttctctcttggctaatatctcagtcagccatcgatctaggcactactatgcaactatgcctccgatcgactgggcccatatttccggtctctccttcggcccattttaaaaataccacttatcatcaaaataatctgattaatatattaaagcaaagtggatattgtctgaaaccatagtgttatattttattgtacataggaagatttaaggtggtaagagaagatatattttacatctcaaacggattggagatacattgtaggtacataagttcctataaaaatggaaaatgctctgagtgcaaaccaaataatcgatcactcatccaattggctacatcattgttaattgatttaatttatttagttgaattgacttaagattaccttagttccaggtattaattttccaagtcttaaaacaaaaaatcttcataccaaacataatatgaaagattatcatttccataaaaacattacttatgccttattattaatattattaagggatttttttataaatactcaaaaatcaccaaaagtttaccaagatgtgcatctacagttttttaaaatttaaatagattttaatttttttcttacaaaaacacagatggttatttttaaaa

SEQ ID NO: 382813 - DNA, 3874 bp, Cannabis indica
aatttttgaaatgaaaataaccacccacgatttggtaaccgtctaaggaactaaaagaagaagaagatgaacagtggaagttggggagtggtataaaataaaagatttaacacctttttttgatttgaaaataataaataaaaaataaaacaaaaaagaggacaaaatgtcacaaaaaggtgacatttttttttttgacatgaaaatgcaaattatattaaattaatcattcataatacaataagcatttagcgggggaggaacttcctccaaccaagaacaaacagtgtccactgaaagagcatacttcgctaacaaatgagcagtcgtattagcagatctatacacatgagaaatctgcactccaggaaaattggacacaagatgtgaaatgtctaataagagacaattgaaatcagaaactgaggcagtagatgactttaacccattaaccacgagtagggagtctgtctcaattatgtgaacatttagatgattatctaccagccattgcaaagcgtgcataagagccaaagcctccattattttaggcctaaacgtaccgaggatagactttgaaaaagctgctaagatatcaccatttcagtctctcaaaattgctccgcaaccagtaatgttagagacccgatttactgctgcatcagtatttagtttgagtcttcccgagggtggattcatccaatctgaaacagaggtggtagcagccatggaagaggaattcgagttaggagaggccttcgaccgtgactgttgagcagcttgaaactctttcaagaaagacaaagcaaagtataaaaccatttcatgaggcttagttttattaccatgcttttcattgttcctttcattctagatatgccacaatatagtgatgaattgctcaatttttgtatcagaccatatagtagaaatatggagcaagcactcttttaatgtcatgccacttgtgaggatactgccaagaggaaaatttgagtctttccatatgtgcttaggtctgtggcagtagaataaagcatgcattattgtttcactttcacttttgcataacagacagcaaggagactccgcaatgtgtctgtgaaacaaaatagcagtagcagggagacaatcgtgaatggctcgccaaaggaaaattcgaaccttcgaaggtatggttaacttccagaactttgtccaccattgctgagattgcatacccgagatgctaggttgttgttcctcaagattggtagccaaaaagtaccctaatttaactttgtagtagtcgttactttcatggtgccagatgagcttgtcacaggaagaggaaatagtcaatggaatactaagtatcctctaaatgtccgatggaatgaaatatgagttcagcagatcaatattccaaatcctctctggtgtgatcagagaagacacctttaaatgcaagtcaatgttggttactactagaggttgaaaattagtaacactaggtaaccagggatcatatctacaagttgtgctttgaccatctccaactttccatcttaatccttttaagagcaattcttttccccaagaaatcccttgccaagtaagtgaaggataagagccatgaccagcatccaaaaaggatgattgactatgatacattgctttgagaatttggctgagtaggcaagtcggattggaaaagatgcaccatgtatgtttagctaagagagcctgattaaagtgtatgaaactcttaaaacccaagccaccttcaacttttggtttgcaaagaactgaccaagtcttccaattaattcccaaaacagatgagtttgaaacccaccaaaatttattcatcatcacctcaatttgattaataagtgatttcgatagacgaaaacaactcatagcatacgtcggaatagattcggccacagctttaaggagaacttccttaccactaattgaaaaacgttgttcttgccatgtcgataagttcttccacagcttttcttttatctcccaaataagacttttttgtctcttccagaataggatggcaaacccaagtaacgctcatgacacggttgaatgggcattagaaggatctgatgcaaatttgtttggattgaagggagtgtgtttggagaaaaagataagacagacttatcaacattcagcttttgacctgaagcacgatagtatagatcaatagaagttttgatggctattgcagagcgcgaattagcacaacataagaccaagctatcatcagcaaaaaataagtgggacacacttggagcaccacgagatactttcaaaccttgtagattgccattagcctcttcatgttggaaaagtttcgataaaccttcaacacatatgataaatagataaggggataggggatccccttgtctaatccctcggcttggatgaacactaccttggaccgaaccattaataagaaaagagtatgagacactctgaatacatctctgtataagattgaccacagatggatggaaaccaagagctaacatcatatgttgaaggaaatgccattcgacccggtcgaaagctttgctcatatctaatttgatggcagcatagccctcctttccccttttcaagtgtttaagagaatgaagaagttcaaatgcaacaagtacattatctgtgatgagacgagattgaataaatgcactttgagattcagaaattgcttcactaataaacgggttcaacctcagcacaattgactttgaaaccaatttataaagaacattgcaaagacttatgggatgcagttgagtcatggaagtcggcttcttcacttttggaatcaaagtaatgactgtttgattaaaactagaaggatctccccccttattcaaaattctgagaactgtttgagtaacaagatcaccaacgatttcccaataattgatgtagaaacatgacggacataccatcaataccggggctaccatccgatttcatggaggagagtgcttcgtagacttcagtagaagtgtaaggttaggttagagcttggttgatttcagttgtaataacacaaggaacagttgaaatcacatgttgaatagcagcagcatcatagccttcagtagtgaagatatcatgaaaataatcttgcacaatgtttgcaatggcatcaggtgatgtgtgctcaacgccatgcacatcaatcaacattcgaatggagttattggacagcctacttgaagcttttttatggaaaaatttgttgtttgagtcacccgaccgcagccaagagactcttgatctttgcgtccaatattcctcttcttgagaaagtaattcatccaggatagtctcactcattttgagctcttcaaaatgttcaacacttgtgtcatgtgtattgttaagagccgcaactttaccttgggagattctgattttttttttggtaaatcaccaaattttgaacgatgctaaagctgaagattagtgtgacaactggaaaggttctgcagaagttgatcagtaggattaagagatgaactcttccaattttgtgagatgatatcatgacattggtcctcttgcaaccaaagtttttcaaatctgaaccttgacttaaatctctgtacaggttggtcattagcagaggtgacagagagaagcaaagctctatgatcagatctaagaaaatccaagtgagtaacagatggagtaatgaaggaatcagcccaataatgattagtaaaaccataatcaagtctttctttaacattggaagcttgagagtgtttattattaggaatgtcaatggggcgggtcggatctgatccgactctgatccgacctgatccagattatgtacggatct

SEQ ID NO: 382814 - DNA, 1662 bp, Cannabis indica
acatttgatgatattggaaaaattggattgggtatcattgctcgtgatcactataatgttgtcttaacgttcaaatcctggtgcaaatttggtgttatgcaagttgagatggcagaagcaatggagctgaaggaagttctcagctggataaaaatgatgcattggcagaaggttatcattgaaatggatagcttggtggttgtgcaagcggtgaggagctctctttacatgcctttttgttttggtttagttattcatgattgcaaaaaaaaaaattctcaaatttaagttttgttgagttgatgtttgttaaacgatctacgaatcgtgccgctcatgttgttgctagagccgctcattatactactgattgtaagtttagtagggctaatgctacacctgaattaggcttgatttggtggttgatttgatttaataaaattctgaagcttatttttcaaaaaaaaaaatcgagttgattttccaagaaatctcgctaccctggtagtttcggtggctgcttcatatatttatttataaagatattttggatctacccattaaattcatttgattcaactatgtaatgttcatgattgccaccctacgattaatttgttcatgggctcttattcaagtggctttttacagataaccaagcgataataatttatttttcttttatatattttgatatgtatgaaataatcgtcgcaacaatttaaaattttggaatttagatttcaattgaatatggaatatgttgtgattcaatcacaccacaaatcaagaacaagaacagagatgagaaacaagaacacaatgatcaaacataaacaaaagggaaatttccgacaaaagtctccaaaaagttcactttgatgcaaattagtccccaagattgaaaaatagtggcaatagtccccaatgtcacatttcttgtaacttcgttagtccttattttaatggagccgaaatatcacgtgtcgaaatattattggcccaaattataattttaatttataaaatattaaaaataagtaaatatatattatttataaatcatatttttttcctttagggcttattttttttcctctgggtttctttttcttttttcttcgtcttcttcaacttccaatgattcaccccaaccccgatccaactaggtaccaaaaacccaccatccactctcttgatctatcatctctcaccctctcaatctctcccaagatctgactcatgccctctccccctctatcttgaatcttgctaaacccaatcgtcaaacccctctcacaccatcacgatccagacatggcgaaccctctccacaccatcaaggtccagtcgtagccaacctctccaccatctggtcaattcaacaatcacaaatacaaactataatttagcaaatgtgtttacatctcatcgatggtgagcagaggtggtctgccttgtttgggcagtgatgagcttttttggtaaaatctcgtcgatgacaaaagaacggaagagcattttagctctgccatggccgaggagaaggaaaaggagagagtgatttggggctttggggttcttaggcatagggaaaactaagaaagttgttggaatttattttaccaggatcttatatctactcacaagtatgttgtttaa

SEQ ID NO: 382815 - DNA, 1211 bp, Cannabis indica
tagtagtagtagtagtattgttactcatatttctggaaattaaaacggaaaaaaaatatttatatataaactggaaaaaattctaaatcacaaaaagaaaagaaaattagaatttttgaaatcccagttgatagagtgacatttgaaaaatagtttgattttttctatatatgatctctcaatttgggaagatgacccacaaaacaaaagtaagcactttacagagattatatatattatttaatattcagtgagaaaagaaaatatggtgtaatgcactttttggattgtacttttctttttctcttttttcttttagcagagattggattatgcactttgggtcccacaagtttgccttatctggtttttgattgggtaagaattgatataatcctaattcgtgggttctgattggttaccgttgttatcgagcgatttctacaaatggggcccactttttttttggatgagaaattaatgagatttttgaaaaatgaatttgttttgctgtaatttaattcttatgtctcggctttctctgcccatcttttgctggtaaccaaatgaaaaaaattgaaggggacttgtgtttgttttttgttgatttgcaactcaatgcctttttggtaaagttctatatatgcggtagaactgttaagacgggacaaatacgataatatgactctaaacccgcacaaaaattaacggatttggatttgggtttgtcttaaatgagttcgggttgtgtttgggttgaaacttctaactcgtttaataaataagttgtgttcggattgatatagctaacacgaaacagatttgttagtgacttatttaaagttatttcagtactttaacaaattaaaaatgggtcataaacgtattgaatacttcataaacgtgttattgttattggttaacatgtttaaacaaaatatacttataaacgggttacacgggtcgtgttgtgtcgacccgtttataaacaagtcgtcttcgagttttattttctgacatgattattaaacgagtcatgtttggatcgagtatatacttattatacatgggtctcgatacgacccgcgaacataaattgctactcctaatatgcgagaacattactacgagacattaaagtacctgacactactataaaatgatgttttataattaattagcaattttttataatatttattaaaataata

SEQ ID NO: 382816 - DNA, 2170 bp, Cannabis indica
attataataaaaaaatgtataaacttttattggaaaaaattaaaaaaaccattattcatgattaaaaaatataaaaaaaaaattaaaataaatattaaaattgtccaaaataatatgaaaagaataatttaaaaaaaaaatattaagagttgttttttaaaaactatttgaagtttcttttcattttcttttaatattaaggtgtgcttatatttaaagtgtaaataaactcctcattcgtaatttattgttacaagatgaaaccaataaaaccacatgtcaatatttattatgctacaaaccaatgaagaaagtcatgtgcataatcaatataacttaaactaaacttaaacttttgagtaaaataataaatatcttacaattcattgattaaccatgtgtaatgtgtttatacatttatgcaaccttccccctcccttcctctggtggtacacttgtttttgttctttgctaaactggtggtatacttgttattaaaacaatatgaaattttgtagttccattaattattttatgaataataataagaagatatttgctaagcccttgcccttagcttagattatgggacaaattagtggggtttggggattgaggtgtgtgtaagttgaaatgctactatcattcatatgggtttctttctagagtaggcccatcgttaggtttatgtgaagacttaatggatattcaagtttaaagaaatatttacataataatttggtttcttttaagatggtttttgcttttgttttcatatggttggaattgttaatagacattaatagcgtggaaaaaaagaagctcaaaccacttgctaaaatactagcactagccagtactaaaatgttttatcttagtattaatattttaaaaatgctatcttgattatagttgttattcaaattttttttaagtatttatttttaatgtttatcatattttattacgcagacgaaatggtttaactaacatgctctttaactacacaaagaaaattatttgttctctttaaatggaaggaatcccatcaatctctttgtaatattattatcttctttaaataatgatacattctttttcaaaataataggactattagcattaaaggacataatgatatcatcacaattgagttaatcaagtagtcccaaattctgaatattagatatggaatgataccgcattcttgttgtgccacacattttcatgggatgatatataagagacaccatcacaccaaataatttatttatgtgagcctaattgtcatatgattatatatatatatatatcctcctttttttttgatataactaataaatgaatcagccaagaatatgtatataaataaataaataaataaatcatggaggtggatcaatcctataaataaaaatgtaagttgcttaggtgagtttggtagcataaaaggaaaaggtaagcctacccaaatgacaaaattgttaatgcagtcacaggattcctctgctatataggttgtgtaaaatggttgaatagttatcactttaagtgattgccataaatgaaattaaatcttcacccaattttttttttactggattgggttggggtggtggttcataaataaatagttagaggttcccagttcgaatttaaattagtttcaaatcaaaaacttgataatttggtcaataaagaaactctacttgcctttttttatttagcatggcatctccctagaaaaatcatattgtttatatagcacactaataataataaattctccttcataaataataataataataataaattctttccaaacaacaggacacttttcttttttttttttttatcaaaatcatatttacattacacgccaaagaaagaaagggaaaaagaaaaaacaatattaaatagtggattcgagttcagaagttgttttttttttcttttaatgaacgacacattcacattactcaagataatattttataattttttttttgagatgataatattttaaaattaattatttaatacctgatataatatatctactatatacttaaactagtaaacatcgcggatatataaaaataaattgtctattttaattaataataattacttaataaaattatattaaaattttaactttactatt

SEQ ID NO: 382817 - DNA, 1555 bp, Cannabis indica
aaaaataaaagaaattataataacagtttgaataggtgtaggatgaaattaattttaagaaatataatatcaaaagattttataatgatattatcttttaatattataataaaaagtaaatttaaaactaaaagataatcattggagttgcttaatcgttaattttagtacactaaattaagaaattagaaccatttcaaaataataataaaaaaaagaaattaaaagtcattaaattaaagtttcatcaaacaactcgtacactagcttattttattaaatttagggctaggctaggcatatactttcagatcgatagagaattaaagagtgtttaattattctctagccaatttatttattgctaagaactaacttcgaaaattttcagccataataaaagcatgttaaatttattttgttataaaatatgaatatatttttttagagaaaaaaagtagtacattatccatattattattattatttgaataaattatgaaatttcattaataacaattagttaaaataatagcttacaattcaatctgacatttctattgttggaaacattactgagattagaatttgaaaaactaattaaataatcagtggtcttattttcaaatcgtttcaaaaaaaatgaaaaagattgcagcatcacacttaacttttagcaggtttaaccttgtagcttgagtacttaacaattgtgcaaggtatgtaactgcactaccaataacccctcattcacaaaaaattagttatttccaaccactaacaataatttaatggtaagctattgaaaaaaaaaacaacaaacaaagaaacaaaataaaataaaatcatgttacatagataagactaaaataattaaaatcatgtcacacaaacaagactaaaatacttaaaactatgtgactaaaatactcaaaattatatcacaaagataagagtaaaacactcaaaatcatatcataaagagaaaactaatcgcaacaagcaaaaatcaaatgaaaatagcaaaatacaaccctgaccaatccacccctaagccccaaaaaggctaataggcctagctggagaataaagacagcctttaaacgacaaactataatttttttttgctttaagaataaagaaaatggataattaaacttcaacataagtatagtgattggtggggtaatttaatatatcaatccaaccataaactttttattttttttttaaaaaaatatcataaactttgttgttagtttcacattattcttattattattcttataagatttcaaatagcaatttaatattcaatatgcacatttaaattcaaaatccattaataatgagagaagcaattcatgtattttatataatactaggtgaatgtacgtgccgagccacgtattgctagttttatttaagattttggtctttttaagattttgaatgtattttatttttaaagattacaaatttttagtttgaaaaaattaaatatttatatttgaaatattatttaataatgtattaaaaataatattagtgtaat

SEQ ID NO: 382818 - DNA, 1613 bp, Cannabis indica
tatttaattttattttaagtttttaaaccaaatgatatgagaataagatattgggtttattattttagctaagtgttattaataaaattgtatggtttatttaaaaaaaattcttttaagagaagctacaaatattaattcttcctaattaattttaaactaaaaaacatcttttttcttatccaaacattcaagtattttttaatgtacttacaataattttttttttcaaaaaaaaaaagtacttacaatagatcacagtatgttttaaattatttttttatttgaaagtttttttaaaatttactatttatactttacaagaatattatttattgttttaaatatattttattaattattttaagttttaaatattatttttatatgaaaatgagtgtatatattaatgttatatatttgaattaaataaaatatattaaatttttaaaagggtattttttggcttgaagaaattgatttatgatttaatgtaaaaatgtgttataaaataataaaaaaaaaattaatgaatattttgagagatagaatagataagttggtaggagtgcaattaaatggaaccattgtgtttattaatactttttgtttgaaattctaggaaaaaaacatttttgcttgaataaataaactgacatgtgtgactgggatagtgctattcatccgtacaatttgagtagtgagcaagctaagcaaagtttgtcatatttgattgccgttgtcacatggggtattatttttgacagtgtgtgttttgtattattatttaattaatagcgtcctggcggtagcggaggaggaggaggtggcagcagtggagcagttgggaagaagtggtgcgtaccaaaattggaagcaagcggtcaagcattgcaggccaatattgattacgtatgcagctcaggtgtggactgtaagcccattcaaccaggtggctcctgctttcagcccaatgatgttaggtcacatgcctctttcgtcatgaactctttctaccaaaccaacggtcgccacgactacaattgtgattttgcaaagactggactcattacttcatccaatccaagtaattaattaaacctcatacaatatttctttttcattggatttaattaattggtaacatcatcggctaattgtcctatattaattaatgtgtacaggtcgcggttcgtgtgtctacgtctaaaattggaggagctgtgtggttgaagatgatcgatgatcagaaccttttcaatatttcaaattattattaagaaattttgatagaaatccgaatgtcttattgtaacttttaactaataattaattgtattattcactatttacaactataatattttccttttgtctttggatataatattggggtgggcgatcgagtcatgtggtcgatatatgaaagaatggtatggtatgatataactgaagttgtaaattacttgttccgccaattgaaatgatatctcagtgctgagaaacgacatcttgccttgccttccatccatactgtcaaatttaattaataaaattttattattatgattaaaatatcttcaatttatataagttataaatttaattattta

SEQ ID NO: 382819 - DNA, 1491 bp, Cannabis indica
tctctctctctctctctatataaggttttgctccatttctccttcttttcctgttttaggtttctagtgcttgggcgccgccggccgaatctggctggtggcacctagggtctaggctcctcgttgctacaggtagaaggtggaggttcctctgtctagtagctatagtgagtgggggggacgaatgtctgccctttttctctttccttgagaccggctctttgatgcccgaggtttcaggtaagggaccaccgaccatggttgatggatgtctctgttgaggtgtcgcaagtccgaggttggtggtcatgggtagatctagtttcttggattggtgggaggcagcgtaggtgggtttctttgggcaatctacctttcgattttagggacaacgagttactgtggcctttctcaagtgagagtgtgggctgtggagcgttgttcctctttcttttttctcagatctctttgtccctcgggtaactattcaggcatcacggctttggtgcacaagagctcgcagttggctttctaagttttgttgatgtagagggagggactcaggttttacccaaagggatgtgcttcccttatcctagcgccatcaccgttcagaaccccagtggatggcagagtgtaggcttttttcatcggaagatggcttcgtttttgtgcctttggtcggcttgtcttgggccttcgcgtgacctcctttacgcgaaaagaaagtcctttaaaactgttttatgttatggttttatttggtttgtcatttttattttgtttagttttgtcaattttttgtaccatttctcctttgtggtgttggccttaggcctttttgggcggtttatccttgtagatgctcctgcgtgaaccatgagcttttttctcctttcagtattggcatggttggtcgatatttgagtcatctctaagtgagatctgtgcggttcttccgccgaacatgtaaggcatctgcctttgcttaaccttaaatgaagctttcttttcaaaaaaaaagttataaatatacaaaagatgtttaaaaattaaaataaaatttaatgccttcacaacaactagttttttgtttagctcactcaacatcttttttggcctcttccaatgctttctgtaagtcatcagtggtcgtgctagtttttagagctgtagacttggctcgggaataagtataggccaacttcaagttagctcgaaaagagaaataaaaattataattatctggtggcaaaattcgtacaaagaactctagatttaaaagtttaccctggtgatctctttcaaaactccaccgaccaagagttctataggcatgtcctccgccacagtaagtttctcattgacctcgaccatcaggcgatccttgtgacagtcaatagtcccgtgatccgtaaggggaaacaccgggtaagctgtgcaatcccacatcgcctgggaaggtcaagtgtgatgattctgagactgtgt

SEQ ID NO: 382820 - DNA, 4917 bp, Cannabis indica
aaaaataaaaatttaataatataaactaattaaagactctcacatcattattgatttgacactaaattctacttatgaaaattctaaacatataatttaattattattattattaaaaaataagtttaattattaatttataaattaaaattaaatttaaatatttatactataaattacttatattattattatttttattattataaatatgatggtatatggtcccattcatttagtgagtagtgtaagtttcaatttacctcccttgctcagctggcaaccaatatatgaccatgcctagattattaattccaatacaattctattggtcaaaatcattgacataaaattagtaatattaatatagaaatatgtataaataataatatatatttatgcttgggatccacctagatataacagatcacgataatccaattattaccaacatatcatttgtattacactatcaaaaaattctttctaatggtttctaacaaattgttgtttttattattattgataaattgcatggcattaatataataaagtgtacatatgaaagatcttaagtttattataaaggggattcaattccatctttttattcaaaaaggtttctagtattctattttttttaatgattatataggttatatttatttaaaattatttataagatttaaatattttgttatcttcgagagcattttcaaaagttcggtgctaattcgaataaattgacagataacattttaaaaaaataagagttaagctcacagtaagaatgaaaatttgtgttcatgagtctttttcgtattgtgttgaaacttaaatatttcaagcaaatgccgatcgaatccaaaccaaatccttttattaatcgtattaaaaattaaaacataaacctaactcgtttataaataaattgatcatctggtatgacctatttaacttatttatataaagaaacatgcataattttagttaaattatcaactcattaacatgattataatatgtttacttacaatcttgttttgacatattatagacaatttaatatgtttatgtcttatttaactaaaaaatataattttataaacataataaatttaaaagtatatacttttacataaattattattatgttattctgattaaattttttattaatctaaaaaataatccatttaataaaaaaataacgatgtcaattgtcaacacaaaattaatccaaatctatttaaatagtaatgttctactaataatttccataataaatacctagtaacaataatctattaataattataaaaaagagttacttaaccaaacattaaacataacgaaaaatgctaaaatgtattattagtgtttaacatcttcgtatgttttaatattattattaatttaactaaatattaaatttaaaataatttaatataataaattttaaaatatatcggtaattaatgacaagacaacatatttaaaggtgctaaaacgaaataacaatggtctaaacataaaatatccaagttgcttgtcatcatcacaatctagagaagagttctctttctctctctctctcttaataagagaggacctttggtaacaaaaccttggtcccccacatctttacacacgaaaccaaagtgggccccaattacgtttcccaatgcaccaccactgtcttttttttttaacggagaaacaaaaacaaaacaaaaaaagagtgtcggtcaatttagtcaaacatacccaagcctatgctaaaactagtccaccctacctaaactcacatccaatcacattctctctttctgttgaaaaaagaagtcaaacccacttgacaaaataatacttacactcttattattaacactgttaagattttctttgacgttagagagagagaaaaaagagtggacctaaagtttaagaactaaatactaatactggttttgtctgtattcttaaggaggaacgaatgttggaagcttaggaagcaaaaaagcaaaaacgcatggttgaaaatggcggccaacgtttcttcttcctcaactctaaaaccccatttacttcaacacagagagtgaaagagccttaaaggtttaaactttaagccaagtaagttgtttttgagtgataaagaagtgagctttgtttagctcacttggattgtaattaagggtagttagtgtttttgttttcttttcttttctttctttcactttttgagctttttggagttttggggtttgattgaatagtgagaaagttgtgaactttaattttgtttggtgggtttgatttaatggggacaagaattggatttgtggcttcagagaagggagcagaaaaagaatgtgatgttgggttgggtttgaggatgcaaacaaatgacactaaatcatttagtagtcgtaggaagatgatgatgatgatgaccaccactactaccataccccatcaccatactcatcaaaatcatcataaccataatagtaatgaagatgaagatggtggtgatgatgatattgttgttgatgatgaatcttctctttacaacaatagagcttttgttgaagaaagttgtaaccttggtagtggtggtggtggtggtggtactggtggctctgcctctggttgtggtggtggtggtggtgaaaatgacagtactactggacccaagttgttttgcaacacaagcaaccaagttgtttcaatggctaatatatacaacaacatagttggtcttggttcttcagattctctccccaaaactctgctcattcctaactctgaatccttctacaacaacccttcttctggtaaagtttcaatctttattatctgttttgtacttgttatttcaactgaaattgaatgttgggttttgtttttgttttgtttaaggaggaggaataatggtgaatgggaatgtgagatttccattcacagctgatcaaagactagaacttgaaagacaaaccatgattttcaagtacatgatggcctctattcctattccacatcaattactcccttcctcttcacccaagaccattccaccatcaaattttgcttatttccactcatcaaatcgtatgttgttcattgttgatttttgttcccacccctttgttttgtttgttgcattaaatgacttggggttttgttaggtggtttagagcttggtatgtcaaataataactcggatcaagaaccatggagatgtagaagaacagatggtaagaaatggaggtgttcaagaaatgttataccagatcaaaaatactgtgaaagacactctcacaaaagtcgtcctcgttcaagaaagcatgtggaacttcaatcccacttccttaacaacaacaacaacaacactaaaaatccatattcaaagcctgaatctttagaccaacagagaaaaacccaccaacaccagcaccagtctcatgacaaccaaccaaggtgtgtgttagttgaattttatgctttgttttgttctgtctttgaatactgatgtttgtgtttttgacatgtgataggagtatggagtggttcatgaattcaaatcaagaatggcagcatatgattcaccaacaacaacagaccaaacaaggcctaaatgaccaatttagcttattgcttgattcatcttctactgataatcagtcaagtaaaacaaggcatttcattgatgcttggtcaattgcagatgagagagatcaattgagattttccaactcttcatcatcatcatcttcatcattatcatcacttgctctatcaattcataatagtaacaacaataatgaagttgtagtgagccaaaatgcccaaatgagttataatcctattttgggttcaggaatgatgatgatcaacaacaacaacaacaaccaagtttcatggagtggttcagtaccacatggtggaccattagctgaagccttatgccttggaatgcctcatcaaaactcctcaaaatgattcaacttttccttttttttttttaattcttaatcaaaatcccaatgttgatctgttcttcttctttgcagtttgtttgcttttgtattttcattcctttttttaagcttaattatctaaagaaataatgttactcatgatgatgatacatagtgctttgctttgttagtttaaaatgtctcaaatatattcccaaaaatcagtttttgtgtgtgtatatatatagaaaaggtaatataataggtacggtatatattatatattataacaaacaaagattcaaagtttaaatttttatgcatagtcacacaacaacaacaacacataaattgttttaagcaatgttccaaatgccctattctatttacagctttcactttcagttgaaatggtgtaattaatgcttcaaaaatttaaatccaaaagagattttaactacttcataaagaagcaatggctatagcatttttcttattattctaaaagagtaaataaatgcaaagtttaaacactctattttatgacacctaccactactagtagtagtactagctttgttaaccctactagttaatactactactgcctagtgcctaccctacatattaccacattgattacaaataacgtaaaccaagaattatgttgcttgaaaatacaagcatacaccaaaaaagggtcaccatgtaaaatcactttccaatcaaaaaatagaaataaaaagtttgaaagaccaaatatgatagggtaagattatattcaatagaaaatgtaaaaattaagttatatttagtataaaaaatagttttgatttttacattaattattactattgtactccaataaataattgtaaatcttaatataaaatttaatatattaaaaaaaaagaacattgttattgggcaccag

SEQ ID NO: 382821 - DNA, 4084 bp, Cannabis indica
cgctcagctcagataaatatctttggccaatgttcagccagatatttctttgacaaaaagcgagcttttgtcgagaaaatagatattcatgtaacttccctacaagagggtacaccatatactccgtgtagccgcgtcaggacagatatttgtttgcttgattgaaatgacaggtggcatggaaaagatagggtgcggtcggttatatttcctgttcctgtccaatcttgataaaaatctttcggttttgacacgttagctctgaatgaatgtccagattcagattacgagttacgaccctacctgaaaatgaaatttcaaaagcttattaacaaattaaggaatttattcaatttacgaattcagatatttaatttaggttctgatttgaaaacaaactagaaaatttctacattaaaaaggaaaagtgatgattcagcaaaaaagaagaaaataatgatgataataaaattttagaatgaaattataaataaataaattagtttggtgaagatatttttattggaattctcaaattaaatgatgagaataagacaaaataagactgttgttttagatgagtactactctcttttaattcggtatgttatttgtttgagcattgctattaggcaccagtggtgcctaacacctttgcgacatgtcgcgttgcgattggctagcgatactccctaaaaactattatattaaattatatgggacccgatacttagttgtaccaatagcgatattgacacataggaaggtgctaggcaccactggtgccctttagtatttctctatttgtttagttcatactttataatagggtgatgtaattattaattaatattgtattaattaaagttttagaatgtattaattaatattgtattataatagggatctaatagaataaactttttgactattttattttgaaatggaagtaaaaccattttaatgcatgaagaagaaaaaattaataattttttatcaattttttttatgcattttaaattttattttgttttattcttattcatattctcattctcattcttgttatctctcagcaatgaaattactccgttttcaaaaacaaatataaaaaaatgatagtatacgtttaaaatttaattaagaattgtaataatatattatttagaacatttttaatagattaacaaataagtgatgcattatttatattttatgtgttaaattcatttaaaaataagaaatgttaaagcatattattggtgcttagcaccctccaacgtattaatatcattattagtgcaattaataatcgggttcatataatttaaaataataatttttaaggaatattgttaaccaatcgcaagacgaccatttataaggtgataagcactactggtctctaataacactactatttaaaaaaatatatatatatatatgtgtgtgttaaatttgctaaaaattatggcaagttcggaaaatataatgcttattaaattaacttcacaataaataataatttttatttatacttttaccattaaatattaattataattttcatacacattaactaatatatttttatacaattttgataaatattttttaaaacatttaattaatttattttcattaatgatgatttaattttatataattaaatttgtaccttgaaatgctatgatttattagagtttacttataattaatattgtgatatgattttttttgtaacatattgtgctatattttaatggcctagaacttcttgatgatttatagcttttgctcatcctttcggcagatgctgcataatgagatttcatttaaatatttaaatttaattctcctttataaatatctaaatgtatttctttacggtaataatatttaaattatatttttaaaacataagtatgtgaacattaaatattaaatcattatccgcgtgccatcaattttctttttttgtaaagatctttgtaacaaatttagtacaatcagatagttttaggattaggacgcaaataaatttattgttgattatgaatgatggtagttaagattaagaaatattagataatatcatattttctaaattgaataacaagattttggaaaggtgtaaagatatttatagcgattcggtttggagtgggaagaagatatttataacaacatatgcataaaaagcaattacataacatattcttttcttgctgtctattatttatagcttacgatttttgtcaaaaagaaaaactatacgaaaaatataaaaggtgacattatttatttgatttattatattatccaaaaagataagggaaaggggcccatataagccataacataaataagtcaaaacatgtttcgatttcaaactcattcttccaactgtcgcagtgaaacactactggtattattagtatatatatagtactactgggctcaagactccacccagatattattatgcacttttttacagctcatcaaatcaaaacagaatctcttctttttaatgtccaaaaaaagagatattttctttctttctttattaatagtattaatacagaacacttgtaaaaaatttgggcaatttttgttcttaaattaatagttatagaagggtggttttttttcttccggtcaggcctaacccaattttggacatagacggtttgtgtttaggactcatctaattgggaggcctaaaaaaaattttatcctaaattatatattttttctaaataagagtttaattttattttttttctatggtccactatatatcaaggctactcttgccgggatataagagcagcttggtcgggattatattttgttattaacacacacaaaaaaaaagaacagggatgaacatagtattaaaaccagaaacaataaagtaataaaacaatgaaatcaacactacaatgtatactgattcaagtcctataaattgatgtgacctataactctactccatttctagaacccgctatatttcaaggccgatcttgcctagatataataagtgcggcttggtcaagattgtattttgttattaacacacaaaaattgaaaaaaaaatagggatgaacataatattaaaaccaaaaacaataaagtaataaaacaatgaaatcaacatcacgatatatattggtccaagtcttatagattaatgtgatttatggctctactccggttctggaataccaccaaatctcctttattgattaagcaagaacaaagtacaatatagtcgagattgattctctcaaagtgtttgcctctcacactctaacccaagaatcttctccatttatagaagattcttcatacaaaactcaagctcaatctctctcttttttgtgtacctctctctctcaagaccaccttttgaaactcgcctgatctcatcgttgtttcaaaaagataagtgaaggtggtaattataggttcgggatatagatcataaagtcggtagttacaaatgataagttgttagttagttactacttaacaaactcatcgtaacaatatctccacgtcagcacaaggtgaagtacttctggataaaacgtacgcttcttgaaagactgaacaaagcgcacactgaaggaactttctagataggaaagacaacagttagagtcgactatctagaactttattctacgagggaataactggccatctagaattcctttctaaaaaagactatattttctaaatacttcatctaggtggacactataaacatccgagaacacccttcacatcatataaacaaagagagtatatgagtttaattatatgagctctataagctagcaaatactactacttattatatataggtataaatggttataactttgtaactaattagttataaaataagttttcataaaactagttataaagtttatgtaactaagtaactagtaacatatttcttttggaactttgtaattaatatttattggagaacattgtcccacatggattaaatgtaaaagtattgagccatatatgaagaacatgggctactccactcattgcc

SEQ ID NO: 382822 - DNA, 1818 bp, Cannabis indica
gaaaaaaaaaattaaaaatatttcgacatataattttgaacatagaaattgactaaaaaattgtaataaaagattctaattaacagtatatattattttactgctcaatttgctctctcaggaaaacatgaaaataatatggtatttcaagacattgtagagacaaattacacacgtaacatatctagtttgttacgcaaccaatgatgatacatatatatcattattaatttaattatacaataatgagaagagtgaacgtagcagtagatagattttaaagtaaaataaattttcttttttttttttttgaaagaaaagtaaaataaattttcgaaaaagaaaagaaggaaaagatggtaacagttgcaacaagtattattatagtatcaaaaagtctctgttcctatcccaatcaatggacgcacttaacaagtttcacaaaacgacaatgaattatataaaacgacaatagtttttaaaaagaaaaagaataagaaagttagttgacacgtgacaaacctggtaggcttgtatgagaggaaggtcgatgatggaaggattattggcctgaacaccagccacggcttgggtgagacccaggctttcgaaggagtctcgaacggtgagagaggcgagggagtcattggtggctaagtagagtggccaagtgaggcggacgcaattaaaacccatcgaagagatttggtctgcgatggcatcgatgggctttttgctgaggccttcggccactaccgcctctagatgagaaacccaattcacgcacgcaagtttcactctgtgcccgttctcgtccacaatccatctcgaattcgtgctcagcggctcaccagtcgcaaccccaatttgggaaatgattagtaatattgtaatgagggataaagttaagagaaagggaacaagagaggaccttctcatttttttttcttcttggaggtgaattaagtagtttgagaattcaaggcactggtagttatcctatatatagaattaaaatatttctatgtggctttaaattataaaaatgagagaaatgctaaaggtattactgtctaggactttcttatgtgtcaatatagttattggtccaactaaatatcgcgtttcatataatttaatataatagtttttaggaagtatcgctagccaatcgcaatacgacatgttgagaaggtgctagacaccactggtgcttaattgcaatgctctattaattaatatggattttgtttttagtttgatgtagcaataaactaataattaaaagttggtttaatcattgagaatttgagtatttcgatgtttttaacattgaaattttgtagaaaaataaatcatcaaattgactaagcattagaaagttattatttacctataatttatagagaattgttattaggcactagtaatgtctaacatttttagggtgtgtttgggatagcttttaaaaaagttagaagcacttttttaaaaagttatcattcaaaatgtgtttggtaaaattagaaaactagcttatttaaaaatttaagaaaaaatttgagctttttgcaaaagttagtcaacaccaactttgagaaattagcttgtacgtgaagctattttgttagtttaatgaatattttacttgataaaattgccctcattttaattataaaattccctttttaacattttactttcagattctcttcttcccaattaatatatctttctctatcatctttatgtaatagataatatttatgtaattctttttactattattattattagtaaaaatctaactaattattt

SEQ ID NO: 382823 - DNA, 3560 bp, Cannabis indica
caatttttttctttctagatctcttcaatccttttctttctctctctaactctcttctactactactctttgcacacgagagtttctctcactaggttctcactctagctttcttctagatctagagagaagaatattttcaagtggtaagtctcttcttctgatcttctttctatttatagatgtagagttagttgagttgaaatggtagttagtaaataacttagttaatgttgattgcagaagttgttatggctgttgagtctagtagattagaatctaactgtattttttgttgtatgttgaaacatattggcttatatgaggaatttatttcaacactttatattttgccataaccttatacataataacaatctacaaatttttataattttggggcaaagtacaactttactaaaatattcttttagaatgctaaaaatttctagatttgcacctcattaccaaaatgctcatatcttgagctatgaacacattttcaagagttccaaagcctaatattagatattgttctacaccttttttttttacaaaatcagaaatgttttggaggtctgacctattgaaagtcagaccacgaacattgacaacttgtatttttacaaaaattacaacttcaacaatttttaatcaaaactttaagcccattcatgcatgaaaaaatttacacataaaaagcataagggatatataaagttttgatcatgtatatatatgaaatgagccatatatatttttgtatatgtatattgcattttaatgtagcaatgaggtagatacatccatggtcaaaacaaaatggtgaaattaatatataatggaattatgaacgatggtttacaggctgaatttctcctaaaagatgtctttcggactgattaagttggtccccaacatttgccaactcaactactactccaactgtattaccagaactaccatctttattaggacccacttggctagacccatttgaagcctttctcattcctttattcttcttggcctgccgagcccaatcaactaatccatcttgtatgtgttcttcgaaaatagctttcttgaaggacttcccatctaataattcaaattcaacaacatacaatcatataatagtaatgaacaaaaacaggtacttaattgtttattacaactcttcccattcaactcacctgtgtgacaatggcatacaaaggcaaggtgctgtaactacaaggaactgaacaaataccctgaaaagaaaaaaaaatagttttattagctggaaatatagtacttttaatctctaccaaatttttttatatatatataaatatatagagatatgattttgtcccgagatgtattttcacggaatgtattccgtgatacattagaggggtctcagggtacattaaatgagtgttagggtacgtttctattttttaatcctaattagccctagaacaatctaggccgttagatcaaataactctctcatctgacggctgtcgtacatcatggattacagaacaaaataatatccctatatatatatatatcttttcacgtacccaatcactagtcggggaatgataaagccgatctgccccattatgcaagagtcaaatccgtattgaacctgtgacacattatattgaaccaatgatagattcaatatatgagtagggaaataatattatatatcccaaaatagcaacactaccaagaaaaatgtgtagaaaaatgtacattgcgtacccaaatccagaagaaaaatgctagttcgaaggaattttggaaaagtatgatatgaatgagtatgagaacaaggcggggtcgatgaaaccagaagtgatcgtctgatggtttaactaccaaatcgccttcaattgctacatgtttctcagcaacttcatgggccaattgggtaattacatgctccaacttagtgccaacagcaagcagaagctaatacattatttttacaatgttaattactaatgcattataaatatacttatattggcataataaataattatatgtatatatatatatatatatgtactacttacaagcaaaggtacgaatgccaaccaaaaatatgcgtgcaaacctgtatatgtagaaattcctcaaaggttaatttccggaagaaaaaaaaaacaaagttgattatttgtaagaggatgaaataaaatgaaaaaaagctagcttaccggatacattcaggcacaaaaagaacaccacaaacaaccacaaataccaactgcaattgattattcaaaagtttgtgttagtttagcttaatttgtttcaaaaaaaaaaacatttagtttaattcaagcgaaaatgttatggatatgaatataatctatatatatagcaagatagcactggtgaatgcttaatgtttcataataataattaactgtaatgatcacaacacaccttatcccaacaacttttttaaaatcagcttcaagggcacgaatcatgtacttgtggaaattaaattttcggtttcccctgcaatgtgtctacaataaagattaatttacttcaaatttatcatatacaaagtaaaaaatattagttacacaaaaaatttaccatgataaagcctagcctaagtgtcaaataatctgcttcggtcacagatccaaaaatttgcttgaagaatgaatgctgaaatttaagaatcaaaagtttataatcataattacacagacagaaatgtatgcaactaataataatgaataacggcttaaattgattgtaaagcataattattaatcatcatcattactactcaccacccagcctaaaagtgataaattcttcccaatgcccaaaaagcgacccctgataaaatcgtgaccttgaacgtccgtgaactttgtttttagagctacatatacatatcaacataaaaatgtagcaagtagtagtaagtacttaaacttagaaaaaaaaaacaaaaccaaaccaaaaaaaaaaaagcaaaataggtacgtaccctcttctgcattgtttgttccattttttgagatagaatcctcccattttttccattgacgtatctagagaaaggaaaaaaattttaataatatgtacatgttcaatgaaattgagtataaatttagagagataggtaggtaagatacctttatcccaccaaaaagaatagttaaagcacagaaggtgacatggacaacggctaacacaaagatgaagatatgaagatggtggagtgctgtagtggacaacagtggaaccttttcctgaggacaaaagcaaagaatttatttatagactatcattaatttgtctcttaatctattctatctgttcttgattcttaaatatgtcttaattcacttgtcacataataaaagtataattctcttggtatgtatatgtgaagacagagtaaattgagtcatattataataaataaggatcgaataaagaaatgaaagaaaacatagtggagtaagacttaatagatagataattaattaagggtaattaggatttaaatgtaccaaatc

SEQ ID NO: 382824 - DNA, 1403 bp, Cannabis indica
taaaacactaacaagtatctaaacttaccttgtaataatactcccaactcaatactatttcctcataatacacaatataaaatctatgtaaaatattagaaaaacttaccactaattcttaagctagcttcaatctctcgggtaaagtgttctcttcacaatactcaaaatctcctagctaggtgaaagtagaagttgaaagagaataaataaaatgagagaaaataaatggcggtggtggtgtgttattctcgacaatggaatgaagatcagagggtgagatgactttgatgatgatatatgtgtattatatatatgttttgattgtataataaaattgtcatgactattagaatagtcacgggattaggtgccacgtaaacaaaaaataagattattttaactttggttttacttcatttggtaaataagatgataatggatgatgataattaccaataagatgataatggatgatgataatatatgggtgtatatactgtatacatggggtacgatcatagataagtgagagagagagttcatttaactatggtatataagacaagggtgtaaattttaatgagtcattagatgctcggtgtcattctataactaatctcactaacatagtgtaattaatttaatttatacaacttaataaccaactcacaccaattaactaatacactctcagttaaaatttaaagtcaacttagtaaatttccattaataaatactcatcacattaaaatcacaactaagtttaatacttatctatccactcacataatcactaaaggtgctactaagtccatccctaaaatctcagaatactacactctaatatttacatattatgactttctgctacactgcataagcgagtttatattcatcgatattaataaaagtatcacataataatataaaatccgagcacacttattattaattaaataatatcgtaaatagcatataatattcatacattctaataaaatctctataattaataaattactctcatttactcacttatagcatatttaaaatttatgctaagatatattagtagggtcataatcctacttttaaccttattaacctataatataaaattataaatataaactctaattatttactattaaacttatcgagatattacatattcactttttcttttggatttaagatttttcttttctaaattagatttgagttttttatttatttctgtaagattttggattaagttctgagattgttacgggtggtgatcgtggtggtattttcggttgtagtggttgattatttgagtggatagtggtgttggtgataggcttgatgaagtagaatgaagaaaaaaaaaagataaacgaaaaatgaaacagaaaaaa

SEQ ID NO: 382825 - DNA, 699 bp, Cannabis indica
aaattggaatttttccttctataaatctcaaaagacaaacaggtataaggaaaacaatttatcataccatacaaatgatgagaagactgatcttcaaaatctgaagcaattaattttccatccactttctttcggtaaaatttgtaatatatgcctgtggcaaccaataacaccccagcgacaactgccacaactatgatagcaataattccacccttcagtcctgcttagaaaaagcaaaatataagatcaaagttccatgaagttttgtcttaatctctgaaagttggcaacttaattaacttctcaagcacctgagctgcaaaataaagaaaacaaagaaaaaggtaacaaaattcacaaatgttaataatttggagagagatatcatctctttgaaatggtatgataaaagaggcagtaggagctacctagaagtcagaggccgaaagctgccatctagatctgcaaatttgaagcaataagagcaacggtgagctaagaaatcagcaaaagccacaatctaaagactagattaaaaatacaacagtgcttcatcgaatgacgacttcaacttcaacagtctaacacagctctccactaacaatttgagccgatacatacaccaaacaatatacagaaactatctggctacgataaaaagagttattcctaaaatgttattgtttcattcagaca

SEQ ID NO: 382826 - DNA, 5725 bp, Cannabis indica
ctctctctctctctctttctatactctctcatacgtgtagacagcattatggtctttgtgagattaaaatcctaactctattacagtgtctcatacctaaatttgttcattcaaataagatctaatagcccactctattcctgagtgttgaggcatgcttggaagataaaggtgtggattcttcaaaaaaggtctttgataagatgattgataattatacgaaaagaaataaggatagcatgataggcatcaagatgtattatatttcttttagtagtttagatttaatctatatatattatgttgagatccttaggcttatggttcatattggataaaaactactttcattaaagttctgtttccacttttataactctgatatggacgataaaaacaaacaagaagacctcttctaggtcagtgctacgttctacagaagtcttggattttactagcatgtcatctacatacacttccatattcctcataagtttgtccttgaacatcttcttaactaaacgctaacaggtcgctatgacattgttcaccccaaatgacatgactttataatagtacactcccttatccatctgaaaatcaatgtgctcttagtcaatgatctgaattttgatttgattatagatggagtaggcatccatgaagctcaacagctcatacttggatgtggcatccaccatttcatcgattcgcagaaggggaaagatatccttggggcaagacttataaaggtttgtgaattcaatgcatattctctatgtgccattgggttttagaaccaagattgggtttgccaacaatacttgctacaatgactgccagacaaagtcagtttatctacttcattctttacggccttcgcctttacaggatccagtggcctccatttttggcgaacgggtgttgtactttctttgatgttcaatgcatggcaaattatgttggggtttatccccgtcatataaaaattgctccatgctagcacatcttcgttttctttgatagtactcacaatcttttccttcaccactggataaaagttccttcccaccttaatagtcttggtgggataaagttcatggatttggacttcctccacatattctagtggctcaattactttttttatcccaatccaaggattcaatttattttcacagtctcccagatagctttagcttccactttaacatccatttcatgagtaagaaattcttcttcccaaaccataaacacggttcggatagaaatattataacaacttttgacacttttttgaacatccccttactactccaatgcttctattatcacaagagaacttcatgcacatgtggcttgtagaactcacagctccaaaattgattaggactggtcgtcctaatatgtcattgtaggctatggggcaatctataacaattaaggtctagtgcgtgaaggcacaaatattattctctcccttgaatgtgactagaagctggatttttcccatgggtatgagagtgtatccaataaatccttgcagttgaatgggtggtgataaattggcctccatgagcccaatcgcttggaacactaacttggacagaatgttcacgaaacttctattgtctaacaagacactggaaactctctttttggatatctgagcttcaatgaccaaagggtcattgtggggaaattaatgtgccttgcatcatcctccgtgaatgtgacgagaaaattcatggtttaaggacattgtgctggtgattgtactaatgcacacatttccccctctccgtttcattcctaaaagtatcttttttggggactccttgtacttctcaaaatatatggtcctcctaagatcgttgttacatgtccgtctactggtggccgagctaaactcggagggtatgggttccctggtcccaaagctaacattgctactacagcctgggctggcagagaatgtagggatgatagttgtgttcttggagctgaagggtgatgtaccccttgtagaggatttatgacaccttgctgtcgctgaacgataattagtccatgaacaccccctattcggcataaataatgggaatatggacccattatcctaggtgtccagctcttgccaacatttttatcttctccattaagtagccacatttaatggttgtgtctcccacgtctctgtatactcacacctcttattatgatctcttttgtacttttccccaggcatccttggggcttcctgtagtgtaccatattttaggtttttttgtacacatttctcgagtgtccaccaagttggtgtactcaatgtatttttgctcataatccttctttagattttgttaagtctcgctttggctttggttctttacatttctgctactccaggaatgattcaaatgttgttcggaacacctttttatgggtttcactctctaagagcaatactacatctggaatgtgccactccatagatagaaaaatgggtttgtgtaggtgtacgcacggatgcagaaggtccatagataggtggaatgtactaagttttgggaacaaggaattgttgagcttatcctggagtagatgcagaagggatcggtacaggagagactatgaaagctttctagtaagcatcttctaaggttatgaaaccttattctcttgacataaactcgcactaagtcttaactcttttccttttcacttctccccataacaaggattcaactatgagtctagattgtaagcctacgagtttcatgttgtcagtcacatttgccttgtctgcttcctccatcattcacttaaggaaattctttaagctttctcgcgctcgttgttttctattggtaatcgaccccacttcaacatcatagtctcagtcagctatgaaatgcttctagaaagtatactgcagctctttctagctatgaatcaattcgatagccaatctgttccaccaatcctaagtagacttggtgagtctcaaggaaaagaagaagcacttaacatcttcacttactctagccacctacatcatcttgttgtacctagctaggtggtccctcgggttggtacatccataatttgaggcatcttaaaactctccatgagtggggcttccatgatccttctgacacacggcttcggttcctcatcttcaaaatcaacgacgacaccactctacttctggaaaagttttatcaaagcagcaatctactcttctagcctctttgtatcactttccagaagattgcatctacgagacttatttttcaaatggattttgtggtcattcgctcgtggcatcacctcttcttttttatccttttcgtacatagcatcaaggcaccttcgaagatctttagtggaccaattgtcgttagaatactaaccccttgtccgaccgtcctgattaatggaattattggggctatttttcctacccatgggcctgggtactttcgtaccagtccttttttcacgtccggacctttctgggcagaagggcgtccaagcctattcccattagtggccttttgcgcctgtacaggtctggattcttgctcttcttaggaggtacgagagctatagggttctgagggtcacccacctttgccttccccttgtcctatacaggagtagaggttccaacattggcagggttttcgccattaattttattaacacattcaactaatggataatctttagaatcctcttctagatctccaaatttgtcatggaggcgagccattattctctccatcttttgagaaatcttctcctgacgggctagcttctcttgggtctcatgcaactccttagaaactttagccatttttgggtcttattcataatgatactcatctttgtagttcttgtctttgacgtattctccatcatcatcttcttcctcccctttagaattttggtttttgttaacatgcttttgatgcttgcttaggtcaccctcctatgattcagcttccgatgtatccccctctctcacatggcttggctagacgtgctctggggaaagaggattgacatcttccatgacagcatcgaggccaccttgagttgtcttcttagtaactatgttttgagtaaacacaatgttggtggtatgggtttagatcattctttagctctcactaaaatatttatcgagattttttgaaactaataaaataagagcttatgaaataataagatccaataataaagaagacatgtatttttcacatggtttaggtgttaatgaaccctagtccacgagttaatttgatttttcttatgaggctttgtatcatgtttttacagtggtgtttgcaagaaaccataactataccctctttgtttttcttgtagaagaagaaagctaataggaaatttggcagagcttcggctatcttgatctcgatccccccttcgtatgtaaatagaacggtatttataggctaaaggacaggtatggacatgcccatgaaccacctagggtttctgcaaaaagcaaactaattgggtaaaatacatgtcaagagctagctattaggccccaaagaaggttttgtgctcgtgcgtagaagcagctagacaatagaggacaacaatttgtaaaagacacgtgtcgcctaaaggtttcaccttgtaaagtaaattctaggaataaccatcaggcaaaaaagtgtatggggtgtgtgcactaagcaagcaacttggaacagaataatatcatgagcctgatattggtaaaaataattacagattagataaattagattaaaatggggtcacaatctttattgaggttcaagaagagaaaattttatggtcagcataacaaatatgtggttacaataagacttagttcaaatttgagagaaatgtagaaaatgaaaactaagttcaaagtgcatgagtgctactggttttcatatataggaaaatgattacaaaaataggcacaagttccaatcacacagtgacacgttacaaccataaaaagcaaagagtaacaacattctgttaaaggaaataatagatgaaatctacccagggattacaataattaagcattccaataataccctttagtaatcattgaagacatcatttggtggtgattcaatttctttgactgcaacccttcaagctggaaggtgaggcagtcacattcaacttagcaatgagaaactaaaaccttgtaggagtgagacccttagtgatacaatcagcaagttgatcatgtcatgggacatatctaatttcaagtttcttttccaggactttatctcacaaaatacacatccaattcaatgtgtttagttctggcatgatacaatcagcaacttgatcatgtcatgggacatatctaatgcactagcacttaagtcgtcacaccatataactggagctgaaggaagcttgaacttcatctcactcaacaggccttctagccaagatatttctatttccaattaagctagagctctgtatttagacactgtggtggacctagccacagcagtatactttttggaagaccatgaaatcagagagtctcctaagtagacacagtaaccagtaatagacttttgatcatctgggcagcaggcccaatcagcatcgtagaagccatctaaatgcaagtggtgacttggtgatatgtgcaatgtttggaaaaatattttaccaggat

SEQ ID NO: 382827 - DNA, 7728 bp, Cannabis indica
tgtgactaagcttcctgagtaagacccagaacttgagatgctggattgaagagatgctaaggctgtatttggaatagaaggtaattggcaattgacaaagcaccggacagagggaaggagtactggcattgctgtttgaatccgccaccgaatcatgtcaggtagttgcatacgatctaagtcacactgcattgccaataagatctaattaggttgacaaaaactaataacaatttgcttggtctgcaaatttttacttcaatttatttgtttcagaaacgtattcattgaattttgataattaaaaagtattcaaaacctacaaattttaaatgaaaatgctataacaaaaaatccaagaaaattaatggacaggaccaacttcactttctggcagtgtggtaaagggagaagagaatttaacacagagcaacaaaatcacgtgagtgaataatgaaagtaacgaacctgcaatgtttctgccaattcacgatcaaatatagaaacgtcctttgcatggtcattggttgacttggaagcaggctttgatctcagccagcttggttggcaactgctcatcaacccatgtagaaccaacaataatcgatcgaagagactttcacctaacgaatctgtaatgacagatgaggaagtttctgttgaagattccacctccttcttggacaaagtttgaatgggattacaggaaagctctacatcctcatgcaccactcgattccctaatagacgaagtattccggaagcaagcatgtgtctcatgttccttcccgatggctccctgacagatccaagaaacacaattgtataattaaatttaaaacataaatatatataaatattaccactaattttataaattcctgataattcagaacgtataacaactcgcaagtcaactaaaagtaatcataattaagaatcggtttttcattaggagtgttttctgataaaatgacattcataaaggggtattcaatttaatcctttattttatattgggacttcatgctgaaaatatatgcttcaaggggcaagctctaacatattattaagttcccatgacaaactaaaaccaaacctctagcccattattaggtaagtccccatgacgaatcaaaaaccaaaacctcgtgagaacaaccttagaatctttaaaagccaagaattttgaacatatttgtttggtaaaagccgcaataaggtattgaacctcaaacttgtgggagcataacataggttaacagcttgatctttttcccaagggaaccccaactatatttcaaagaaacttatcaaaataattgcatcttccttcagtaataggtaaaagttcaataggcatcatgggctcaaaatcaaaaacaaactttttaaaagtataagaacggaagccaaaagaacaagaaaagagtttcaaataaacaaataaaatatagtagttaagtgtggtaaaatattgcatgcttacccatctgaacaaatcccaggaagcaatcttagaagtaattgcaatcgcaacaacatagaagctcgcaaagctgcaggcggaggtggtgaagaatctgctgctgaacttgttactgctcgtctcgatagtccaggactaccacccttaatagctttacggttacttcccttggtcgttggaccttcaattccagaaggagatgatcctgcttgattattcaccccacgagtaaatacatttatctgctgttcaatggtattcaactgcttaatcagatcattagcaaatgtattgcgggagtcatcagagctttgatctatgcatggaagaagtaagtcgatgagagccctatctgtcacattctgctgggtgacgttaaacccttcattgtcagatgttggaataggcccttttctgcatctttttgaatctgttccctcttcaatgacttctccttcttcaagcgagatggcttcaaatttcttttttgtccccagttgtgacagggtgagaatcagacttataccatccccaagatttccaaaattggctttttgttgaaagaccttcgctctcagctatattaataagacgctgtctgatagttttccttcccaaaagaacatcagtgccagcaaggaaccactttgcatgcattaacatagaatcctccagagatctcccaaaacgatgaaccacatctgcgaaaagagatgcagcatcaggcctaaccaataaccttgtgagaatgatctgaataaaattgttctcattatcagaagcagccgcttttccaggactaggtgtcgaggaacgtatggcatctgccagggatatatcatgggactggagcttctcaacgagagtttgttcattcaaaagaagtcgtagctctatccattgccaacgaaactttgcaggttgtagggtatccaatacatgtgcaagcttgtccttaagctttgtctcagtctcggcaaattgagttttagattcaccatgtcctaagacccgatttccatcctctggcatcttacagtcaatgatagcatttaaaaaaagccttgcacggagaggtacaaatgccttggactttaaatgcatgtcagaaccacctaattcaagaatggctgcaaattcagcatcacttccatctgcagctattagatcataaaatccctgactgtctctcaagcatgcatctcgaaaaggcaagtgctttatggcatcattaaaagccagcgttaaagactggtataattgattaatatcttcacggattgaaaggcttgtacttaaaatgaatggtcgccatacaataaatgcaaatattgaatatgcaggtggaaataccaaaacaacaggaagcatattctgcatcctggaaagagctactatggaaggttcacccaagagttccacaatcaatccatcagatacagttctgcagtttccaacaaacagcctaaaccagtgaacataaacttcaatgaggttgtccatcttaaatcccattgaacgagcactgccattagaactagatcttgtgctccgtataaattgaactatatccaacccttccttcagtcttagaacagttaccattctctccaagctagtgatcccatgaaccactgccccaacaacaagagcagaaacagcagctgcaattttagtagctctaccaagaaccacttttgtggaattgttcaagttttcgttggacatgctactatttgactcgtgagattcaggagatgactgaaactgatttcgagatgcctttccaggagcaaagactgcagcaagggctgaagaagcttcagttgcaagggctacctcaaatacacgggtttggcgctcaccaagcgcttccttaagtaggcctagacagcttatatggatacgcaatatacgcttggcaacatttatagaatctgtaggagatggagcatttggatagccacttcccactctcaaatcaggcaattttgcaatagttggcccaacattaccaataatggcagaaacagcagaagacaccaaagatggatccccctcctgagcagcaccaccagtctgcctaatgcattccattaagtcagcaattattctttgtgctatctgatacccatcatcccacttttctgcagcaggacccttaggagtcccggcagcaaagacctttctctctttaccaaaaaactgctgaagaacatcctcaacatttaaatttcgttgcacaatgtctctcatgtttgcacccaccctggataaacggccaccactaatcttttgacggaaaaagtcatcaagatcttcaactcctgcaggaacaccaagcggaaagttttgctctccgtctgtcgaccgtccagactcaaattcagaaacaagtcttttatcgcatgttgccttaaagtttttctcccattcaataacactagccacattaccatatcttctcaataaataccgtgcatataccaaaactgatgagcctgacactcttccgttagaggccattactgctgcagcacgatgcattgcagctgacaacgcttctgaaataagatcttgtgcaataagtatgttctcatacctgaaccagatttatagtcagggcatttaacttgaaccaattgcaatgatcagccaaatcaagctaaagtaaagcaaagcaataatctaaacatagcataagagtttcatttatataaaataaattaagaaagaaagaaacattggatagtggtttggttaattaatgtaaaagtgttttacccaacaatattaatgcacatatgctgcatggtacatttctttgaatgcaatatgcataatactatctcagttttcagtgagaagaaaaaacctctatgcgacttgataaaataaaaatttcataagttatctaattttgtgatttcttaagatgctgaaatgatttcaggaaataacaacactggcccaaaggaccagtatatatatgcaaaaacaattaaatattaagacacgtaaaacaataggcattcaccttcgaagtgatgatactaaaaatgcctctcccacttcacacacttggctttctacatttctcggcaacatgagactgttccgcccactatggattgtggaactagggctaccaagtaccttaggcagcaaccaaaggacaaacttgacagccagcactagatcgtttgaaacatccatcaaatagagtatggcagatagttcgtcctcaccaagcttccatcggatgccattcctgtcatcagcagaagggaatggcctccctaattgtccaaccttggatatggacttttcaacctcttcaacaaccttcctaacaacagtggccaaccacattgaaattgttctcttttctacaaaatgcagctgttttaatgctttcccaattgaaacaacatctgtgcaattgttagcttttatcctttcagcagacttggaattttctccttccagtccagatctgtgatgagggcaacttactttattatcacaaacatgacttgtagatgctccttggctaccttcaatcctagaatttgctaattgcgcaagactttgagtcttacggggtaatttctgcctattcctggggacctgcttatttgacttcagcgggggatcaaccttcatagactctaaagatttagacccctttttcacccaccaggtatcttcatcatcagattgaatcgaagattgtccttggaggcaagagcttctttcctcacccagtttttgccgctttgcttttttacattcttcacacccaggtgtgccttctcccaaatccatcttgttaaagagtgccatagaagacctcttcacaccaataagtgtttcattaagtcctgcatctgtagattttagcaaagtgcttggtagctgtaacactactgagattgcttcctttagttcttcaatatcaacctcgtgttttacctttttacgtgaaattaaatttgatggctgaacagatttccactgatcagcagaggctgatgaagcaccatccttcccggagattgaacggaacttttgtttttgagctgatatatttgttttattagactttttactgagattgcaaataagtccactaagtactagtcgtctctcatttgagtaaacttgcatggcctccaaaaattctgggtcttgagttaacccagcctccttcagtgcatcatgcacaaatatcccaggcaattgtttcaatattcgataatgcctcttccgtctatcagcctcaatcaacaacccattcatttccatgattccactcaccatgagctgccttacataagcatgcgggtaaaatatccctgcacgtatcaattcgactacaagcagctggaggcgttgaaacccttcccccttgcatgattcatgctgatcaatccaacatactatgatatcatgtaaaggacctgggctctcaaaaattgaagatatgttcataccccgttgatcaccatattttgaattacttttgaagtcatgtaaatctcccatggtatttttgactgaaaatctgttctgctgacttggacattttgccagaatattaactccaaatgggttgtcattcttggatcgaagtgaattctgcaaacctcctatcttcagctttaaaagccgaattgcaacatatacttcagaaaaatcttttctgccagtaaacttcaccttgtcaggaggagcagtccgaaaatccctgaaatcacatgtcgcccattcacaaagtaaaaatacagagcaaacaaatgataagttaacattcccaatccacttcaacgatgatctcaagcagggactgacttctgcaatccagtgttcactggcaactccttcacaaagatcttcaaagagaagtttgtaagcccctttgacatcaccttgaatacgggatctatctaaagcctctgccactttagccacactatgaccaggatacccaggacgtgcagcctttgcaagattatcagcacgcttctgaatagatgaaacaacgtagttaagggccaaggattggtactgggcatcaagacccttactcctaaacagacatgaaacttctgatgagccaaatttaatctttctcgcatcatcggaagatgactttgacaaatttccatctgttacaacatgcgaagcaacacaagatggcaatgggaagcaatccaaagctacaaatgtatcaggcacagcaactattaaatatcgaagcatctcaatcagtgcagaggttgtgtatgcctttcgggaattatctacaagatctgatccacctgaagaaggttcacgtataaaacgaacggctattcccacaagagtgcgcacatatgtttgggatagaacaacagtttccaaaacaccatatatgatgggcaaaagcaactgcacaacttccagtaattctttatcctgaaagagtgaagtatgaaagatatttataaaaccagacaaaacttaaacaggaaaaagtaaaagataataataagaataagcatacatagatattttaagtaggagacttgggcaaagagtacctgaagctgacggagaacccaatcaattacaaaagaaggcagaatcagtccttcagcatggtgccactgcaaaaggcgtaccatgtaccaccatttaaaatgcagagaagactcttcgatatcaggtgcagctgaccctggatcactcctttggtgtgcagcagacccaccatacaacatttgtggtacccgatctctggtgtgtgaagaagaatgagcattgttctttgaaaagaactcatccaagagggactgcaagtaatcaatgacatcttttgtccacaactcagtgcgggacaactgagctttatcggatgctccagaaataccacctgaaccaggtcgaatctataaaatgttgaaatcattatatgtcagctttcatctttaaaagtagcaaagaatggtcgtgaaacaaagcaaaactgctggtgcttcagcacccatacctgattcaggtatgttactttgataaaccaggttgccctgagcaagggaacattattccttataagaacatcaaataggtatcgtttcctatacccatgaggaacatgatcagccagggaacgcaaccgtttgtgttgttgtgataaaccctggaaataaaaaagaatttgaaacttatatgtaattttcatgtgtatatatata

SEQ ID NO: 382828 - DNA, 1082 bp, Cannabis indica
tattacaccatatatcagtttttttaaaacacacaagaactctaactttttaaaaatttattatattttattcattcaaatttataatatttaaagtaaattacggtaaaaccccgatagtgtcacttcgctagcaattaatcccctaaatttaaattttgacaacaaaaaccccaaacctatatttgaaaaacaaatcacttttccgtcaaggggcacttcaattccaacctggactcgcggctgtcttcagttgggtttcacaacaggaacgatttgagttgagtgggtaaatttgatatttgagtggcaaagagagagattgagagttggtggtggtgatatggaagaagagaaagaagaagagtaaagaactacaaatttgaaaaaaaaaatggaaagaaacaaacatgtaagaagaaagaaaagggaatgaataaaagaaaagaaaaaataattttataattaattttatttttaaaattaatttgtattttaatttaaaattatttttaaataaatatagtatctagaccaatataaatgtatcatgtgtacaatagtgtacaagtaaaaatgtcatttaattacattttgtgtgacgtagcaatagaggttgatttgacacttgttcacttaagccacataggtaaataacggactgagatgaatctaagaggggattgcagcaagaggaccccttatccccacttctttttgttatgagcatatctttctcgggtgttagaaaaagtggctttgcaggaagagtttttcatcaccgatgcaaagttttgaagcttacatacctttgctttgtcgatgacgcgatactctattgtaatgggaatttcaagtctatcatcttattgattcgaggtttcaaacatgtctttgacacttctggtctttaagctaatgaaggaaaaacttctgtgttctaccatggcatgaaggaaggagaggttagaagagttcttaatgtctcagggttctcgagaagtgatgtaacgtccccgcttcaagtctccattgggcccttacactcacggaatgaatggctcttatacacgagtacgtca

SEQ ID NO: 382829 - DNA, 1029 bp, Cannabis indica
aaaaaggactttacactatcaatgtacaaagtcaaagtctcttattaagttattaaaccatgcatttggtgtcttgtaggggtggagacccttaagctagttatagtatatcctattcagttggttagttgacgagttgtgtttgaatgtaaaagtgtatagttgaggaagtaagaataggtgagtgtatggttcagagagttttatcgcaaaattaattagcaatgaaaggagtagctcatacattttatgtatggtatttaatcttcatatattatcaatgtgggactctaacatcttttttaagatggtagttattttcttgctcaacaagcttgcatggttcgatcacaagtgacttattttgattcacaacgactctttttgactcacaatccccgaatcacaatcgactcttttagctcatctttttaggtgcatatattgggttataatgagaaaaatagtccatacatcttataaatagtatttaattttcacacattattaacgtgagactctctaacaatccagacctaaggctataaaaatatgagaattgttaaaaggcactactggtgcctagcaccttccttggtgtcataccggtattgtgtaattatgtatcgggtcccatatataacttttagataatatcactaaccaatcatgaagaaagtgttagccagacaccactgatacacgataaaaatattcctaaatatatagatctctatcctatcatttatgatttaattgtgtgaaaacacttttaagattaataaagagataaaattcttttactttaaataatatagttttttgtttttgtttgtgagggatttgggatgtttggggtcggcttaggatggtggcaatcggagatggagacctcagctatccttgggggatggaaattggggtcactctttcttcagccgattctcagaagcaattgagatgtgttgaaagttttaggtcactatctatgtgggagaaggttaggtttttttcttaatgtcatttatc

SEQ ID NO: 382830 - DNA, 2677 bp, Cannabis indica
ttaattttttatttattttaatggtttaagtatttagtttttttaaaaaaattaattcattcttttaaaaaaaaaaaattacaaaaaattagttattttcgctgaatagcaagatttgtacaaaggagattaacctcaatccacatgacactagctttgttagtcaaatcataattggttaaaatgtgtgctaccctattagcatcccaatatactaaagaaatcctattcacattgtcatacattaacatattccgtatatggtcaagtatatcatcaacgtctcgacacacatcttctttttatatgaattaattagacagcttcaagacaatctgactcgatgttaaatcttggtaatttcttttgtattcccaactgtagcccatcttgaataacgagcaattcaacatgaaaatggtagaactgtagtagaggtaaagaaaactcgtcctctactatctagaatcacacttcccaatctcgtatgccctttaccctgtttaactcttgcttcaacgtttattgtacaaaccccaacagtaggaggctgtcattttatttccttttctggtcgtgtcctgttatgtttcacaccaacagttttaaaatattcaagataaagagcacaccattcagccacctcagaagcatgagggattttacctctatgtttagtattgtttcgtatgaaccagagattccaaattaccactaatcagaattcatagtcttctagggtacacattttagacaaccacataagaaaggctagcacgtcctctttctcttatcttcgtaccatctgtttaaagtcacatcttctccaaatttccttgactgcattgcagtgtcacaacacatgaaataaattttcacgcattccttttgagcatctaaaatagcttggatctattgtaaccttcctatgaaccagattcgattgagtaggcagccatgaatttgctaattttcacacaaaatgtttgactttaggtgggattttcagcttctccatcttcttccaccaagtgactacattactatcatcagattggactatctatgtcccaccctgttgtggtatgttcaaaatcatttcaacatcgacttagttgaagttaccacgaataaaaaactcatcccatgatcccatctcccatcatgtagcttcaagtcactcacatcaagttggtccaacaaaggaggtttatcatatattttgaaagtccgtgggcaaggcatccaaggatcttccactatttggatactctctccattcccaatccaccatcgatagacattaacaataatttttttctccaatgccgactcttccaaataaaagaagtaagagaatcgcatttagccttaaaaatatcgttatttgggaagtaactagcctttaatactttagcacagggtgttgtcgggtgtcgaacacatcgccaaatttatttagtcaaaagagcttgattgaacaactcaagattcttaaatctcaatcctcctttctctttcgatttacacgggctgaccagttacaccaatgaatttttctttctttatcaaaggaacctggccataagcgggttgccatcttatgtagactttttaggtgacacattcccaagcctagtcctaggctgggttaaggcaagttaggtctatacttaggacctacccaaactcaaggcccaaaaattttatacactacgaatatgtggagaaaaaaatgataattttgtgagatttttgaaaataggccgacaaatacccaaactcacccctacccaagtcaaacacatactttacatataacacatttctaaggccactttgagtcagggttggccctccttcattgcataggaatccatctaaataaaaatatacacaaagaattaatttatttaaagttaagtttttccttggatgtcactcaccactagttgtttgaatgggattcaggtgacacactcccatggctaattttgagctaaaacaggttagacccgtgtctattacccactcaaactcagaattccaaaattttatacactacatgaatatgtgaagaggaaaaaatgataaccttgtaaaattttagaaaatagacccactaatacctaaactcatctttacccaagtcaaacatataatttacatataaaacaattcttaggtccactttgagtcagggtcggccctcaggcctacacaccccgtcattgcatgggaatccatctaatatctaagtagaatatttccttgcgggaaaaaaaatgtagagcattgatgaatatttcttagcggggttgtagctttcttggtaacatttgaaggaagccataatgatagcccctcatcaaggaaaaaaaagggttcctttatcctattaagactttgtaaggccatctatttctatggttgattggttcttcattaaagaaaaagagttttggtttggcttcctatggattttgaatagttgttaaaatacttccaaaaagagcaagagcttatagttcacatgaaaagacatttattagaattggttctcaagttatttacttttctaattttaagcatataagttgcatgtaggggtgttcacaaagtatccgatccaattcaatccacacgatccaatccaatccaatccgcaaaatgcgga

SEQ ID NO: 382831 - DNA, 2494 bp, Cannabis indica
attttcgtatgaaaaatcaaattttcgatcccaataatcaatagaaacaacatcaaattttaagttctcattgtagtgtagtgagagacatttttttctctattagtaaaggtaccaacctaacagatttcaaatatctaaagacaaaatggctccttatgtagagtctcgtctctctgaagactaaggttttttccttatactcttttcttattaccctcactactctttctgctggtttttttgttgagcgtctacaatggcaaaggatatacacgttgatgtgattgatgaggagttgctggaactgtttgaagacatcacgctcgaagaggttgtctcaaataaggcttgtgttgggaaggtgattggctgcagggacatgccagcatcggttgttaaaaagattttaactggtgtttggcaaaggttgggaccctggaggatgaaaaaatgcgatgaaggtgttttggagttcttttttgaggatgaggatgattgtagctatgttttagagaatagaccctggctggttaatgggatggttctaaatctaaaaccatggcctgtggattcactcgttgtgtatctaatgagaatgctcctactatcgccaagaaagtagggtccttcatcaaggctgattctaagagcaaagaggagctggttcagagaggctttctacgagcctagattgatgtttggctctcctacccaatcccgacagggtttttcttgaaagctgatggcaaaccagagtcatggatccagttcaaatatgagaagttaccacacctctgtttcaactgtggtaagcttgcacattaggataaagtttgccaggctctgacggctatgatgtttcctgctactggcaacgccatcccaatgtatgggatatggattaaaagtgagactgggtggagcaactgtttcaatcatgctagaaaaggaagaacgatgctcttgactgataatgagggggtaccggagtgggaagtcaataggaaagctcgaaaaggtctatggaagaggaaaacagccacgtcgagtatcactgaacaaggaaaagaacatctgcttcaggcaggacagtcgacggctctggggaagccaggaagtaacgtggcaaaaaagatgcttactacaacagccacaatgtcgtacccgactgacaatcgtggtactattgatacgtgcaggaggcgtaatttcgaaaagtatgggaatgttggaaatgcgggtagtacagagaatgaggtggccattgaaaacgtgatcaatatggaaattactgtacctaacttctcaattgggtctgaagttttggatttcccagggcctgactttgctagttttgatgccaacaatgaactaatccctgatattgggcctttgattgcccaaagcttagaaataccacataactgggtatgcctatctcagaaacctcacatgtttcctgagccaactcctattggctggcccaatcacgaccctgaagcccaacaaatttttctcaaactttatggcccagattatttgaacctttacaaagccctgcaatctctattatctaaccccccaaatctgtccgagatgatcatacatctcttggataataataaaaaatgtaaagcccatacatggcttcaaccatatctgtcgtcacctagccagaactttactcctaatgcagctgtggtcactgagatcgggtcgacaagtgaagccccctctgatgttcagaagtttgttattggtgctggggacaaagatgtggagttgagtagaagagcctgcagtaaaatatcgagtagaagaaacaagaaagactcgaccaataggtcttctgaagtaaaaaccagaagctgcaggaaaaaggagaagcaaatgccaaagagttattgactagtcctggaaacctcgacaagatacttgcaaattgcattgagatcagtgtggaatataaccaaaattttcgatgtggcgacgaggcagctgtaagcatgcccccactgtcatcatgaggtgcctggtgtggaactgccgtgggctgcgtaggcctactacagaaagaacccttcagggtctcatccgcaacagcaatgcagactttattttcttgtctgaaactaaggtggatgtgaaagcaatgaggttggttactaatcggctgggattcattaacttatattccctctctgggcattgcaggttgcttctgtgttgcatggaagaggggagttaattgtcaagtagtgaaaatttatgatgatgggttctgtatttctgtctctgctgaaatgggggctcctacttggcgcttgttctacgtatatggtactccgtactactctcaaaagaatgattattggaattggctcactgataagatcaattaatgtaaagagccttgggcgctcatggttgacttaaacattatacttgatgaatcggagaaagaagtgttggcttttatgccctaaataaa

SEQ ID NO: 382832 - DNA, 2760 bp, Cannabis indica
ctcttatgctataaattcggcataagtgaaattgtgttttgtatttatttttaatattttaaatgtgaaatttttgcttaacaataaacattacagaacacacttttatttcctgtttttaaaattagaaaacaaaaatagtttcaaaagacatttttatttttacaaaacaaaatttttaaaaataaaaattttacttttattttatgattaaaaaattaaaaaacaaaaatactactaaaagatactctataacttaaaaaatactgtcatgaaaaaaaaaatcaaatattttcaaatatagaaattaactgaaaatttattataaatggttgaaaatagcacttctcattaataaattacccataaataaagagttttagggggaagatgagtggtagctctttttgtaaattggtgtaaccgtgtaagagttaagcagagcacaaataacaccaaccagacacgtgtgtagacagtgcaataaatttgtttgcacaaatattttctttaactattattatttatcaagaataaacaaattaaagtagaagtagattcataagaaaaccctccactcaccaccgacaaattaaaagatttgtatagaatgtgattggacttgggttgggtatatctaatctgctacataaaaaaaaaaaaacaactctaaatacaaacaaaaactccctacttcaaaagtcaatgattttagacactagcatattttcatctccattatttagattgacagtttcacaattttctttttttactttcacttcaattaatgttcagattattattcttgtttactgcaataagttgaatatgaaaagatatatataatgatgaagtagattttttatctatttcagtatgttagttatttaagaatatttatcaatttttttaaaaaaattaaataatttacattatatattatgacaggccttattattaatctataagttttttgaaaatttatcttaaacaactataacatgattataaaaaaaaattctaaaaattttctaaataccaaaacagaaacaggagtctaacaaaacatccctagggtgtccaatagaaattttctttattttatatactaataaatggcatgacagccctcagaattgtagaaaaattgtattagaatgacattactaatgtagaagggaaaaacaattaattggccaattaattaacatctaatttaattctcttctctattgctctcaatacaaaaaaaaaaacaatgaaattgaaaataaataaataaaaaaggataaaaacttcatgacatccttaattgttgttgtttagtgagattgagaacttaattgctacattcaacttatactattttgatacaaatattatagagttttgggttggagatggaatcaaaacactttccaacttaaaacaacacaaatgaaaaatcaatattacaattaaaaagcaaggctccacatgtacatctaacaggcaaactctctctctctctttctttctctctctattaaaatcaaatggtacagtatagaataggccagtcatttttctagttctaagaggggaaaaataatgagttaaaacaacaaaaaatatatgcctaaatcaattaattgtcacttgtcagtgatgaaattattgactttagattaggtagggtggtaagtcaatttctaagagttcttgactgcaaaacattatattattcaacttgactgacctcgttccatttatatcaacaaaatcttggcccccatccaaacaacttccacctacgtctgtaaaacaataattaatcagaaaaatatctcataatcattgtcatcactgtagtctaaaagggtcttctttttttttttgctttttttgaacaaaagtctaaaagagtcttggttaacttatcataactgaagaaaactagcaataatagtataatacaatgctaaaacaggcaaagcttcacaaacattaaattgtaatgtggatcccactataatagggctgcccttaaatattttcctaaatcttattgtgaacattttcaacattaccacaaaagtacaatagccttaaaaggcaaaggcaccaaaatagaagcacataggagtactatagagaataaaatccaataaggctacctataaattatcatagaactataaagattaaacatgtttgaaaaatttactcataaagactaagtgaagcacatatatatcatttaattatagttaaccaaaagttttgttctagtatttctaaaaacttcagaccaatcctttgaaatattaatttgaagttagaaatagaagcaaaattttacacaaaaagaaataagagaagcacattatgaagctacttttaaaaacgttggaacaagaagaggattaattaattaatgtggagtttaacaaatgaaataagtctgtgcagttagattccatttttttaaaaggaaaaagaggtactagtcttagaggagcattcacctatagcgaagatcacataattctaatatcactctttttagaattaagaaattaatgccccatcagagcatctccaattgagtgttaaaatagtgtagtgttatattttagcatttttaataaaattagttctccaatagggtgctaaatcttgtgccaaaatttgacccatactaaaatttgtaccaaatttaaacaagatataacattgtgtcaaattaggcacaagatataacattgtgccaaattt

SEQ ID NO: 382833 - DNA, 2234 bp, Cannabis indica
gggtgattagaaaagtgcaagaaagtgttatagtgtctcgactagaatagtatttatggtctacaaagaagatcagaaagaggctcaccaagcgtttatccagccaacactgggggtaatccaggaggaaaatgagttaaactcatgggtgggggtagaaagaataatcaaaccaatagaagaggtaaaagaagtttttaattaatgaagaagatcctactaaagttatcaaagtaggatggaatccatttccagccattaaaggaaaaattttatccattacaaagaaaaaccatgatgtactagcatggagccattttgacatgactggaattagtcctcacataattagccatgttctaaatgttgacccaaacgtagatccaatttttttagaaaagaatactgttagatccagtccagtctaaagtagtgatgttggaactcaaaaactaacgttcattgaattcctcttggaggccttatatcttgtttggttagcaaattcgatgctggttcccaagccaaatagaacatggaggctgtgcattgacttcactgacctacacaaggcttgtttagaagattgcttcccacttccttggatcgataaaatggtggacgccatgtctgtacatgcactattaagatttatggatgcatacttcagatataataaaatcgtgatgcatgaagcagatcaataacacaccatcttataagtggataaaggtgtgtactgctatgccataatgccatttaagatcaagaatgcttgagcaacatatcaagtttggtgaacaaaatggtttaagatgttttgaggaagattatggaagtctacgtggatgatatgctggtcaagtcaaagacttccaaatagcatagtgatgatctggaagaggctttttccattattctgatgtacggaataagctgaatcccaaaaaatatacctttggaatttcctcaagaaaatttctaggattcattataagctccagaggaattaaaggtaatccggtgaaaattcaagcacttctagatatgccttcccctcataaacataatgatgtacaaagtctgattgaaaggattgtagtgctcaaaatttttgtttcaaattcaactaacaaatgcattccattcattaatgttctacatagaagtaataagtttgaatggactgccaagtgtgaagatgccttccaaaaactgaaagaaagttttgcaaaggctccaattctgtccaacctagttgagggagaatctttgtacctatatatggttgtgtccgatagtgccattaatgtcacattagtgtgagaaaaagaaaaggtacaacttccagtgtatatgtaagcaagagattgttgggcaaggagtctagatatcccattcctattgcttactaattgcctcaaaaaagttaggaccatactttcaggcccatgcaatcaaggtactcacaaatcaccctctccgctaagtgttacaactctggaagattattgaaatgggctatggagctcagccaatttgacattcattattagcccagggtctcaatcaagagacaagctctagtagatttcattgtggaatgtactagaataaataacaatcaggaggaaccccttctagaattagaactcaagaaggtttttgttgacagagaattaaatgagaaaggttctagagccgaaattatcttgatttctccgcaggggtatcaactccaaagtgccctccagtttgaattcattgcctcttacaatgaagcggaacatgaagtaatgcttgtaggcttgcaattggcctgggaagttggagcccaaaacattaaactctacaatgattctcaattggtggtaaattagatatccaaagaatgccaaatgaaggtgagaaaatggcttattacgtatctaaatcttgagattttcttcaaagtattgaatgatatactttcaagcaagtccacttggatcaaaattccttggtggacatgctagaaaaactagcaatgaatctagaaatcaagaaatacagactagttcccatatcccaccttgttgttcaaagcacagagtcactaagggtaagcctcatcgatcattcaacttcctagataggccctatataaaagttcctaagttctggggagcttcctgacctttgcactcaccccgatggtgcctcttgcagctagggcactcgggataggagaatcg

SEQ ID NO: 382834 - DNA, 2260 bp, Cannabis indica
gagagagagagagagaatttttctaatttctttctcaatccttcgagcaggctttttttaggtccgtgaagtcagcacattcttcatgttctgtttggctttgggaccagcacaagatttgctagccaaataaaatatagagcttcacagaggaactctatataacttaacttctcgactttcgccttccccctaattggatccaacaatcttatttttttggtaaactggggtcatattttcatccatgtttaaggcgtagtagaagacgtttaggctaattccactcatgtctgcatggctccacgctggccagtatgtcctgaatctttttaactgtggatacaatatgctccttcaccgctggagacaaattacgttccactttgataactttggtgggttctgtttcactgatgttgatttgctcaaaatcctctacaggttcaatcatcctttctatcccaactcagggatctaatttatcgtcctctcaaattagcccctgctcgggctggacaggtgctttgggagctacttcaacttcttccctaaccataaagactgagtgttgtaggtaatccacatctacgaacatacaatgcttaaaagggaaggcatttatacttttgactataccccattcaaagaaactgggagctggatcctccccattggcagtagagaatctgcataaaagccttgaatagggcatggcattagatcagcttttaattaaccaaattgcttgaaagacaaacttgaacagtatgttgattgagcttccattgtctacaaaaactctagacactcttttgttggcaatatgggcttcaatcaccagtgaatcattgtatgggaagtgtacgtgctagctaggcatcctcttctgtgaagatgatgggaaaattgatcatccgaggatgttgagctaggaattgcactagggcacacacttcaccctcatgatctaactcattcaaatatctcttctaggcattgcaagtactttcgacaatgtgcggacctctatattgccacatagccatccacgggtggcagtaacaaccttggtgggtatgggttctcaggtctaggagcaaggacattcattgtaacctatgcattaggtacccctaaggggtctgaattgttgggacttgcatcatcagaacgggtagagctggaggttgtattctaagagcttaagggaggcccttcgtacggaggatttacaactcttaactatccgggaataggagctatttgtgcgctataccttgttcgagatatattatggagatccagacccaatgactaagatggccatcttaggccaaagtttttatcttgtcttttaaataaacgcactcattggtagtgttgccaatatcactgtggtacttgcacctcttactttggtctctttcttgcttctctcctttaaacatctgaggtgattttttgtaatatatcatattgtaggtagccttatagacattctcttaagtgtcgattaggctagtgtattgaatatatttttgttcatactaacttcttcctttcttcagagcctcactctgactttgacttttcccacatctcttgctctacaaatagctcacattcaattctagggcttccattttttattgtctaggagtagcactacatccagtttgtattgtcccatagccagaaaaattagtttatgtaggtgcataccctaaggcaatgggtccgtagactgtaagagttgtgtactggctgccaaccactggcgctgctggagctgagaattgtggggtaaaggttgtgtgactagatggagtttgtactggagcaactccaaaagcttaaatataagtgtcttctaaattaataattccttaggccatggacatgaatttagacagagtttcgaccctttttctttacatttttctctagagaaagaagtcaactgtcaatccaaattgatgggccacaagctccatgtcgtcgctaaccttggtcttggccactacttccatcattctttggatgaagaccttaaggctttcccctattttttgtctgatattggttagggatccaacctccatatcaaagtccttagcaacactgaactctttccagaatgtggattgcaggcctttccaactgtgaattgatcttgtaggaagcctcttccaccaatatccagtagactaggttaatgataacgagaacagaggcacttggtgttgggttttatgcc

SEQ ID NO: 382835 - DNA, 1091 bp, Cannabis indica
taaattatttaaatttttaaaaaaaatgacataaataatactgtaagtataacaaatattgttaataaaaaaattaaaaaatatattttaacatgtaattttaaacataaaaattaactaaaattatagtaataagatattataattagcatatatatagactattttttagaaaaaaaagatattaatattataaaattagttctaacaaccacaattaaatatttattaacaacaaaaaaatcatcttaactttttattaattatatttagtgaatactgcaagaaaagtatttttctaaatatatattgtagatttaattaaatgtactttttatgaagtgactcaatagttatttgcaaataaaataaattagcatgatgatttttagagttgttttcccacgtgaccaatagtaagcattattagttaaaagtgctacaattaaatgtatatagctttattttcaaatttacgtactattattatatagtacacacatatggggttgaccggttgagcaatattgtttgaaggttggacattattttttagatggtttcttgtcagttgttgaattaaatgcattttgaaatgcattagaattagttacaatcattccttattgttatctgaattttcggataccaaaaaaatgggccttcccacataaaaggtgagccatcttatagaaggccctccaagatgatttataaaaaaggttcgcctaatcgataagcaaacccaaaagaattaaagttggattgttccggatgctcactactactagtggacccggctgaaggcctaaagccagacgacctaaggatccccacaaggatgcacgagtactctaagggaatacttataagacaacctttggatatggaatacaaaagggcgtccgacaatggtatgagtcgcggacaccgacccacgtggcaaaaatatgatggaatctcaaaaaaagggggcatgttgcttgtgtcagatcgtgaagatgttagacttttatttaggcttacattaatttttattggttttattaaaatttgagttgatttgatagttctttgctgtgttagcccat

SEQ ID NO: 382836 - DNA, 1517 bp, Cannabis indica
ttatagattaaaaattcagcttcaagagaacagattagctcattgatagattctttttgagatccattgaagtgcttcacgatatctgacagagtaacctggcaataaacccgaattggtaaacataacaacgaaaacaatagtttgacaaaaaatagatatctagcattgaactcactccatccttaaagttcttaatccaatctagcacagaatcctcagttgcatccggtggtgtggaaattccttccgctggttcaacgactctctgtcgttttttagatactggatcctcatcacagtctatgggcagatctgcaggtttcttgtggcagctggacatagtatccgagggagacaccccaatctcttgcattgtcaagcagaccttgatatgtgaataacttacctgtcattatacaaagcatatttgagtgattatatataattatatatgtattgtacttatggaaaaatgttcaaggttgtattgtaagcttacatcttctggtaattcattctttataggcttcaacttttctttcgagccaacctttaaaatggcactctgaatatctgacaacacttcgtgtgttagtccgatctcttggcaaaatctcatccaatccattgccaatccttctcgggcagcatctagtatgtagtcaataacagtctgttcttttattggagctgacctacctgggaagttctatgaagaaaaaagaaaaagccagagaataaacacaaatccagaaaaattatgttagtgtaattatgaaataaaaacttacagcaattttctctattttgagaccatcttccatccacattttccaagcctcaaactttgctggtgttaactttctctgttgattagacactccctgttgatcggatactggatagacttttctggtaatagcagtttgtaagttttgttccccatccaaggaaaggctaagacgttgtgatagctgctgaataacttgaagaaaacgatctccatgtttcgttaccaagtgctgcaacattagctcagttaagatttcattcagcatcgaatattaagtttcaagtcaagaccttgaagaactcatgacctcaatgacaaatggtaaaaatgtgcatgatgcaatagaaaaattaatctaatttgtggattgctttgtcatttctcccaccctgaagagatacctggttgacaccatcgatgtttgctaagcgtgctctcgtagatggtcgagtcaatgcaattcttttcattgtctggtcgccacatatggcatatctacaaaggattataaagaacggatcaatttcccgaaaccagctctaggaaatatgtcaaaacaaaaattttaacgaccaatgacttggacagtattattgtgaaagagaagggtaaaacccttacggagctgttccaagctccttcgcaagtttcattctttcttctaagagcatgtggtaaaattttgcctcagtctgtaaaaaataatgtgccaaagtgaata

SEQ ID NO: 382837 - DNA, 2945 bp, Cannabis indica
taatctttctcccagtcaccttagagatgaacttgatcgcagaatggcaatccaaacacacccttaaatttttcttaactataattggtttcccaaatggcatatttagtaaagcaaatgcaatagctattctctcactgtgatggtgaagaaactgcagcttttcattgtcatttatgtcaagtgggactgaagcagtgcaaggaacatatccagcttcctttatctgatcaagaagacagtcaagcttttcaagatttccttcctctgaggatgacaccaatcttcggatccaaagatatgagttttttctctaatatcaacccaactataacccggcaacttcttgatgtttccttctttcatcattgttctcaaagctctcacttcttcccattttccctcctttgcataaagattcgaaagcagaacgctccactgttttcgggttcaagattaatcagcctttcagctgcaagtttgccactctcgacatcaccgtggaccctgcaagctccaagaaaagaacaccatccgaaagcatttgcctcaaatggcatactgtttataaagtcttcagcctctttaagcctccctgccctgccaagtaaattgataacacagttgtaatgttcttctctaggtactactccatatttcttctccatgaaatggaaataacttagcccttcttccactaaaccagcatggctgcacccagataaaagactggtgaatgtcattgcatttggttttacttcaagaaccattttgtcaaatgttcccatcatttcttttcctaaaccatgctgtgaaaacacattaagtaaggcatcccatgcaatctcagttgggtttcttatctcattgaatacttgaaatgaatgatcaaccagcccacatttcccatacatactaacaagactggctgaaatgtagggttctgaatcaaaattaagcttaatcacttgggcctgaagctgagctccttgttctagtgcagcctggttggcacaagccttgatcaagcttgagaaagtgtactcattgggttcaattccctgcctcctcaactcaacaaacatgtctaaagcatcgtcaattctatccatttcgccatacccatcaatcaaggatgtgaaagacacaatatttttgtgttctgaaacaatcacaaacacattagaagcactttccatgtctcctactttagagtacatatctaggagagcattacccacaacaacctttgactcaaatcctaactttacaacactggaatgaagacacattccaaacttataagctttattagcggcacaagcacttaatgtcgcactaagaatatgaggatccataagaatcccatccttaatcatcctcttaaaagctaccaaagctttttcagactcaccattctttgcatatccatcaaccattgcagtccacaacacagcatctttacatggaataacctcaaagaacttgcaggcatcaaccatcattccacacttggagtacatatcagccaaattactccccacatagagattcgaatcaagcccggattttaaagcaagacaatgcatttgcttcccgagtgtaatcgacctgagagacaagcaaactttgatgatacttgctaatgcaaactgggttgggttcataccagaaattctcatttgggaaaaggcttttaatgcttctggtaaccacaagttttgggaaaacccagtgatcatagctgtccaggaaacaatgtttctttgagacattttgtcgaacaggttgtgagcgtagtgaatagctccacattttgagtacatggtaattagatggttggtgagaaatgtacatataggataccatgtaagaagaagctgagcatgaagctctttgcctttgattagctgcttcgtttcgccgcatgtttgaataatctgcgccaagcttgtggtgtccaaactgcacaacaaagcgtggcttctcattacaataatgggttcttcttcttcttctataagaaaagtttcagaaaaattagtaatggcatataaccaaggaagaagaccaagtccaacagattaacaattcaattgatattgattgtttttgtgtatgtgccacaaaaatttcttcttgcaatgttgattaaacatttgaaaaacttgaggaagaaaaaacaatatatacactcaaaatcctccaatgcaaacgtatctgaatatcttttttttttatcagttcagtgataaagttacaataaaattagactagttaagaaatgttttggttgtgtttttagtttttagtattgtgtttttaaaagtaagaacaaaaaatagtttcttataattttaaaattttaatggtgtttggttcacgttttttaaaactatttgtagatttttttactaaaaaaattaatattctacactatactatgtcggggttggggtccgggtttgggtctaggttgggttcggagtcggggtccgggttcaggtccaaagtccgaggtccggggttcgggtcaggtccggggtctgggtcaggtcagattggggtttgagttcggattcgagttcgggtttgggtttgggatccgggtccagagttcggcgtctggggtccgagtcaaggtcagggtcagggtttggggtatgggtgtgggtcggggtttgggtccgtgtcaggggtctggggtccaggtcaaggtttgagtcgaggttcggggtcggagtccgtgtttagggttcgggtgtgagttcgtgtctagggtccaggttcgaggtccgagtcgatgctcagggtccggggtcgtggttcgaggtctaggtccgggaccgtggccgagtccgagtccgagtccgaggtctgggtcggggtccaaggtccaggatccgggtatgtgaacaaaaaaagataaaatataatatgttaga

SEQ ID NO: 382838 - DNA, 1459 bp, Cannabis indica
tttttttcttttttatatattacacaatatacaataataaatgaatctattactcattttccatatcaaattattaaaatggtaatcaatcacaaattagggattactaaatttgtggtctataataaatattaaactcaatatatactacataccgtatataatcaagcagaaaattctctattacatagacattttatagtaattgataatcaaatagaatcaattttgtaacaaactaataaatgcatttattttaaatgaaatgatatctccttaaatatatcgtaattaccggagtggggttacaatattattgtgtaccaatatattgtaattgtacttattaaaaaagaaaatgacaaacttttatacttttgtgtgtttattaaatatatcaacacaatgtattattatctaacaaaaaagaaaatcatggctacaatcaacaacgctagtctctaatattgtttttgaatatcaacaatcagttgtggtttgtgttataatatccaatttccaacgtttttgggttgcctaatttattaaataattaattactataaaatgtgtaatctaaatgtggttgataatcattaaagcaaggcaaatgactcccaagttaatagctgctaattacagaatgaataaggaaagggaaaagttttaaataataataaataaaaaaagtaatacataggcgttaaaggatatcaatataatcatcatcataaagatttcatatctattgatagatgaggagtttgcagaagacctataaccaaaaagcattgatatgacacaaatagttctttattagctcttgtaaaacagaagaaagtgtttgtttataaatatattaaacttctttgtttcaaatttcaaccatggcttcttctactgctaactactttttcaagattattcttcaacaaactcttctaaacaagcttgtaagtataccttaccttatagtttattacaccaaaccaaatcttatattaagttttcatttttccaactccttataagatgattatatagtgagtcttctttgacataattaattttttagtgtggagtgtctatacatttaccatgaaactgtttgcaaccatagaatactatgtcttgattttataaatatatgtaagtattttgttttgatctttccttttgcagcaaattcctagtagatttttaaagaaatactgtggtggttccttaccaagtcaagtatttcttaaactaccttgtggatcaagatgggaggtggggctcacaaaaagtagagatggaaaagtatggatgaaaaagggttgggataaatttgcacaacattgttctttaaggcgtggaaatttcttagtttttggatatgaaggagactctgagttccatgtaatcatatttgacacaaacactatggagattgattatccttctaatcatcccaacc

SEQ ID NO: 382839 - DNA, 3014 bp, Cannabis indica
aaaaaaaaaaaaagtatcctcaaaaataataatgttacaaatatttaggtgatgctcatttttataattactatcatagtagcatttgaagaaatatgccaaaaaaaagaaaatatttttatgcacaagtgattataaactactaaataatccttagcaatactttagagttaatgtatgtatgtagaggaagcatcacaataaactactaaaaaatccttaccaatatatgaaagcttaacatatgtatgtagaggaagcatcacaataaatttgtttctcaaattcagtagaagtaacagcagcaattgattacatgtaaatgctaaaaaatagaagtgcactaaaaaaatgacaaaccaaaataaatatatgaaacacaattaactaaccaacaatttcgttgaatcttatttttaaattagtacctcttttttaaccctcaaaaagatgacaacagccggaatttgccactccaaaatcaattaaataagcccaaaatgtcagcaattcaattgcatataaaatataaaacgggctacaatgtaaagtttttgggaaagaatccttaaatgttataaaactaaaaactaattatatagactcagtttcacgaagagagtactttctgaacttcagttgtgacctccttggggggtttctctgcaggaagattggccacaagtcccttatgggcgtagtagtcaataacctgaaatttcaattgcgaaatatcatttcaaaaactaaagggaaacaaaaatgattctagattcagcagtgaaaatgtgaaattaatcagtaacatgttgaaatgaaactaaacaagcttaaattcaacaatatattgatcacaactgccttaacttatctcttgtaaaaaactcgacaaagaaggtgagaccaacagcgaaaaacatagttcttacaaagcccagaaaagaaaaaaaaaactttaaataatattagttctttatggtttcttatcaacttagcactggactgccatcaaataaaatactagaattaagattacaattgataactctctgccattgtgttgatttacaataaattagagaaaaaaagtagagtagaaagcataccggttctgtttgcttgtgaaacgcctccaaccttgacttcagtacagctgctgtatcgtctttccgttgaatcaatggttctccagtgaccttgtacaagcaacagaaagagaaacacatgtataagatagagaggattgatttataagatgacccgtttcttttaggaagtcagattggttagttagtcatctagcatcattttctgttcaatcaccatatatccctaagtaaatgataagacacttttattcacacaaataacaaacataaaacaaactgtaaagaaaaaaggattggcctacatcatcaacaccgaaagccttgggtggtgcaaacttagtgtgataggtccggccgctagaagggtgtatccaccgaccagtaatcctctcctccaaaaccgcatcatcaattgcaaagttaagaaccttatccactttggagccctgcttctccagcatctcatcgagctgaacacaacaagaaaccactacatggtcagaagcacataaactcacaaaatcatacagcatttgatacaaaacaaatacaaaaaatccaaatgcttaacaatgtagaaccttctgtgcttggactacagtcctaggaaatccatccaaaatgaaacctttctggcatgaaggcttcttcattgcctcatcgatgatgccaacaaccaaatcatcagaaacaagctcaccctgaagcatagtttagcaacatttctattaggaaattgaagtgcagagaagcaaaaagtcaatcaagcaataaatataatgaaagtaaaacagtatatgcatgtaccttatccatagcctctttagcctttaccccaagaggagtcttcgcagccactgcggctctcaacatatcaccagtagccaagtgacataaacagtactcgtccttaataattggtgattgagtaccttttcccgagccaggtggacctgcaacacacattttttcaccatcaaacatagtgaaccattatatagtggaaatctgttaccagcattccattttacagttttcatgcatgaactttaaaaagatcaaacacccaactgaaaatcattgttaaaaccttttcaactttccccataccttctgtttaaaacccatatttatgaggtaactattaacaaatttgagggattcattttcttttgaagaagaagaaaaaataagtgtagaaaacattagtgtaagcttagaggacttagaattgtcacaagaattttgtaaaactaataatttcttcaacaaaatacatgatccaaaaacatccttttgaattttctatgttctctgctactaaattcttctaggttctcgcaaaatttcatataggcaactaaaataaaagccaaaaactatcaccctccaaaaaaattaaaaaatctaacttgtaacttctaacatagagaattttcggatctgaatacattttaaacatcaaaaacaaaacttgaagccttaaagtgaagaaacaatataaaagcataaaagggggattttgttaccgataagaatgaggcgcttgtctggcttggtagagcacttcatacgtcgaaggagctcggtcatgagatcaagtgaagggacgtcttccaagcctggggtggccatagctgaggtctggtctgtctctggttaagagttagggtttattatgggtatgggagaagaaaggaaggaaggtaaggttctttactatgttcggactctccaatgcttcaaaccaaaggcagcggtgtttaccagatttcatcaattgacgattatgccctcatttacattcgtaactcaagggtatttaagtacgaataattcttttatagatccatccattatctaatgggaatttaataagcaaaagtttataattttactgtgaca

SEQ ID NO: 382840 - DNA, 1744 bp, Cannabis indica
catatgaagttgtccaagaactttattaattaaaaattgaccactcactagaatacatgatgagtaaaacaacaacctataatccaaacaaactaagttatacatgatttaacagatgaaaaccaaaatacacattagccttaactacaacaaaacgaataaactgaagagcaaatgtgacacaattgaataaaaaagattctgactaagaaaaccaaccttttgcgggtttatgcactacaaaatttacaaattaagacaattttaattataaatagtagtttaataatttgatctatagttgaacattaaattattaatattttatatttaataattacatataaatatcaaataaattcttattaatatgttaatcccgaaaattgatagagtggattttcaagattagtcaacaattagtctcgacgatcgagagacatcgcctgtaagagttggtcgaggaatgagtgaatcaatgtgtgtggcatatggctcattaatatcaaggatcaatgcttgcaagtctctgggtacatctaagcaactcggaggtcaaccccataacaactcacgagtagagctagtaagatcaacttactaaattacaattgttggaggattatgataataatacgttcggaattagatcttgtcataggcataaaatccataaatatctttctcagctttccaacgcattttgaatcatccaattttgacatatatcaatagagttatggcaaaactactaataagaccactaaattgtgacaactgggtgtgcaagcccatgagtcattgtgcaagcccatgagctattggaaaagccaggaagcatttgggtgagccgtgaggcatttgtgtgagccgtcgagcctttacgcaagtggtggagtcgtcgagcattataggttcatagtctctgaatttccatgttataacattgtcaaggatatagatgacacaatataatgatgtttagagaatttattttgatttagaaaatagtaatcatttattttgtaatagataatttattttaaatttattatgtaaataaattggagagagaagaattatcagacatgataatatgtccaaagtatgtgccacagtttaagacaagtgtaagtggtgcctacactgtgttcctacagggtgataggcgcctatcacttgtagtggtcccattaggtttatttttttgattaattatttaattcaaaagatatataaacaattatttaaatttaaatttaaaaagtaattacaaatatttaatatggttgagatattccctcaaagaggttgagagattttctctagattgttggaaatattttcaagtggttgagatattccttcaatcggttattaaaaatttagtttaaacttaatatttaagtttaaaataaatatctataccataattggttatagaaatcaatttattaatgcgaaagagagaaaatgaaaaaagtaaagtctgtatattgattgaatgagcagtacaagtgaaaaaagttatatatagcaattacaatagaggaaacaacctatcctataaaacaggggaaccgacttaaaataagctccactaaatgaggaaaagaaacagctaacaactaagataacaaaactgaaataactacctactgacaccagtaacagaaataacaaaaaggactaaactggactaatattctaatatcccccctcaaggtggacggtatatgtcatg

SEQ ID NO: 382841 - DNA, 3316 bp, Cannabis indica
agtttttaggttgaatactcgctaattgttcatcatattctttcttcttattattatcgttattattcatttttggtgttgcgaaatttgctcgacaacacaaatatacggtttggcttgaggtttttgaggtggagagttatcggaccatgcgattaagagagggagagagaaccaagggtccccgctatttacgtcgagtgaattttgtcatgacggggtcgagtgaattttgtcattcttgaggctaagtgacttttgtcactcacgaggccgagtgactttatcactctcatggccgagtgactttgttactctcttggccaagtgacctttgtcattcttgaggcgagtgactttgtcactctcttggctgagtgacttttgtcattcttgaggatgagtgacttttgtcactcttaaggtcgagtgactttgtcattctcatggccaagtgactttgtcactcccttggccgagtgacttttttcactcttgaggctgagtgactttgtcactctcttggtcgagtgacttttatcactctttaggccgagtgactttgtcatgacagagtcgagtgagttttgtcactctcatgactgagtgactttgtcacactcttggccgagtcacttttgtcactctctttactaagtgacttttgtcacccttgaggctgagtgactttatcactcccttggccgagtgacttttttctctcttaaggtcgaatgactttgtcatgataggtcacctttatgaatccttcggttggcaggctgttctcctctagttcattgtacattgcaccccaatgatccttcagtggcatttgttaggctaacaaggtggagcatttactatactctaataaggtcaccaatcctcacgtggacttcagtgttcttggttcaatgacacttgagatggttaaggaattcaaaaaggatcatgaagaacaacgagcaagtcgcgaggctaagcgccaccgatggggatggtactagtaacgagcagtaggttcgttttttttgggggggggtgtccttaggctttattagactgacccttttccctttgggtgattctaagaatctaattttatttgccaaatctttaacatttgtaactgttgttggctgagtggctatgggagttactctttggcaaagtgagttttcccgttgtgataagtaggtttttatttgagggagcattgctctttgagcggtctcctcctcttacttatttctttatcctttttaactcagatgggagggagcttattgtacttgactgtgctacaacatcttgatttgtttatattaatccttttactcatatgtaagggagcttattgtacttgactgcgctacaacattttgatttgtaaattttttcttacgtctaagagacgtccctgtcgttgcagcatttggccatgagtatctttcaaggatctctctttaagcttgatgacttttgtcactattgaggtcgagtgacttttgtcactcttgagggccaagtgactttgtcattctcatggccgagtgactttttcactctcttggccaagtgacttttgtcactattaaggtcgagtgactttatcactctcatggctgagtgatttttccactctcttggccgagtggcttttgtcactcttgaggccaagtgactttgtcaatctcttgaccaagtgactttgtttcttacaaggctacaagtggatttttcgagggggagtgtattttttttgtcaaccaagggtagctaatccttgctgacttcaatttatttttctcgtccttgctttctttgtccccaagtgtatagtgttatttatagcattgtacactagattccttctctacttctaagaagaagaagaacattaatttagaaaatcaacaaggcctgattagatcatttcaatattcattcctgcaaattcaaaggccttctaatggacctcttaagaaatattacatttgaaatttttagggaattaaaaaaaagacaagaaataatactaatggagttgtcgaagctacccctctttgattcctactaatggaagcaactaaaggatatcaccgctttcttccttcatggatggtacctttttgaggactcctcgcattcttccttgcatacttggtagtctgcctcccccacaaccgttttaacttgaccgagccttccattgatcgtcattatcgtgtgttccttagccttggtggccacggatagcaagatgttataacattctcttacctctgtatgctttccctttagagttacaactcctcccggggttggaaactttgtggccaagtgatacactgaagtaattgcctttagcaggttgagtgaaggtcttcccattaccacgttgaaggctgttaggaaatccactgccaagaaggttgccatcaccgtggagtatgtgggttgctctccaattgtcagggccaagtctattgttccaagctattagactaaatatctagtaaattcgtatattggtatcgcataaggcttcatgtctttaacccctaacccatgttcttgagggccacgaagtacaagatgtcaatagaactcccattattgataaaggttcggtgcaccctcatgttttcttctagatcacgatagggattgttatgggaaaagtgtatacccttgcttcctcctctgtgaaggttatcgaatcgttttcacctttaaaactctttggtaacctctgctctaggctccaaacctggggttcatgcctcgcattgcaagcttacttgtctctccccttgcaagtgtctcctcctacaccgagcccttcaatgagtgttcttatctctctcaacacttctggggcatcgtcaagctcctcccaatggcgtcctttgtttggcctctggttttcttttatgtattttcccaagtatccgctatatcaactcttcaatctcgacctcaagtatttgcattctttcttgtgatggccaacatccttgttgaaccggcagtacttttctggatatctcttggccctttctttcctcaagggaagaggcttcttaaaggcactcgatgttcatttaccaagaatatatgctccctcaaatgggttaggtctgtgtaatgggagtactcacagggtactaactccacctctttcttgattttcttgtttttttcatcgtctttgcttctgaatcccattttcctatgcatttccttgtcgtgcattttcctgggttgatcatgttgggttttgtgctttaaatataacccatttcaatat

SEQ ID NO: 382842 - DNA, 1566 bp, Cannabis indica
aatccataaaggagtagtaatggcatcacgagtcttcttaagctgttcatatgataagtaggtttgaagagttcttggtatgtattgtaagattagaatcgtttgacatggtggtcggtttcagtttttaaaataaaaaaaatagtttaaccaaaaaatcgtcaaaaccgcctaaaatcgccaaaccgaaaaccgccaaaaaccgcacggtcggttttatatggttataatttctaaacggtcggttataaaattgtaaaaaccgaccataaccgactgattttcacccccagttctatttcaaaaccaattagcaatgagtggagtagcccatattcttatatatggcttaatattcttacattttatccatattggacaatattgtccaatagccaccttcggccataaatttcaaacacccaaacatagaagttatttaacaaaaaaaaaaaaaaaatccgaaaataaagtgacattataaattaattaatgtccatttctatcaattaccccttgtgtaaaattcatatgatcaattatacaaagttaataattagataaatattgtttgaacattaaatagattaaaatacttaacaataataaataagcataaaaactgcctgtgggactgaaagaacaactggaagatcaatcaaaatatatgaccacttaatctttgtagctctttccaaaacatatttgagaaacccttttccattgaaatccaaataccccttaggcacaaacccaacaagaagttgaaaagtaatatgaaaaatgaaaaaagaaatctgtaatggatctgaaagcaggagctataatcttcaaatttgagtccattttgaggcacttttaatcctcatccagagttgtaatgtacaaaaacagaggatctgttaacactgcaatcacccatgaacctaaaaataccttattcaacattggaaggtaaggcccatgtggatcaagaatttctccagttcttaatcttattcttgttcttggcttcatgcaaatttgcttattaagatgatcatggttaaaaatcccatccaacttactgaaaaaaaaaataaaaaaaattaacacagcatttgttattatgactaaatttgataaatgagttgctaaatggacacaaatttatagcatagagttcaattataatttaatcaccaaaaaaagaaggaaagaatatgtaggaaatatgataagaaactaactcaacttcaacttgaattgcctctaattctgtgctctcactgtggttcataacttaaaagtttaaattagaatgtgtctctttaacaaaactcataattttcaaatgaagaactggaaaaaataaaaataaataggggcatattttcagaaagagggtttatttttcagtttgataatgtgaaacaattagatatcttcatatatggcacaaaacatggtcccaattatgaagacttggaattaggctgccccagcttctaatcattgatatatagtttataatttccaaatatgaaaatgctacttttttaaaaaataaaaaattaaattaacaat

SEQ ID NO: 382843 - DNA, 1852 bp, Cannabis indica
ctcaaaaaatctcaggtataataagtggaggacaccatcttcaataccttatccagggagctttttctttaaaacacataatgcttgaaaatcacgctgcgatatgcgacgaaattgtactatatttagcacaacaaatttcactttgtgtataaaattgtaagtagttaatttctgttaaagttgttagttggtaacttggtagttggttaccaacagtaacagatttgtaaccttttacttctctttgtatccaccaatcaataatatacaaatacatttcattttttctcattctttgcattattgcatttttttctcattttaataatacaagttcaatagatgaatacaactagaagaaatatgtggcaaaactgtccattttagccttctcacgcttgtcagtattttacaccattttttatacaaggtttgtctttgcagtatatagtaaataaacaaaatgttttactcttttggcaactcatatcctcaaatgaaagatcactcacatccatcaaatttattatgcatgacaccaatcctctgcagtgattctaaaatttgaaatgcatcaatgtcattcattagaatatttgaaagagaaaaaacagaaggaaaaaggagtatatatatacctgcgcgcgctgaagatctatcaatcttgttgacaacaacaagtaaaactttctttaaaacaactcttgtttgtggcattggacaatccacataatctacctgcaaaaggaaaacctcttctactttaataatgtatagaacaatgcaaatcaatgattatatgaatggtacacataacaataattgaaatacattttacaaaaggtggtaaggcgtaccaattcagaaatctccccgaaattggagtgtccacatgtaaaatggactgaaggctcacttcactcatgctgctgtgactgattgaaatacacatacaaatatatgcataagagaattagggtgctgtgaaacaatagtgctttgggcccaaaccagctaaaggattgcttgtgtggagtgatgagttcttgatgccgactccttatggttacttgaggctgagtgatgcaagaaatcttcttagaggaggagtaagagttttcttcctcccactcaaagttttcttccagcaaagggcaattataaattttgaaactttcaaaagagggtggcagtgaaccttcgaaagagggtggcagccctttcactggaagtgtctgcaagttggggcagttagacacgtgtagttctttcaagaatgtgagttcttgaaaccccccattgtcatttaaggttttaagacaagcaatgtcattaatattaagggagataagactagttggcaggaacccttgctctagaaaggaaaccatatcttcacctttataacctccaaattctaagcttatcagattgggaagtgtttccaaattccaattctttcgagatgcaattaccttgtcacaacgttcaatgcgaagctcacacaaactgagaggcaacccaagtttaggaagtgattctaactctggacaatcatcaataactagttgttgtagagaaggtaggagaataggcagtttctcagggagaaaccttaatttgcagcaatttaagagcttgagttgagtcagaattgggcaaaggaagttgttatcaggtaataatgtgaagttaggcaaattatagaaagagagaaaagataaagagtttatggggcgtattgaaattgggaggaaaagagttctacatttttcacaatttaaaaattttggaacatatttgatgttgggaaaggaagtctatattaagcaattcgaatgagttgaag

SEQ ID NO: 382844 - DNA, 1755 bp, Cannabis indica
atattgctttcatatagcaaacgtcaaataataatattattttaaaacaacactttgtatttttgtaaaaagaaaattatgttgcatttccataataacaacgaaacaataatttttcaaaaacaacattccgtattttcttaaaaaaaaaaaaaaaaattatgtattttaataaacaataattttttaattttttgtgtattagtttaattaaatgttggtccgtatatattttttgttgaataaacatttaagggttcatttgttatgtcacactacacactagtactatattaaattatattctatgtaatatttttacgtaaaacatgtatgatattaatttttatggacatataaatactgtatataatatttttgtataaattctaaattaaacttactattatataaaattttatgatctctaacctaatttaatacaatatagcacttaacatacctaacaaactctagttgagctaatagagaagggcaataacaaaattacaattttactaacaataagtaattaaattattttattatgatttcaaggctcaataaaggtgtggatgatatatataggtactcaaccaactattatggagttgtatatatgataggtatggtggattcaaggaaactcataactaactataataacataattaaagaactaataatgccacatacctatattttttctttttattcgaggaccaatattattgataaatatataaatacatatctttattatatattaataagctagataatatatatctaaaaaaatgcatgttagtaaactttgtaataggaataagtaagacccacccttttaattatcatgttgaaagtacaaagaaactgataaaaacaaatatttaaccataacttgatcatgttgatattatttgaatacatttcgatatataataatgcacatacaatttagggccaagtccaactataatttcgaaaaattaataatgttgaagagtttggacaaaaatgatgatgggagtgggagtgttaatattattaacgtattgtggcatggagtgaggagtagtccccatgtttccatgattgaattcaatatagagaatagatcagagatatgctccatagtccttttttgtggtcccaatatattaaccatgccatggctaccttgtccaaattctctctttgatttgataatgactgccatactattttatgttaggggtaatattaattataagatgagtgtttcatattttcattctacaaggaattaaagcccaattacaatcacacacgaataagctataaaatagcaaatcatttccaaagagaacgagcaataaccctaaagatcccaattccctcctccacattgaagaaccctagcaaagctcaagcctcccccgttaggagatcggcaccattgagcactacccccaactgatgatctgctcacgaaagcccccttgggcaagattcatccataaaaatcgagctccaccacaccacaccccacattaattcgacaccatagagcccaagcaatccacctcttgttacgaaaattataaaacaatacgcaagtacacgcaatcaagtagtaaactcacgcaagtaaggtcgaaccacagggcattggattaattaccactaaattatacttatgattgtattcggcaaatcaataattttcaagatttaaacagaataaaagtaattcaagaaacttaaagaaacaag

SEQ ID NO: 382845 - DNA, 2348 bp, Cannabis indica
acaacgcttcccatcactccatggcatctcccatgtcatgtgttgcctcatcattagtcccttgagttgcatatgtgttgtactactacatctattgtggtggctggggataagtagacatgtcgaccccaaggtgcatggcattcattagagcacaagcatcgttgtacattgtccactcccgtatctattgtcggtgttgcctcatgtcttcagtaatagaggctaacttttttttattcattcaaggcgttgtggtatagtcatctgactgggctcctcttcctctggtgtctcttccctagatgaggatgccaatgtcttctttgttttaagatccataaaccgagtcgcaatgtttctgtcaaaaatgtgctgaggctgcagactttgttctgaaatagagtattctaccccagctttagcacacagtgttgtaattagattcgaatgagaaaatccctttctgatatttcgaacatgatccataatcgagtgctagatgacacttcccacatcaatgaacttcttatgaagaatggcatataggagtttggtcattgtggtatcaacaatagaaaaatattttgttggaagcaacttagctctaataaattggagccaaatatgacattcatactccatgtcattctgatgaaagggccttaattctccatcttcagttcgaacccattgagagcccaatttgcaaaggcttctgatgataagatcataatcaggctcttgaactatctttccataatcatcatcctcaatgtctttgaggccatagaacttgttgatctcttggcgtgaaaaagacacatttttgccccggactttcacttcatggtttacatggttgacatcattggcataaaactcataaccattggaacaactacagcatcaggctgagcacaaaatttgaacaaatcttgatcactaataattattgtaaattggaagaaggaagttgaaagattgtcaaaatcaaatcttcgttctgcaatcatcttcccgccctgagtgatgtcatcctgatagaaggacttggtggaggagtcctattagttctctcgttgttgcgaagtcattcaacattaggtggaggacccattggttggtgcccttgagcttaagccctaggttttcctagtgcctgcttgattaccaggtgtagcattggcagtctgagcatttagtttgccttggatactagttctcatttgaacaactgctcgacggggtgtctatcttactaactcaaaaatacccctacgggaagtagttttgtgattagatcaataagatttttcaatctgctgagatatgttagctctccggtgttcttgctcaacacattggctgtaaatgttcttctagttttcacaaaccactgttgaaaccgttcgtgttgcttatggagagagtcttgcaactatgttgcaagtcagccacagtctggctgagttgagctacctaaggattagcttcctcagggtgttctacctctacgtgtggctctcgaggtaggatttggttgttgttttatgtctcgagagcacatggtacgtggtggccttgaaggatgagttgaggagttggttccaaggcctactcttggtgcatggggcgcaacagtagtcccagttccaactctgtcaactaacgtgcccctagttgtttggccagtttctagagtttttctgtcgatccttgaagaacgtgtcacaaccatcttgattaatgacattcttgagctatgactttcaatgaaagcaccaaaatattgacttagaaatctagattagaattctaagccaacatccgcttgctagattggcaagaattaaaagtttattaagtaattaatgagagacacaacaatttatagtagttcacccctacattgcattagtaatgggactacatctaattcgagtttttatttctcatgagatggtaattacaacaattgtttaagtatcaaaaactccaaactctaaagagagaagctctgaccttctaggtagttttctaaatgtgaaaaatgagctaagggagcgctcctttataggttaaggaggcctacaaaaataaggaaaaaataaaaataaagtgttttccaccgttgatgatgatctaatggtgaaaattattttttggtggagatggctaatttttggtgctcggcgggtcccgctgcagaattacccagagcttatttttataagtcccttggggtgaattttgatgacgatagcttcagaattacgtttggggtgtgagccatgacttgatagaacgtttaaataagttcaaaattcaagttgaattgcgtcaat

SEQ ID NO: 382846 - DNA, 1096 bp, Cannabis indica
attctacgtaatttcctcttaatattatgataggcggtaattaagtgggcctaaatatatatttaagtgtgattaacttttttaatttatagaggaattacaaagagataaattgatcaatataataattagaaggttttcgagtttagtggtgaggtcttcctccaacttaattttgatgatttatgcttgcatagaattattccgttttctaaaattaaaaaaattgaaaagtttgacttcagttgtgaaagtaataagcatatagtgatatcgttactaagcacatgaaaacaaaaattaataataatggttatgaatgatatataatcattgaaaaattaataatgagtaataatatgtgtatacataattcacatatcaatttagtatatatttatgtgataaataaattcaatttttctatttaaaatgacttgctacaaaggtatatatcatatatatgtgtaaattatatatgcatatcatttttgattaataataatactagacgtacccacaaataaacaaataacaataattataattacgtgctcaatttaaagaaattaatgataaaaattaattgtgactacaataggagaagaaaaaagatagaatagattggaatgtagatatgtacatcatgagatacctacttaccttggaccactatattttaagttaattattcttaattattatttgacatcttataaattttatattaatacttttgaaaagatgtatatatactatatatacgaatcatatatttttgcttttatagacacacttaattttgtccaatttaatgacatgaacaaagacattcgaactgatgatttgagctacgaattaagcttatataccatacaattacaaaaaatgaatgtctaatttattaaaactaatatgttatttcgtcattaatagctcaaccgctcaaatgacttatcgaccataaatatatgagcattgctattaggcactagtggtgtctagcagggctgtctctagctatttgaagaccttgggcgagcttcaaaataaaggccttttaataacaattttttactatatgtatatataaaaa

SEQ ID NO: 382847 - DNA, 917 bp, Cannabis indica
gaatttaagtaaattgcattaaagtattaaaagagagggtacgtagttgatgaacataattgtcctagttcaatttgttatttctttattgttttttattgttttttttttttctatttatttttcttgactaaaattttttataaatttatttaaaacaaatagaaattaaagattggttgattggtaaaaatctcatttaacgttggtatagaggggatgagttatattgctaccatctttttacgttgaagcaagtgtagttcacataccgtattgatataactcgaatagtaagatataaaggagtatctctctttggggacttagttccactcactctctatccttgtggaacggggctatcccgttccccaggactagtatcatcttggaccaagaatttcccattactcaacctcatgtctcaatgcaaatatactaacttaaagacatattggtctaggatcaacgttttggtacgactacctcgacctaagtttcgatgacttcattctcaccttttagggtaaagtggtaacatatgttctctgtaaaagtacgaacatcaataaagatcgataaaattaagtaataactaaataatataactaatcataaatttagtaagatctctatctccaattaagagtctatttggcttagtttttagaaaaactaaaagctgtttttttttaaaaaaaaaaattgtgataagaaggtatttggtaaccaggtaaagaaaaacttattgaagaatttgtggagaagctaaaagctaaagctgatacaactcaatttttttaaaaaaaattgttttgattaaaagtctttataataaattgttttgtactaaaattgtatttaattatttattatatattacaaaaataaaaaatattttttggaaggaaaac

SEQ ID NO: 382848 - DNA, 2036 bp, Cannabis indica
tgggttttcaatcccacatcccactggtttattggcaatatctaattgccactgccacttacttgataaatcgcactccttctaaactcttacaaggcaacacatcctttgagctattacacaataaaccaccaaaatatgaccatcttcgctcatttggttatcttgcttatggttcaaccttagtctcaaaaagacacaagttttcccaaagaagtcgtgcatctgtattcattggctatccattaggaatgaaggcatatgttcttcttgatattgaatcccagcagatttatacttctcgtgatgtaacttttcacgaaaatatttttccatatctcacaaccacttccacacatgagattgacaattgtctctctcaatccatcattccatgccaacaacaagttgcaccagtccttattcagactgctcctgcaactcacacacctaaaataaattcccatcaatatgctgcacctgctgcaactcctaatccagcaacacattgcaacaaatctgttgcaccagctgcttctaaggaaccaacaatatattgccaaaaagttattgcaccagatgcacctaatgcaccagcaatacattgcaaaaaaatcgttgcacctatccctgcaactcctatagcagcaacaacttgcaaaaaccaagttgcacctgatcctgcaactcacaaaccagtagcacagtgtccacatgctgctgaacccgtacctgaaactgttatcaccaccaaaacaggtcgacaaatagctaaacctgttcacctacaggactatgtttgtcacacagcttcaaccaatcatccaatagaaccttttctatcatatatcaaacttcatccagagtttcgtgctgctgtccttgcagcatatagtcaaattgaacctcaaaattatgctgaagaatctcagtttcagcactggcttcaagcaatggatgatgaaactcaagctttagaaaagaaccaaacttggattgtcaccaagcttccacctgggcacaagccaataggttgtaaatgggtatataaagttaaatataatcaagctggtgcggttgaacgattcaaagcacgtcttgttgctaaaggtttcaatcaaaaaccaggcattgactattctcaaacatatgcacccgttgcgaaattcaataccttaaaagtttttttggctttagctgccatttacaactggaccattcaccagattgatgttaacaatgcattcctccatggggaacttcttgaagaagtttacatgaaaattcccccgggttataatgctcctccaaacacagtttacaagctcaacaaaagtatctatggcctcaaacaagcctcaaggcaatggtacgcaaaattgtgttccactcttctacaagatggtttcactcagtccttatccgataattcccttttcaccaaaagaacatcatccacttttatagccattctcatatatgtagatgacatgatcatcgctagcaacaatcaaatggccatttccgagtttacaaagactcttgatgccaaatttaaactcaagaacctaggcaaacttcgttttttcctaggacttgagatcagccctactgccaaaggcatttctatttcccaacggccttttactttgcagctcctcaaagatactggtactctaggtgtcaaacctgcatcaacaccaatggaactcaatctgaaattgagtaaagacaagggaaaacttctccctgacccaactgtctaccgaagcttgattggcaaggtcatttacctcacaatcactcgacccgatattacatatgctgtaaaatcacctcagccagtttttatcaagtcctcgggttcctcatatgcaggctacaaacaggattctccaatatctcaaacaaacccctgaccagggcctcttttacccttctgatgcagcactccaattgcacgcatatgctgaaaccaccctctcaaaagacaatgttaaggtatccttctttgctgatgctgactggggcagctg

SEQ ID NO: 382849 - DNA, 1369 bp, Cannabis indica
gttggttttgaaaatagattataattttatatttatgaagaactctgttctgtgattctgtaaattacattaaaaataaaatatctttcttttttcatcaaataaataaaatatctttcttgtttccaatttcaatgactaatttagaagaaagtacatttggaattgaattattattgtactaatttagaagtgaaatatcttatttttattttactgttctttacaaatatctaattagtacttttttactgttgaaggcttcatagttcatacagtggggtcgcattttgtccccccctttgtttatcttgtcggtctggtccacaattgtttggattaatagttagattgatttttgatcattacaagttttcaaatctaaatttaggaacagaattccgagccacgtgagattggttggtcgagaggactgcaaaattatcgcttaataattttgcagtcttcctcaccaacccgataatgccacatggctcagattaggaacttgtttgctctcgagatttattacattatgcttttaaaagttgtcatgtgagaatttttgattggtcgaaattattaaatttttatttttttaaaaatttaaatatttatgtcaaagttctaggacttaagataagagacatcctatgatcctatcttatcatcatgtaatctcttatttatgtgtggataagaattttgtttttcttttgaacaaaagaaaattttgataccttccctatttgactcaaaggcctactatttttgtaactagtctattttgtatggagggtttgaataatttgttttagactcacttttccatgttttttttttttttgaaaatttcatttttggggttttgtttggttttagggaatggaagagaaaagcgaatggaaaaaccgatggcaaagtcagctatcagagcttaaaagaagaagcgcgagtaaggatggtaggggtaacaacatgtcatggggagctcggatgcgacgacggaataatgatgacttacctaatgaactatagaagatatgaaatattagtatttagtaagtagtcttaattagcatgtatatattactgcataaaaatgtatttttttttcagccttgtttttccaagaaataaaagttcaatatacaaaaataaatatgtttaagtttgacctttgacatcctaatatgagtaatgatataacaaagttttagtttagataaatgtgatttgtcagaaaatatttaggaaaataaaaatttaaaggggcattaaataaaggggaattactctatatattatttttttaaattttttttttaaattttacagtttgagtttcggttgcagcactagttgcaat

SEQ ID NO: 382850 - DNA, 1856 bp, Cannabis indica
tattattattattatcattcattatgttttcaaaattaattagtattaatgttaatatagggggatgagtaataatgagatagtgagattgggaaaaagtgagctaataagtctactatcactttctcaacctcactatatacctatccttttcctccaattcatcatcactttacgtacacaaatttaattttgtgcgtgtttgtgtgtttaactataatgcatcgttttctgtaatacttcttgttttttttctttttcttgttaaattaaaatttcaagtcaaattcgttggaatacgcacgtaattatatatatatatatacatatattatatcgatatggaggtacagcacatgtagagactacctagctaacattatatgcatggttgtctttgttgttgatattatataatattatagagtagaagattatattgatcaacaagaaagaacatagagatctatgtaatagatttaaccgtgaattgattgtgtatagatgattatgatgatgatgatgataaggctaaaagaaggccacgatgggaggagaggagaagggctataataataaatgatgaagaagattattaaacaagttaaggtgcatgtgtgtgtaagaatggggtaggggacattgagagctacccaaggggacataaaaccattcttgtggaatggatgaaatttaataaaaatggtgatcaattcaaaacccaatcccctttcgttttttgtctctcctgcatttattggttacatgtgctatccctattataagtcttaaccaccaccatcttcatttcattatatacatcataaataaaataatattagtgttgttgtatggctcatcaagttgtccaaatttaacaaattgtgattggtgtaacaaaattatgtaccaaaacggtacatacagtactgttgaattatgctcatgctttagtctagctcctagagcccaagactaaaattttgattaaaaattattgacctaataaatatatgaagcataaattaattaattatattaaaatacgctggctgtagtgccaacttatatttctattttaattgatgtggtaggttcaatttaaacaatgaatctcataaaaataaataagatttggttgaaataaactgtcaagtcatgaaagtaaatatcattatccttaaattacagattattaggatttatcacatcatgcatagcaatattctaaatatgcatagtattggaatttggacgtatacatacacatatagaagaaacaaatggtggtatgcaagtgtatcaatcattgtctaatttggaaaaagatggatgggatgtatcgatgacacacgtgtgatatgatatatagtgatgttgagttatatatagcttaattatagcatatacaaagtatacatatgaggttgggggagattgcatgagtgagtatacgtaaaagtaccaataataatattcatataagtaatagtatatagtgacaataattttaaaagaaagacattaaaagtgggaagctacagctagtgcaagagtccaaagtggagatgccgacttctcataagtcatgtcctctagttttgccaaccatgggtccttcatgcttctaccttttctccttacctatttctcatcctaaatccatccactccattcaaatttttcataaaatttatctatatatatatatactagtcaaaagctacgtgcaaggcacgtatatactaaattttatgctaggtactttctaatttatataaaagttataaaataaaaaaaatgttattatttattaggtgagattattattatgtatatctaaataatgtaattta

SEQ ID NO: 382851 - DNA, 1834 bp, Cannabis indica
aaaaaaatctccataagaagaaagaaatacagaaattgcatcatcaatgtctactgcgagaaagagagaaaccatgtaatggggtgggttgagaaatacttcaaagactgcctttgtgatttcaaagacgacgtgtccttggtttgggccttatcagcttggtttgttggggtgtagctgagatcccacaaatcataaccaatttcaaaactaagtccagccacggcgtctctcttgcttttctcctcacttggattgccgggttcgtattatatacatatatattatccataatccatgcttatttaaaaaaagggttttctatttatttatcttatttatttttgtgcagagatgtgtttaatctagtgggttgtgttcttgaaccggcgacggtgagtagttttataaggtgtttagtgattttcagtacggtggtccatataaaatatattttacacagttgataattataacaagtttttaacatttttcatttttaaaatcacttaaattatgtttatttattttaagagtggatatcacactactaattgttatactttataattttaatgcagctgcctacccaatactacacagctctggtaatttcactattttgtttctttcgattctattatattttttctgttacaaattaataaacagtatttcacacacttttcttggtagaactgttgggtcaaaatatagaactgtttactcggctaatttcgttaaatataattcctttggattcggaatttctgctactttttgatgatttcgataaataaaagtacgtttctatatatgggaaatttgtatgttttatataaattttaggaaaattcttataatggcctcaactcaactgatccaacttttttgaaatatgcagctttacacaataagtactatagtgctggtacttcaaagtgtgtattatgactacatccatagatggtggaaatgtaagcagattaaaactaccaatttccaagaggtacatctattaatttaccttaatttatgtactacaaattaagtaccattaattaattaatatatgtgatgtttcagaacgaagaagaccaaaaaagaccattaatgaataatgggatgagaggaaatgaaaatggagaagcagggattacaattcccagggctacacccaaagccactagtactagtcgcaaggagttctactatacgtatgtaattaattaattaattatgtgttaattaattaatataaattagaaataaagaaataaaaatgaaaaagtatatattactttacaggtcagctagatcaatggctggaagtggtacaccaccattcagaacttatctaagggcagcagctagaagtggtccatcaacagtgaccattcaaaatgattcatcttcagatgatgatgatgatgatcagcctcgcccatcagcacgatccaactctacttctctctcccaaccacgcccaatccctaaatcggtcagtggtcacatttctcatctttcttattgggcttttgtttttggtatttttaaaaattaccaaagatttttgtgtattttttaaaagaaaatagtatataaagttttgaacttaattctgtaccaaaaattaaaggagtaaattacaccctataccctttttatattgtcctcttttatttttaccctcttttttaaagtttattatttttacctctttttttaaacattgtaccaattttgcctctgtcacttcaagatactctcttatatcagggtattttgggtacaatacatatataaaaagaggtatgtttcaaataaatataaa

SEQ ID NO: 382852 - DNA, 3758 bp, Cannabis indica
agttgaggttaatttggtcaattgcgtacaaaaatattaaaaaaaggataggaagtttattgagaaagaagatatgtggggatatttgtcagagtttcagttaagaagctctctttcttctcttcatctgattttccttacactctcttaccactcagaaacgtacgcacgatcaaatacaagagaatttatataaatatatatataaacatataataaaataatatacagtgaagtaaagctttcaaattcgaccactttcgcaaatcgcaaatcgcgaatgtgaatcttattttattgcttttgtcagataaatagcggggaaatttttggaaatgcaagacgttcactcgatcggagatgggggaaggtttcacgcgggtagcggcgctggaactggagcggcttcagaccggaggttgaggccacaacacaatcagactcaacagcaggctttgaagtgtcctcgatgcgattcgctcaacacaaaattctgctactacaacaactacaatctgtctcagccgcgccatttttgcaagaactgtcgacgttactggacgaaaggtggtgtcctacggaacgttcctgtcggcggcggttgtcggaagacaaagcgttcgaaacagaagacttcgtcggtgtcggtgacggtaacgacagctccggtgctaccgccgccgtcgcaggatcggaaatcaaactctcactcaagtagtgagagctcaagtctgacggctacgaacactaacgctgcgaccgaagcggtttcagcgccttcaacgagttctggttcaaatttgctcagtgttaatcaggaatcgaaattcttcgtttcacagagtacgaatgctagcttcgaggtgtcggcgttaatcgatcaaagcgtttcggattgtggaattttctctgatattgggagcttcacaaacttgatcacgtcgtcatcaacgggaggaggtgcattggaggctttcgaatacacttccatatgcgatatctcgatctctccgttcaggttgaatcaacagaatcaagatcatcatcatcaccaggtttcacagagccagacatggcaacagcaaaacacgaagacgaacgtggctcctccggatcatgatcaattgaagatgcaggagatcactggtgggttacttgatcagacttcccaagctgatctatctgttctacaagatagatccaatggtggggtattcggatccttgggagattggcaatcatgcggagatcaaggtatatttgatcttcccaacaccgttgatcaaacatactggggtcagagtcaatggaccgatcaagaccacactagtgtctatcttccgtaaatctctcacctttaacttttcatttttaattattattattataaaaaaaaactctcaacgtctcatattaccaaacaaatctaaatataaaaaaatcagaaagaatttttttaagcaaaattatgaatatgactgctttcgtatgtaaattttaaaaatattttttgttttattttttcttggtgaacttggggttgatcttgttaagtattttatgtaagttgtaactaactggcaacgtttttttttttcttcctcttgtagttctaagtttattattgggagaggggagagttttgttgtctaatgtaataatgtattttgatataaaagatcagtattaatattaatgaaatatagagaagaatatatatatattgttttatcaatttgtcaagatgtatttatttatttgttgaagataagaataatcactatttaatttaatatttaatcaactctcataaactttgttataaaacggtgtaattagatttagtgggctttaaacactggcaagtcaatcacaatacataaacgtcaaaaccaccacgtcagcagtcggttggaggcggtgcgtgtgtgtgtgcgggatgagtgggtcccatgatgggtagtgatgagtcccatgcgcgattatgactcgtcgtgcgtttgagagggagaggagtttaagtggggcccataaacaaagcaggggcattgttctggaatccttgtggacacgtggctattcctaatttgttgaacggttagtgagagagagggcggtttgtctttggctcaatcctcaaattgttgttgttgttttatgatctcagtcacctcactccaattcacggtggccttccttagccagctacaactactctcctagtagacaatagtagtagtaagaataagtaagtaataatatcatgttaggtttcgcactctttgggattttgtaatcgagtgctgatcgtgtgaaatgatgacgatgacgtggcgatatgctcgtgggttttgcttgggtcccactcgttaggtttgggtggagtggaggtgtgtgtttgtggggcccatttagtgaactgagtgcagaagtggtctcccttgaaagtcatgcatgttggcaatagcttgatttgattttcttgtgagccattggggcgacgtacctataatgcaaatggccaattggtggagtcttcccaagatattttgagaaaaaaaaaaaagagagtggattatataaatatatattagtattcattttattattacaattttatagtagagttatggtttgcaatgtactttgtgtaataaaaatttcacaactcaaaaatttcacaactcacttagataccagaaatgataaacatatgtataatactaactaatttatcaaatttataataataactaggattgttacagcggatccggtgatgatttttgttgtgtatttaaatgtaatttcttcataaataaataatactaagctcattaatagtttcagattaatagttgtgtatttttataatgactacttttgtatttacatcgtgattggcaaaacagtattatttgtgatatatttgagtggcccaactcacgagaatgcttaataaaatatccgaatgaagaactaatactactgatgttgggtgttcagattgttatcgtgcatgttatgtttggtgcccaatatgttgctttgttttattggtattaagtgatgtatgcctaatgcctttcaaataaatgcaaccaatttttggttttggagttttgcctttgatattgaccgtgatcgtggcagttcagtagaattatgcgggccattgttttgctccctttgggcttatatggagtttaatttagagtagtttgtgtgttaataatatgccaataaaaattgaatggagattaacatgccacatatacacaaagctcattagagtagtgaaagtgtcaataagcttatattttatgaaatgaaattggcattgtattgacagtgatgagagtgtttgaggcttcttcttgtctttgttctctatttgcgtagttgggctattgcgattggtggtgtggcaattttgcctatgagtttttgcacaaagacgtagaaattagaacaacatgaatatatatacataatatataaatatatatatttttgatttttgacgttattttcaaaaatatgggaaaaattattaaggttatgataaatatggcataaaaagtaaataccactaaatatggcattatctaaccaatcaaactaaaaatatggtttttttctaaaaaaaaccatacaaaacattaaaaagaaatctgaatttaaaattcataaaaaataaaaacttaattaaattaccataaaaaatattaaaattcccttcatatttatttttttta

SEQ ID NO: 382853 - DNA, 2342 bp, Cannabis indica
tagttgatttatagttgtcataaggttaatatttcgtttttttcttattttttaccaagcaaggtgtatttatatccgtatcttcttttccggtacgtaaaaatgtattcatattcttatcttctttttcacaaatttaatctatttttcctttttctatacagacgaattttattaattctcacaaccaccactctaactggatttcattttgctgtgacttccatggtcggtctcatctaatgctaccatttattctgcatccaaattacatgtacctctctgggagcttctctagttctccatagttgcaaacatgtccatcactggaggtgaggctccaataatgttgttggagataagacaaattaattttgttagagctgaatattcctttggtgtatgcatgcataaagggtgtaccagaagagagaaaattagtgagctgccatcgttgagtgccatgacgaagaaaagaccaactttgtaatctgtgaggagagtgtgttcttgagtgttcatcaatgtatgttcaactcattttatgtgtaatctcaaactcaaatagtggaagtaggatgtaggagacacattgtctctaaacctggataaacttcgggtatcttttttctagtttaatttgattaattttctctactacttcattacttttaattgcttgtgttacttgattattattacattggttcggtattgattggtgatcaaacatattgcattattgtgtttcataacaatagccagtgtagttagaactagtaggttgttaaaatgttaggaacctaggtagttaatgttagttggttcctatggtatagttcttacaaatgaataggtctctaagagcatcaattttggaaagtttttcactcgcaaataccagtaccggaaggagccttatccaatgatagttgagtccagataggagttccaaaatggctatcatgccaagtccaagtctagtcttcaagatagctagcctcactctaggatggtgttctagttggctagttgtccctcctgtaatggttgttccagatagtcgactccagctgttctatcctatccagaagcataatcagcgagtgtccttggtttgagagtctgggagatcatatatgctctcggaggctctgatacttaagctgacgtggagactttgcttaaagaggagtgtgttaggttagttaaaaataactaataacttaacaaccagctcatttcttccagccactgactttaggatctttatcctaaggctataaataccaccttgtcttgttattacaagatggaccagagacaagattcaaaacttagttcaaatgatattgagagtttgagagagaaaagattgagaggtagagagaggggtacatagaaaagagagagattgggttgtaatttaactacttaattaaagaaattataaaaaatacttatgtttacactatatcaaaaataagtttatataaaaattatttaagctaaactcaaccttttttatcattttttgccgatttttttattattattttcttttcagctgatgaaacaaccctaatgagagatttttctaattaaatagaaaaattaagaataaaaatttaatttttctaatattacatatttatggttaatacccattaaaaatgcaccgatatatataatatagttactcaacattaacccttttaatagcgtaaatcattgtagcttgttttaatattcactactttttttattattaactagggaataatattgtgcttcaagcggtttttatattatttgggaatcaaattttatattttttagtaattttttttaaaagattttacttaatttgtattttaaaaagaaaaatatattatacttgaacctataattatcattattattatttaaagtgtattacaacttatttatttatttattgtattattatatatgcatgtatagtaataataattaaagaagataggtatgtgtgtttttttgtctgttctcttattaaattgttgtgatttcattattttttcttctagtatataattatcagttaataaaagtaataataatattagtataatattcattatgctatatacaaaatcttcaataaacttaattaattaataatgataataatagcataatagtgattattatataacttcttcattaaaatgaaattgaaataaataagaaattatatataatgttaacgtaaagctaattggataggatgaatagaataaaaaattaattaaacttaatttttttttttatgtaagaattaacttgaaaaattaaagaag

SEQ ID NO: 382854 - DNA, 1736 bp, Cannabis indica
tgtaaaaataaaaaaaaaattctcaattcatgaaacaatttcaattgttatatttaatgccaaaaataactttgtcatatttttgtatttatttttagtattgcactccaataacaattgtaaagatacaaaaaaaaaattaaagtatttgtgttaagctcaaatatatcaccctacttatccttaatatataaagaatgcccaaaatcctaacaacgaaatatcctagcctaactgtgtaagccgtggaaagccggctaacatgaggtttccctgttcttgggttcgggtttcctatcccgataagattactggccctttttgaagaagtctcagggctgtgatttgtcatctagggaggtgtttcttgtgaggaagtgtgctgctacggtgatgagttcgaggccagaggtgcaggctattggtggtggtgttttgacgtctcaatcaacgctggctataaatgacgagaaaggtggccaatgatttggtgaaatggcatcatctatctagcacacttagggctcgtttggtacgttgcattaaaatgtattgtgttggattatattgcattgtatcgtattgtattgtattgtattagtattatttaatatagtacgacatttggtattgatttgtattaatagattgtataaagttataatatattttcaatacactcgaccacaacaccgactacgcatgggttgggtctcgggtttgagccctgggtttgggtttcaagtccaggtttggggccaggtctgggttcgggtctgggtctagggtctaggtttgggatcgggaccgggtttgcgtcttcgcagtttgaaactgggtctagggatcgagttttgggtgatcctggtccaggtctggagtccggatctaggtctaggttctgagtccgggtttggggccgggtctgatccagctccaggtccagggtcctagtttgggaccgggactaggactgggtttgcctcttgggtttggaactgggtttgggaactgagtctttggtggtcctagtccaggtctgggatccgagtctgggttttgagtccgagtccaggtcttgggtccgaatctaagactgggtttgggtcttggtctggatcttgggtcctgagtctgggtcaggtttgggtccgggtttgggattcggatctgggtttgggtccagggtccaggtccgagttcaggtctgggtccgaatctgagtctgagtccaagttcgggtctaggaccaagtccaagtccgtgtttggttccggtcccgggtccggtcctgcgtctaggtcaaggtccgagagtcctgggtcacggtcccaagtccagggtccgggtcccgagtttgggtccgggtctgagtttgagtccgggttcgggtctaggtttgggtccgggcttgggtcccaggttcaagttcaggtctgggtccgggtccgggtccgattttgggtctgggtttgggttcgggtctgggtccaggttttgagtcccgggtctgggtctaggtctgagtccggggtgctaggtttgagtcctggtccgggtctgggtccggtccgtgtcccgagtttgggtatgggtctaggtctcgagtccaggtcccaggtccgggtccatttctgagtttgggtccggatttgggtccatgtccgggtattaaataatacaatttacgttgtattaaaaattttggttgtaataattaatacaatatattgctt

SEQ ID NO: 382855 - DNA, 2945 bp, Cannabis indica
aatataactaaccaatcgtggaatacctgctagacactactattgtctaataacaatataattaattcctgtcaaaagatgaagaaaaatatctataaattatattttatgattattattcttattattatatattgatcattcatatatatatgaatattatttgacattaataagtctaaccgtttaattttaactaattttaacaatgaaagaaaaatacatagattttgttttatacatggttgattttataagaggaaataatatataggaagaaaaggagaaggtaaagatacgtgtgtaggttttaattaatagtggggaatattattataattaatcaataataatagttaatggtacgtacgtgatcagatgcacatgtgggggcatggatcagaatacagaaaagggccagagtcgcttaaaggaagtcaacctcgggtgatggcaggaataccatgctattgttgcgcacaaggatgtaagaacaacaaagagcacccacgagcgaagcccttaaaggactttcgaacacttcaaactcatacaaacggaagcatggcatcaagcccttcacctgtcgaaaatgtggcaagcacttggctgttaaaggcgactggagaacccatgagaagaactgtggcaagcgatggctttgcatttgtggttctgattttaagcacaacgatcactaaatgaccatattaaagcctttggctatgctcatcatcctcatcctcatgcataactatagttaaccggccacttacccacaactacgtatgcacccatttatttctgctttgcatgtttaatattaagaacttatatatcaatgaaatctttgtagtaattataatatacaatgtaaacagaatctatatatatatatatataaatatattaattttatgattttaaaaacattcttattaagcatatactgagttataatggtatcatgaggtagcatattatgagtaattagccataatctgttataattattaaaatgaaatgtatatatatgacactttagttaggtgtattacccttaccctttaccaattatcaagaaaagtgctaaaaaaaagttgtactaaatattatctggaaataaattaaaagaaaacaagctcttcaatgcaagaaaaagaataaaaatggcagagttactcctctgtaagttatgaatttttgaatccccttctctggtcatggctaaccccttaaatggggaaacgtcggtgcttcttgcttcaagagatgtaccattttgagaatatctcaattgtcatcttagttttcggagatggttaaagactaattcttttgataatattccactatattcatgggtttgtaactactgttgagcttcttgcgagggtcccccccaaagtgcggtatgaccatttaactttctctggggataatagccactactttagggtgacacccctgagacccactctaaagggggtgatagtcgccaccttagagtgttacccccgagaccccttccacttaatcttcaatattgtgtgtagtcttgacgttatgaaagatgcactatatcaaccatatcttatgtaggtagaatgtattacttggaccatgagggttgtgggggtcaaccccatcaccttttgagtagatcacttatatttgaggtaggggtagtagtatatattccccagatcgatcgatttgactcccttaggtgtgtagtaattatttatcccgtttgttagggtgctagtctaccttacctctaggggtagtcacctactgctagacttctattctaacggtcatgactttgcattcttcatcaattcagtcccagtatcatcgtttcacatcatcatttttgccacgtcactatcgtcaaattttgggtaaatatttgcctcccaagtttttagcggtatgactatatggtagaaattttcttatgtagtctatgcttcaatcttgatattgatgacttaatggtgcgatactgagaataacacctctatatgagtgattaccttcctaaaccaaattatatatacttttcccaatgattaaacttttattaacatcaccccaataatacctataggcaaaatcaaatacaaggaagaacaaataaataatttacaataggaaataattcaaatatttacaagaaataaaaaattatttgttgggggaatttaatagcaaaaggaaataaatgaccctttgtggtaaaaataaactttacttatgcaaaatagtcaaatgaagagtaaaaatactcaaaaatcacaaatttaaaaagttgcacctttccttctcttctcctttttttatttcaggtttgactcactcttcttcattggaagagattttgaagcttttaggtggttcttggaaggtttgtggttcaatctcaatattgggtaagttttttatactcctttttacaaatttcttgcttgaaaattgagatttggtgacatttttagaacttttccttggtggtttttattcttgacagaaaatggcttttaatctttgctgtttttaattttttttgatgaaaaatgaatgtttgatgcatgagttttgtagtatagatgatgggtaatgtatttttgactttgatttcatgaaatttcgtgaagaaatgactaattttgaaactttttgttgggtgtattcttgagtttagaagaacaccaagaacattggaaaagtttgattttacctccttttttcttactttgattctcataaaattgagaaaaatgagtttgtgaagatagggtataccttagaaaaaattctttagatttggtacccatacgttgctcaggtacggtccattaacgactaacctctaagttgggtgttaggttatatttagcctatgtttcgggtctttaaagttagcattatctcgtcta

SEQ ID NO: 382856 - DNA, 1049 bp, Cannabis indica
gcctcaaaaatatgacatgagaataatgttagttttctttccgccataacatcaatctaatctagaggctaagaacaaagtatagagaaggattttctcagctcatgaaacatttgtcactgtaaattggaaattagtccaaattccatgactatacactgtagtaaagataagatgcaagcgtacacagagatcttcagtcaaattatttgtttttcatataaaatttgggtgtattctttccttttcttttccttagaacttctcaattaagctgttaagtacatttgggtgtattctcccggaaaccaaatatccccttctaacaaaattttactgccccacagctaggtcatgaaccccaagattgactgaccttggaatccaaacaactctacccctcactctctcaaaaacaaaaatataaccattaaaccatgagtgggatcctaagggagtttttgacactaacttttggaaaagaaatcaccaaaaaaagagctacagatgactctatccggcttctctaaccagctcatcgatgtctctcccaagaatacttaacatccatgctagcaaggtcatcccgccgcccatagtaaaaataaattctgggagagacggaccctagaatacgctctacggtacctcctccttttttgtcagccgcgacaatacaatttaaatcaccaagacaagcctagaaatcagaaaaattgtcccgaaattgcttctaagatcacgcataggcaagggatagcaaaattctaccaaaatttctgttaaggaaaggaatagcaaaattgcccctaaaaatcacttacaatggttattttaaaatatttgtctattaacactgcactagagtatgtgtgaatgaactaaattaacactttttttttaacaagcaaaaacgaattcacattacttctaattgaatttaattaaaccatagctttgaaacaatacctgtaacaagtaaaaagggtacgtttaaaattaaacatgtaaactacaataacaaataggtctaaataacccaaaaaccg

SEQ ID NO: 382857 - DNA, 5085 bp, Cannabis indica
gtggggatttactttcaacaatataatttgtagatatattatgtgggtgtgatgaagaaaagaagatgagtgttttttttaactataaagacttttttgatttattttctagctcttcttataaagcatctttcatgatagacacaaagtttaattatttagaagagatctttcttcctagtttggtatcctttaatttttcaatccagtactgacaaagacaacaaaacaaacaaacaaatcaaacaaaattaaatttattcattttcatatttaatcttattttctcaactcaacgtcaactaaacacacaatgaacgagtctacaaatataagatggacttgtgtttgtttcaaactcaaggaaataaccgatcgattttctcatcaatttcctaacaaaatttacatttatgaagaagtccatatgacagctttgatcataattgactgagtttggtactgatatatcaacaacatcatttattattattaatttctagggaaggtacgtacgtagctagtatgactatttactatttagtcattaatgtgaaaaatcatataaaatttactaattaaaaaatattaatttttgttatatgactatatacgtacgaacaaaacgttgtttacgaaatttaattacaacagattttgcgatgatacgtcttccgttaattttaattaaatttaaagtactgttaataaacttagaagcagctagctaataagtcaagcattgacttggcttagcagttagtaccaagttgagcatatatatataaatatataagaataatttatacaagcaaacacccctctgcatttatttctaattatatatatatataaacttgcaaaaaggttctttgttctgttcttcattttcaatcgtctaccaattaagactttggtacttcgaaacaggtgaagtgtatatatatttttcacttttttttttatttcttatttaaatatagtactttacttggtggtatctttacaaatatttactcaggtatttctcatcatactattaaacgactcgtatgcatctaatcaccttcttctatacatacattagaacacatacacatgaattcatcactatgtgcaaacatgaatagatttattcttaattagtccttgtgggtcttaattcgataggtgcctagaatttataatgtttgaacttattaagagtgacaattttagtccttaggtgccttttcaattttgaccattcatgagtaaccttgtgatactttatctccatatgctttgtcctatcatggaatatagggtttttgggtaggtgtatgcaactctgactatttgaatacactataggagctcttttttctatggtgatttcttccatgagactttccagccatattgcctattttattacttctgtcacaacaatatgtatccagacttaattgttgaaagagcaacaacagattgctgctgaacattccaacttatggatcattcttcaatttgaaaatggtatgcagaggttgacttcctgttgcatgcttatgtctccaacatagtcagcgttactatacccttctatccaagtactcctgatttgtttcttgtagatcaatttcacatttgatgtgtatagcaaatatttaaaagttcacttcatgggaagccaatattctttttcttgatttgccatatatttgctcaaaacactcataacttgtgccaactcaggtcttgtgcacactattaaatacatttatgatctaactgcattagagtacgggacattactcatctgttcaacttccttctctgacttgggacatattgtagcttggacaacctgtgttgactggtgattggctgcttggtaggttttgcatctctcatagagaatttatctatgagtttttcaatgtaaactgtttgatgagtatgagttcccccttttcccttttcttttgatgttcattccaagaattttggttgcaactcctaagtcccttcatctcaaaatctgtctttaacaaattctttaagttttcaatctttttcttcattctgcttattaacaacatgacatctacatacaacaggaggtatgtgagttcctaggcctttgagatacaaacatgtatcataataacttttgacaaggccatgttgggtcatgaatgagtcaaaatttttattacaatgatctttctaacttgcaaacttaatgctctttgtcttttttcacaaagcctttgggttgatccatgtaaatatcttcctgttacactatgaaatagtgtagaggtttattagtaatttacaaagggtgtgaatcactataaatatgaattgtatagctattatgggatagggaaggagtaaatagaactttggttcaattgagagattggcactgtctcgaagagtgcatttcggagatttgtcctgtcttgaagaggacctgtatctatcattggtgctttcattgagagaatctcagctagagatttcagagctccgcaatatgactgacgagagcttcgtgagttcgtaagatcaatgattagatctgtggagttgcgtacaaacgccatgtttgagagccacgacttttcgactgcgacactgttggattcctcagcttaggcaccacctatttcaccggaggtcaaaaatatcattgataattccgaggaaccagtgagcatcatgaagccaatggcgaagcctcttcatctcctcttcagcaaaatttctaatggatctgatccagaaagatcgcaatcaattttgattcgatctacggtgacggcggcagctcaaagatcattgaagtcggagaagacacctctggcttcgttggaggttttaattctgatgattttgccacttccagatcactcggctggtataccgattcatagtccttctgcgtcaatggaagcggctcggaggatgctaatgccggagaaggtgaccttagctccaatgaccaatgttagctccaatattgtcttcgtcattcgtgattcaaactagatctggcacggatccggtcgagtatttcgtttagaatttctgaacaaaaatggttcctcaaactggagattagccaaaaagataaaggtggagctcgctggagaaacagagagtgttgacgagggaagaagggtgctagttgctggcggaagaacggaggcatggtcgcgccggatcgctgaagaccgtcgaaggaaagggacgactactgggctcttttgttcacagtttgctcgaaattaaatacattttttcatcacttaattgatggaaatatatatacattgatgatgggaatatatatatacagtacacatttgatggctctacaaatgaagctaaggagtacaatgcatgtcaacggaaatagcttttggtttcaagtgcattcaaaaaaaaaacaaaaaaaaagaaggaagggggctgcgcacagtatcgggagaagaaggtgatgctgccctaagacttttgggcttggacttgggctgagaatttagtagaaaattacaaagaaatgggctgaatattaaaggaataattgggatgtaattagtttttttatcttttatatttgtgcttatttttagctgtaatttttatttttaccaccttgaggacaatgtgattttgaagagtgggaaagtgttatactagtgtagaggtttattaataatttgcaaagggtgtgaatcactataaatatgaattgtatagctattatgggagagaaggagtagatagaactttggttcaattgggagattggcattgtctcgaagagtgtatttcggagatttgtcctgtctcgaagatgtcccgtatctatcacttcctctagtttcccatgaagaaagtttgtagtaacatccatctattccacttctagattgaagtgtgtaactagagccaacatgattctaatagttttgtacttggcaattggtgagaaaatcatgtacaatctatcctttcctttcgtgtgagccctttggaagataaccttgcattctacctaattggatctacatttttgattccttctttgtgtttgaacaaccatttacatgtaactatgttcttaattccatcaggccttcttaccaatctccaagtcttgttcttcttaagagaagtcatcttctcacccatagccttgttccattttgctgcatctctggacttaattgcttcttcatagaagtttggctctatgttattgattttcattgtagtgagtaaagcatttactagcacttcattgcattgaaactaaacctttgagtagctttgagaattctctttgctctatctctgttgagtttaaactatgagatgttctctttacaatttccaggttgattttcttttgtttgttccacctgacctatgtcaggttatgttgtgtctgtttgaaattgttctactggggttggttccacctgaccattgtcaggtctagttcctggttattctacttaaaaaggatgtgggggctttgttagtgtctaaagtacctgcacttgaaccatcatttgtaatgcaaggaaaattgttttctttaaagaacacatgtaactccctaaccctgagtgacgccacatgtatagttttataaattagtttataatcataaattaaagatttaaataaaattatgatttaattaaaactttattaattactttgaaatataacactttttacattaggatccccttttaaaatattacaaaaataaccgaacaatattacataaaaatatacaatggtcggaagttccataaacaaagtctcaataacttggcactgctattaggataagccgatatgtacatttgtcaggaaagacctctaactcgtggctgcactggcttgttcaatctcttgcgtgcaccacaaagcacttgagcagggctgaccctaggcataggcgggctaggcccgtgccagggctcacactttctaggggcccaaaataaaaaaataaaaaaaattattaggtttttatttaagtaaaatctaagtgtattatatgcaacaaat

SEQ ID NO: 382858 - DNA, 888 bp, Cannabis indica
accagtttatatgcatatttttttatcattagataatagttgattttttgattgattttgcttttcttctcaagtcacgttgctagaattaattgtgtttatttgtgggttgagattgatccgtcgttgtcgacctggttccatcgctcgaaaggttcaattttctgaaggatgtttgtgcggcttaaatttatatgtaaaggtatttgtgtattttttttatatggactatattaatatttaaatagctgacccaaatataaaattgtaatttttttttcactataacagaaaaaagcccttctttatttgccacgaaacacaacttcttacaacaaacaattgaataataaaatacattatatatatttgcccaaaatgagttcattatatacaaatctctattttcaatagatatttagcaagtctaacgataacttaaattggtacaaaaagattgccaaaaacgcaagcatgtcattaaaactatctttaacggtgcactatttcattaaattggtgtgaaatattctcatcatttcattccactgatttactaaattatgcatcaaattgttgtgcaccaaattttacactattaatagtattgaattttgaatctacattaatttggtttattttattttattttattttatcttttactttttttacattctaacccttattttatttaattttaaacaataatcttacattttagtcattaaattaaaatttatcacaaaaataacttatttaaaaaatacaaaataacaataataaaagtattaattttaaataaaataaaaacaacatagcactaaattataaaactaaaaataacaacataaataaaaataaatattaagtaaaataataatttaa

SEQ ID NO: 382859 - DNA, 4303 bp, Cannabis indica
ggaaaggaatctatattaagcaattcgaatgagttggaagaattttcaattgaaagatattggagaaattcatacctatagggtggtaagaattctaaattaccgcaatggcccacatttaggtctctcaagttggcaggaacatacctgtgatcactattgcttgatttgaatcctggaagcttcttacagcatgagattcttattttagtgacattgggcatcattgggagcgaagaaccaagctctgggcaatcataaatattaagctctgtcaaaaagggtaaatgataaggcaaattgcccgtgaggccttgacacatacttataactaatgattttagctttgggaaggctacaacatttggttcaggcattgaccattccttccagttcgacatttgtgtaaattccaaggtttccaatgatgcaaatggtgtagaagtagtcccataaaactcaagactcactgtttctattgtatggcactttccaatccaaagagttttgagagatggtaactgcccgagtggtggcaaagtacagagtttataacattctatgttgagatatctcaaacttatgagatgatagaaatttttagggaactttgtgagagtctcacactgaagtatgtttaatgtctgtaaattgtacaacatgcaaaaggacttgggcaactctttgactgaagtttgagagagatccaagtagcgaaggtgctttaattcacctattgatttaggcaattcatcgacacaacaaaaaccttttagagacaaaaatctcaaacgcttcaacttcaacaaatctttcaacacatgttgagcaaattcgtttgaagtgtagataaatggcccaacaggcaaaattgtacgcatacaagttcctttagaaattgacttgaatagctcatcgatgtcacaactctctaggggaactgtaacgtgtcgtgtttgcttcatcatttcaatttcataaaacttatttctctccatttgaataaacttctttctagatacaaaattagccaaatcaaccataaggtcatgcatgatgaaacgaaatgcatgaacgtttgaacgttgaaaaaaagatcgtgaaactaaatcactaaaatactcatatcccacttcttctcttgttctatttccatttgaatgctccaataaattatctaccatccaaagcctaaccaactcatctatcctaaattcatagtctttaggaaagagggaacaataaacaaaacatcgttttaaatgtgatggaagataatggtaactcaatctcaaagctggaagaatattttcttctccaactggcaaatccaatacattacactttgctattctctcccattgtgttacatctgtaaagcacaagaggcttgcaaggactttcacagctaaaggcaagcctttgcatttcctaacaatgtctttgccaattctttcagagtatgaatccataaaaaattcttcattgcgagatacaatcttcacaaataacttcaagcaagcttcctccttcaagttcttaagatggtgaaatccagttgttcccattatggatcccatgatagacacaactttagaacttcttgttgtgacaattatcttactaccttgagcccccactctaaaaatcatcttcattgcattccaaaattcatatttttcacaccaaacatcatccaaaattatcaagaacttcttttccttcaaccttttttgtatgttctcttgcagcacaatcaagttctcaacagcacaagcatttctagttattgcttcatgaacatttctcattaccttacaaatatcaaactcatctgacacacaaacccatgtcttgagttcaaaatgtttgttaacttcatcatcattataaacagcttgagtcaaagtagttttaccaatcccacccaagcccactattggaatcacacgtatcttttcactatccacttcattagacaacaacattcccttcaaacttttcttttcatcatctctaccaaaaaattcagaatcatctatggttgacattgaaggtggtctatgtgtcatgatcttctcaacgccctcttgtagattaaggatgtctttctgtttttcaaaagtttcaaacctctcaagaagcttctccatttctgtcttcctgtcaagatcagttgagtcaaaattagagaggaatttacttactttggttttgactgactttgtttccaccttgactttgagagcatcatattcaatttcatcaaagagatcctctgcatcttcaacaacatcttgaagcttgtccagccacttctgaactatggggtccctcatctgtttctgatctgcatcattgagcacttttgcaagagagaggaacgtagtctctagtttatcgagaatcctatcgaaaccagagtctttctttccccttaagaagctagccacatcagaagaagcgatcttcttcagcagaaactcaacggaaaaagagacaacaggtcctaccaccaactcagccattgttcccctcctcgccagttcagttgcaagtacagtaaatatgattctccgaatgtaaatcagcaatggcaataatgagagaaacaccagtatgaaaacaaaatcacagtttcttaagaggaaacaaaagcaatgctttgaaaagtaatatataaactataacatgagcatgtgcatgtgaccgttactcgtaagctgcgagattaacatgtgcctttagatgctttccccacatatgtatatatactgatatacataatacatattgtattgagaattgctaaaaggcatcatgtgcttagtactttccttggtgtcatatcgctattagtaattaattatcgggtcccatataaaaactaaaaaaaataaattttaggcaatatcgctaactaatcataatgcgccacctatagaaggtgctgggcaccactagtacccaataacaatctcatagagcattgctattaggcaccagtggtgcctagcactttctcgacatgtctcgttgcgattgactagtgatacttcctaaaaactattgtattaaactatatggaacccaatacttagtatgaccaataacgatattgacatatatgagggtgctaagcactactggttgtcctttaacattttatatgtattgatgcaaaagcagagaaactctactccaacaccaatgaaaataaaattatattatgtatattgtttggctgtttggaattggagtttataagttgtgaaggataaaaaattatacatgccttggaaaatgaaagagtgctgtattataaaataatataatatcatacagtacaaggtaaatttattactctattcgcaaacatgaattatgaaatgacaaaattttattggaaattatttcatatattaattttaattttttaaaatttacggtttgagttgatttagtagtttttatgtggattactatgtaaattttagttgctccgttgattgttatgtgagttgttatataaatttttgtaaaaatataaaaaaaaaaaataaataaaaattactttgaaatgtaaaaataaaaaaatctcaattttattagtctaacccttaaacagaactaatttattaaaaattttaagacttataaggaacatgaaaaagactttatagttcattctagcaataattataaataaacattgtcttattattattattattattattttcgatcaagaaaaatgaattttattaatcaactggacatattgaaaacaaacaaatcagcaaaggctataaaaaaagcctcagaaaaaacattcacttcactcaatttgagaatcgagtaattagttgttgttcatagaagttcatcttttttttttccttttaacactatacaatatgtaatgcatcatacactttatttctttcactaagtactcaagtgtataagaagaatccttatggaagcatttatttcggttgagctaaataccatgcactgtagctgcaatgattgcatttactacagaagccaaatgacctgatcttgtgctattaatctagattttccaaggacaagcttgaaaactcaaccaatacaatatagaactcattgaagaatcattaccaactctctagaattttcttgagaataactagataaatatatcattttaggtcaagtctattattattaaattaattaaaaatagttaagtcctgtgaaagctttaagaatattttagtaacacaattaagtagaattttttagaatattatagttg

SEQ ID NO: 382860 - DNA, 2726 bp, Cannabis indica
aaagaaaaaagaaaaaaaaatcagtgcatataacttacgaagtgctcagtatttgaggatgtacattatattccttgacaaacacaaaggaaactatggcttggggaagagcagcctacaataagagtattagcattagttgataccagcaggaatagccacttcaactataaatataatacaaacaatgaccacctaaattgtgagtatatcattaagtttttggcctgacattgtatgattggatcaaattgaaaaggatttagctttaagttgtagatggtaatattaaaatacctgaacgattgcaacttgaaggagaacccctctaatgccaatagcagcagaggttgcagccatcactgctggcccaacaagaaaccgtatagccagtgaaagtgcagccagagattttccacaagctattatcttcggctgtaaagccatgaatagacctgtttggatatccaatctttttgcatcaaaatatactattttttgtgctttaagcaacatagtaattatatttagagaatagtatacctagactgaacattgacattcccaggcctgtgtttgataatatggttacgatcccttcaatcattattggcatagtgatgtgaaccctacaaaatgaccgaattgagatgtattaaaaaagtgaattagattattttctgtgaaagttgtgctaataataataatacctgaatgctataagagaccacacaaggccaataacactagaataggtgtttgggtttcttatgagtttcctccaaaccatggtaagtatgagctttgtcatgacacttgctggaggcatctctaacttcttgttttttcctcttcttcttcaatattctcactaaatccaataccatcctttgacccataatctattcaaaagcatcatctctttttgtaaatgtgtcacaaaaaagtaaaaagaaaaaaaaaagaaagcaaccaaactcgtacagaaaaagccaaattcatacaaaagagcaacacagtgaaaaaatacttaattttggaataaataaataaatttatattgtgttatttaaatattatctttaattttttcaaaaactgcatgtgttgatcccttattttttttaggtccctttgaaaattatttctccctcgatcataacaaaaatataataaacatgttcattagccttattgcataataatatagaagaaaatcgcaaatattctatacctatataattttctgtgtaaaagataagaagtttaataattaaaagcaagcataatctacaaacaattaccattcaaaggagatgctccatttttactgattacatccatagaagtaccaaaagtgtttccagggagatctgttgctgccgagaatgaactgttgttataacttgatgcagcacttgacgagttccaaaaagacatgtgaagttgaatggcattggcatcaccaccacgacatcctgttctagtaatttcttcaccaagctctgattggccaaagcttactgatgagtttctgggagtagtaacactaacactatattgatccacagatgatgtcgttgaataaatctcaactcctgttaagttcgaggcacgtggagtaccagacttagcagatgaacccatatggatttttctaaacgataaaatagaggaattagaagagtaagatgatctcctcaccatgacatgaagcttcccagaagtgtcaatttcagcctcggcgtgtaaagagtcacaacctccagcaaacgacataacatcaggctcagtcttaagagaagcaatggagccagcattggctgggaaattgttgtttatgaaaaccttagctgctctgtactcgaacataatcaaaagcagagtgttccatataactccttggaaaacgacgatctgaaccattaagcttgaggaaaactcaccgtacattgctttgagaagtgggattcccatgacaagagtgttgggaagagttgagagtgagttgagtgttatggtccactcaaggcttccgtgtttacttatcattttccagcaaaacagagcaagtaaaacgacaatcttttggagagtgtcagctaagataagcttgaagttcatgtcgtatgggttgttgaaggcaatgagctggaatgagagaaatggtatggctatgagggccacgaaacggtttacaccggcgcactgctccggcgtgaagatcttccaccataggactgaggcgtaggctaatgtcatggctgcgtaaaggggtactagtgctgataacacttggtagaagtccttgccggtgatcatgattgcgtttgtgtttgagagagaagctttactgatattttcctttttgagtgtttggaaggaaggaaagagaaagaaagaatgaaattaattaaaagtagaaggaaacgtgtttgatgagaaaactcaatcttggccacatttcgtttgttgggttttgcatggctggctatgtataattaggagtgagatcacagttatatgctatttatggtctttttgttctgaatctattgttattatttcttattttatttaattattattttttatataattaaggtttgattcatgtttgaatgtataatcaatgtatatatatatataaaggaatgcccaaaggattccacatggcaccctaattctcattatctcctaatttctctacttctaatttttttgat

SEQ ID NO: 382861 - DNA, 1302 bp, Cannabis indica
ataatgaatcctgcaattcaaaaacacatggtgattgatttagttatatagctaatacaaattacaatacagttcaaccatcatcacatattcacactcacataccccaaatgacaaaattgaatgaatatctaaaatactaactttgaattatgtaagccacaatgttgttagtttgaacttccacagaattgacacaaaagtttacagcttttatagaatagtgaaagtggatttacttcagagaaaatggtatggaggcataagaccaatatatatatttatataaatatataaatatatataagaccttacaagcctaatccactggcactacccaaggagaagtcttcatagcctaaccccatatttgatttctagctctaaacaaatatcagttataattatctatcaaaaaacttgtacacattagtggtaaataatcagttcttggtgttcttcaatttttttaaatactcaaaataactaaatacattgatagaacctgttaatatgcaaaaatggaaactaaataacagctagataaaattaacatcagtaacaattgatctaaaatttatacaacactctcagttttaatttttctaaaaattgaattctttgatttatagattcaattcaatccaaacataaacaaaaattgaatcttttgaaacaaagcctaaattaacatcagttgttatcagttcattcatagagttctcttcttaaaaaaaagtcaactagggctaacgatgacaatcaaaatccaatctccaaaatttctctgttatctatgattctatctatataattatgtatatatgaagaaggtaccttgggctcgccatcaacgtaaattacagatccatctttataagggagcaaagaccttccattcctagcatgaaacctaatcggaactccacgaccagtttgagtactgaaagcgaagagagatttgaagccatatttatcgagaatattcctaacctccaattgatcctggtcccaaccaccaagactcgacttgaagacatcgatcggaccttttccggtacggtatagatggacctcaacctccggaactttagttctcaccgatttgggactgggattattattccgattgggattcgaatcaaagattggtggttcttcttcttggatttccccaattaagctctctttttcatgatcactcgtattctccattcttctctcctctgactctaactctgtttcgatttcgataaaacttttgtaatggtgttttttttttctttcttttataggactagt

SEQ ID NO: 382862 - DNA, 1439 bp, Cannabis indica
gaatggtaatataccattaaagtaatgttagaattaagaagtgtaaaaaaataatgtgaaaaaaagataaaatataatattaaatttttggatgatatagaaaattttaacacttttagaaaatactatcattagagatgttgttaatgacacttataaggatgaatcttttgatttgagttcttaatgaactataaaatattatagttataaaaccacattagtatattatccaacacaagctataaaagcccttaatcaactattaataaaaataacacaaaataataagaaattatgaatcgatttataaaaatcagaatgaaagagcaaaaagaaaaaaaaaatcaaagccccagactaaaattagatatattctaatttaagtagttttttttttttttgaaagaattataataaatcaaatctaatgatactaatggtagcaataaccagtgccctgtttggggcagctcctcccactcaattttttcttttttttttcgcttaatacttaaaattttgttactaaaaatttaatatatatttccctattttagtccatgttaatttttacatttgtgctcctttaatatatatattgaacaatatatttgtatttatatttataatttttttaattatattttgttttatttttcactccggtaaataaaatttttgagtccaccaggggcaagaattaacatcttaaataaaaaatcaattaatcacatctaataaagttgtttacgactattaattaaagtttaattattgtccacctactagtgggattgaaaagacataatctatatacacaagtgtatatattgtcctcctaaaaaaaccatagatgtataatggtaaatattactgtttagttttaatcatacacacgacaccttaattctttttccaataaactacatttttaatttaatcaatttagtctcttcttccatctaaagtttttttttttatgcaatcgacacatttttttttatgaaaacaatttgttatcatatataataaaataacattgttatattaacactacctcctagtaaatttattagcaagtttgcatataataattataaaattaaatcgtatgagaattaataattatatcaatatatgtaggggtgttcatcaaactgttcaaaccgttcaaatcgcccgcaccgcaccgcaccacactgtaaaaaaaatgcggtttgaaattctttacggtgcggtcgcggtttgaatttttcctaaaccgcgcggtgcggtgcggtttgcggttttgaattgttaatatgcggttcaaaccgcaccgcactgcatattataaaaataccattttttatatttatttaggtccaatatgtgaatattcaacttaaagtctactattctttcaaaacaaaaatttaaagtctactaattattgt

SEQ ID NO: 382863 - DNA, 1944 bp, Cannabis indica
ttgtcattttcacagatttcactttcttgatttgtgactctttctccagagtcaaaagtaggtgtataattttccataaagcacagtcgaaggcggccatggcttctttcagcgtggaaacaagagattctaggtgggcttttaacggccttgattataagccgcccttcttctcgatgaggcttgatttggagagattcagctccactcatggttgtcaatggaggtggaaagttacgagatggtgatgctgacgatctaaatttcctagccgacaaacgccgacgactggaaaaatcttcactttttgactctgtttccgaagtgttcgacaaaatgccgctttcagacatgtcagttcctgtctcgtttcccaagttttcagtgcacaatttcaagctcttttcgctcagacaagaagatgagctcttaaccatgggatggacataagtcttttccttttcaagcttggaactttgactgttttggagggattggaggaagcaccacccacccatttcagtgttttttgaggtttggctttcatggggttgattaggcagctgacatttctctgctggttcgtttgttttggcatctgggaagatggattttaaggttgacaaatcaaaggactgtggctgtgctgtcaagtgaggtgttatggaagaagaagagagcctcagcctcagtgttctcgactcaacaagctgtggtgagtccaaacatgattgcaaaccttggcatactatcgtcgtcattttaatattattgaaatttgaactatttaatataatcaacagaacagttctaatatttctcaaaagagcaaaaatcaaagatgattaaaaacagagagaccgtttgtgttatgaaaagagttttgttctgtttactgagagagagaggatttttggcttggaattacaataagaaaaagggagagtgagtgagagagcgacttgtgagtttagaaatgagaagatataaaaggggaggttcttttcttttctttcttttttggttgagacttgagagagaaagagagagagagagagataataagaagaaggtaaacaaaggggtttagcacttggatttactataagggaaacgttgtttttgtactatgaagaagatttgaaactagagagagatggaagaagagaggaatgaacatgagcaataagcggaagggggggtctgaatttgtagtctctcaaaaagtgccaggagggtacagtgttgagggggaaagtggggaaagagttcttttttatgccacttgaaatatactaatcccataatgccacacacactagtaccatacttagaagacaatattaaattaccaaagcagagcatgaccccacctcctcttcccaactatttatattcatttttttttttggaggaacttattaattttgaagaattctttttctaaccaatgaaaattggtttttcttcttatacctcatgtgggcaggaaaaaagagagaagaaaattaggtctgcttggaatgaaatgtctttttctgtgtagttaaaagagatagacagatgagtattttacattactccaaaatttaccagcttttttttctattctcttccaaacgaaaagccaacaaagtcagtagcctaaggattctccccaatatttttgatagtgattgcttcctctgtttaactttgatagcatatcctatcctctgtttttatctttgatactcttatatttctttgacagtcaaaatctttgttgaaattactagtaagaaaatgtctctttagtatcatattgcaatgtattggatctcatataacttaaagtaataacttttaaaaaatatcactaacccatcctaagggtaggacgtcacctcttggtggtgatagacaccaatagtgccaacagcaatgctccttatataaatataa

SEQ ID NO: 382864 - DNA, 1698 bp, Cannabis indica
gaaacatagttttctttttttttgtttttttttttttgtaaaaaatggcattagatgcccaatacttttgaagaattgccatagaaggacaaatagtcaaaagagtaggtaaagagcccccctcaaccccaatgataggaacctctcgaggtgttattatgctaatgctttgctactttcctttaccctgttttggaatctaatcaacttgttttggttacttaaaatcagtcttaatcatctttctcttctttttgaacaacacttattaattcttaatcacgatgcatcttctagttttagtttaatttttttagaatagtttaattaattgtatatgtatcatggagaaaaaaagttcataaattgtcgtatcttcttacctcttactattaatttacgtgtgagttatttatagaatgtcattccatgtgttagtgatgtacaattagagatataaaatacacatattttaaaatggttagtattattattattatttttattattgacataaatatattaataaataaataaccaacaaaaagaagaaaaaatgattacgctaacagatgacgtgtctataactttatctaattattatttttaacacttcattgtaccataactcgttttaaccagttaaaaaattaacactaataattataaacaaccacacaaaggtaaacctcattccccaccaataataaaataacaatttatggtaccaaatgtagttgtaagttgtaaccaacccttaaacttttataataataataataataataataataataataataataaataattaggagaagggcatctttttttaagaaaaaaaaactttaattattagttcacctcatactaagtatgaagaaataattatttttatttaaaaaaaaaacagaaaaagtcggacaaggaactggggtcttaactgaaaaaagagctaaaacaagggcaatattgagaaacaaaagatattattactaaacagtagaaagtcgttagaagacaagagtggcaaaagcgtaattccatagaaaaagtagtggcgaaactagagatagcactttaatcaaggcttgtcaccaagtgattaggccatcactactacccacttttttttttttttgggttgggtttggggttggggtcatctaataggaggaaaggaagaagagctttactgacaaggacgtaccacgtcagcgcaccatttctacagctgcagccaataataatttgccacgtgtacaatgggtaatggctctgagtagctacgtgtcagcagtggggaaaggataaaccttattgcttctctccgccacgtgtacaaagagagtctattgacacaaccttgtcgccttctgtcagtgtgttatccgcttctttcttcttcctaacttattacaatgacttgttcaaattatccaaacatttaaataaaagaaaatattattatatatttctttgttccttctttctcatcaaaattttaattatctatttatataattaataatagaatatgatgttttctactttttcaactattagtgttcgtattcatgtaaatttagtcacgatttgtgggcatgtaccaaaaaagaaaacttagcataataattgatatgtcttcaaaaaatacatatataaaataataataattataataataaactaactctt

SEQ ID NO: 382865 - DNA, 2207 bp, Cannabis indica
gagggggatttgggctattcttatcattgaaacaaggataatcgttaaaattgcccataataagccaggagcattcagggctgagtcaaacagacgatgtagaagggtttaagaatcagatttgtgatgaatataaggagaaccataatagcaagacaagtgaaatatattattattatccatagttacataaatatcaatgtgatacaaagattgagataagatatggacattgacagtatcattccaaaaaagaaataaaccccctcctaaacctactctaggaacctcaaacacattatcaaaagaaaatttagccttaacagatcacaactattaacaggaaacttagtctccatcacaaaaagaacttaaggtctatgttgttgcactagaagggagatattttggaatgctcgggaactccctaatccgcgagcattccaacttaaaagactcatttttctgggcggggttgttaagcaacacccgcctgctcttcagtgtcagagattgaaggaacaacaacaaaatcagacatggaggatcgagccctcttaagggtattcctcaaagaagagccaactttagtgcactgtcgtgtgtaggttcttttggaacctgaaatgttaagtggggccacttgagctttgggacaaattggtgcaggaggctcagaggagacccagggaggctcggggtacatgggggctttgcctttggaagtagaagtgaaagtagcagtagtcatgacaggggcagtattgatggggcaagtgatactagggaaatgagaaactggctgtggggtagaatgagtaagttgatcagaaatggtaactggagtggagaagcctggtccaaagaagcaatggaactaaccaaagtggtactagcaatgctgggaaccaaaaattggtcgacaacatcctgagactttggctagtaacattgctaagggaggggatttcttcgaaaggggttgagttggatagttcaaagatactcttcttgtagataggtttggctggggcacgaagaacatccttgtagctaagcggtggggaatgggcgtgagtgtcacaatagtggagaaagttttcacacctgttaaaagtgtggtcaagttttccacaatggtagcagtaattctgaatgccttcatattggaatttactccatttggtaagagaaagtttccaaaagtggatattcatgccacggaaaaggggtttggtagtatccaaaagaacccgaatacgcatgaatggaatgatggaatcgtataaggaggcgaggtgcacttcaatgagatccccaatggtatccacaatgaagtgagccaggccatgagatctgttcccaaaagggatgaaatgggcttggagccagagagggatatatcgaagttggtttggaagaatggtatcaaaaccatctgggatagcaaatagcataagggatcggtcgaagtgccaaggctggccctccataacccgtcttctatccccttcacaaccaaatcggaccaaatatagtccagagtggtattcagtaaaagtgaagggaaaacgagcaacccaagcatctttcatggaatttcctatccaattaggtttgggggtcttgggggtgagaatcttgaccacaaggcagaaggaatcaggttgggtctcaggatggattagaacattatcaaaatcattgatgagagcctcttcagcagtgagctggagagattggtggctgggttcgggttggtggttcttggttggttgtatggagttaggtacgaaaaacagatgaaggctacaggtaaaagtgggatggagataaaaactagaggaagcatttaaagagaaaaaaaagggtaagtaatacctggagaagtcgatagctggagtggaggaggaagctaaatcagccctactttcacctaggccgaatccatagtatcctaagagtatgattattcctggctggctgtaagagcacttgaggatagtgatagttattaattgcaagatttgaacccatggaggtggagaaccaagcatttttttgatactccattaaatgtagtcgccggctgggggaaggagcagagggcattatgttgggttttatgccctaaataaaactcatttcaatataatcagatttacttattaatatagatcagaaataacatttaatgttgcatggtt

SEQ ID NO: 382866 - DNA, 2751 bp, Cannabis indica
ttttttttttttgagaattcaatgagcttagattcttgtgagtgaatgaatttctggtaagcgttatcgataggaaaaaggaactatattattggtagaagatttatttcgttatgattaattacagattatttatttgttattgaatgacagtttcgcttcagtattttgggtatttagtctaagattgaatcgtttagaatgttgcaatggatgggaggatcgaggaggaaagtcactactgtgagtatcagctttctcttgtttttgaattgtttgatccttcgtgctcttttacatgagcaatgtatggtatacaaaagctgcacatcgtgattgagaattgaaaaacttatatttcatcgcgttacaatgacaattacgaagaatcagttagaagctgtaggtttctttgcctttaagaatgttatgagattgggatcaaggtttatttgagcaaacttgtaaaattctgatattctttactatactgtactttaagatggttcaattatttttttttcaaaaaaatggcactttaaaaaccattagttgcagatttggtgattttgtggtgcaacttttatgcacacctagcatctaatatgatgccttaaattctgttctgactcttgaagcatttttgttgtgcatgatgccactttattaaatgggaaatttattcagtcgaggagatccacacagaaaaggtaaaataagaaaaacattttccaattctgtaaattaaccttcaattgttatttatgtaagtataacttgctgctgaatgatatcctacttcctagcttttcaataaagttggttagaagtttaagactgagcctgtaagaatattacaatgcatgggaactaaaataagtgctattcaatctatacaatttaactgagagctagatgaaagatcatgactactgaaatgtaatcggtctatcgagtttatatgttttaatgctttcaaaaatcttcaataggcaaaagaatacttgaacaaaggaaacgacaacagcagtgtcaaccacaaacagagaggtgtgagacctatgctgatgaaatggacatatccagacaacagcagaaagaacatcgatcgctggacatactcagtattttgaacttgtcagaaaatgctagagaaaggaaatctgattgtttaagtggtattgctgtattattttaaaactaaaacatgacagctgcactttgttacttttctatagacgtttatgatgtttccatcacttacctcactcataacaccgcaggaagaaaaaatccagatgtgaatgcatcaacaagggagtataatatcaccaatgattcacctgtaatccttcctgacagagctgtacttgccaaccttgttggaattaatgaacagtgtatgctttctaagtcttgtttatgcttttctttttttagtattatgcaatgtttaaggaatggtgatgttttctgttacagcgattccatcagggtttcacatggagacatcatccctaaagaagtaaggcattttctgtattcgcatactgttgtatgcacaaaaaactatttcctttaaatccactggacaagtagctttttcacctgtaaatgacttgatgaacaccaagaacttacattattattcttaattaactcatatttctcaacttaaactctgctcaatgttaaaattttatttttgaacatttgatgaattattgcctcacagtcacaggatttcccctagtgctcctgatagtcataacaatgccctcaatggagttgattgtaaacgtgatcagcgaacatcagctacagagcaaggtaagttgcctcaactattaattttaatcatgacagttttgctgcatcatattgtgaatgaccagactatagttatttatttatgctgataattattgtgccttttctttcctccccacccccaaaaatctgatggtcattaaactttgtgtagagatgtctgttcttgatttgcttggtgatgatgggctgaatggcaatgttgtagaaaatccaggacatgaagctcatgttgcgttttcaattgaaggtatggtcttgtaaacttaatatctatcagtgtttgattggcttgtagtcttctgtgatgcaactaatgcaccttttaggtttgggtaaagtaggagcggaaacaccagtccattcacctcaacaatccagcaggtaactagaagcagttccaatggactatttatgttattattatttattttccattctcaaagtttgtcattcattatatgataaactcttactgcatcattttgtgtgcttacaaacattccagcttctaatatatgacttaaggtttatgtggcgtgcataaagataagttataacttgcataaaatctgattgtatatcattagttgatatgagttgcccttagttctccacttgaatacatgtatttttatttctctgttacaaatttattctcattgttcatattttcagtacataagatgtgggcatcatatgcaatataggggttgtcttcatttaagaagaattcgttcaagaccgtattatttctgagggaaagaaagatggaagattggagaatttgacctaattattagaaaaaaaattggcaacgaaaaaaaataacaactattgcgtgtattatgatgaagccaagacgagttggttctatctatttacctaaataaaaactaaatcaaactataatgttgttac

SEQ ID NO: 382867 - DNA, 1910 bp, Cannabis indica
ttatacattaaatttaaacagtatcgatcacgtggagtactgtcagtgatctgatcctaattaaagacaaatatggttgttgtagttgtttttcaaagaaataataacaaatgggtggttgttgctaactactgtataacatcatcatatacttacaaaatgtacgtaccctactacttatgtttgtaaagaactaataatagtaacaacatttccaagaacattctcatcattttcaagtggaaaaacaaattactttgagcctagtgtccaataacacatcctgattgatttgatatgtgctaccttaatttgtttgatctttttctatatataccaagcttggcatcaatattggcataaaattattctcttctagctaggcttcttcttcttaattaatatatctatctaaatatagaacaaaaacatgggggttgaatctaatattggggaacaacaaaccaacaaagccattggatgggcagcaagggactcttctgggcttctatctcctttccatttctccagaaggtttcttttttattatctttttaatttaaaatttaaattttattcttgattgtatatttatatatcttccttccaatactcaatataattttcatgataataagtaaggtctagtttactcgatgtatagtaagtttgttgtcaagtttttcaagagtgttttgatccatattcgttggtcagtatatatatatatatggatttttattactacttaaaaaaatggttttggattggatatatcgaaatttaagatgaagttattgtgagtgtttttagatactattccttaaataataaacatatatgtttggtgaataataattaattttgcaggaaaacaggagagaaagatgttatgtttaaggtgttgtattgtggaatatgccattcagatttacatatggtgaagaatgattggggcatatccatctatccacttgttcctgggtacgtttttactcctttaattatttgtctaaaaagtaacatccatatttatgagtatcactgttaattattatttttggtttttgaaaccatttgctaattattcaagtgaagcaaaagttacatatgtaataacaaattgttcgagttttgattgactaggggaaattatgagattaaaagctaggcatgagaatttttaaaaaatattatgctttggtcaactaatcatagaaattggattcgtaaaaatagaaagaaagcaaaatacttattaaatttaagaaagttttacataatacataaaaaaaattataaaaatatattgacactagtaaatttttatttttatagtttgtattttttttattaaaaaatacatttttcaataaaataataattattctaattattttttttttgtgttttataatttatttataattatcagactttattttcttatttttattattattattttataatttatttatagttaatttataattattgtaaattattttctttattttttagttgtttttctaatattttttatttttagaagaaaaatatattttttttaatttaaaattttaaaatggtatttttgggaaaaaattatttatataattgtaaaatatatatatatattcatatttacatatatgttgtaaaaatatgtaaataaaatataaaaaaggtattgtaaaagatgtattggaggaccaaggcaactatttttgttaggtgggaactaatggacaactatttttgttaattctattggacaggaatttagtttgacttagtgagagtttactttgacttgaatcatgcctaagttacaagacttggaccgactccatttcatttatggcatatgatcaacaaaaatagttgcttaatttaactcacattct

SEQ ID NO: 382868 - DNA, 3599 bp, Cannabis indica
tatttggttctacatacaaattttctcttacctaaccatgcaatatttaagggaaaagaaactatagcaatttgtatgtaggactgctttaggtggttgccactgcagtattcgcccttggaggcatacttacatttggtatgtgaaattcttaacttcaggatgcgcacaaccaggccggtattgctcacaatgggggtatagtgccattactcaagcttcttgattccaaaattgggtctctacaacataatgctgcatttgctctatatggtcttgctgataatgaggtgtgtgactatacgaacttatgaaccatgaatgcagtccttcagtcagtaaaagattgatgtttaaatgccatttttgatataactttgtactcagcttattcattctctccaataggataatgtatccgattttattagggtgggaggtgtgcagaagctgcaggatggagaatttattgttcaagtatgtgattgtcttgattttatcgttgctatccatatacctttattttccatttttatttgataccttttaagtgaacatttatattttttaaacttttaatttattactgcaggcgacaaaggattgcgtagcaaagacattaaagagattagaggagaagattcatggaagagtgagtagtgtcgtgtagttcctaacaaatcactcttttctgttatgtgtcgtcatagattaacttttatgaactcagatgtatattcttttaactcctccatgcaggttttaagccatctcttgtatctgatgcgtgttggggaaaaggcagtgcaaagacgtgttgctttggcccttgcccacctttgttctccagatgatcagagaaatatattcattgacagcaatggtaactcattttcttatttttccttgtattataacactcttagattgcaaacgttatgatgtaattatgaatatattaacgtaaatgcaggattggaattacttattggaattcttggttctacaagcctcaaacagcaaaatgatggggctgtggctctgtacaagttggcgaacaaagccttgactctttctcctgtagatgcggcccccccatcacctactccacaggcaaaacttctttttatcaattgtttgacctgcattaaagttaatttcagttttgtaatcaattttgacttgcactttaggagtgggtggtagagtaagggtgcacctggcataatctttctgggattacatgtacctttgaagaatattatcagttttctggaagtgaatgatattagtcttgatttcattcatagggtacatgcaaataataaaataatgttttcctttacagaattgtaaaggcatactttgcatttggattcttattttgcataatatgacacaaatttattgcaggtctatttgggggagcagtatgtaaacagtcctacattgtctgatgttacatttctggttgaaggtacaagtctctggcataattaattctgtattactatttgtgaacaagtatcaaattattgtgattccattttctaactttcttaaatttacttctactgcaggtagacgattctatgcgcatagaatttgccttcttgcctcttcagatgcattccgtgcaatgtttgatggtggttaccgagtgagtacttgttgaatgattatttcatctttttaggcacagttgttaggagtggcctggttgtggaatttgagccttatttttgtggttaagtttttttaatgtataattgggtttttaaaagatatggccagccataaccttgtggctgtttgcaaggaaagttgacaacttatcagggaggaatgaatggtttatggtcgatgacatgatatcattgttgttaatttatcttcatataatcacaggaaaaggatgcaagagatatagagattccaaatattagatgggaggtctttgagttgatgatgaggttaagtaaaacttatgctttcccattttctacaaaatcttgtgttgagagcgtttgtgatttattggatcaattgtgtacaggttcgtttacaccggatcaatagagatcacagtagatatcgctcaagatcttttaagagctgctgatcagtatctcttagaagggcttaagcgactttgtgagtacacgattgcacaggtgagctaacaatgtttaattcttggcatcctaactaactgcttatgcatggttgtctaattaattctatttattttcatttcttaattttaggatatatccttggaaaatgtttcaagcatgtacgaactttcagaagccttcaacgctgcttctttgaggcacacttgcattttgtttatccttcagcaatttgaaaagttgagtgctaggcctgggtatgtgctctctatcttattgtctttcagatatttctttttattcagttagaaagtttgaaatatacaagggcagtatgcagtcattttgatgatattgtttccttaaaagcttccgtctttacattttgatgattttaaatgaaattctcattctttcatgattgcctattttattgaaccaaaaaaagggaagttaagacgaaaatagaagcttaggaaaatatactcttccttattttgctttttacaccatcttctttttcctcaccataatccattaaccaattcttgcttaattgtttagtgcaataaataggtctcacgcttgttattgttatgctagtctgttgttaatgctgccatatttttctgaagtttctaatatactgggaaaattgcaggcacactcatctagttcagcgaatattacctgagatccgcatttactttgctaaagcacttactaagcctaacctacataatcagaggccttagatttcccatctcgttattttgatctctaacaaaatacgttgtacagaaagcagtagatgttcttgttgtcatcattgtcattatgatcgttttcgttgttgtttttgggccattagaaggttctaattatttgttgattgtagctttgcttataatccaattccaaaggcgagagagttgagtgttcttgcttgtctaatttttttttaacggacttgtcttgtctgtgttagtgtctggactctgtaacggactggacttgtagtggcactcttcttggtctttgttctctagtgaatttgacaaagtacatgttgtgaaaagtccctacccacatctaaattagttggatgcaaggatgccaaataattagtatttttgtcctgaacatactaacaagttgtgtcctcaatagtatatgattttattaataatattactcgaaatataatttattttattaataatattactcgaaatataatttttacgggtctaattatattttatttaattttattgtgaaaggagtgatatggtaaatggttggcaaattaaatatacattttttaattttaatgattaggaaactaaaattaaattttctaaaagaaattttaattcacctagttttttttttactcgtccacaggaattataaattaatataaaaaagagaatattttattctattattcattaatgtaaa

SEQ ID NO: 382869 - DNA, 2024 bp, Cannabis indica
aatgaagttcacagctactgcaatgctttgtccagttgatctgatttccaatgggaatatttcacttggtattgtccaggcaaggggtccccatgaccatccaaaagccagagcaaagagacatataacaactatcaacactatgaataatgttcttgacaggttctgattatcaacctttcccgccaagattatggctattataatctgcttgacatagaaaatgaagaacaaagttcagaacaaaaaaaaatatcatggtaagaaataacatactgaaatttgattctttgagttctttcttaacatactgaagatttacctggcatataagcattactattccgccactaataagtagaactctgcggccaaatctgtcaactactgtcatagacagcagtgttgatagaacaagaattgctccaattattactgaaggatacaagatagttttgtctttgtatcccatgttaaaaaacaagatggatgtgtaataaagcagagaatttatgcctgtgaggctccggaacataggcacgaggattgccaagaccagttgaggcctgttctttttccaaaaaatacttctaaaaggggttttaactgttttagcaagttcacttgcagaaaccatgtcttgaaactctgcctctacttgttcagttcctctgagtttctccaggacttttttccctttctctttcgatcctcggtgaattaagctgttgggtgtttcagtaaggaatattgctgccactatcatcaacaaggcaagtgctgtaaccaaaccaaaggagggaccatagttgtagaacaggtccacagcataccatggtttggtgaggtgtctatctgtatagttgtcaatgcttgctatcgaaattccaagggaaatcgctagctgaaacatgaaatttgagcctcctcggaaatgtgttggcgcaatctctgatagatacagcggaatggccttaacacaatcaagaaaacagactaaattagtttagtttggaataagatctcaatatgtatcatccaaagataataagaaaataagatacctgagctccaaagccaatgcctaatccgagggatatctggccaatgaaaaagataagaagatctggttttttggaggaggcaattaatagtgctgctgaaacacaaaaaatggctgcactgataattatactctttttatgcccatattttcttgtaacaggagaagctatgaatgcagctactatgccagggagatatactattaataacagtccaaatgacattccagcaccatccttgcagtaagattcgaaactgcttttatctttgtatgagtaatcagagaacatttcatagtattctcctgtggttgcaaaccaacctgcatatataagaagaattgaatcaacttgatccattaatcatttatctttatgttgacattagagttaatattggttttaagattctaacaagctcctaggatattgtgctgcttctgtgttagatttcaatagatccatacgtacaactttacacaagagtgaatagttgtatagacttgatatgagcaaaattatgtgaatggtgtcaacccgtttcccacaatgatatcatatcagaatgatgtatataagtatatatatttaatttaatattatggtaagtttattattgaacaaatagaatttttcatccagaactattatcacatttaaatcatgtcatctaaattttccatcctcccaaactagtccccttatagagttttgcccattcaattacatatggccaaaaggctacttattggtatttttggagcttaggtcgaagccccacacatataaattaaaaaaaattaaaaattatttattacataatttcaaaaaaaaaatatatatatttaactaagaaaactgaattttgaatcatacaaaactaaaatcatattttagcaatatattttagagttttctttcaaaaaaatcatttaatatatatttttataaattgtatta

SEQ ID NO: 382870 - DNA, 2050 bp, Cannabis indica
tgatgtggtaagactaattaacaaaaattaatttttgaaatattttaacatgcacaaaaaatcatgcttaataataaaattctcttactttaaattttttgttgcatatatatttaattatacctcttaaaatttggttctttctctgcattgtctagaaattagaatattttgcaaatttttgaaaattttttgaatactttatgctaaaaacaaaatcagacaataaattacattaaattatttttttttaaaaaaaataatggcataaatactcaatatttcacatttgtatgatgaattaattaaatactcaatcttttttgttgtgacacaagtgcacaatgtttattttcttagtttttattaataccccctgtaatggaactgttaagtgattattgggtgaatacatgatctgttattatcagtactacaccctgattataatattttttaaaaaataatctaaattaaattaagtcatttaaatattaaattaagtacttatattgttatttttttaaaaaaaaatttctaaaagtttattataaatagctaatatgtaaactatcacgctagaattataattatacatgcatataaaaaaaaagatcagtaaaaataggaatcgtgtacggataacattttaaaagatgtaatgtagtaattgacataaactattgatacaattaagtatcaggtctcatgtaacttagggaataatttttaaaaaatatcgttaattaaattgtagaatatcatttctaaatggtgttaagcatgcctaatagcaatattcataaattatgtatgtgtaaatatatatatcattgtagtaaattttttcatttaatacctaaatatataaatctttagaatttaaaatcatgggtaggttgggatgagtagtgtagatgatgatgatgaatttggtttaaatattggtttgtatgcagaatcgacactttagatttatccactgtgtggagagactgagtttgcagaacagacacaatgagtggcaaaattgttttcaaatttcagggttgggcactgtccccattgattgttacaacactggctacggcaatgtggtaattagttactagttactacttacctatatattctttttttaattttatgccttatatatatcaagcaaaataatctcatttcttcactttagcttaatttatgtaattccttgcaaaaattacatcaaacaatttagacagctggttgaatttttagataaggattattttacaaataattattaaaattagactaaattacataataattatatatattaaaaaatagggtaaatactattttgtaacactgtgttttgtcaaaagttattaattagaccctctattttgttaaatgacaaaatgaaccctgtacaaaatgagaccctaaactgatttttgttcaaaataaaacttaataataatctaatctaaagatgttatgacagaactggttacattttctgtatttttctatgttagaaattgtcttaaagttgattatattgaaaaataaaattcttgaaaaaattgagcacagggtcttatttttaccattttggaaaatataggatttattttgtcatttaataaaacaaaaaatctaattggtaacttttacaaaacataaatccaaaatagtatttaccctaaaaaatagttatttcactaattatatcatattttatttatttatatattgagagagataggagggtattatattgacttggtatgcagcattttcttttttctaatttatagaaagacttagagagtgtttgacattttttaacatgcaacattgttattgtattatattaacagattttgtctggtttaaatatgcatttcgttcatatttataatcgatagattaatagttgagttcatgaatcaaaatatgcaaatgttagagattttattacaatggaagaaaatcaagatacattacaactctattgtaaaataatacaaagactaaaataagagattgattaaatatatgt

SEQ ID NO: 382871 - DNA, 1856 bp, Cannabis indica
caggaatcacccgttaaggatatgactctgataccatgttgagaatcatgaggttccatctctaaaaccaattgacaatgagtggagtaatccatgttcttatatatggctcaatacttttacatttaatctatgtgggacaatgttcttccaatagatacactatgaacaaaatagtgcagattggattggatgaacacccctaatttaaatattattttctattatttttatttaatttttattattttagtgttatttttatataataccttaataatgtaaaaaaaaaaattgaacataaaatttttacaaaaaaataatattttatgtatattttttttttgagttatgaaccacgattcctatactacccctccacaggtcacgtacaagtggcagagaccaaatagaaaaccctaggggcaaatgcggaaatgtgatgcaaaagctgaagccatataaaatgacctcaaaagctccgccattgatacagagagaagttgatcaaagtcctgagaatgaggttttgctctcagagagagagaaagatcatcggcgggtcgggtttatccaaaatggttgcccaatctacttgatcctctctctctgaacgtttgtggaacctatgatttcctaaatcatcttctctcttgccaataatcataataataataataataataataataataataataataatgggaaattttctttctctttctctttctttctaccaaacatagcgtttattcgaagccctattaagaggcggtgatgatatgttggatatttcaggctgtaaaaatcaggtataaggaagatggatccggttgcctggtgggtcgaccggagaatgacgattctgtccattttccacgcggtgacctggccgtcggcctccgccgtggttagcctcgtgtcctctttctttgcctgataaaaacaaatctgagcctctccttttatttatttatttctcttcattttaattttttagttttttttaatatttattttgggtgaattaataattagttaaataataaatttatgtttattgctgccaatttatttaagaacgacaagtttaaggaacaacgacaaccaatttttgacaaggaacagaaaacgacaatattgagaaaacagacgaaacaaagcaaagaatattaaacgataggtaatagaaaagtgtaggtgatgatattattgactgttaataataatattagatgtctcctcctaccctcaatcaattttaaagcaatttcattaaaaaaatccaatactttatatatatgtggtcataggtttgaggagtttcggattctccctccccaatgtaaaattgatatagaggtttataacaaattaggagttatttttaaatacagtattcttaatgtttcaaaaaaaaaaaaaatacagtattcttaaattgatgttttatatatatatttcaaatataataaataatttctctaatacatttgcaacttatgcacctttacttaaaaacgttaggcaaaaaaacaaatgtgctttgagtatgccttttaccaacaccactgcctctctttggttattgtatactcttaagaagtgtaggggtaatcaacttacaatgcttgcttcaatcttgtcaattgaagaagatctaaaccagaaagtttctactcctatggattctgctggttttattgacaatgaagtgaaagctgaagctaaaccacgtgatcaatcatgaaaattattagtttgaatgtgcgtaacttttgtcatctccgtttgcttgttaaagagcaatctacatgtatttttttttaatagaaactaagttaggtcctaat

SEQ ID NO: 382872 - DNA, 2953 bp, Cannabis indica
ttttttttttttttcagaattaacatgtaattcacaaaccaaaaacgattaacaaatagcacctctgagctaacaaataatttgtcctatgtcactgcttgtactgttcttccatgtcatagtgaaaatctaaatcaacaagtggacttaaattttaagctacttgcagctagctcaagtggttgcgtgtgtgattgtgtgtgggattcaaatccccatttggtgaagataaaaaagtggacttagatatgggagctaaaagaacacagggtagatttttgatacggtgcttttaaatcatataagcgatggcttcaaaaacatttgtttattgaagcgtagacttttaaacatcatggtgtttttttttcttttgttgtacttagatgctacttgagttctagctcaaggggttgtgtgttgtgactaagaggtctgggatagtgtgaaaattacagtttcttattaatatgcttgggagatgttaaaatagtagaccatgtagatccataattgttcgggaattttttgtttcagagttcatcgctgttaacttccttagggattgacatatttttttgtttatcatcatagtagtggctgatattatgttatatatttcctgttgtcacagattcattctcaaaacctgtatcgagctctgatgaaccccagcagggtggttggtttcggacattttctgtagcgacttacaagccatactttgatgtcgacacttctgatgttctagataggataaaatacaccctcttcccatttacaggaggttttaccgagaaaacagatggaaacccagatttgtaagttttctttgttcaccatgttaatttgttagaggctgaggtcatagtatcacaaattagttatgtgcaggtatggaccattctggatatgcactacccttatctttgtagctgcttctattggcacttttgtgacatatgtggcgcacaaactgcaaaagaaagaatgggactatgacatcaatcttatgacctggtctgccggtttgttctacggctatgtcactcttgttcctctcggattatatttaatccttaaatatttctcagcaccatcaggtcttgttcagctgttttgtctctatggatattccctatttgtcttcattccagctctggtaagtctcttaattttatatttttagccacttctaaaacaagctatgcatcttgcttgcaatgtgtattgtattctttgggtatgagtttggtgttccatatatctaattttaaaaccatattttcttggaaggtttgtttgattttctgtttagaaaaccaaagaaaaaggtttcctaagaatgtttctctgcacccgtgcacttgcccagttctatctgctaatataggtcataatgatatctgaggtgctactaatgttgtggttcactagtcataagaaatacattctttttaggtgctaggtgagagtccatcccatggttgcattttccatcacctagctctaattttgcgggtttttttttgggtgtggttgcagtgtctctctgttgtgcccttggaaattttcagatgggtgataacaggtgtagctgggtttatgtcagcaacctttgtggcgaataaccttcgagctcacatcgaggcagcaggtcgaaggtggttcttgattgtagcagggatcttcctgttgcagttggctctggcttttgtactgaaactttatctgttcactgtcacggtatagtactcgaacttcatcaaagtggcttgaacaaacttgtagattactaaaacaagaaaatcttttttttttttatccattgcctattgtttccacctgatagaagaaatgtgtcattcatcatcccctagaacgtaaacatatactgtattcattcatttttcgcaatataaattcatatggctgaaactttgatccagtttctgcctgtaaacaaagtttgagaggtcttcggtgtattttggacactgattttatggggttgaatcatatactagactcgtggaagaagggaggtaccgttgtgcaatactaggtgcaaaaaaattgacttcaaaatagtatttctggccatttcaaagaaaagaaataggcaaaaagaaaaagaaaaagaaaaagaaaagaatagattttctggtagataatttcttttctttcaaatcttattttttttttttttttcggctgaaataacatttaaaagattccaatatgtctggggcctctgggcgttttgctagactagtaaagccaaagatcttcacctcgagtgggatttgtagggttttttttttttttttttaaaaaaaaaagaaaatcccaaaactccactccgaagagcaatagctctaaactttgtcgcatataaacaaagtaaatttaactggattgtggacaacaacattagccgccttagagctatgaaaagactcacattattaaagagctaaattaaataaatgtctcaaaaaattaagcctaaagacgagtctatttaaatattattattaatcttaccacattaaaacagtcagcctcaaactgaatattatctctaccaaacaaataatattggactcctgcatgacgtaaagtaagagattcagtaacttcagccttagaaaaaaaccaaccatgtgccaaatagctaatgcacaaacaaccctattatctcgaataactatactcataccacaaaacctcctgtcacatctaacgtcgcatcaacgttaaccttaaaagtaaccaatcttaggaggtactcgaggcacaagaatagaagaggaagaagattaagttgccttgaatttttcaaacaattaaatcctttgacttcaagggatcaatcactcaaaaaattacgagccctaggggtgtaaatcaaaccgctcaaaccgctcaaactgcccgcactgcaaaaaaa

SEQ ID NO: 382873 - DNA, 2579 bp, Cannabis indica
tttaaccaattttaccctctttcaattattggccaatcaccaatgacattaaaacaaattttgcaacaataacacttctatgaaatagatcctttataaaaaagaaagcaataacttaaccatccgagacataactgttcaaaaataacactaaacagttcaaaaatgtggatgtaatacaacagggtaagttagacagctacaacatcacatggctcaatctcaatggtacattatatattatatacaatatcttggactctaaagaaccaacacctcctcagggtaattatgaggttatatggaaaagtaaattagactccctaggaagaacaaacgttgcaactcttcctgcaaaaaccaggagcttcctcagaacccaccatatatatagggttcttttcacattcacctgtcttggcccatagagggcagctagcattttcatccgtacaaccatcgctacttaatcgcttcattggcttgtcaaaggacctaacatgaatccacttggtggctgaccacttctcaccctcgatgacagggcagcttccgtgcaagctacttgcatcggtggttgaatctggatgaaggctgaagaacagcaaggcatcacctttgtatggtttcactgcaagaaggcgaaattttctcagattcaatgccaagaagaatatatggtttgtaatgactgaacaaatatgagtgaaacccaactaaaggacgacaaaatgtttaaacatatatccacaccaaaattaggattcaatgggaatttgcaagacactcaatccaaatctaatagaatctcccaagaaaaggggcaacaaaaatggcaaatcttaccccaatgaagtggcccccgaaagaaaataaaacaatgtggacaaatgacaacttgtattgaaatcaattgatacacagcatacaatcttttctcacttgatgcttagattctaaactctttaaaggataatagaatttgctataagataacataattgatatatttccgaaacaaacataagattaatagtaaataagcaatgaaggaaattaattgtaaagatcataaaactacctgcatagccatttttagcacagtcagacaaactatcatctttatgttgcgttaatttcgcctgttggcacaacaaaatgaaactgccttttaaatatacaagaataaatcaggaagcataaacaagaatgcattttcagtgttgtaagaaagtgatcacctctgaattgggaaatatagtttccccacccttctcaatattagacaaatacatcaacacagtggcaacccggtgaccacccaattcttggttcgccttatcatgaaaataatcaaaatgaggttcatacttctcaccattctcataatgcaatatctgcatcgactctccattttctgataatcataataaacccatatttaatcaaagatcaaacatcttaaaagattggaagaagaaaataatttatggggttaccttgtggaaggaaagtccatgctgcaattctggcctcaatgttagcaactattttatcctacaattgaaaaatagataaataaataacctaagcttattcaagatcaaacatcttagggccattcaatgcaatttaaaatggggaaactatatttcatacctgagacttttgaagaaacattccagagctcgttctaacttcactcataatactcttacccgattcattatcagccaccatagatttttcaagcttatccttagcctaattaatcaaaacccaggtcaatacccaatggattatcaagtcaaacaattaaaaaaactaaacttaccaaatggattaggtgatcacactcttcctcagatagaaatcctttgtacaaaaaagctctgattttatacagaaaaagcaaattggttataatataaaatgtagaaagcaacaaataacataaattacaaaaatgctaattaagatataaaattaaaaacctagggttccaagagagctgagtaacccgagttggatcaaacgaaacagaagaagcccccgttttcatccgtatcactgattcatctctattaaaaaaaatgcagacaatcaattcaatcaaatacaaaaagattagaaataaaaagaaaatgaaaaagaagaagacaacagtgcgtaccctttattttcaacaagccattttggaactcgaacagcagaaagggagagatgaggaaagaagcatacaagggcgagaagaagaagaagaaaaaatcgaaaatccatcgtaaaaacttgatcttggacaatgaatttgggtgaagtttgtttctttaattctgggaaaatatttatgtaacaatatatttacagtgtttgctaaaaacaaaacaatggatgagagaacaagattcactcttttttttttttattaatttattaatattattattttttgagaggaagggaaagaaagagctatattagaatacaaattattggatggttctcttctcttcaattttttttttaaaaaataattaaaaaaaaggaaaaaggaaaaggaaatttctaatgggcgcctg

SEQ ID NO: 382874 - DNA, 3480 bp, Cannabis indica
cctccatttgccagtaaaatctatagtaaacagccaaaacagccatggaagtaattccaaaggtagacataacagccgcaacgagatacgtaaacctctctgattccttccgtgcacgcttctccaccaggcgtggcgagatctgtactgagtcggcattactatcggggatttcctcatccgaaatctccatatgcgtactctgtttcttgtcccccataatcacgcaaactgtgacacataatctggggcgggctcggagaatcgttctctgggggcatagattgagaggggagaaggctaaggaagtgtgctgggggaggagataggaagattggatgagacggaaaggtttaggggttaaggcggttgagagtcccgccgccatggaaggaaggaggttgggattaaggtagcgcgagatggagatggagattgagagaggtgtgttgtgtgtgggggtggacttatatgaaggtgtgaaagtgtttttgggttgaactgagaccacaacttcttcgattgcttcttggaatttatatgtagtccactcattttttgtttggaggtgttaaaataatgagaaaagagttttaccaaatgccacaaattttgaacttaattactagaatgacatctaactttacctacattttaggaaataatctaattaattttcctaataaagaattagaaattctcctaccaactttaaattataaagggaacaaagatgagaagacaatgagcatacatgattttaggtgagcctctaatgctaaatataggattaaatccctttataagtgatgtagaagttttagttctatttgcaggtattcataaatttttacaaatggtaaaaattaaattgaataaatcgactaaaaaataattaaaaaaaacaaataaatagtcaaattattatattagatgtggtcatagtaatagtctagtggtttcattcttctcatcacaataaagatattctaagttcaaattcctctctcctaatataaaaaaaatcaatatattagatgagttgaaaatattccaaccctcttaatataacctaaataaaccaaacaaattgatttgtatatatttttttttaaaaaaaaattatataacatattacataaatgatgtcaaatgaataaattattttgtatttaaaatttaaattttataaagtgttgattaaatttttaatcaacttatacagaattgtaataaataagaatctgaaccgaaatcacaataaagaacattggaatttaaagaggttcgcccccaaatgtcggtaatagcctactccccttatattttattaatcagagttgcaaagtcaagagcatagtcgaatgcaaagtataataatgacaaagtttctgttctctaattgttaattttcagatccctttctcaggtcatgggtgaccccttatataggagaagggtcggagtttctcgcttcaagagacgcgagcattgtggaaatacctcaattgtctccttgatttttggaagtggttgaagtctgattcttgtggtaatatcccgctattttcgtgggtttgcaaccactattaagctttttgcgagatttaaatgtttaaattagttattgacggtgagggcctctcaaagtgcggtatgactatttaactttctctacagtagtagccactactttggggtgacactaccgagatcgactctatagtcgctcgggggtaccctcaagaccccttccacttgatcttcgacattgtgtataattttgacgttatgaagatgcactatatcaaccatgtcttatgtagttggaatgtgttacgttggaccatgagggtgtaggggtttaagggtacaccccatagactaaccccatcaccttttgagtagatcattatatttaatgtatgggatagttgtatatacaccctagacaggtttgactcccttagatgtgtgataattgtttatcctgtttgtgggggtgttagtttacctttcccttgggggtagtcaccttgctcaagctagggagaaaggtgatcgccaaacttctcttccaacgatcatgaccaacaattatgactttacacattcttcatcacttcagtcttgatattctcattccacgtgtcatcattttgccacgtcaccatcgttaaaatttaagtaaatatttgctcccagtttttagtggtatgactatacagtagaaagttttttgtgtagctcgcgcttcaattttgttgttgatgacttggtggtatggtgtcgggaataccatgtttatactagacttacatttcaaaccccaaaaaataattctcccactttttatatttttgcaacatatcccaatggtaatttttgccttgaccaacaaaaataaattacaaggaagaaaaataaattgcttacaagaaaaatcaattaattatttacaaaaggaaaatctatttatttgtagaaacatgataattcttggaagctttgagattttcatcttcatagtgggtaagttttccgtaacttccattgcattttcttgcttgaaatttgaaatttgatgaagtctttggtacttcttcttggtagttttctccatggttgaaaatggcatttaatcattggggttcttaagtttttaatgatgggtgagtgtttgatgattgagttttgtagtatagatgattggtgatgtatttttaggtttgatttgataaaatttggtgaagaaatgagaaattttaaaactttattaggttgagtgtgttcttgagtttagaaaaacatgaagaacatggtaacttttgattttttttcactcttttcttgctttcattctcataaaaatgataaaaaagtgtttgtggagatgtagtgtacctttgaccaattttaatgaccattgcttggagggtgttgtagttgtgacttcgggtcaccttattttttcctccacaccaagacaccctcttttggggttgaggttcgctaccctgaattcagccacaaccacctcgatgtgggggcttcgggatcatgctatttttcccccctgagatggggtttcaccccgggttggtgtggtctcgggttaccccctatgaatgctttgagtgtaccctgagtggatgctttgagtgtaccctgagtggatgctttgagtgtaccctgagatgggcattgagacctccaccccaagactaagacaatatcacgtgggtttgggttaccccgagttggaattacttaggtttcggggtacaccaccccgagatggggtcttggctctagcaccctgagatggggtcttagctctagcacctcgagcctagactgtccttccctcaccctgagttttataatgcataccttgaggttatggttttaactgtaccctgagattcccgtgtatctcgagttggggtgttaccccgagatgggggggggggggtcgtt

SEQ ID NO: 382875 - DNA, 772 bp, Cannabis indica
agttaaccaaataatatatgtgaagcaaattagtgagcacatgggactcacttcctagaaattaataagaatgtgtgtgtctattttacttgaatggcatattggtgtctattttcattattcgacaacataaaacaatcgaaattatggacatattttgtacattgaatgattattgttacttgcaaaaaaagttataaaataagagaacaagatggaatttcgattaagatggagaatgttacaagatagtttgagaaaaaaatcacaaagaggtaactggttacaagtttttgcaggtggttaccttcaaaatgtaaatttcatatccaaaattcaacccaacaatttatgtaagcttctacatttagctgaaattcagatgataacactatttagggcctacaaaaagctaatactacttaatggtaattgtttttttaaagcaaaaagactaagaataattagtatttttttttttgaaagtagaataattagtattttagtttcataaactttttacattattaagttgtgtctttaatagtatacggcttattaataatacctattgaaatataactcttacagtaacattttaattctaccacaattctaaatattgttttgaaaactccataataaatagtagaaatgacacattgtacgagtttgtatactatgtcaaattatggtttttattttgggaaatttataaaaatactgtaatttagattaatttttataaaaatactgtcacacggaaatcttt

SEQ ID NO: 382876 - DNA, 2580 bp, Cannabis indica
aaaaaaaaaaaaagaacataatcaaacaagtacacctaagaaaaaacataaccataatcaaactagtacaccaaaggaaaaaagtttgaaacaacaataacaaatttttcaaaagagtgagaaagcccactaccaacatttgaactttctctttagctctatctcattattatattccatctaagttccaattccattaatttaagattccaattccatacaaagcttattatacaactaagttactaatgctttggctatctactctaggttcttgctcgttagtagtcttggctataatatggttgtattggagtttaatattattatgtcattctatacacatttgattttatttttttttatattatcctagaattgtaaatagtgtggctcacactttaataaaattagcactctttttgaatgatcattatatttagtagtttggttatcctgattgtattattactgttttactgataaacttttacgattattgatattgtttggtactttgttttttcttgaagtaacttctactaaatttactttaaaggtcttaagactcttaacaaggtcgtatttttttttttttttttaaaaaacaattctttacaaaagtatatacaattacaactttaattacttcaaatcttttcagcaataaaattgtggagtggctccgcttctctttaaattttgagaacttttttagtatatataatttttaaaaataaaatgaaattaaatgtattttttttattattatttcttttcatcaagaagaacaaagttctcattgatcaagcaccagcaacaaactgctataagaggataacaaacaaacaacattattatattttgttaataaaatctttaagggctcgtttggtatgccgtataagagttgtattgtattaaataataaataatactatctttagataaagtaatgtattatattaattattatggccaaattttttaatacaatgtatgttgtattatttaatacataataaatggttcgtattagcttgtattataatatttacaaaaaatttggggtcaacaccaatctccgacgtagacctagacccagactcgggacccggactcggactcgagacccgggacccgggacccgaacccgaacctggactcagacccggacccgaacccgaacccgggacctgaacccggacccagacccgcctgggacctgaaccacccgcgaccctaacccgaacccagacccgggacccggacccagacccgaacctggacccgagacccgaacccagacccgcccgggacacggacccgcccaagacccggacccgaacccggatccgaacccggactcgggacctggaaccagacccgaacccgaacccgaaccatagttggtgttgggattgagtgtatgaaaatatattataactttacacaatcaattaatacaagtcaataccaaatattgtattgtattaaataatactaatacaatacaatacagtacaacacaatccaacacaatacaatacaatacggcgtaccaaacaagccctaatagtcaaatctctcatattcctatcgattatgtttaggattctaccctttaagagcccctttaaccaacctcagaacataacttgtagtaaaaggcttactagtatcatgtatacaatccacaaagtatagacagtagcaaccacaagaacagagatgacatcagaaataatgctctttttctaagaatcaaactaaaataagccaatcgaactggagtcacaaagtgcagtcaagccaaattgtacacacactacaccaatacaaactacaatcaaaaaataagtaataattgttgaataattatttgatagagttattttagtttatttatttattttagtcttttatattagttgcctaagactttcttattagttatattctttcacttttgattttacaattgaatgaaactctaatttctctgcatctcttttattttttaattgttattcttctcttcacaaataattatgaataataactctcaagaactttctcacaacaggacataatatcaaattagatattacaagcaaaaattttatctctagtaaggagattccatttaccgcttgccaaacctatgtttagggataatgaatctataaccaagaatcttagtgtaactcactttctcttagggatcgtttggtatgtcgtattgtattgtattatgttggatcgtattgtattatattgtattagtattatttaatacaataccatgattggtattgacttgtattaataccaaacatggtattcatagcttgaatttgactttgagtacgagaacttgttaccaatttatctttcaatttataacccactcctattcgattcccaataactttatttatagctcgaaattacttgtattttgtaaaacattcatcgctagaatcattttctgttcctgtcatgctggccacctcttcaatcatttgctcctgatcaaataaaatgttagaaacacaatattaccttcattcattcatt

SEQ ID NO: 382877 - DNA, 1618 bp, Cannabis indica
atgaactgtgttcatgtgttacttacagggactcacagatctcctccaatcaccaattaaaggagctgagaagcatggtcttcctggtgtattgtcaggtaactgaatgcttgtataattataattttagatgacttaatatggatattgatggatgtttgcttcttgattgcgtgtctatggtgtaggaatagctttaggtgttacgggtcttgtggccaaaccagctgctagtattcttcaactcactggaaaaactgctcagagtatcagaaagcggagtaggctataccaaatgggatcacaacgtttcagggttcgtcttccaaggcctctaagtagggaagttcctcttagaccctactcttgggaagaagctgttgggatgtctgcacttgctgaggctggtgatggcttgagactcaaagatgaggtcttggttgcatgcaaggcacttaaacaacctggtaaatttgtcatcatcacagagagacttatattaattataaagtgctccggcttggtagagttgggaaagcccgagtttcgaggcattcctgctgatttggagtgggtactagagtcggaaattgtcttggaaagtgtaatgcatgctgatactgatcatggagtgattcacattgttggaagtagttcagataccttattgcggcaaaacaagcaggctacagggagtagcggaattagcgtacgatggaatagtcctactctccctctcattcagaccaacttagaactagcaaacacagaagatgccgagaacttgttacagatttgttggcaacaattgaacgaggaaaggatgaaggctggggctgtaggtatcttttgcaccgaagtagtattaagtaggtgcgtgtaagcgcaggaattcactatggtgatcaactcagagattgtattgaagactcagagacggtgaagcttctttattgcaccctttaagaattggtcatgatcaaagaattgtctgacaacaaacctccatccaccctctcactttacaagaaagaaaacagaaaagcaataacaaatatagatgtgcaagttttgtgaatctgacatagtgcccaaagtatggtttttgtgtgtatcttctttataccatgtacaggttttcttcttcctcctactccagttcctaatgtaaattagagagtttcaactccaatgacaccaaaagccattgtgtacagtatagaaatgcttttggtgtcacgattttggaaatactatgtgttagttttatagggtgagtataaattatgtgattttagtgaaagccagaaagtgttggccaccgattgaaatgtattttaaatcgtgtccttgtaatacgaagtattatggtgcctgggaatatgttggtaatacgatgtactttataatcttatataaatatatatatatatatatatatactagaagaaagttacgtgcaaggcacgtatatttagttttatgttaggtgttctataatttaattgagaagattcaataaataatcatataatttaaaatgaatttaaaattaatttaattagtgtgtggggttatttaaaatcaatactgaaaagtcaaatttaaatttgcagaa

SEQ ID NO: 382878 - DNA, 2774 bp, Cannabis indica
ccatctacaggtatatgattcagtatttgagtgtatgcagtacattatatgacacttgaaattgatgtccttcctaccaataccacttggataacaaataagccacatgaattggttcaaccatgcatggaaacaaatattgacaagctaaattaggttgcaaattgacaactaagaacaaaatatgatccaattttcaaagctatttgtgagattaaaatgaccccacaacacactaactagatcaaatcaagaccaaccaaattgcctaatttttgtggcagagcaagtgttggagtctctggcaaaacccaaaaaattcctgtgtagtcaatttacactagaatgtataccagctttcaacatttcccaagaatcaagatgatcgaaaaagcccttataagcgctctctcttgcctttgataggtaggcgcaagtgggatttgagctgtagtttgttaatcataatagattggctccttttctctggccagtggaggccacaaaggaaattagttgctgtgtgtgaaaaaataaaaaaatgtggggtcttcttaacattatttttaatgacaacaacacgtgtgagttgggttcccaagttttcaacaatcaactgagccccactgataggaataggcatgtggggaatcatagacctcagaaaaaatacagaacttgagagaggctacgtgttcaggaaagtaaatcagacaaaagtcgtcatcaagatgtgaagatggccgacatgatagaatgaaatccatatggaccgttgatcagtgatctgtgatcatcttcagatttatttatttctaaaaattgatgtcttcctgggtgcttgtatattcagataagagtttctcagttcgtggtatattcagataattttgagctattttgcaaattcattactaacgtaaccagatgatagtgatgctccttaatatcacattcaaaaaatacaagcctaagcatcccaatcaaagacatcacatttatactagataaacccactttaaccttgatctcgaagcaccaactaatttccaatcttagcctctaacgtcgttcgtatacattatgagttcaactaacttaattaagcccaatttcgacttgtcaattctatcatcttctaattctcatatttgaccactaatgaccttttcagttttcatagaccataaatgcttctttatttgggtggataaaactttcggaagagacctaaagaaaagaaaagttttcctaaagaagtaagacataatgatgcaagttttccatagaattgtccatctttaaaacctcttgagttgtaaaaatgacagcctcctaataaaccaagaccaatgtgatacattacatttacggcaacctatcaacacgagctataagaaagctaaattcaacagttctccaactcaaaattttatttttcatggatcaacaaaacttgatcatctcaaagattattattttaatatattaaaagatggtgttagaaaagcaagcctgaccaagacaaacgcaaacagttatgaatattgtcttacacttgggaaagtctatatttacgcctggctaaaaaaattaaacaggaagcaagccttccaaatctgaagctacccatccatcattttcaactttttcttacctgaagccagctaaagcagggcccacaaaccaatcacatatacaaaagaaaaaaaaacggcaggcgctttggatcttaatctccatgtgtgattttctattttttattttattttcaaatcatatgtgctaaaatatgaaaattgaacgaaatagtattaactacccatgcatgaatccaaaccttaaaagagtaaaggaaaaaaaaaacacctaattagctaaatttgaaatctaatcatactgagaaatggagtcgatatgataacatgggattttctcccatttccaaaagagcagaatggatggtccagcctaagtaagatgattcaaaagtgattggaaaaaagaggcacttagaattgattgcacgagttcccaggctttagaggaaagagaagggtctttttgttttttaggtgcctcctagagcttgtcaatgagtgtgcatagaatctaaaacaaaggccaaaaaagaaaaagaaagaaaaacttgtggaaagtagtaaaatggagaaaaagttacaataagtgggtgtgctttgtagagtatagaccccttaatggtaggcagctttctcttttagctttccttttctaatttatgagtgctgtccaaaggctgtgtggaaaagtatgagtaaatagaatcttagtcaagagtgtttctcttcgattgaacagaaccaaaataattttcttcctttcccacccactttccctattttaaaaagaaaaacgaaaatcaaaagaaagtgaaaatttgtggacaaagttttattaaagcaagttctttatattgttaacttactactagctggttttaaaagcaaagcaagggagtaacttcactcacgaaacaacttattaggaaggataaaaaaccaatgaacaagtaaatcatcatatttattcagtattagaagttcatgttaggatttttttactcttttaccctacaccaacaaatgattttaatatcagtatcaaggtcaaaaatgacctttcctagtctaattaatcccttagactaaaacggtaccgttcaattcccacgacaccaaactcagtgtcgtattgaactttaggtttaaagactctgatcgaagagtctagaa

SEQ ID NO: 382879 - DNA, 3225 bp, Cannabis indica
gttttagggagtggcttagcctaggcatacaaatattgattttgctctaatagttcatattcctctgtttgatggactttgatttcagaatctttcactggtatctaaaattttctttcatatgtttggtaattttagatctatactgaaaagcttggcaacgaagagttcgaagataagattatggcaatgaggaggtagaacaaagcatgtatggtcgactgtacatcataaacaatttcttctggtttagatgaggaaatagccaaggaggccaagaaagcaggtaaggtcttcctgaatttaatctgtatttgtttagtgagacttttgtgcatagtgttttggttgtgaagacctttatttttctgtttgcgccagtttctgcggagaaacaaaggatagcagagaaggttgcatccacactaaaagttagtgttgagattgataccagtccctctgaaaggttatttttttcgaatgctcttgttggcctttgtgtcttccattactttctctatttgtgcctttatataagaattaggatagaaatagccagaatgaatttaaagaaacttaactctgcttatctttagaaaaaaaaaacctctgcttagggtttttttttttgtgtactatttaaattatttgtgtagtcccatggtcttaggctttgacatctgaataatgccagaatatgttttataacatttaatgcataaataaaaattagtagcttctttacatcttcatgctctgttgttgttataattattgttttcctaacaagttgatggtcattcagcttagagaagatcatagctgcactgcgtgcaggggcagagagtgccggtgtacctgtttacaattgtgtcctcgtggcaggaagtcaatctggagtagctgcagctgagcgagtaggcatgccatgctttgtgctccggagcaggttactaattgacttttcctcaaccccagaattacatgactaattaaccacacaaattatgtattcatgcatcattagtttcggtgcagtgttttgctcttaaaatttagtttcaaatgacgaaaattagttgtttagaaactaacccgtgagaaatagatcgatttgctgtcctccatcataattgaggcaaagattatgggaacatgctttccttttctagcagcttgtaaccaatttcttctctgtatcacaattatatttaacctaattctaatgctccggaaagttgattattcagctattaggtgatatttaattattcatttctgtttccaaagagatacattatcatcaagggaacaaaacttacatataaaatacataatttcagaaatgatcacagatggagtggttggatgcacaaataagatgtgtcctgttttgctttagaagaaaattgtatgtattggtgatgaatatttgttaacagggccttagttacttgacaatatcaatacatatgccgataagataaaacaatggttacaagtaaaatttgggatatgactcttacagacatgttgccttctgctttattgaaaccatttttgttgattattttgcctttcgttgtgtactgagtgattagtttagcttactatctcaattgttttccttttttacagtttgacgtctagagctgagtttccttcggcgaaagctgtaatggatggctttggaggtgcagatctaacgatctccaagttacgccaaaggacacaaggttgacttctgtaagttgatctctacggtcactttttgctccttttttttttttttccaaaatgattcatgtccctactctctaataaacatgttaagttcttgtcaacgttaatttaaaggttaaggataaggagtttttaagctaagaaaagcagtgtttattttcaacaattaaaatgtaacaattcattttcaaataatttatttgattgatgactgttggtgcaatatgcaagattacaatgcccatgtttgctacttttgcaaataggaaaagaaaaggttcagctgtctcaaatagttttaaacttttgtttttcaattaaggagtgttattgaacaccattggtactgaaacaatccaaaaaaatatttgtcggaattgatgtttcaaatgcataatctttactttttttaatagttttttttaagggtgaacataatcctgttggaaggactgcaataataaacgctgacttgtcacgataacacttcattggagatgactgtgatgacttcagctcttcaagcaatatttttatctatataatttcacaaatgctgtgagcaagatgtaagatattagatttaaaaaattcataaaattcatatgatcttaaacttatgtcaaattattaagattattttatgaaataataagatggaagacatttgattttattatattggatgttagatgagattgtgggtatatagtcttccacacattaatcttctctctatgggttctcattcaattgatgggaatagaggataaaagtggttgagattagctttggagaccaaactcttgtgttctttacatagcaaattaattagagcctcataaactctaattagatttactattgggtattacacattacaaagctcatactgaataagatgtttattagacttatttaattagatcacttatttatcttaatttataatattagttcaaataaattgtcttaatttgtaagtttacatattggattattaaaaataacccaacaatctcctacttgggctacacattaattctcatgacaattatatttaataaccttgtatgcgcacaaacttgctaattattctcaaaacatctcctttaaacaatttggttcatctcctagaccaatattagaccagagcggcctttgttacatttattgtaactggactcatcaatgatcaccatatcaaatatattcaattacatagattaagtatgaatgtgtaactaaaaattacatgctatgtgatcttagtcatgcgtatttccaattggtcctttatttcttattgagatcaattcttagtctttcaaactacaattgaaagataacatattcagagcattaaagataataaaaccatcaaccttgttttgtaaaaagttgaaccttacttaaagtaagtgtaataatgtcaaatcaacaaagtaaactaaaactaaaaaaaaaataaccactaaaact

SEQ ID NO: 382880 - DNA, 3637 bp, Cannabis indica
aactaaggatttgtcatgggctcactgccatgagctgagagtcgaagaccactggtcatgggggtggaggatggctttgcttcatgcatttgagctttggaaagtaaatcacaggcatacttggcttgagacagatgtagaccagtaggagtggaattgatttcgatgcccagaaagtaatgaagattacccaaatccttaagagaaaacttgtcattgagtgcagtaattaaacttgagacaacagttgggtcacttcctgtgactaaaatgtcatccacatatacaagaattaaggttgtgtatgtggatgtatgttgtatgaacaaggaatggtcagacttggatggcatgaatcccagttgaagaagacagtggtgtaatttatcaaaccaagctcgaggagcttgtttgagtccgtataacgctttgtgaagtttgcacaccaatggagggtcagatatgacttcaaaaccagggggttggaccatgtacacttcctccttgagatccccatttaggaaggcattattcacatcaagttgtttgatgcaccatccacgagccaaggctaaagtgataacaatgcgaatggtaaccagcttgacaatcggactgaatgtctctgtaaaatcgaatccaggctgttggtgaaaccccttagcaactagacgagccttgaacttgttgtgagtgccatctgaattttctttgtgtctaaagatccatttgcatccaatgggttctcttcctgggggtaagggaacaaaagtgtatgtggcatttcagattaatgctaacatctcatcagacatggcttgattccactgctcatgttgtaaagcttcttttacagacctgggaattttaatgaccatatatatcttgggtttgcgaatacctgacttccctctagtttgcatagcatgagaattggccaaggtattgggagttgcagcagcagttttctgttgtgtagcagcaacaggttgctgttcagcagcaacaggtgtattagacaattcctcaacatgtacagatctatcattcatggaaacaccaccatgagcaatgctcagtctagaattttgttcttccaaaggtaccaaactagcagggacaatagacacacttgggacagctggtggtgagggaatgttctgcattattaactcagtcacaggtgcagaagcattgtctgtcgaattggaactctgcaaaggcacaaagcagcttgccatatttggcacaatatgattagtggatacaggccagtcattggtatcagtctgtgagtttaaagtgactgtagggatcacagctgaagtgtaaaattcagagtaagaataggaatcagatggttgttttggtagtgtggagaaggggaaggatgtttcatcaaagatgacatccctagatatgtagacacgaccagtggcgtcaagacacttatagcctttgtgattaaggctatatcctaagaatgtacatgaggaagacctgaattgaaatttgtgtttgttatatggtcttatgttgggaaaacatttgcaaccaaatgttttaagaatagtgtaatcaggtataatggagaacaacttttctattggtgaaacattctgtcggacaggggtagggagcctatttgaaagatacacagaggttctaaaggcttcatcccaatattttaatggcatagaagcttgagcaagtaaggttaggccattttcaacaacatgcctatgtttttgttcaactaagccattttgttcatgagttgttggacaaggatgcctatggagaatgccatactgtttgagaaggtcagaaaagggtctaaactcacctccccaatcaatttgaagacattttatttggtgaccaagttggagttcagattcagctttgaattgagtgaatgtttttaaggcatctgatttgtttttgagcatatatatccaagtcaacctagagaatgcatcaataaactgaatatagtatttgtagccattgatagatggagttttggcagggccccatagatcagcaacaacaagttgcaagggctgagtatacacagtaagagaggatttgggaaaaggcaatttgtgaattttgcctaaacaacaagctgtgcaaaactgaaccagaaattttattgctgatttttatattataagaatgaagtacagatttgacaacctttcaaagggatgtccaagtctattatgccacaactcatactcagaaattttagatttattacagtgagtgcaaacagtggtgactggttcattattctaggatatggatacagtaagggcacttagaatgacagctggtgtgggctgttgaacactgaactgggatggtttaaaaatatagaggccattctggtgtatcccagtaagaaggatggcttgtgtgacctgatctttgacaaaacatttgtcaacatgaaactcaaaaaacacattgttatcataagcaaaacgagacacacttaacaagttttttgttatttcaggcacatgtaacagattattcaaaatgagaggatgggatgaatttgaattgataaaagaatgacctatatgtttgattgacagacctgagccatctccaacataaagttggtcttgaccttcatattcagtgctgttggttaggttttgagcatttggtgtacaatgatttgttgccccggagtctggataccaattggtgtcttctgtctgagttgtttgggcaatattggcctgagcagtaggggaattagtgccttgaaagacccctgtgaagcttttatcgaacctgtaaaaacagtcaatgactgtgtgtccaatcttgtgacatagttgacactggacacgattacaggtgtgggaaatcgactgcctctgttcataccagaaacaccacgtccattagagttagcaggaaaaccatagccatagttgttacctgtaaaagcaccccgattgatgaatccacggccaccaccacgagttgtggacaagggagaagggatgcgattatagttggtgaatctgttgcttcgattctggtaggccatattagcttaagatgcttgatcagactcaatcgtggcaagattggctttgagatccgaatcttgatctggatctgtcttctttatacgagactcagaagctagtagcaaagcttctatttctgcaactgagtattcttctattcgagtgttggaagagatgataaatgtatcatactcactgggcaaacccttgaagattgctgcaatgtgatctctggcacttaggacttctccaacactcgcaagaaggtcaacatgctgcttgaccttcaaaaggtactcattgagggacattgatccttttcgtagcttctgtaattttgttttaaattccaagattttggaggagacttgcaaggtgaagtgtttttcgagggcattccagatctgtcgagcagtattgcaccccaccatgcgtgtaagaaggctctcagtcattgatgacagcaaccaggacactaagagctgggcttgaacctcccaatccagaaattcaggattaaatgtgtttgagctttgatctgaatcattcaagaactgaggtggtggagctcgatcttg

SEQ ID NO: 382881 - DNA, 1249 bp, Cannabis indica
ctgatttgccaagcacaagatacctaaaatcaaatataggagagaattaccacctgaaggtagtcccatatagagctgcataatatttcactccactacattccccaaagtgtttgattagccaccttcctccagatttatgattaacattacactttgccacattaattgaaactcccaatacaattacatgcacaacaaatgacaaaaatacaataagcaaatatatgcacaagaaaaaatgaatgccaataataataaccgtcaacgaaatctacatgttacataaacatttccattgctatgagacaactaggctcatgaacacaaactacaagttaagcatgctagtatgtgtataagagaaaaatgatacaattttaaaaaaaaaaaaaaaaaaattacaaatgaaacaacaaatactcacattaaaatagtctactagctcaagaagctcgtccttcttagaagtaacctttttacctgtcaaaggagaaaggaaaagatgaattaaatacccaataacattataccatttattagaacatgaattactctaatatcaccaattagttatgatataaaccctcatctttcttaccatacccttcctctcattgtctaaacactttcacacttaacgtcctcactttccacatattagaaactgcaaagctcgcaacttaaacagttttggcttgaaggaacctctcaattctcatataagattgactattaatctaaagatataacatatatttaagattcattatctacttctagacatcgccaccttcaatgcagatttagatttatattccttaaccttaatattcatacatcaaactctcacttccatctaagatgctccatttagtttctttgataataaaatgtgatttttaattcaaaattattttttgtcaaaatccaaagattaaacctactacattataagtcatactatgtgaaggattgtttctagtatcaaatacttaaagaaacataatcttgaaaaaccaagtttatctaacctcggcaatctttcaaaacagtggtgcttgcagattccgaaatcctgcgttctatggttatggtactaccatatgtctctggcttaaacgcatcatccccttcgttatttatttcaacaataacaacagtggaactgtaaaaacataacaaacaaccaacaaaaataagaacttgataggcaaagatacgaaagtaatattcaaactagacaccc

SEQ ID NO: 382882 - DNA, 2590 bp, Cannabis indica
agacacaatcaggctggctcacgatggctacgcactggaacggaggcagattctcagttttccgatgacacaacagaccaaggtgtgaacaaggaagcattcaatgcggttgattcccatgatcacaatatcaacgacattaatgctaagattgacaatgccaacaatacggaaagaagaagatttcaaggagcaaatcaacatttactgctgagtcatacagttgacactacaaatgttctccaccatcacggcaagcaagcaaccgaaattgaaggccaaaatggagatcacacattaattgtctctgattctaaaagaagaagaaccaacactgatgctgatgagattgtcgaattaaatgaggatgatgaaaacatgaatgtggacgtgtcaagtgggctgtcaaaaaatgggcaaaaggtgggtcctggggtccaggcccacctagggtcatgagtatccttagttggaattgccgtgggcttgggaacccacgggccttacaattcctaaaggatattgtgatccaaaagaggcccaacttcatttttttatgtgaaactttgagtaaaaaagacgttttagagaggcttagagttagccttggattcgaaggtttattagctgttgatgtagttggcagaagcggaggaatagctctcttatggaaaaatgagactgacattcaggtattagagttctcttcttcctacattgatgttagtgttcataacaatgataatatggtgtggagattaaccggctgctatggtgaacccaaccgaagtcttcgttcaaagacttgggatcttttgagaactctagctgacagaaataacctgccatggtgtgtaataggcgacttaaacaatgtctgctgcaatgaagataagagaggcggtaatgattatccttcttggttaattaatggattcaatcaagcactggtggactgcaatttgagagacctggagcttattggttatccttttacctgggaaaaaggtagaggaacagacaattggattgaagttcgtttggatagagctatggctacacaaaattggttagaccatttcacttcagctaaactaatcaatattgatgtttctagttctgaccatacaccaattctccttatgccttgtacctacgatgcaactacagtcaaaaaagattcgcttcgaaaattgttggctccgcgaaccaatgtgtgcacaagtaattaaagagagctggtctaattgtccatctaatgctattacggaaaagatagcttactgtggtaacattttacaagtctggggggagagctttacgggcaacttcaaggacagactaaaaaatctcaagaaagagatacatcattggaagaaaggaagggatgattattctgttcagaagcataaagaagccgagcaaaacctctttgaagcatacactcagagggaggttttttggaggcaaaggtcaaagcaactatggttgagagaaggtgatcataacagtaagtttttccatgcttatgcttctactcgaagaagaactaactcactgtcaaaacttcaagatactgctggtttttgggtggattggcaaagtggtttagcagatgttattacaagttattatacagagctttttcacttcttctccacatacagccgaagagattatagaagcattcccacgactatcacaacagatcaaaatttgcttttacttgcaccagtcaacgaagaagaagtcaccaaagcagtgaagcaaatgcatcccgacaaatccccgggacctgacggaatgacaccaggcttttatcaacgaaactggaacattgttggaacggatgtgataaagctggttaggaatttcttttgtactggattgctgcctcctggtttaaaccatacaaacatggtcttaatccctaagaaaaagagtcctatgactatgggtgatcttagaccaatctctttatgcaacgtcctatacaagataatttctaaggtgatggctaaccgtctcaaggaagttttgccacaactaatatctgagtatcaaagtgctttcattccgggtcgtttaatattcgacaatataatgatatcgtatgaagtcatgcactacttgaagaggaaaagacatgggaaagaaggctatatggccctaaagcttgatttcagcaaagcttatgatcgtgtggaatggccttttattgaagctatgatgaggaagatgggattccatgaccactttgtgcaattgatcattcaatgtgtctcgacggtacagtatacaatactaaacagtggtagagaagttggtactatcactccacatagaggtatccgtcaaggtgatcctttgtcctcatacttatttttgatatgtgctgagggattctcatcaatcattagaagattcgaaacttccaatcttttgaaaggatgtcgtgtggcaaacagagctcctactatttcccacatgctctttgctgatgatagctacgtctactgtagagccaatgacagagaagtctctaatgttctcaacatgcttcatacttttcaactagcttcgggacaag

SEQ ID NO: 382883 - DNA, 2978 bp, Cannabis indica
gaatcttatcttatgattcctatatatctttcttttccattttccattttcctatatgatataataaataataacaaagggagttctgggacccaattggaacgtatcatttattcagttttcattctcatactcaatgtgagcacttgccacttgctcctatatatataaaatattagaacaatagtgcaacacccactcacacacgctactatgattgttacccattttttttaaagggccgtgttattattactattgatattatatatatgaatgagttgaatattatcatattcgaataaattagaggaattatttaggatactagttaccattttagcatgctgatcatgatcattaaaacagttcaatccacatttgcccacattgacataacataataacatcaccatatcgttcatacatacatacaaacatatatcagtacttaattaaacattagaaaataattaataacttaattaactagctagctagctgtaacacagtagtactaaatgccatgatcttattcatgaaatcttgatatatccatgatcatcatcatcatcatcatcactcccagaaatgtttgaatattgatatctcaattctcaatggagcttgttgacaagattacactgctttctaatctcacccttggtaccagttagagggttattctcggagagaattttgatggctctagagaactctttgaagaagtaggcttggctcttggccatcttcttcacatatggcttggtcctcttatcagtggccaattgatgatccacttgaagaagccccttgttgtccaatatgttcctgtagtaattgttgtcaagaatcatgggcgtacccctgtcattcctcacgtactgcaccgcttttgggtctggaatggagtctgggcacttgtatagcatgtgctctacgtggtctgggtttagtgctgggtccacttcagggtacaaacggtgcaccaatttcacgcagtgggttcgccccacactgtgagaccctgtatttattcaaacacacaaattataggataagtctaaggtagtgtactcttatggttgaaaaataaaaaagacaaatatgttatggggctgccaacactcccaaggtgtgtcgtagaaagctagaaataaaattaagttgggggattattatatatttttatatcatatggtatggagtgttcaaaatatctctaccacactataccaaacaaaaaaatttatttagatctaagcttcaaataatttaagatcgaagaatttattatgggtttcacatatttggatagtgttagtgccttaacacagtgatatactacaactgctaataaagtacacagtgatataacggtgattctggctttgacattgtttggatcctaagaaaaataaaaagatttgaaaatatttttatttttaggggtctgccttatagtttagaaagaaaaaaaaacaaggacaagcctaattagatctaatgttatgatgcacattttgagtatatatgcatgactcatgggcatgatactatatattgatgtgaaattctgaaaatgttgtaaatgaatactctaagatttaaggttgatgattcatgagcatggtacacacacacatatatatatatatacttataatatatgtacctagtaaagcaacgaggccaggggtgtcaatgcccatggaggcgaacctgtcaagaacaacggacatgctttcgttgtggtcaggaaggtactgctcgaggatctctgctctgcttctacgaccatctcttcttccagttttcagaggaatgtaaggtcctcctagctgatcgatcaaatcaacaaaattaatggttactaaaattcattccttcttagttaataagaccagtagaagtagttaaagtaaagttgatataattagaattagaatagaacagaatctaagtctcagatctaagtactgaccgaagctatgccatctctagcagagagcacaagaatatcagagcatgaaactacgccagggcattctctctccacagcttctttaatggtctcaatgtacctgaaatttctcatcccaaagcttctatccatttctttctcagacaaggatctccttgttgagtccagcagcaatgaagcatcacacgactgtgaatttaaacatgcaaaatattattagttcttgaacttaattaatattattgaaacagaaaaaacagagaaagctagagaaggattttttttttttacgttacctgaacagcacagtcatgaaaaatgtttctgagccaagagaaagcagtgttcttgtggcgcttgtataagagtctgacttgttctttgatgatatcttcagcttgaggacatgaatccttgtaaaagttcatgacaagacctgggtcttgctcattttgattatcagaggcagaagaggttttgatgagacatgaaagtgctgagaaagatagtaaagcgaagaagaagagagctttggaacccattttttctgaactctgctcagtaactgacctgcttctctctttggctacctacttcttaaataaggcaaataaggataagtttgacaattaaaaatgaaaaaagatggtggaacactacacactactaactataccaattttatattttaatatttgagcatttaacataaatataaaagatactagtactattgtttgtagggtttataaattattactactgtacttaactaattaaaagtttataagtgaagaattatttaacatttataaagtgtcgctttatgatatatgttaataacactactaatatttgctttttcatttccaaaaaaaaaaaaaaatattagtctttaaaaaaattagtcatttttaatatcactataaggggtcatcttatattttattaattagtgtttttataataaatattaaattaaagagtattatta

SEQ ID NO: 382884 - DNA, 2375 bp, Cannabis indica
atcaaacaaaattaccttaggtaaattagcaagttctttttcacaaaatcaagagaaaaagaaagaaaaattacatgttgtacaatctaagaatatgacatgaattcatatacaaaatttgattaaatagacctgataaggcaacacaatgcagcctcagttacagggaagaatggcaaggtttctccgatttaaactagtggtttcaaccgagcgaaatcccggtaaaaaaaaatgatcagtcttcaacctcagtgttgaagatgaagcttggaaatgctgtggtgatgtccctgcataataagaaaatcgagtttcggtaaggcttgtagagaaacatgggggtagctagctaattagctgtggctgcatttgcatatacttacttcaagtaaggaagagtcatgttcttcaaaagggcgggatttcgaacagcgaatgctttccattcttctttgttgattttaccatccttatctgcatcagcatcagcaaatgtctgcaataacatgttgagaaaaacttgttactaactaactaactaatgagttgttaagaagatgagaacaagtgaatgtgattgaattgagacactttgccttatcaataatggcttcaagagatcatctgataatttcatatcacattccatcattattgcaactaccatttgcttaacctggaagaggaatcaaagagaggccattcttatagaaatgttaaaaggcaccagtaaagtgtcgcattgatataatttgatgcaataatttttgagaatatcgctaaccaatcttataattagttaaaaagacgaacacatacatttactaactattattgcataagaatatgcttacttcttctctctcaatgaatccagtttgtctcagatcgtatagccggaatgcaactgccaagagaacaaaagtacccgaaaatcgggttagtgtgtgtaaatctgttttgcatttcattttaaggttagaaattcttcttttttaacacacttacaatcaattttttcatctataggtgcacagggatgaaagacactgagtgcatgtacaaattcttcaaagtcaataacaccatttctcttttcatcaaaaagatcaaaaacctatataccaacacaaaagaaaaacagttcaaaacttaggtatgaattaagctagtttgattttcttgacttaatgttcaaaatatcaacaaattcttttacccggtctaggaaaagattttcaccatatggggtttggaacagtgccaattgaagctcttcctacaaagataacaaaggcttgtaaaactcataaccaatctcactcatcataagactttcaactcaaaatcaatgatatactattcaagtatgtaaacagtaataaacaagaagaaacatttgaataattctacagtacacctcctgaaaaagtcattcaaatacacttatcgtttcgacattcagaagagcttttagtctaattgtttgaacctcattttcaacactgtaaattaaaaattctccaagatgacaaaacagatttacagaatagttcttttcggagctaactatagattttttttcctcaaattatcaaagaaagtttagcaaaaatgagattgaaaatgaaaatagtgtaatttggtataccttgtgaatagaaccatcatcaatgattgaactactcagcttcttaaagagttcatacaaagcctcaacttcattcacagaaactgcaataaaaacccccaaatcaattatgacccaaaattagggattttacagaactgaaaaatgcaaaatcaaatcaaacaaacatacatctggtctcatcagcaagacgagttagatcttcaaaatggtaaataaatttcttattgggaatagacctgcgacaatcgaagcaatcgactatggctaatatgaaaacctcaacaatggcaacgaatggtaaaaaagccgcacagatccgttctcccgctgttaaagagctcgatctctgtttttttttcattcattcatacaaaataatcaaaacccagaaattaaattgggaaaaagaagaagaagaagaatgagtaccgtgaaatccatggtggagtttggagagaagacaagaagacatgagaaggtgataaaggcgtcaactttagtttcattcaaatgggtttttcttctttttgtagtgatttaatggataaggatgaagatgatgatgatgaagtgagaagtttcgtttctgggttggatttgattgagagagaaagaagagagagagagagaaggaatgaagaagaaggagaagaagaagaagaagaagaaagagaccattcattcaaagattgaagcttttttgttttgttggttagtt

SEQ ID NO: 382885 - DNA, 4196 bp, Cannabis indica
tatacaaataataaaaattaacaataaataacgtacaacataaaagacagtatttttataaataaaataattaaaatcattaaaaatatttaaaattttgtaaaatcgtattttttataatttttcttttttgttttaatgtatttgtgaaaataatccacatatatattggggtcctccacttattttttgtttgttagtacaaatattatattaatatgtggatgttatggttaatttggtttgcagtattcttttgatgttggcattctttctatctttggtcatttggattctaattacaaggatcaactcaaggagaattattccattgtaaataaaggatataattcttttcccaacaacgtacctggaactacatatacaaaaagcactcataggtaattaaaccaaaaataaaataaaataaaaaatctcacatcaattatattcaataataatatttaattaattgaatgcatgacatgtatacatgattgtgttgtattaggcaaggaaaaggcttaagcagattctgagtgagataatgttggagagagaggagaagaaaatagcagacaaggatctattgggtcatcttttgaatttcaatgatggaaaagggaaaagctttaacaagagatcaaatttctgataatatcattggggttttgtttgcggctcaagacacaacggctagtgtattgacttggatccttaagtatctccatgatgatcaaaagcttcttcaagctgtaaaagtatgtatatatctctctatatatattagttactagtaactagttactagttagtaattagtaaggtcatccctaatatcgaaatttaaatttgattattattttagtagtaaactttttttttctaattccaactacaatactaaaaattatattctttattatacagtatctcattatgattagtgtgatactgtagactctcatcaaattataatagattttaaagttcagtcataacattttgtgagaaaatactgtatatatataggagtttttagtgtgtataaaaatggcctaacacacttttgatcatggcttacttattagtatatatctaattaatccttttatttgtcattgattaatttgtgtaggcagagcaaatggtaatatatcaagaaaatgatgaaggaaaaaagcccttgacatggaaacaaactagaagtatgccacttacacataaggtattagattttaattcatattagagccgactttaggtgtgagtggggtcttaattaatttggtcccaaaaaaaattgttttatttttattttcttgaaaaagacccaattttgattattttattttaaatattattaaataaataaataaaaataataattattttttcaggtgatattggagagcttgaggatggctagtattatatcattcacatttagggaagcagtgactgatgtagaatacaacggtatgtaaagggcaccatcaatctagaagattctcttactcattaaaattaatatataacaattttatgtactatattgtcttcttattattacattattttgattatatttggtttttgcaggatacattattccaaagggttggaaagtgatgccattgtttcgaaacattcatcacaaccctcaattcttccctgatccacaaaattttgacccttctaggtttgaggttggtttttatataccagagtcatcatttataatgttgaaaaaagaaaaacaaaaaaagacattatttaattattatactaatgactaaaatcttaatgtggttacaggttcctccaaagagtaatacttttatgccatttggcaatggggtacactcttgtcctggaaatgagcttgccaagttagagatgctagtttttatccaccatttagtcactcaatacaggtaattaattacaattaatgcaaaatgattcttaactaaacaaatctttaagttatttttttagagcattgttaaccatgtggccttatacgattggttagcgatattttcttaaagttatttttttaaattatatgagattttatacttaattacaccaatagcactcagaagagtgctaagtagaaatgatgccttttagcaatgttgattttcttaacttatatagaacttgctacttattaattccactaatagtgatatgacaccaaaaaaatgtgctaagttccataatgcttagcaattcttattttgtagtactactagccactcttctctccttttttataattaattttgagtttaatattggttttgtaggtgggaagttgtgggatctcaaagtgggattcaatatggcccatttccagtgcctcaaaatggactcccagccagattctggaaagaatcaaacaatttcatacaagatttttttccacctaattaactaaatatatatatatttatcttgttcaccaagtgtattattttcaaatgtatcttatccctaacccaaatccaaaaccctctgtttattttttttcaaatggggtgtctctataaattattagtattattggtattattatctagagactctatgaaggtgtttttttttttttggtgtattttccaccttcttttgcattattaggaaaaagaaagaggggtaataattattgttgtaccaatgagcaagtaatgtaatttgtaacccttttatatgataattgaaataatagtaaaaaaaataaagaaattttgtttgaatgtaatggaaagatctcttgttgtctagcttcttctctcacatgaatttatgttatcaaagagagtgacacttagagcatccccaaccttgtgttaaaagccaaaatgaagtttctggcaaatcagatatgtgacctcaaaatgaagccaatgaacagtactactacactgttcatttgagggtttattgatttaatatatgctgaaaatgtcatttctagttttatatatatatttcattcaatagtaatatacatgtagtccctcaataatttcatgaggcctgtgatatattcctcaaattatttatagccatgagattttattttcttttatggtaatttttaccaagagcgaaaattatgtagttatattaattatgtaaaatataattttgttttttctttttgggtagataagatgatttgtatttctcataattaaacaaagatggtgaagggtgtaaatctcatttcaaagcatgagttactctttagtgttatatgtaattacaactattataaggaaaatgtgcctcaatgcacaactgacacgtcatagagtttgttacagaataaaggcatattgagaatctctatgcttacagaatgggaattaagatttcctgttaaaaattagtatttcatactgtgttaaatcaatcaaaatttgatacattaataaaaataaatctctaattgaatcaacaaaaataattaacatatttaatataaattagattaattaatgtgttaaattttaattagtttaacacatgtgacactaaaatcttgatttacaaaatggcattgaaataagcgaatattttggaacaaaggtttatcgacaagaaattgaaattaatttcttaagttacatataagaataaagtcattctacactcgatgctctctacatatacatataaaatcctaaccatccacttaggcacatatgtccagtacgtaagggtaaaaaactttttcctgtctttaaattattgagcttgtagaattttgtcacttacacttctctcccaacactacaattattattgaaaaattgtctattttggtgtactttaatttttgaatgatttactgatgtggtcacaggccacatacattgttatagtacacatgagtatctttagctaatcaaagttaactgaaattagatgaaatcaaattttttgacatcggatttttgtagtctaattagttctagcaatttgatcggttgagttttgggactgcagattatagattttacatatcaacaatcatactaaagttcataatctactatcttaattattatttgagtcatgtaacacaacaaatcaagataattagctgaattgttttgctacagttcacggaattttaaatatttttacgatttttttaattttatttacataaaata

SEQ ID NO: 382886 - DNA, 1586 bp, Cannabis indica
caaaaatttttttcttttctattgatgaaattttaggatttaaaaattcggagaaattgttcttttttttttaaaaaaataaattaataaataaaaacaaaaaattttaaaatatctattttagtcattttacaaaggttaaatacgtaactatatttttttgcggtgtagttaataatttaatgggggtgtatatactaactccccatactctattatatatacttccccaaaaccccattacaatgactcaattaccctctttatttaataatctaaggcctaacaataccagcctctcgaaatttaccttgtcttcaaggtgaagaaaataaaaaatccaagagtagatgtccttccaaatagtttgcatcaagttcaacttgtctgattacctcaactaaacgaattggctctactattgtgtttttgaattctttgtttgcatttgggattgtttccttacttaaattaatataatttttagaagttaaatgaaaaatatccctcagttgaaaaagaagcccattcttgatggcccaccagttgagagagaaccatggatatataagaaagtttcacaattagtacagaaaaaacaccaacaaatgagattaagtggtagataatttgttaaaaaactacctccagtatcacccttcaaccaaatggagaacattgatttatcaatataattaatcctatcccatgagaaatacttggagattaacaatgatcatagtaaagctaggccacataagaaaatcttaaaaggtgatttttcctcctctgtcaaaaaactaccgagaaaatacaagtttttccttctatttgaactcgctgctcgtaccataattcccccttttatggatccaacctgcctaaaacaaagaggaacaagagaaaaaattcttatgttgttttcctctgtcaaatacccattgacttacagaggcaacctccccaatacaccctagatttttcttctcccatatatgtctagaatattgagagaggtgggttctaggcaatgttttaagtaccataatagatgtgccactttaaaattgaaccataatttacttctcctttgtcatggagattttatttcaatcttattacaaaggttgaaattgtttgctaccacttggggtttagttccgaatgaagagaaaactgatgtatattgtagtggaatgaaggaaagtcaggttagtagggtgcttgagatgtctgatttttcaagagctcatttaccttttaatatcttggcattccaatatgttcaaacaaaatttcaaattgtaatattattctggagaaaatggttgcttggattggatgttatggtaatttcaacacgtaaatatacatattgtaaataagtaatagactcacaaagagtgaggtcgatcccacaaggattgtagttaagtactataaaattaaatcttatgtcaaaattaaaagaaaattaaatttagaaacactaaagaaacaatgaaaataataagcaaataaatcaaaaaggaaattaacgatgattaaagttagggtttcgaattcaattgtatctattcattatg

SEQ ID NO: 382887 - DNA, 2381 bp, Cannabis indica
gagactttgcaaatttttggtagaagttgaagctaagctttgtttgttagtaccatatcaagcttttaatgaatagggcttcaatattttgtgctattttctttgctaatagggttattaattaatctatataggtcttaattaaggttttttcaactttgtaggaaaaaacagtcaaattttattattaatttttaagcttttgcttggtaattacacttggcactttgcttaaattcaacttatattaattgtaacaattcttttgcttttgctttttgtatgaattttttatgcatttggaaatctttaactaaattcttgcttgtttaagaggaaaactcactgaacacaactttctattatgatatatatatttctgtaattaaaagataaaacttatttttatttcttttgctgtattttcttcttcttcttcttcattttctcgatctcagctcttgtccacttggacatttttcgggctctctcactatgtaaatcacatctccagaaactttgtacatgtctctgtttcgatgccatgtccatagagcatgagtctcatttttcacctgcaaccatcgaaacatggcttaataaaaggttactcgattaacctcaacgcgaacataatcactttattgattcctctcctttgttcgacattacagtattagaatgtcatttcaatgaaattaatactttttttttcactcataatatgtctttttccattctatcctcgaattttcaataccaaacatactcttcaagtttgtttattaaaggcgattagattaatcatcttattagctaatatcattagaatgtcatttcaataaaattaatacatttcttgctcgtaatatacccttcaaatttttattaaacgcgattaaattaatcattttattaattaattactgaagcaaaacctctcaaaatcaaaacaaacataacaaagtaagattagtattgaaatgttcatatcaaattgtcatcatcaagtattgtacctctaaaattccatgccccaaactgctttctcggtatgcactatattcgggttgttcatcccaacagaattttcctgctgcaggacccgaagtgaagttaaaagcacaagaaccacccataaatggatcaattgtttctgatggttttggacagtttccaggttcatcagtgtgcgcgatcgccattttttctctattcccaccatcaccaattgttatatgaacaggtccacaaggatccaaactgtagttataaactcggttcgatctttcgtaggcatgaacctgtttacaaaaacacacatttcgcaaacattatacaaactttctcaacaacatacatgaacatcgattttttcttacaggtttaatttttgtctcctgaactattgacattacctatttttttccttcgagttattttcacatctctacaatgcaataatgattcatggacaaagatcttaaatgtaaatttctcagcacgctatgttagctcttttgttaagtttttggacaaatgaaaccgaaaaaattcatagggcaaaattcatttttgtcccctgaactattgacattacctattttgtccttcgagttattttgcacaataatgagtcatggacgaaaacatgaaaaacttaaatgtcaatatctcaacacgttatgttagctcttttgttaagttttaggacaaagaataccgaaaaagttcaaaaggcaaaaatcctatctgaattgactatagtttggctatgaagaatgtacttacatggccattaaagactaagtcaactccatacttgtacaaaatgtcttccattgataccctcatacactctgcttctctatagtgtgctgtgtaggtactataccaaggagcatgccaagaagctaccaaccatggagtcacttctcggtcaacgctagccaagtcgtcctcaagccacttgtactggtcagctgtacaaaaagagggaacaaaaatacataaacaatgtcaaagatgaaatagtattggagatagaggaagaggaccgatcctcgagctcacatgttcgatcgtatggagcataggcaccgagcattatgaaatgcactcctcctgcattgaaagagtagaagagtgtggacgatgatccacactcttccgagggaaatgcaaatcgagaactgtaagcaacaaatgtttgattttcggcttgtggttctatgtcatggtttccttctattaccattattggaacatttgaaattagaggctgcatgtacctaaaaagaaaaatcaaatattaatgataaattgcaaaatatttaaatttgcatcgtcgaagaagatatcataatgctacctttcaggaa

SEQ ID NO: 382888 - DNA, 837 bp, Cannabis indica
ataagcaaaagaagcatgttcggggaaaagagggaaaaatataaaagacacaatattttgttattagatatttctactcaaaccaagaaaaagaatagtaatgccatgcaccactttttctaatatcttttcaatatcaatatgtgacaaaaaacagtaaattaaattaacgaccatggtgaaatatagagtgctagaatcaaatggcgccgggaaagaatcaaatgagagaagtgctagaatttttgttgaaagatatagatttatttacatatttatgttgctgtagaaaaacattattataaaaaagagcatcatattcccttgaaaaattcactgaaactgtattctaagaaaatttgtacatccttaaaaaaaaaattggacatattatgaaaatgacacttaaagggcacatgattatatgtgtttttttttttgttttgaaagaggattatatgcgtgtttaatgagcgataaaatcaaggtcatcgatggaatattctagccaggttgaaataatttggtttcagatggtataattaaagcttttagacgacacgaaagagtcgggtcttaaagggtgagagccgaaaattatgtctgcctctgtcttatgcgagtaattaagcacaaaacaccaatgtgcacattatatatgaaaaatgacactaaaccatacctacatttatttctttcttttttctttttaaatgaaaattgaaaactgtacatatatcctttaattgatttaaatatatataaatattaatatattatttataaaattatcatttttaataggagaattatttcatgtacttttttttttttttt

SEQ ID NO: 382889 - DNA, 3646 bp, Cannabis indica
aaataatatgtatcaaggcagagcaatgccccaacaatatgagctaataataaaacaaacaataaatatcatcactaataaatgcaaacttttttgatgttcatcactaataaatacaaactaattttgacgttgactatttttctagcacaccctacttttttttccttcttttatttgaatccttctttttatatttgaatcttctcacagaattagtttgaaatcaacaaacacttttttctgttttaatgccgaaaaaagaatcctggtttgacacctttactatgtatagtattaactcatactctctcactaattaatcattttgaactgcttattttttactagatattttgaactaccttttggatcataatttgagttgtttcttctacacgttctacaaattcgatttgttaaaaaaattcaccccctgaagtccaatccaagaaaataaaatagtccaaaattctagcaaagagaccaagaagtccaatccataagaccataacaacacagtaaaaaaaaacagcttaggtcaatactgacaagtaaagatattaaccacacccagtttgccagtgaggtcaaaaaaatattgacttagctctatttaacaagagaatagagctaatcaagacaaaaaaatattctgacattctctagccaggatatctggtaaagaaattgaatctataagacgataaaaaccagaaaaaaaacacaaatggataggttttcccacaatataaagaaactcacttctaccaatccatatgtttgtagagcaatcaattactacatggacactcatctactttatatactatacctcaagtcattaaaaggaacaaaatttcagcaacagaggaatacctgcatgaccatttgcaaaagatgcatgcaagtaattgagcttgaaagccatccgctattagcacatatatctatcatggcctgaattatgcgtatactttgatccaagactgactttaggtcagtgacatagtcactaattggcaattctaactgtgaaaaatgtgcctggacagcaaaatttatttatgataaggaataagcacaaaaaagaagatattcaaaacaatagaaaagtgatttcatcacaaatattattcagacctgaaatagcagattggccttgacatgtggatcatcaaaccgatccttgtccaccatataccgaactttcttggacaaagcttcattgtagttttcctaaattttaagaagttgaatttggataaacatgtctacatattccatttaacaacacaaaactttgataagccagcacgaataacataactgaaaatatgtacttatatatagtgttctgttcttctctaataaaagaatccgagcaccaaattaatatcatcatttcagtgtacaaaacatgaaccaaacttcacttccatatttcttcagactaactgttggcagataatcataattgtgaaattaattttagtcgaacctagttattgtatatagctgtagaatttactttttcaaaaaaatatagctgtagaatttattctgtattgagttatataagtttccctaatcctagcatatatatataaatatatatatcttattggacttgtcttgcatctataaatttctactcgtttgagagatatacaagaaaatcattcagcacgtgttttatattaacattagtttcttaaataagtatagtttgcatgtttttagtaacaggtttcattccttcagtcatatagagtatgagtatataactagtttccctatatccgtaatttgacaacacacaaacttctaattatcaaataaatgaaaatgagacatagcaatgacaaattatatcttgtcacctcattatgccgcacaggaagctcattgtattcagacgcaccagaaagaataagtaaaaacacctgcagcaaagaaaatgtctaaggttgaagtttgtcataatttgtcattacaaagatctttaggaacggcatattacttcaagtgacgtgtctggacctatgttcgatccaaacattgatacagtcatgtaactcaggtaatattgagatgctatagagcccagcatcgttggctccacactgtcttcattgatcttgatgcatccactgtcttccaggtcctcaaaggttgtttgcactaacctgccaaaagagaatagttgaccaattaaataacagatggaacaaactagattccatgagtgtgaataatagttaatcaatataccttgacaggtaagaacttaaaatttcaggttccctggtttccaaaccatagtaagcaggattcatcatctgtagcaaagcattttaagaaatgggattatatactgctcgtaaaatcagaagagaagaagtagatacatgagattatacagttctgtcatcaacaaattattgttttccatacattcctctcaaagaagcttagacttctgaagttccatagcatggaagtatttctaattaaagtttagcattttgaacgtccaaatggcaaaaatttaaaatgcagaccattctttccataatcttttggaagcatgtttctagaaaatggttttgcaactgtccctatgtttctttcattgcaactatacatcccaaactcataccagtcttcggaataagtaagtccaagtaagatagtgaaccgcatcctccttatggcaaattgttccagaaactatttctgcggtcatgtgatcatgcaactgctccctcagactactctcaacaggaaatggttcatataaaaactgcaaatcacaaaattaggaattatttctgcatcagattgtaggtggaaacttgaaaatatacaagattttgtaatataatatacttcaatactttaatttcaccttcttatagaagctcttcttcggttcatgaacaagaataactgctttcccgtgctgatcatattgtggacgacctgcacgacccatcatttgcaagatatctgtgattgggaaatcaacatatctctttgttttgccatcataatactcagttccctacagctcataaagaataaatagttaaataagatttttcaaaatgaattttattcatagggagaaacattttatttcatgtagaattgacttcatgaaaagtgctaaataatagcattataaacaaatttgatgtggtcatcatcaagagaaatactcctgcgagttgcaatggtattcaacatatcagctagtcataagtatttgtcatgctcccacaatacaccaaaagttagaccaaatgaagcgatcaatcttctaatgtgactgaatcgatcaacaagtcccttctacacaatttgaagttccttaccggtggttgtcgtcgtaggtgaggtgggtaattgtgtagatagttggaacttcaaattcagaaggaacttgttggaaagggaaatacctagtctcctagagctgttacaacaattggaatatgttagagcgcagaatgtgttggatgatagtagagtacgaaaaccagatgtgagtgtgggtcttctcatgcaaatctgctttcaagtattttacagcaagtccgaatcatggtgaggtgttttcatggtgaggtgttttggtcta

SEQ ID NO: 382890 - DNA, 4932 bp, Cannabis indica
acattttgataaagaaaaaattataatgacaattctttaaagtttttctttcaagtaattttattttcttaaatcctctacaaaaataaatagatatttacataaccattttagtaatttgataatgaaaattgtcttctactattttcatttgtatcgcaaatggaagctagggaaattggaatttagaaactgcttatttattactacagatagtttttgatcagatttttgaaaaaaaaattaaaaaaagtgcgttctacgcattgtattatggtattgaaattagttttatctgaactgaaggtttcaagtgaataagtgattccccaaattctacccatgttatattggtttaacataacacttttctatattttcatatggtcttgacgacaaaaacaaatgctcataatttaaaatgaaataattaaaataaattcatatggcaatattcttcttgtaaattatgtaactgggttttttttttcaaatctatacagatgttataacatttcacattttgctggaaaaaaaaaaacacacacatgacacctttgacaatgataggtattttgacatatggtctctaaaattattaaacctaccgaagtggtagggaagtaatttgcaccacaccatgtgatctatttttttatttgaaaatttctatccgcacctcagaagatgataagtacatttctaatattaaaaaaaattaaaataattttttataatcacatttaatattttttaatttttttttctcatattaatttgtgataatttcaatatttattttaatttatttccataattttttttctaatataatttttattttaattcttttgctataatatttaaaatataatttatttttttataggtataatttttaagaatatgaattagaagaaaaaaaaattaaaaaaatatatattttatgtagaataaaaattattaaaataatgtgtatttatattttttgggtacaaataaaacttctctttttacgtttaataaaaaaagacaatgataggtgtttaccgaattttttcggcaactaaatattttggagcttaaaaaagtaataacagaataaatagcaagatcacaaataagtaatttttacgtggttcaggcgttagctatccttagttcacaagtccattttattaggctcatcgaccaatgtgtttatacaaatagatatacaatggactgaaactcccttcccctgtgttcctcttgaggaagaggaagcttagtaagaatattctggagttttatgtgtgtgatgttatacaaaaatctatttgcttggagcggtgaaggatgaatcttctctctgaaagaaggtcctcccaaaagaaaaggttttctctcttttcttgtgtttttcggggggtatctacaggccaacttatttgcatgtgctaccttagatggatcatcgttggggcgaaattcgactgttggattggtaggtggcatttttcccatatgacatttaagggcttcagatcgcacaggttgggcctaatacgcatgtcatcccatggcttctcctttttgagtttcccttatccctattcgttggatcatttgtttaggtacacaaggacacgcatgctctatacaatagcatgtcgtgggagacaatgtcatacctgaaaaagcctggtcactaggcccgtagtctgacacgtataggcaaagcttttgtgggctaaaggcgtagcccggcttaacatgtctcaaaatgccttggtccctctgggaaaatccatactcttctcgaaagtagatggctttggttcctggaatagagggagactttggctcacagataccctccgtgttattagcagtcagggaactccctccgcaaaaactcttcccgcgaagctgatgcctttttcttcccagagcattaatggaggaaattggtcagctaatgactccttagcctatcttgattaaaatccatgtgtcatgatcacagaaatgcagataacatttaccccgaagctttcggggcgtatcatggtccaggagcttgtagtgtcttctcctgaaagagtttaagcacgtgggatttatgacaagctctttattacactacctcattagccaccaactgaagtatcattattcagaaggcataatttcttatgttttctcgttagggttttaaatgctgacttttgagctttgcatgcgtgttgggcacgtgttttgtgggatgcccaaaaatggcagtgattggatttgagcagactttccatttactgagtgcttatcatgatgcatgtaatgatggaagccgattgctgggaggcgatacaccctatcagctttccactaatccaaccgttagatgtctcttaggcgaacgagttgaactgttcgcttctcgtggaaggcgcctcttcctggtacccattaaatatcttcagcagcaatttcacactttacatttatgtctatcataccagagttattttagtttcattccttcctctgccctgcaacaccttcttaactcttccgtactcaggcacccagttcgtcagcaaggacgcagcgcaagggtcaccagcctcatattctcttaacaaccggtaagttttcttcaatgtttacttgctgtaaagttttgagggaattgtgcatgttgcatgcagttgtttgccctggggatattgatgtcgtgcttgcagtctctatcatgaggagtgagagtcttgtggtcctgggttgcacttactcattttactttgtacccatttctggcaggtgcatttggtttgtaatgcagaagactggttcttctaaggtggcatgcggcaatgcccctgatagaaaaaggaaaaggcttgaggtagccacttttggaactggggcccacccagtgtcatgatctgccactgaggctaggcaagcctccggcgtatcatccttcagccatgccaaaaatacccttagtggggttcacgttcccaaggaagcccattccttttaatcctctcgacatgcagaaggagagggaagtgaacagggccttaaaggggcacttggaggcagagaggctacaaatttgtaaaaggcccaccgtgctttcaacggtgcgtaaggctgagatttcagacggcatgcacaccctgcccctttcgggttaaccgtggaggttgaagccttggagaagcgcctgactttcaaggtggggagagaggctgccccctttgccaccgaacttctagatcaggtgactggaaatgcctcagagctacccatggagacttgggtgtattgtagtagaatggacgtctttgcgcttgcccactccaccaagcatcaggtagttggggtaaggccttgagacattttcttcctcttttatttatttttattatcttctgccccctattctgattcttgactttttcattttggcctatttcgacaggtggccttactggcggagaggactgcccaggaggccgacacggtggtgacagaactggagcaagtcaagggggaaaaccgtgacttgcgcaatgccaacgaaacccttttggctgagctcactgaggccaagcttcagattgaaggcctaaaagaaggagaaccagctattggaggccaattacgttcaacagactcacttaatacggggtacgagggccgttaatgacctataccaggagacggtggcgcggttgtttggagaggggtcctctgacccatctggtggcgcccaatcttgacttccaacagaccttttttgaattgttgtttgttctttttttttttttgtatattcccctttcaccatacttttcaagtcgcaaagacaattataatttgccctggccacgggggatacttgtaatagtaaatagggttttctttgctatttcttgttggagatttactttaatagactttttaggagcgggttgtgtcattgaaacatttggttccaacagcgagtgtttcaatctttctctctagtcttaatcatttcttaagcgattcagggatcgtttcttggttttaccctttctttcttggagttgtaatgtttctttccaccacttaaccccttgcttggaagaaaccactcgcttggagttagcccagagatggtttcctttcgcgaaaaaggagccttctctttttcacacatcttcttcaggctttagtcccttttacgaggttgagtcccaagagtcatgcccatgactcccttaggcttttgggcatttttcttaccttggtccttgttaacctaacactttagctattatgcaacctgatggactaaacttatagaaaatccacagagatttataagaaagaatgcaggcatattctttttaagaattttggccgaatacacatcttatccctaaattcgtacttaagtttagcctttgaagaaagaattcaagccatttcccttgggaagaaatagttgaaaacatttcctgattttggctgcatagtacatttgagctaataatcttggtaaacagacgtaagaagttgtagtcgtcaacaatcgggcgtaccatacccccaaatgagctgggaattttggtctcaaattctcggtcatttgcttagaatctgtctcgtatcattttcaagtctatgaggaggaggtttgagtgtggttctactttgctccgagaagcatactactcatccaggctatgtgttttcctcttcgtgactacttggaggggaattcttgaaagtctagcagtaatctcctggcttctgtgagaaaaagccatggggttgtaggtgaaaactgttggaattattttacgatctctaacccttgtatcctttctgttgcagagtattatcaagatctgagtctcaatgtccttctcttggatttggatccttcataat

SEQ ID NO: 382891 - DNA, 2591 bp, Cannabis indica
aaaataaattccaacatgtgtgtcatgcatgctgattggcttttgagccattcatgccgagtggcgtggcatgcatgtcgagtggcctttgtagcatgcatatcgagtgaccctcgtgagaatgcatgccgagtggcgcgaatctcgtgagaatgcatgtcgagtggctcgtgggtcatgcatgccaacttgccaagtggccctcgtgagcatgcatgtctactggctcgcgagctaacatgtgggtgtcaagatgcttgcaatctgttgcgcttgcttccgtattttgagcataatttcctcaatattaatcgaaattgggtgattcaagacgttttagaaaactgagaaagagatctatctatgcttctactttctgagatgattgcatgccaacaagcttaccgagatttgctaactaatctcataacactgccttgctaatttttaaggttaacataaattatttagaatttttcaaaaatttacaagtacagtatttacaaaaattaaaacgtacacgatcattaaaaaaaagtgagagtaagatagtaaaaacccaacacaaataaaaaatctaccaaaacattctaatacaaatttctccaaaaaattataacaatgtatacattaatactttcattttgaagcagacaaggttataggtgcacacaaattatataccaagtatacatatatttatttacttaataaataaaattcatctaatcattttatcttaatgagtaagaatcacttgttgaaaagcacaaaaatgtgtcaattcttttttagtttgccaacaaatgtatggtatatattttgaaagaaaaatatattgtgtatattcatgtcgctcattctcatttacaaaatcattttgtgggtgaaatgctgataaacatatgggattttcctgttaatttattgcaaaacaaatccgcaattaccaaaacggagggaaaaagaagcagtaaaattttgtttttacaaaagatcaaagggccaatagtcatcctgatccaaaacagtttgggggtcctgatgagtgagagaaggatcaaccatctgctttctgtcaacatcatccatcaacaaatcccaaccgttgaaataatcgtcccacaatccaatcatcggggcgctagtagtagtattactactactactactactccctccattaatattattcccataatcagatggtggccattcgaattccggcatgaactgaaagtcttccaggaagttgttagacgaagaggaagaagaagtagaagaagacgaatatgaatgcgacgtcgtcgtcgttgcatcagaagaagatgaaacgacattaataatctcgtgaggctccatgagtgggacttcgtctgtgcaaaatccgtcattgatgagctccattccatcttcatcaaccacgaataatgtgctggtcgggctgtagttctcagctaactcatcatcttttggttccgtcactgagttagatgatgagtgaattgaagacgacgacgtcgttttgtcttgcttttcctcaggttgctgttgatcatcatcatgagaatattggtctgtgaccgtagaagaaagtggctggtgggtgagaggatcaatccccattttcttcaacttctttttgatgtgagtattccagtggtttttaatctcattgtctgttcttccagggagatgagatgcaatcttagaccatctgcaattattatatgtataaacagtaattaattaattaattaattaaagatgtaaaaaagtgaaaaggtttttgactttccggcctacctttaaaagtcctgaaattattattctttatttattttacttattacttgataataaaaaaaggtaatatatatatatgtatatggtaatgggacttggtcggtctaatatatccatttgaaattaattaattaatcaagggagaaaaattaatgtagaaaaaatcttgatgaattaaaaaagaaaaaatacgagctggtcaccctataatagaataatacattatttagaagtttgggttggaaatcgtcctatttttttaagaattaaacaaaagaaaaaaggaaaaatatataccggttgcctagttgggcatgaagatcaatgaccatttgctcttcgtaatcagataaaagacctctcttcaaatctgggcgaagataattggtccatctcagcctacaactttttccacaccttagtaatcctgaaaaaataataatgataaaaatcacgcccccatataatcattaatttgattctctttgtccttctcccttttgcatatttttcatttttacagtgaactttttttctcttttccaagcacactttgttcccactttaataaacaaaaaacaataaaaacaagaagtttataatttagtgtaagggaaaaaactgaaccgaaaagctatacatgagtaacattaacttggaatccttcaacttccagaaaattgccaatattatttatgtgtatgtgactaaaatgtcaatgaaaaaaagaaaagagataatatatatatatatatatatatatatactacaatgaatagagacct

SEQ ID NO: 382892 - DNA, 2840 bp, Cannabis indica
tcatcaatattgaaattgtctcaaataaactctttatccatcgtctattagaaaattttagttccaccacataaagattctttgaaaggtgaggtttgtcaaatatcttaaaactcctttggtcgtgccaactacaagtcctctaacactctcacattgttaccctcacccactccacctatagccatttataataatttccgtaccccatatcaagcttctccaaataaaagaagtatggttcccacatttggcttgtaagacatctttttttggaaaataacatgctttcgggaccttactacaaaggctggatgggaaacaaatgcaatttgcttagcaagcaaagcttgattaaataactccaaattttgaaatcccaagccatcattctcctttggtttacataaatgagaccacttacaccaatgcactttgtcatctttctttgaagagccccaccaaaatctcgctaccatctttaaaggttattaattgtgctcttcggtagtctaaagcaactcatggtgtatgttggaatggcttgaactatagccctgatgagaacttcctttccctccatgaaaaacattgagcctttccacccccgtagcttgttccacaccgaatatttaacgacattaaaaacctgcattttatttcgcccaacaaatgatggtagacttagatacttcccatgattatcaactactctcatccccatcaaatcgacccaaatctgccttctcagcctctcccactaacttcccagaacaaatttttgatttaaggaaattaacgacctgacctaaagcggttgaatatttctctaacagtgctcgaaacctttgacaatcaatgtaatgaccgcttagtttttattatgagtaattagtagataaattagggacttatattgtattaaatatgatatatgtgaaatttttttatttttatattttatgcccgttaacagtggaatgcgatgtatgacatgtatagtcacttagatataatttggtatcctagaaatattggagcattatagttagacaattggattgtcgaaaatattcgaggtttggattaggactattttactccttggtgtgttgtttacttcttggttatgaaagagtaaaaatgtcattttaccttaggttattattatcgttattttgagtaagattttaataatcttaagtttagtatttaatggtataagctgaataaaatatgatttttttattccaaataacacttagcatttttcaccaaaaaatagaattctaagcccccctctctctctcctagggttggctacaccaagggctaaggggattcaagtttttcttagcaattcaaggagttttaggtaagaaattcatagaatttagaagataaaagctcaaggtaagcttgttctttttcttctctttgaattttaagttttgagattaggtttttcatacaaaattctaaactgggttactgtatgaattgttggggtttagttttgttttcttgggttagtattaagttatttgagctgttttatgctggttttgactgttgtggttgacaaagaccaaggtttgagcttttaagctcaaactgtttaatggtagatttgattcggggtgtttttttttccttgtgatttctagttttattatgtttattgtggcttaattaagtattctggaaaatttggtgcaatttagggaaaatttgagttcattttgaagtttttagggtttctacaaagaaccggttaaccagttcagtataaccgattgaccgtttccctaggtaggaccctaggaattgatttattgttttgggaatccaatttaccagttttagcagttttagaactctagttttttgtgttttatcgatatttagggtattgacacgctatctaccaataaagaaacttttaattttaaatttaagtctccgagaagtgatttagcgtatcacttatcagttttacgaatattgtgacttaggggcctgtaaattatcgaagagcagtatccactcagattgaccggtacacttgaatttagaatcaaggtaaaattagtatattggtacgatctttagtatattggtccaacattataagttttctagtagcactaaccaacgcactcaagcttttttttccccagtattgaaggcccagatcatgaagacggattcataaaggaattgatttgataagtttcaccgcatttagatttgtagatcataaccttacaataacaggcttcctgtcaaattgcagaacacctccgaaacttgatccctagtagcctcatcattaaacttgacaattgttaaacccattgccattttgataatccgagctattctaagatgtccccgaattctcttaatgaacccctcaaacactggcataggtggattttcaccaagaaccatacagatcacagccaagctccaattcgcaacctgcattttgacctcctctacgtcaacttgagaaatcttaactccatgcttgattaatggttctgtttaagcaagcattggatctcgataggtcatattgtcctttgcagaagacttccaatgattctttgctgattcttgaaatgcatcttgttcttgctttgattcaatctctttctctacctcctctgccaaattcatagtcatttgtgaaactccgtattttaatattctcagtttaattatttaattaagtgattaattaaatgcggaataatgaaactggtactgaaaataatttttctgtagttatagaatacaactttgtaactccagagaaacccagaaaaacaaac

SEQ ID NO: 382893 - DNA, 823 bp, Cannabis indica
cttctccttctcactctgtgcaacacgcaacatctctctccttctttctttccttctttcacactcacttaaacctatcatcaccaccactaaccaagctccgaccgccaccctctagtcacccttcgaccacacgtgctgatattgctctatgaccatttgataaggatcccacaccccaagtttggttgaaatcggaataaggacgctaccatatgaaagctctgaagttttgccgtcaaaacattgaagtgacatttcggccaactccgggcaccattaaaagaatagttggtacctttagaatcaacaccgcgagaagaacatcgcccactaagtcatttttgtcaacacactagttttttatgagatttttgtatctttgtccttttgggagcttttttggtgagaccagttattgtttgggctaacgatttgtacagctgtgatctactcgtcaagaggattgctttgatatatacattgttaaaatccagcaccgttcctagagcactgatatcgactgacgtaaactgccatcacgtgcagctaagatgaaattttgactttctttaaatggcatcgtgttatatattgttgggttcagtttaaagagtcgattgtaatgatgataattatttattgacttgaagagtgtaggaaaaataacttttagagtgtctaagctatttggtgttgggttttgtgtcctaaataaaccccatttcaatataatcagatttactaattaataaaagataaaaaatcgtattttatgttgcatggttcacatgatttatttcatgattatgtttaatgtata

SEQ ID NO: 382894 - DNA, 1177 bp, Cannabis indica
attattgatggttaacttcaaaatctacaataaatgcaatcaacattacctttagttgctagttatataataaatgataacttaaatctaattaattagttagttataactagtatgtatataatactacttacatatacaaatataattggtagtagtaataattatacataatgtgcaattatgatatttacatcaaatctatcatgttctctttttatttttacactttaaaacagtttttttttttacatttttacggaattctacatagaaactcttattacaattagcgctgcaacctaaattgcaacaaaaatcgtacagaaacccctactgcaactagcgttgcaaccactttaaaaactcaaaccataaatttgaaaaaaaaattaaaaaaaatagtataagaagtaattctcctacaatatacatatcaccttctccgtcttcaattgtttcattttgcaaggctttggccaaatcgatcaaaaccaatcatcaatcaataaaaggttgcaaatttgagagtaagaaaataaaaagtatacaaaactatcttattaggaaataagaatgatatcaaagtattaacaactcaactcatagttctcataactacatgatacataaaactcattaccttttcagcttgataaaactcatgatactaaatgatacaaaaacaaatcactaaacttaataattatagtgttaaaaagaaaaaaaaactcataattatagatacatataattttcaatctttcaacacttaatcctacatcaaataataagttctcattcctaataaatacattttatatataataaatttatataaaaaatatacaaaataatatggaaagattggtttatacctcaacagaagcttaaagcccaccacaccaccgattgcttccaccgttggcgattattcactagaaaaaaaaaattacttctgttgacaagcttttgcgccaacaaaaggtacctaaacccagtggcagagccagctcaacattttagtgggggaaatttttttttttttttgaaacattaataaaaaaatataatttttattaaaaaaaatgcaaagtgagaataaaaataaatatacgtgaaaataaaagtgaaaaatataaattttatgggaataaatataaaaatatgtaaggac

SEQ ID NO: 382895 - DNA, 2365 bp, Cannabis indica
agaccacttttgtgacatgatgttgtacgtatttaggaaataatgtaaaagacatgataattaatgatctaatttcgacattaatctttgtttattaaggaaaactcagtcattattctacgcatgcacagaagcaccatacaaaagattacaacatatgcatgatgatcatatatatataaatatataaccaaaacgacagtgagattatacgcaagggaagctaattaacccacaattgacaagaaaagttttcctctcatattattacgacaagtcgtattaattacatgaccgcatccagctggaacagtccatttccccaaggcctttggttgtaacagtccaaattatttccgtacccaatccggaatatatcacagtacctcttaaagaacccaattcggtcttccacctgatcgttccggcctttcccgcactcaagcccgccgttgatgatgttcgtcgtcacaccgtaaccggggactctaccggcggcctgatcagccccggagggattccatctcccggtgatgacgtcatggcaggatggcttcggtgactgtggggtcatccagaaccagattgctgccttgaaagaaattacagggtccgtagctacaaggtctggattgttgagtaggtccactccaatggctcttccacattgtccgtagttgtagttcctgtttaattagttttaaatttaattaaactaaaccataccaacatgacacttaattacttgcatattaaaaaattgaaggatgagttagttgatcgatcacttgatttaaagaataaattagtttctaaatttcattttatggaaattattggtattaccatgaaagttgcattggaccacggccatagtattgccttccgggagcacaagggtaagtagcgtcagatctacagtaatcgcttggtggatttcgctccctcacgaagcagtatccccaagaatgtgggccatcaggtgccgttggccatccacctatatatatatataacataacatcatcattcatcaataaatttacataacatatacataaacagggtgaagctgtaatacataatgctcactctataaattcttataaaaatacttcattttaaaaaatttctaatttttttttagtaaaaaaaattattttaaattaaaactaatttttttttttaaaaaaatttattatcatattcttaaaaaaaatatacctattaaataaaaataaaataaattttaaatattaagataaaaaaattaaaacaaaaattagataaagtaattaaaaaaaaattatagggtgcaagtactttccataataaaatgacattttatattttaactttatttgctaattcaaatcctaaaaattacattttaattaaggtataggatatgaaatctcaaaaaacaaatatgtattttgcttagtctaagaaaattaaagtatagagttttgtcctgaccaattaaactttaaaatgattttaattactattacaccaaattataactttacttaatattatttgacccaaaaaaaaaaatatatttgcataaaataaaaaaaaaaaaaattatttagggaaaacttccaaataagttaagatcggtcttaatttcaagtaagattactctcttgtcttggtttcatatagcttgcccgtgtagatagatattcatgtataggaccgatcaaattaatgtgttctagttcataaactagcagtatcttatctctgtttagaacattgttataatttaataattaaactgacctgtagtttcgtgggaagtttgggctaagaaagcagcgatctcccttttcttagttgcatcatcaccagtgttgccgaagccaggaaaagctttagcagcggagatgaaagcgtcgtaagtgtaaaagtttctagcaggacaagcaccatcgttacgatgcttaagcatattatcaaaagtggcccttgaaattagaccaccaaggcccccacccccaggacttgatccgcattggctttggcatttatcgttgcagtaatcgggtgtgttgccacaccacccaaattcgctgcagcacagcccccctggacacagagcacccccagcttgtcttccacattgctctgctgaccctccttctatggtcaacaacagcagggacacaattgtcaatgcacaaatcttcatctctatcttgtactatatatataaatagcctttcttggtatttaatttggttgatctttgagtagggggtgcttgtttatatatatatgtagagtgagacagatatgtggaagagtgaacctttggttttggtttaattttttattatttattaaataaataaat

SEQ ID NO: 382896 - DNA, 1649 bp, Cannabis indica
tagtatatatatatgtggcaattttattggtcaatcttattcccataactcgaatacgtgtacataacgaattaattgtcaaattattattttataccttattgctttcattagtaaatattcattaagacttggcaagaactcatgcatattttccaagaaagtttacaacaagaatttattatgccattaaattataaaacgaaaataacaaacatcaaattttaatgaagaaaaacacttgttgaatctaacaaaccatagcgggtggtgctggctgggttaggtaagcacatatctttattctatgttgtttgtttcacaatcacatctctaaaatagatttaacaaattagtcaactagcttctgtgattttctattgtttgttataatttacttcatttctgttaaatgaaatatttataatttttattagtagccagctgctagcaactatttccttctcacctatttgatcatcaaaatttcttcttcttcctcctcttaaccattttgagctgtatctttgtgaatgaattcctttgtttatctcgtatatttctttctcttcattactttcgtcccaaactatgtaaaatgcttcaatatcagtgccaacgactgtgcccctttcgattgcgggaaattcaaagatctccactacccttttcgtaaaattggcgagcccaatttctgtggacacccgggattctctctcgactgccaatcagatgacgtccagatactgttcgaggaaatgtcccaacggtttcggatcctggatatcaacccgaaaggccggactctcaagattgccagaatggatatatctgattcaatatgccccgagaaattctccaacaccagtttgaattcaagtatcttcaattacacggaaaaagataaaatggccgctttgttatacgagtgtgatgagggtgattttcctttcttcataagctttccttgcactgtaaataacatatctacgtcctcttactttgtgatggaaacagaattggactctccaatttttccatcttgcaatgttagtgttatggttcctgttatggagaagtcgtttaaaacgggttttatgagtcaaaagctcaaagtggatgacgttatggaagaagggtttgaagttgggtggagctccatgggagaagacaaatgtgaggattgtattttgtcgagtggaaaatgtggatttgattttagtgtgaatgagttcagatgtttctgtcctgatgataatgcttatgcattaagctgtccaagcaacactatttctatcccacagcagccaccaccaccaccaccaccaccacaactggtcgtccccactattgataatattgagcctattgagcctgcaccatctgaaactgcaggaaattcaccaagtaagtacataattttttttattattatttttatctctcttcttgatcttatagttaatgccttttatttatttgttgttctttttcggcatgtgtagttgtagtaaattctatgattttagatagttgtgtagcggagaaaatggttgaaacttgaaagtacatacattgaatcccatagcggagaaaatggttgacttgaaaatatatacattgaatcccatagcggagaaaatggttga

SEQ ID NO: 382897 - DNA, 1996 bp, Cannabis indica
aaacacattacacaaactaataagctaaaattactagcaatgctagggaattttacctttggaatcaatgtaataatagtttcattaatagaaggagtcgagccaatcccatcaatgaacccaaggcacacatgatagaattttggctagcaacatttcaatatttatgataaaatcctaccctcataccgtcatccctaggctcatgataggatgcatttggaataaagccacacacacatctgcgtcagtaaaagacctcatcaacgcattattcaactcttcagttacccagacaggaacaaaatttaagacatgattcatagtttctaagaaaggtttgagagaagtaaacaacttcttaaaatattggtgaagcaaacaagcaataccttggtgattatcaacatatttgtaccaaaagcaccatcaatcaaattcttgtttctgcgatgagtagcactttggtgaaggaaagaagtgtttttgtcacccaatttcatcaacaaattgttagccctcgaagcccaatacttctcatccttattcataagaacatcaagctcatttttcttcttctgataagttggccacaaaacattgttaagatcagaatttaggtaatccaactcctccttcttcatgatagctaaatgtgttcgtttttacactctcccattccaatctttgaggacatcagtctcacaaattcattcttggactctgccaaggccaattccaattactagtaataagatcacgaccattcaatttattcacccaattaaatataaaaatgaaaatgaaacttagttataggagtaacccgaccttcattatgtcgcaaaagacgagtcaagagaggcctatgatccgagccccaaaactttcaaatgagaaacaaaagaatttggggacaaagcatgcaaatcaaaattatatacatcatacgattcaattgctcttaaggaatataaccatcattattcttattacaccaagtaaaacgagacccttcaaaacccatatcaaaaagactagtttttgtaataagagctctacggagcctgtccaaacacacttgagtccgcaaagatccccactttttcatacatggagaatttcattcatgtcaccacctctcacccaaggccccccaaaattttctgctaatatatttccatcaaacacaaaaaaatggttatgaagacacattagactgcctataaaacctcgtaaatctccaccacatgtaactgcaccataacatcaatataacttctagagtaccccttcaaaactacgcccacattatcactccaaaataaacacaaactaccactacgacccactttctccaccataagatttccaacaaaacccaatcaaacccgcataatttctaacatcaaataatacacaattatctcaaaaagaaacacaagatttagcgagaattctttaacatgtgaatgtaaaatttaaaatgtctggtcatttcttaaaccttgaacgtttctagataaacaaatcataatgatcggtggctttactccatagggtcaccatcttgaaattacaacccccatcaatcccaacctccactggtaaaggagtttaaaccaccaaacccacatgaacgcacgattaggagctactaacagaggatataatagctccttcgttcaacgttttataagcattttttttgaaagattctaaaaatgttttacaaaatgattttctaattacattatttttttaatgaatcagttaaatttttcattactccaaaaatcactttttaatttcattattatgattttgttcataatatatatttattaaagggaaatttgaaaaactatccttaaaaatctctaaaattattttcctaaatgtatacctattaaaattgcccatatatgactccatttgatttttccccataatacccctcccatttaaaaaacaaatcccaatcaaaaatcaaaaa

SEQ ID NO: 382898 - DNA, 1601 bp, Cannabis indica
tatatatatatgtaatataataattatttattctgagcataaagcctaattatgagtcggttaatgagtctaattcaaaaagcttagacttaatcaagtttatgatgaggcaaacacccttggcccacccatgttactttctttacttattgctcttatatatatctttcgttcctgtaacgaattccccaagcttttctaatttgctttaatttttctgtcactacaaccttgtttttttttatacatatatattaattttgtgagttataattttgttctttgaactttgatgtgtactaaattatgtattttaaatttttgaggttgttaaaaattattctcataaattattaggatggttggattcaatcagaatttttatccaattcaatttaattttactaacacaacgaatatctatatatactaaatagtgccccaaaaatttaatatgtactaaattatgttcctaaaaattttattcacattagatttttgctaataaaatttaacaaaaattattaaatctaacaattttaatagtaagagaaaatttttaacggtttgaaaagtttaaaaaatataatttggtaaatatataaaagttcgggggcaaaaatgaaaactattaataatatatataagtcattttaattaaaaccattaaaatttattaatgatgtcattacattaagaaaaaaaaaacaatatatctcttatatattgacccacatgatgacctcgtccttttttaaagaattaaagaaacaaaatgcaacataatatatatttaacataagatacaaaagtaatctttatttttgtctgattgttcccttgggaattttcatcagacccaaacgacaaatttaattaataatatattttgagagttaattaagcaaatgcatcttttctaaaaagaaaaattaatttatatcttgccacgaagctatatatgatcaaacagatatattaactttctgttatatctcacctaattaatggctgatattatataagctagaaaattgtgtgtatattatatattaattcaagaaagaagtttgtttatatacttagtatctttcaaatgagactgaattataatctaaaacagataatgaaatactcaaagtgaatatgaatcaagatcttctgtaaaaaaaaattgtgttttatagtgtattaaactaatcttattgtgacacattaattaatttgagcattttaaggagaaaaaaattgtatagataattaattttttaataaataaaagattagttgatgtgtcaaacttagattggtttaacacggtaagatacatagctttttaacaggagatcttaattcattaatactgcatttgtttgacgagaaggcatgattttagtgggatggtttgggatcacaaggatcgggtcgtgactaggattacataactgtggattgagtaagttcttttaaagattattgaagccgtggctcttaaaaaagtgttatcatagttgaagcataatttttcaggtgttagttatatcgaatttaatttgtctgatattagtacaagtttagaaatttgaatattttgtcatcca

SEQ ID NO: 382899 - DNA, 2035 bp, Cannabis indica
aataaaaaaaaaaaaaaagtcatgaatttatatgagtggaaattacaattatttttgtaggttacactatttaaggccatgtgttcttgattggactcctatttattaaataattaattgcactttatgtttcttaaaataatatgaaattgtactctaagtctaatttttaaaatacattttttctaatataatcaacttgacaagcacaaatatgataccaaaaagtgcctatacttctaaggaataataataaatttgcagcacttaaaatatataattaatgatcatgaatcttgatatcatatccttttatttctattattaattttagttatcattttcattccatggtgatattttatcacttattaaacaaaaaaaagaatgttgatctcataatatatatatgtgtgaaggtaatattattcaacacataacataaaaattataatatgactaatttaatttcttactccataaagaagaaacatacatttaaaaactgctgacaagagactgatgacatgatcatatccaataaaacaaacttacttactaataaaaaacacacttgaaattaaactgaaaggacaaatgatcattgtcttaattgatccaaaaacaacaaattcacaccctattctaccaccaggcccggcccaccaaactcaggatccaaaatcaatatataattcggtgtcacttcaatgtaccacaataggagttcctttaaaatcagagttattttggattaaatagagaaacgcatctaaagtgtcatcattttcaatctcgatatatctgtgtttatagtctgaatcaatttttgaatcgtacgagattcgcattctacttttcctttgggaatccaatccaagctcattacatattagattaacaaaccaatcgtatggaatgtactcatcttcatcaaacaagattatcttaatcttgtaatgcaaataactttcattctcagcccatgatccattgtacaaaatatgaataggtatcttcatctgcattattattattattcaatatttataaatgatatttgttacaacatatatgatatatataaatatataacaaaattaaagtatggttttttgacgtatattaaaaataaattatagtatggtttttccacttattaaaaaacaaacagagacaccacggcctttacaacacaaaaaattatacaaataatgtaaatattatttatatacatacgtgactcatgaggatcgaatgaataatcttatgaattataaataataaacatgtttatatacatataactacacttacaatggagaagagaggaacgtcggagaagaatgttcgatgattgatatattgtgtgacttttttggtttctctatagctagggtttgtgtaatatacatatatatatatatataaaagtaatttttttttttttttaaaaaggaaacccaatagaccatagaaattgatattggaaaagaatatactattaaagaccatttattatacgtacgtagtaatcgaaggtagatcaatagtcaatactcagtaatcagtatagcttttcttcatcaatatccattaaaaaaagttctcttaatttaaagaatattatttttaaattaattgttacattttgaggaaaatccatttaagtattattgttatattcacacatttattatgatcagtgttgcgataatttgcacacgcaagtgtacgtatcgtttaaagtagtagactcactaggagtgaggtcgatcccacagggagtgtagttaagtacgttaaaattaaacttttacttctatttggttaaataaaaaataaagaaagaattaagaataagaaactagtaagaagcaattatacaagaaaattgaaagttaataaaaactagggtttcgatttcaattgtttttattggatatggcctaatatgattattttcctaatattaatttctatgcaatagcaggtttactaaggtaatttatagtcttctcagatatataaatct

SEQ ID NO: 382900 - DNA, 1551 bp, Cannabis indica
tatatctctacttttacgtttttttttttttttttccaaaactgaaatgacatatttcattaacaattgtcatttggtaaaattatatttttttagcacaataaatgttgctaattaattacaattttctattttaatttaatttttctataaaaacatacgaaaaatatatattttctttttacactggtattcttatttatcttttactgagttttttttttttttaaatagttaacaatactaaatttattgtacaaagtcgggtaatcccaatcaccaaactttcaaaatgtctaagaaaagctaaatagcaaatttatgaccaataccattagcaatacgattacaaaacatacttaaacatagtagaacttaaggatatcaaaaattattattaaagctgtaaattattcaaaacttttaaattctttaccgaaaataatgttgtaattacccaaaaaaaaatcaccttcaaatttttttaagatcaaatgttaagatattatatcactattggaataaataagtattgaactccaaatattttaatttagtcactaaagtatcattagattacaaaaaattgttacttaatagcaatataaaaatttattcgtaaaatcattagatgtgtacgtggaaatttggcttaattaattatgttacatatttatggggcagaagagtatggtattcattattatttccttctcttttatctttttcctccttaaaatgctacgatcataggttgccatattttcctatgaacattgaacatcatttacttttatttagatgaatgaatgagtggatacttttatagagatgtacatgaatgttcatggcccacccataaggtatcatgttacacccatcaatatgacacgtgtacaatcagactcagtacatgggtaggaaattgcccatgagagctttgttattagttttgctactttcaactatcaaatacatacatttttttaagattagtaagaatttaagtatgagtatgggcaacacataaaaatacatgtcgatcttaagggaaatagtctctcttattaagactactactaagcatggcatttgagatcttttattatttacacctgctattactataatatacaccatatgaaataagaaaaaagaaaaatagaattagaaatacaccgatgatttttttttttttttaaaaaatgaatttggtattttgactttttggtattttctctagtgtgatcactacttgacaaattttagttttattatgaagttttcctttttcaaatagaataacaataataagatattgtaagagttgataaccttaggggtcattttaggcactacatgttggcattgaatgttaaatgatattttaagagttgagctaagatgggtgagagttgacttgtctcttcaatagggtgttgtggatattgtcctacatagaataaatagtagagaattgagccatatataagaacatgtgctactctactcatggccaattagtttgagatggaatcccatgattctcaa

SEQ ID NO: 382901 - DNA, 2705 bp, Cannabis indica
actttgtggctttagtacccaaaacaaggcacttcctcacaaaacaactcaaaattatcattgcttctaaatccctcccaagaactaaattactccatgcccagaccattacattgggtttgttgtcctcttctttcacatcaaattttgctaagtcttatgctttgtgtggtcatgttgtttatgcccgcaaactgttcgatgaattgtctgaccgaagctctttgttgtttaacgttgtcataagaatgtatactcaaaagggtatgtactatgatgctcttaaagtgtttggtgagatgattactgttggagagtgtgttcctgataactttacttacccttttgttgctaaagtatgtggcgagttgtcgttgctcgaggttggtttcgttgttcatggacgggcattggttgctggttatgagtcagattcttatgtccaaaacacccttgtagcaatgtacatgaattgtggggatacagaaacagctcaaaggactttcatggcgatgaaggaacgaacggtggtgtcttggaataccatgattagtgggaattttcgtaatggatttgctgaggaagcattggttatctttgaatggatgttgaatgagggtgttgagcctgattgtgccactgttgtttcagtgttgccagcttgtagttgcactaaaaatttggttttgggaagaaaagttcatgcctttgtggaagagaagggattggagaagaagaatataacaacatccaatgctttagtggatatgtatgcaaaatgtggtgaaatgagtgaagcaagattagtttttgataagattagtaagagggatgttgtgacatggacaagtatgatcaatggctacattttgaatggtgatttaagaagtgggttggaactttttgtactgatgcacaatgaaggagtaaaacccaatgctgtgactatagcttctcttctttcagcttgtgctactctgtctttttcgagacatggccggtctttgcacggttgggcattgaggcagaaacttgagtctgatgtaattgtagagactgccttgattgacatgtatgcaaaatgtaagtatgtaaatcacagctttcaggtttttgcaaagacttcaagaaagaaaatggttccatggagtgccattatctctggatttagttacaatgggctagctagagaagcaattgagcttttcaaacagatgagaatggaaggtgtacaaacacatgaggcaacactgaatggtcttcttccagcatactcgattctagcagattttcgtcaagcaatgaatatacattcttaccttattcgagctggttttctttcaagcattgaagttgccactagtttgattgatgtgtattcaaaagcagggagtttagaatcttctcacaagatgtttagcgaaatccccgcgaaggagaaggacataatcgcatggagcgctataattgcagggtgtggaatgcacggccaaggtgaaattgctgtctcatttttcaatcagatggttcaatctggtgtgagaccaaatgaagttactttcacttctgttttgcatgcttgtagtcatgccgggttggttgatgaagggctgcacttgttcaaatccatgtttgaaactaaactagtgaaaccgaacaccgatcattacacatgtatcgttgatcttcttggtcgttcgggtcgattagaagaggcttatgatctaatcaaaagcatgacattcatgcctaaccatgctatatggggtgcattgcttggtgcttgtgttatacatgagaatgttgaaattggagagatagctgcaaagtggttgtttgagcttgaacccgaaaatacaggaaattatgtactaatggcgaaaatttattctgcattaggtaggtggaaggatgcagaaaacttgagactaattatgagtgagattggtttaagaaaatcaccagctcatagtttgattgaacttagaaatatgtgaattgatttttggtaacttagttagttaattataggcatatatttcttttgtattttcattaagaatatacatgattaaacagttttgaaatctcttatctcttgagtttcacatttgtatttgaattttactacagcaaccaaaacaatagtattgcactattacagagaaatttggcaccagaattttatttttcctaactaaaataaatgaatttcatatatatctttttctcttttcaataagatggctcaagccaaaaaatgattctcaactcccaacaaaaaatattttagagagaatgtgcataattgaaaattaataaatattatataaaataaaggcgaggccgtgcgtgagaaaatagggacctaaggcgaagcaaaattatggagcccttaatcacttaatataaaattttgtagggaaaattatgggggtcttcataaattttgtaggtgtctcattgtaataaaaaagtttagtttagtggaaaatgtcctattgtaatatagaatttatggtcttttcttttcattttaatggagaataaaattaaaataaaataatgtagtagctgagattcaaatttacagtccacaaaggactttcaacaagtgtagttgccactatattaattgaatattttattttgtattattatttattaagttttattatataaaaaagaattgacttatttttttg

SEQ ID NO: 382902 - DNA, 1714 bp, Cannabis indica
gggggggggggctgggtagctctactaagtaggtagataaatccttcctaatctaatgttctttttgcaattgttgcaatgccagtcgaggtgatagtaatatggaccttcagcctctgtaatcaattcctcatctttggcatcttgctcctctttagagaaagtgattggctccactccaaaagttcaataattgactttattttcttcaccccttttgaggatgacaacccctgttctgccttgtcttcatgatcaattttttaggcttctcctatttcttcaatccctttgccatggcgccaacaaaagctgagagaatagaagagagaaaaatcttaaccaacacaattttgttttcttttatatttcttaatttttattatcatttcaaaattttaagatttattgtttatttaagttttattttaaatctattaaaatagttttattttttaaaatatttataagttagaccaattagaagttgacatatttcattctactcaactacttaatagacctaacaaatgagaaataacaaaattactacacggggtaccttttttcgcttacaaaaagattgggtttttggtggttacaaactctaaacattaggtatttaggctgccaataaactttaaatatatatttttatttttgaaagaatatctatggatgacaaattaaaaaacttatatttatggattcaattaatatttttatttcgtgttaatatattcgtgattttatctcgcgcttttgcgcttattatgtcgtgttgtgcttatttttcgtatagtgcctcaagccttttcatgtcgtactaggcccaaactcatattttctcgcaacgtttcaggctcatgtcacttggacttgtcccaaaaagcccaacccaaatgtacaactccacaatgttacacgtatattcaaaacataacatttaattataattggaattctgttaatgtttgagaaacattccaatacacacatgagaggatatactcaaaagtaggagtgacattggatctccttaacgaagagtcctttttggttcaaagaattaattcaaagaaccattaaaaatgagattaaatttggagttctaacaatcatgaccagctctacaaatttccttggtaagttaaaagcatacaataattcttcaataaagtcccactcaatcatgtcatatgctttctttaagtcaaacttgatcatatcttgattataacatttaacaataaatttaacataaaatcatatccccatttttaaaaccttaaaaattttgatatttgcctcctatctctatttaacaaacttatagtaacttagtaaggctcttacttcataaaaatttattcatttttcactaaagttatacttaaatggaaaagtttttgggtatagtgaagagagaaattggtaggatttgggaagagagagtaggattataagggggtattttaagatttaggcaaaaatgtgatcattttttagagtgtcaaaatattaagtcttttttaagttctgtattaatttatgcattaattatcaaaattccttaagatgcaatagctatatactaaattaataatatatattattatttcattttgttatagttggagagagcagcatttattttagttagtgggtacattacaactctcaaaaatttttttagtctaaaaaaaaaaaaaaa

SEQ ID NO: 382903 - DNA, 2493 bp, Cannabis indica
gatttttccagcgacaatgccaactctaacgattttttcgacactgattgctactccggtgattttttggtaccggcaggaaactccgcgtaactttttcaggattagtgataaataaaactacctaaacaaataaaaacattaaatatgggatttgaatacctaattaacatatatatggcatatcaaataccataaaaagacctaaaaataaaaaaaataaaaaaaaaataccatataaattggtcaaacttaaatgtgccatatttatcataagaacttataaaatcccataataagtgttatttcctcttgtattttcttacttaacgttggcgttattttttttactatttttattactatttttattattaatttaaaatcttacttctcactacaataattggtttctactttctatatgttccgcgacgaaattggtttcttatgtatttgctaacaattactataaattgggtttttttttagttttaactaagaaaagtaacatattacaaaaatacttccaactggccaaataagtaaatatacagccaaataaaaaaaattacacaaatgccacttacacacaccttcaacccagaatccatgtttcctgggcaaccatcgcccaaccacgcagcaacttaatgcaactgaaacaaaaattcaaccagaaagaaaaccattattaattttggtgacttcacctgagaagacaaccagaatcaatcaaaacaagggctgtttcgaattcatgaaaaaaaaaagtatagaaaaactactacgaaactaaaattcaatcggaaatgcagatctcaaaaagttgaagtagagttcccaaacaatctaactcaagtataatctaaaaaaattacatcaatgctatagtaaaatatttattctggtaatttttgttgttttccaaatttctaatggtaaatttgttcatattgaatcatgaagagaaatgtagagagttacatacgtggaaacagtgttctgatttttaatgtttcataatagttgcattatagttgcataaatattttgctaacggttatttcgtttgattgaaactttcgtttgatacaaccttcggccaaccacccaacaactttcgtctgattgaaacattcatctgatgcaaccttcgatcaaccacccaacaactttcgtttgatgcaacctttggccaaccacctagcaaccacccaacaaccatcatctgattatgtaagtgatagtataagaggtattttggtgattaaaagcacataagatataaatattgtctacaccttatggtgatatttttataaataaagtatcaatttatatttttcatgtaataattcctaaattacaggtaagaagaaaataacaataaattatgttaagaaattgtccttaaaaaaagtattttaatttatttttcactttcttaataattgaaataaatttgatattatttttattatcacaaaagattaaggattattaatgggtaaacaataactaatctctaatctaaattttataaaaaaaaaatccaacttgaatttttgttaagaccattgataaattgatattcgccttataaatatgtttattttttttaaaagaaagcatggttttattaacaaaataaatcaactgttacaggagcactaataaatttaggacaagcatcagttcaaacatgaactcctaacgaactagtaataaactttctcagtgtgtgggctacaccatttacatcatgcgaaatggcctaacacgaaccaccaccaatagcagctaggagataaacaatgtcatcaacaataggtctgaaaacaatattacaacttcgggagttaacccaatttcaaacacacatagaatcagcttcagcctttgacaccttaaaccccaaattggttacacaaagaagccacattcgaagagccagaagctccacaacctcaacctggaaatcatccacaccccaaatagcccaagctacccacacaatccctgcaccatctcgaatcacaccaccgaacccaacaaatccccaccctgaagtaatttgcggaatccgtagatagagagaaaaacccccaagacggaggcacccattggcgcataacagaccttatgttgggattttatgccataatcaaacccatttcaatgtaatctgatttgttatcaatagaagattagaaatcatttgtgtttacatgtagttttcatgtttatggtttaatgtgtacaaaatctgttaaattcagaacatatagttattcacaattacagtgatgtcaacacagtggaatgtaattgtgattatatgcttcaaaagataatgtcccttaattcatcagtgcactggatttatactgatgtgataatcagcgataaagtatacttacaccttagataagtgttacgttgtttccagaacattggcaaagtatgctagttttggatgtatggagtata

SEQ ID NO: 382904 - DNA, 5360 bp, Cannabis indica
actagcgactctagcgtgttcagctacaccatccgccaaaacattacagctacggctgataaaaaaaaacgacaaacctgaaactttttagtaagttaattattaagtaaaacacacgagctaccctccagtcagggactcaaactgctgttaaggcttgaactacgatcttcgagtctaagaggataggaacatctcgccaccctaagtcaattgtcctgttaagagcaagaagaatcgttgtaaattcagcttccaaagccgactgcgcctgaagcttttgcgatttgataaaccagaaaccgatggagatatcgacactaactgctgcaatgcctgcatccccattaatccacgaagcatcagtgaaaattacattgccaacctgcttgtcttgcacaccagggttcacaactgtctccaacttgtctaatgtattctttacttcaacacaacctcccctatttggtgtgaacaaatcttggtactccaaagcactcttttcaattcttaccaaggcagagagaatattaactgttgtattctgaatcaaaaatgcatttctctagtgccaaatttagagaaaatacagccagtgtaattaagcaaatcactcctactaacaccattgaaatgttcaaatagagtttccagcatactgatcaaattatctgctggagtgtcatcaattttcaaagacagtcttcctcaaaacaagatggctcttgagaaactacaatttcaaaacaagttagaagcactttcctcctcaattccacatatactccagactttatcttgcagaaagtgttgacgatttttggtagggattggctcattgagaattctccaaaataaaactgaatttcttcgatggatacccacatccaaaatccacttccaaatctttttttctggcgcaaacctccaagcgttttccacattataggcacctttaacagaaaacttacctctttgattattattccaaatgttaatgatacaatgtcccaactcagcaccaaacacctgtaaaattacatccacattccaatcattatctagcgagacatcccccagtgactgtattatgtaacctctgcccctaatactattcatcaattccacaaattcaggatactctaaccatggaacccaaggttagtgccaaaagttgattgattgacccgatgcaacaactgaaatggaacctttgaggatcgtttctctactttttagtatgcatctccattgatatgaatcgcagctcttctattttacacaccaaaaactctcgtgtttacaacatttttccagcaaacaagtgacccaatgtctatcttcttgagtggcaagactccaagccagctttgagaagagagctttgttcatatcttcacatcttcttaacccaatcctcctgaagccttaggctggcaaatttgatcccaggccttgagggccaagtatctatttttgtcaaccttccataatcaccaatactttctcatcaatgaatctagttcacgacaagtagacaatgagatctttgaagtggacatagcatagatcggcatcgatgatgtcacagtcttcattaaggttaaacgctcgacatacgaaaggagcttcatcttccacccttctagtttcttcatcaaactgtccttgagcctcatataatcctcctttttccttctcttgaagataaatggattacccaagtgtttctcttcaccacgcacttgatcaatattcaaagtacccaaaatatgatctttccttctacaacttagattctttgaaaagagaacactagatttaggcttactacaagattggcccaaccattactcataaaatgagatacactctatcagcttctttgctttcattggcacaggcaaaaaggattgtatcatcagcgaacatgaggtgagacactaggggggctgattgggcaatcttaattccatgaataaaacctctttcttccgccttacaaatgagtttagatagaacctcctggcaaaggagaaacaagaatggagaaatcggatccccttggcataaacctctctgaggaatcaactttttgagggacatccatttaaaagaacagaatacgatacactcgtaacacacgccattagcttcctgcatctttcatccaatccattagcacagaggactctatctagataaccccattccatttgatcattggccttgtgcatatcgagcttcaacgccataagacccccagaccccttttgtgccggatcttatggattatttcctgaataagtatagatgattctgctatccaccttccaagaataaaggcggattgaaacggggagaccaagtcattcatgaggggtctcaatctattagataagattttttcaataactttgtaagagaaattgcaaagacttatcggtcgaaattgatccacactcataggaaattccactttaggaatgaagcaaatgaaggtattattgagtttcggatgcatactgccacttgagaaaaattccttgactgtggcacaaagatttgaacccactacatcccaatatttacggaaaaaacaacctgaaaacctgtcaggccccggggccttgagaagatgcaagcaaaacactacttccttaatttctgcatatgagggaatattagcaaagttatcatttgaactggagtcaatccttttgacgaacaagtcttctaactcctgatcaatgtgcggccttaaggatgtggaaagctccaggaagtgcgagttaatgacttccgctatatgtttcttattcttccaaactcttccatctttattcttgattgcccaaatattatttcttcttttccttatgactgttgcagcatgaaagaatctagtatttctatcttccaaagagagccaagtctctttggatttttgtctacacatactctctaattttgaccaagaaaccgacagttgagcatgaattctcgaatcttcttctctgaaagcatctgtgataggatgattttggacccattcaagtcttttctccagatcttttatgtcgccttcgttaacccctttgagattcttcttccaggcttgaagagctttcctcgagttgtgaatattttggataaaggaagcagtagcattgacgcctgagaatgaccaagcattggcaatttccttcttacacaagtcctcccacgaccaagcttcaaagaaacgaaaaggtatgaaacccctagcagcaaataaatgagtatcaagaatgataggagcatgatccgaaatcgcaataggcaaattgatgacccctgcagaggcataatctagcaaccattcatgcgaacataaagctctatcgagtcgttctctaataagacctcccaaaaatctattattttgccaggtaaacttgttgataatgaaatgtaaaataacactaccagtgtcatcaaaaaaattccttagtcactttgtatcaacagaggacactttacggccccctaccttctccttttgactgcaaatgcaattcaaatctcctatcaacacccaaggaagctggcaatcagatagttcatcatccatactcttccaaaaggcctctttagtacctaaatatggggttccataaaccgcatataatttccagtataattgagtttggaaatcccacacagtagcttcgaaaaatccttcagcaaagaaattaacaaccaaattgatactattattccacatcaaacatgagctgcctgccaaaccattagcaccaacacactctactcttgtgaaacccaactttcgagataattcctccatgttactcttacttacttttgtttccatcaaaaaaacacaatccaacttgtacttattaacccaagccacgatagcttggggtgtcgggtctcttgcgaggccccgacaattccaagaaaggcatttcatagggctggggggcttgataagggctgcctcctcgcccatgagaaaatttttggagctttcgacatgaacttcaaccaaattaagagaatcaatgagatttttctgggtaccatcttcaacaacaggagctatatcacggctgtagctttcctctgtaaccgctactttagaacgagatcccttccatctacgtttgtcatttttcaaggatgaggaggaaactcctaagcccatctaaagggagtatgaggggcaggtgagaacttcgggagatcaggaacatcttgggaaacttccttaatgtttttagccgtatgttgaaggtaaggaatcaaggtgaggctagcttttcttttctttttggttgtgggcagtggtgaactaagttagagacatctattgggtcatggaagagactagggattggctcaaacttgtcaactggtgcagggcccattagttcctaagccaaaccaatttctataccataaatgggccaaggaaaatgggtgggttcaggatgcttgtgtggttgtcttgactggctaaattcaacatgggccttgtctaccatctggtcataggtgggcccaatatttgccataatagtggtaaggataccattatcagctgtgtttggaggggaccttgaagagaaattatttaatatatcattatttgataaagtactattattaccttgattaagtcttcgcagcacactaggagatactgaccttgctttccttccctttccaaggtgtctagaacctagagaattagaggccttgtgtccattgttattaaccgtcgagtgaacacttgtattatctaccactttgaaatttttccccaaaatagcacttggaccattgttgttcactttgatgattttccttgttggtttattgctagctgtctgatgcaggacctgatctctacaactttcattgacaggtcattttcccatagctttggatctcgagtcagccaccggaggtgctcttgccgatattatagtccggctcgctacttctctgaaaaaatctagctgattctgagtattaaaacagcataaaatagttgattctgccttcatccaaggtccataggcagggactgcagctccttgaggaggataagcataagcggttgaacgaaagcaagactttttgtcatgtccgaggtatccacagttataacaaagcgtcgacaacttaaagtactggaattgtatccattctttcctatccctcctaatatccagaaaaaaaccagatgttagttgatgagaggtatctaactcgacttgaaactttagaaaaccccttctaatgatggttcgcctgtaacaccctaactagcataggcgtattacgtgatt

SEQ ID NO: 382905 - DNA, 2538 bp, Cannabis indica
aaaactaaatttagttataaaaaaataataaaataaaaaaactaataaaaaatttttaaaaataaaaagtatattacattttatggcgcgtggacacaaaggaaaggaggagcgttgaaatttagaaggtttttttttttttttttttttttagttattaaaactaagactgctaaactcgtgaaatagaagtttgacagcgtgggatgagagatttagtattttagttagtttttttttctttactaagaaatagtatttagtagttgagccacgtaatcatgtaacacgagttttaagattagaaatgatgacgtggcgaccacaggcgataaaggacagagagagagagagagagagagagaacacgctatggatgagcatttaacgggcggtggatgacttaaggtagaccaaaagtatgtaacgtatctgacccgttttgtacaacaataaaactttcaccaatcatatctcaccacgtcatcactttccactagacaataatgtcctcacatgtcaacccctaaattaccaaaatatccttaatgaatataagattgagaatttggtcagtagtagaaagaaatgtgtgtgagtaaatgagcagtgtgtgagctataaagagcttatttcattacctcaacaccttcctcctctgccttataaccttcttctatcctcttcaacttttttttctggttttagagagagaaagatgggaaattgtcaagccattgatgcagcaacactagtgatacaacacccaaatgggaaagtagagaaattgtactgtcctgttagtgctagtgagataatgaagactaacccaggtcactatgttgctctactcatctccaccactttgtgtcccacaaaaccaaccactgacaagaatactactactagtaccaccacaaccaccaccggcgccggaaccgggaccggcggtaacggctctgtcaggttgacacgcattaaacttctcaggccaactgatactcttgctcttggtcaagtttatagactcatcacaactcaaggttttgtttttttttttttattattttactataatgttgtgtttatttattttttttcttttggttcagttggtgggtttgggttataatttgttatttcgtttggtgcagaggttatgaaaggattatgggcaaagaaacaagcgaagttgaagagaaacttaagccagtcagatggagatatgagagtagagattgttggtagagaaaaaccaggttcagtgccaatggagaagaacaatcaggtgagttttcataaaaaaaaaaaaatcattatcttaatttctctagattgatgccttatggtgtttgtttaagcacagattagtttattttagttcttcattaaccccatcttgtgtgttttacttgaaattaaactcctgcatttatttgccataattaagtttctgactaattttaagaaggtttacacaataaacaagaaacttttattttggggtctaaatttaattattaatgaatcagcataatatcagggataataattattagtcctccttcctatagtaacggcttgataataaattaaaaaaaagatactaaaaaattaataatgaatgctccagctatctcaagttgtgctaatatattagtaaatgatgaataaaaagaatcaataatatgattgattgagtcagatattcctttacttactactattttcattcattcatgaatatgaaaagaaacaataccaaggtctgaatctgtgttttcaggtaataaaacatgagagacaccgaccaagatcagcatcatcaggaacagcctctgctattgccagcaagccaagaacatggcaaccctcattgcatagcatctcagaaggaggaactccaagcctacagatgagaagaaaccaaacaaccccttcttcttcttcttcttcttcttcttcaaatagttgaattgttaaaaaaggacgaataattttagtgtcgtttatcaatccaaggaagagactgtcatggcagatatttgcaggagaacacagaaagagtacttgagtacttatactgagtgagtgagtgagtgagagagagagagagatatgaagagggtcttaaaaactctgtgttgttgatgaggttgcagatctgagtgtgagttgaatagttaattgtgcataggaaagagtgtcattcagtttccaaaactaaaatatgaacaaaaaagactgaaatcaacactatactactggctttcatctcatacttggatggatttgttgtcctttctagtttgtgaaccttttcttttttgtgtgtatattttgagctatgattaattagagcattcaaactgtaatccagataggttactcactgctacaaatgtttaaagattgcaaattcaatcttgacaaaaatatagtaattcagattagagatgtgttttctaagtaacactgttgaaagatcataaaaaagtactgacttgagcaagtgtaattctctcttttttttttttt

SEQ ID NO: 382906 - DNA, 1197 bp, Cannabis indica
ccactgtataaaaccctgccagggcgtacaggccgcaccccaagagctcccccagaaagaacataccaaagagtatccgcattaacatccattccccaataatcctagatatatataattaattatttacaagaaaagaaaagaagaataacagtaatcatgatgagttagatatagaaaataactggtacgattcccgaatacacatcaggcccgtcaaagctgttgaaaatctggtgaggtctaggatttcttggatttctcgcaatatcatcgttcattaaaattataatattctctttctttaaaccacctttcagtaatatttgatacgcgtggcatacatcagcctgcattttcattaaacacacaaaaaaaaaacttgtttaataataaaactatatatatcataatagagatggtattagtactagtagtactacttctttcctatatatatatatataaaatatacctgaagagaatagtctctccagccattggagccggcaataagtactgcccatttagtattttcagatgttacaacagcagtaattaggcccaacaaacagatagccagccacaatgaacgagtaccattgaggatgcaggagctaaaagagagccaaatactcatgattttcagatatttaggtagtaatgtactagtaagtaataaggagagttgattcgtatatatatataagccaaagcagctacctacaaatcaggtagaggtaaaaaacttcaaagaaacgcgttggatttgtttttttcatcttaatataacgcattagagttatatgtatacgtagttcaatttcaattattatttttagtattattttctattatctggttttctgtataagggaaacctaaaaaatggtaacctaagaaattatttgccttaattaattctttcgtgatggttaagataatcaacttaattaattaacccatgaataataagtttcacattcacaggccttatttagtaaatattgatttataattacagtatgttcttattttgtcaagctatatgtttcccaataaagaaattcacctcctcatagtcaaaaataaataatacatgaaattaatacaaatctttgtaatagagtacttaaaagacacaaaacttcagttaccataatcgaaaaaggtttaagtgaactaaataatgactaa

SEQ ID NO: 382907 - DNA, 1175 bp, Cannabis indica
ttggacaagatgaaaaagaaaaacaagcaaatccaactcacatgaggattgttagaaaattgcaatacttgacaatcacaaggccaaatatttcctactcagtaaataaattgagtaaatttcttacaatacctcgagttactcacacgaatgcaacaattagagtgttgaaatatgtgaaaggatctcctggccaatgagtttattttcgttgctaattcagaagtaaagcttaaggcctacacagactcagattgggttgcttgttcagacacaatgagatccacaacaggcttttgcattttcataggcaactcaatcatttcatggagaagtaagaaacaacataaagtttctagatcttcagcagaagatgaatacagagcgatggcaaacacaacttatgaagttgtttgacttctgtccattctaaaagagctcagagttgatcacaatggacctatattggtgtgttgtgtcaataaattagcacaccacattgctgccaatccaacttttcatgaaagaaccaaacacatagagatagattgccactgggtgagagaaaaggtttaagaaggaattacaaagacagttcatgtggcttccaaagaacaacttgctggtattctaactaaatctctttttcctactcagttcaagtatttcaaagacaagatgagattgaaagatatatatatatatatatatagcccatcttgagggagtatcaatttagttattttagtagtttagttggttagttagtaatgagttgtcatagagttagttagtgagtcttgtaactaactttgagccactataagtagctgaattcacttgtaaacagattgatcattaatccaacacaggatccactaatccttctttcctgctctgtttctttactctaatggcaacgtcaaaaaataatgcaaaaaaagctttcctacatttctctcctttaacatcatattaaccaatttatttatttatttatttatttttttttttttgcattgttctttgactttactattagagaacttttaagtcttaatctctgtttttttttaatatcaaaacccttaatttggttataattttaggtcatttgatgagtaacgtttaagaacttagagagagagagagaagtgacgagaaaaataataata

SEQ ID NO: 382908 - DNA, 1385 bp, Cannabis indica
actttggtcatgtgataaataatagtgagattaggcttctatgcatgaataggatatacatacaaaagaggggggctaatcaaaagtaggagatcaaaacatggttttagattggctgaacttatgttatttaagatttgtctttgttgtttgttcatagctatctttgaaatgttgtaaaaaactttttcctttttgaagaacaggactgggattggcaggataagtgcagctggaggtaatggatttgctggaggtggaggtggaagaatttcaatccatgttttcagcaggcatgatgatacacaatttctaatacatggtaatacttttttgtttgtttttataatatgtagttgtgcaggagtacccttgacatgtatgttgtgtcctgctatttataaaaggaccagtcttcctttctagcaccaatattaggaaaagaacttgttgttaagtaaataaaataaaaatatgcggagggcattatatttttttgttttttggttttagttgtggaatgtggttatcgtggttatctgttggtccttgtggctagaacagaataatggggttttttaacatttagaggggaaccttggagcctttttgggatctagtcaagtcagtgtttggtaggacagtgggtgttccaattctaaatattttaaagaattgtatttttcctaatttaatcacttattggggtacttcattgtaagcattgagattattcattgttatctttttctttgatatctttttttatatttttttttaaaataattattttattgtcagttatatctttctgttctcataaaataaaaaaagagagtttgattgccagtttcactatcttgtgttattttcaggaggaaggagtttaggctgtcctgaaaactcaggtggtgcagggacttattatgatgcagtgcctcgtattcttatagttagcaatcacaacaagaccacacagactgacacgctcctgatggattttcccaagcagccactttggacaaatgtttatattcaaaatcatgccaaggctttggttcctctattctggagccgtgtgcaggtttagcagctgaaatctttgtgctcctactgtactataactttggtttattgcttattgtttcttaggtgatctttgccttccctaagacaaaaatgcttattttctagctggtaatttaattaggaattttaatctccagtcaatttcactggtgtgtagattaagtgatgtattgaaagggtaaggtaacctaccaatagatcctttcgtcagggctttttcaaaagctgtaagatatgaattacagtcttccatacgctgtttatgcttgtgatttaaaaaatttataaattatata

SEQ ID NO: 382909 - DNA, 2030 bp, Cannabis indica
aataaaaattatgtgaaatttttgttagaaaaaaactataaatgatttttaaaaaaaatatagaaaataaaattgatcatataagtattgaaattatcataaaataatatgagaaaaagaaaatttaagcttaaattttttaaatattgaggtatacttttcattttgtgggattggataaaatttctcttaagttattaagtgattttggtgagattacttgattacccttagaaactattttgagaagatttaattattagggttgaatttgttatactttaccattaatttgatgagtaagatatataaataagtttatatatttaaaataatataactaataaatttgttataagggtatgattaattaattgaattaacatctattttaattttaaattaatttttatatatataaaaaaataattttctaatttttataatagttttaaattaaatttaaatagttaaaactaatttttcataaaaaataattaattaattaatttaacggtgttagttttaactgttagctttaacgaaaaaaaaaaaatcgctaaaccaacaatttttgttaaataactatataagataaataaactttaattattttactttcttattaataatatgatcatcaccaaaaactccattttaattttcataaataatcatagaagcctcacgtcaaagcttaagtaaagatatgatcacatcataaattagtctttgaaacttaatttaaaaagaaaaatggtaacctttaattattccattttcttacttttgaggtgtgttaatggagaaagttagaaattgtaatatataaccggcatatttatggcatgtgcatatagatggagatgattaaatgttagcctaactgtatttactatatattgcctaaaaaattaaaaatacaccttaattaactactataatcccaaaaaaaggattaaaacggtttctttaattagtattcataggacagccaaagaacacaacatgtccatcaacatccatatgcatgcatgcaaaaaatcacctctaatcctctatagccagctccaatacaaacacacaaaaacaatacaaagaaatttattccaacattagtattattataaataattctttaatgatcatctttcactcccaataatttatattataaaggaagagaattattatttttatttgtcttcgtcttcatcttcatcagactcaaaatgggttgcggggagtcaaaacatgacgtcgcaactggaaacaccatcctccaacgcaagaaatccgataatagcatcaagaccacaagcatcaacgccaaagacatagaaacggttcacgaaaacccgcctattaatgcagcggttgatcaagtaaaaggcgatatttctgaggatcaagcaaaggaagaggagaaaaatgagaataatttgttaagagaagatgagaagaataagaaagaaaaattagatgttgatgatgatggtggtggtggagtacaagtagttggaagggaggtagggagagattccccgaatcgcttcttctcttcgaggaaagatgaggaattagggattgatatgatcatttccgatggacaatctgggaaatctgagtacaatactcctcgccatggagctggtgaggctgctcatgaacttattaacaaagatcataataatgatgatgctaataatactaataataatgatcaagatttaaaagtattaaaggagaatgatgataatggtaacaaggaatctttgcctcatgttcaacaagttacacaagtgagatgatgatgatgataaagaaaatggtaatatataatttaaaaattctttttcgattacatatattatgtagttgtttttgtcctgatattaaattgcaccaataatataatatacagaaaagcctgtaaatgtggaggagaattcggtgaaagaagtggaaacgatcaaggtagaagaaaaagatttgaagcttgttgacgaagtgaagagcactaatcagaa

SEQ ID NO: 382910 - DNA, 1381 bp, Cannabis indica
acttatttatgctcttattatttttctaatatataaagttctatataatagtttaaataggaatctcatctatttttaaaaattatgaataatatataggggaattacctcatatagtactattttttttaatttttttttttttttcaaatttacggtttgggtttctaaattaagtagttgcagcgctagttgcaataggagattttgtacgatttttttttgttacaatttaagttgcagcgctagttgcaataggggtttctatgtagaattacgtaaaaatgtaaaaaaaaaaaaaaactattttaaagtgtaaaaatataaaagcgcctaatatatataatactgaaaaaaaattaataaaatcaattacacatgacaaatgaatgtttaaatcatgcttttggcataagtattatatattctaaatgttttaaaaaaatgtgtgtaatgatatttgcacatatacaaaataaacttcaatttttatatttttcgtatgaataatgttacacaaacataataaattttccaaattaattaattaatattgttaatacgtacccggccaatatcttgccataatgactcattaaaagaagcagcagtagtaatgacttgagggaagctagtggccccagggaaggccccggcaaacttagtcccggggccggtgttggccaccccatgaagggcctccgaccaccactcgtaagccttaatcccaagtcgaggcacctcggtggcggtattcaccaacaacttgatcttctcttctaatgtcagtcgtcctaccaagtcttttgctctcacatcaatagccaatgttgttttacagaaggtcagctcattcgtcaatttgtttttggggtcacatgcaaatggttctcgagctttgacattaagtaacatacaaaagaaaccaattatggctagaaaaaatgagaaattaattttgttatagtttgccatcatgagaaatatattggatttatgggatttgtaaatgaaaagatgaaatatttatagtattggataggaagtgatttttttattaataaattatttttttggagatattgtttaaactgtggaagctaaaataagttaaaaagagattgatatacgtgaagttaattaatgagtctatgtatgttacacccatgcataatctatatatagctctactcccattaagatatttctctaagtttgtttctttggtggatttagtaaatatacttaactaatatttaattatccatatctttggagaaactgaattagctaattgaaacaaaaatgatatataattaaatttgggatttttacactatatgtcaaatttggtactttttttacatttttatttatgttt

SEQ ID NO: 382911 - DNA, 1156 bp, Cannabis indica
gttgtcattcctggagacatcagctctggaggccctcaatgttgagaaggcattccaaagcattttgcttgacatttaccaaataataagcaaaaaaggcattggctgctcaggaggcagcttcctccactggccttccacaaggcactgccattaatgttggaaatttttctggcaatctcatgaacaagagaactccttgttgctcagactaacaactgcttctaatatttggtctattcactttatataaggaggggaagaagatttttttcatttcatatgaatactttaacacgtaacaatgtgcttactgaaacaaaatacaactatgattttttgtgacaaaattaaattaacgctataattagcacaacattcttctttgtggaatcacaatgatttctgtacgaatatacaagtaaaactaaatggcttaaaagacagtgaaagtcagcgtgttgaaaaaaaaaaaccaaaaaacaattgcagaaacaagattacttgctcacacagaaccaatacttgcagcagcaaacaattatagaaataaataatgcataaagtgaaattcacaaacacgagttctacgtgatatcaatattctttcaaatattactagtccacagggcctcgtctagagaataaaattaattattaaattatcaaaggttacaaatgcaattgactaatgaactatttcaatcccactaaacctttgtcgcattgtaattcatcttgctaatcttattatctctaatacataccaagttgtgaaattccttcagccctcactactacaaaatttgcatttctccttggttgaaaatgatcttataatcatttagccttaaaacacttagatacttgtaaaagatattttaagaaactaatataattaccaaaatgagtactttatcatttatctcgttaagccaagctccatggaaccattgtttcacttataataaatatagaacctatagctgtccatatttatgattaacactccaactcaattgcactatcgagtccccaagatgcttatccttcggtatgctggtaaccaacaagtcaaaaactcgtgcaatacatttaagctagagcttaaccatctcaagattgagatcaaatgatctatgatcacctaagtgat

SEQ ID NO: 382912 - DNA, 2377 bp, Cannabis indica
gaatttagtaaataataagttcgggtgttacagccctagacttgccacacaaaagttacaagaagacaaactaaaatccttcaaaacaagttctaaagaaaactcctacttcatataattgttaaatttggataccaaattatgacaattagactcaaaaataatattattaaaactaaataaacaacattgagcacccacacttctaagagccaatacttcagtgatttcaaatgagaaacctccacctaaaaaccaaaatgttgaagccaaaacctctcctcgattgttcctgacaatcatgcccaatccacaacatcccttagccacatcaaaagtggcatcaaaatttgctttgatgaaaccaaggggaggcgaagtccaacaaagacaaatctcctgctgcgacaacgaagagggaggttgatcagtggcactcaactcctctccatttgaattaacaactttcccttgataggtagtcacgaaatcattagcccaaattatcactaggttcagagggatgagtttttttataatgaactcatttatttcttcgaaaccaaaattttcataagacaacgaaaatcaactcaatgtgatgcttgagaagagagtcaataaagatgtgaaaagaaatcatgcaagtagtaagcggatcacctaattaaaaatcgcacaacttacgacactaaacaagagaagagtagcctattttttattttctatctttaatgtacattgtcatataaaaataaaaataaaaaaccaaaactatctaaatattgaaaatctgaatgggatatctcaatataatctatgaggggtagactatagatgcaccctcaaaatataacccaatattcgcttttttctttgaaggtttgttagagataagtaaccatttaccttgtaactaattagtaataaccaaaaaaaaaataattggtaactagttgataagagttatcttccttatacatataaatatatatattatataatcagattaaaaacttaacctaattcttttaaagctttgttgcaaataagagcaataacccaataacttatggtaaagaaaatgagtgactggttattgtgaggtctttttcaaatttgacgttgtctcaatgacaagtaactaataaatgtgaacattggtaaccacgacacttgtcatattattaagagaaggctaattaagattttcgcccatttgacatgtaccaaatcatgattcataaatttttttgaccgttaaaaatttctcctgaactattgagattatctaatttaagaacttttatccaatttcattcaattttattaatttagtgattgtttatgtactaaatcatgctctccagactttaatgtctactaaatcacgtctctcaaactttgacatgtatcaaatcatgccccctgaacttttattcatgttagacttttcttactaaaattggataaaattctttaaatccaacaatctcaatagttcagaggaaatttttaacgaccaaaaaagtttaggaggtataatttgttacatatcaaagttcacgaggcaaacattctaattagccttaagagaattgctaaaaaatattattggtacctaatactttttttagtgttatattattattagtgtaattaagtatcagattaagaaaataacttttaaagaatatcactaaccaattataaagcgctacctgaccacctattcaaataacaatgttttattattaaaacacacacgcatggcttctcaacgtcaaaataaaatagatatgaaatttaatttctagtcatgatagaatacatatgggtatcctaataagcttcaccaagggacttaggccatggttgtgggcttgggcttgactttattattgaagggattattttaaaaaaaaaatacaacaataataataaaaattacaaaaatacagttgtacgaaattttaaatatttttacagttttttaaaaatttatttatataaatacagtttttaatgtatttttatgttgtactcttgttattttgttatttgtatattattttttatgttattctgatattgttaggatgttatttttttttattattattttcatgtggttttgttgttatgttgctgttatttttatgaatatcgtgaaaatataaaaaaaaaatctttataagtaaatgtgcacaaaatttactaaaaatagtaatttatgtaattttcttattgcacccttttaagtttttcctcttttgttctttttgttaacttagtttttttttttatagggtcaagttcggtatggtttaactcctatactcaaaaaattatggctaaagtccctaaactccacaat

SEQ ID NO: 382913 - DNA, 3237 bp, Cannabis indica
gtattgttgtgttgttttcgagcattgtcacattctcttgaaataaatatgttcttttcccattgtccattgctctttatgagaactggtatagattccatgtcctatcattttttacaatatttcatttacgtggcattttttcatattaaaacaagagtaaaataacactacaaaacagtaatttgttgttgatttagtaattttttctctttgctagattttatggtttttttctggtgtttttatgattccagtgttgatttgtccgtcccctaccacgaagaagagaatctgtttgtgttttattactgtttacagtataaaagtaaatatatttggccatggacggtataaaagaaataaaaatgggcttggacagtaaaaatataaagtttgccatgtcctagtattttttaaaacatttagtaaaaaaacagtatttttgtaagtttctcttcataaattcggtaattattgacgggcccaatatttcctaggcccaaattagaagccctagttagctaactcgaagctctctttcatggagggtttaacacttagccgcacctctgagtaaaatctttcacttctctctctctgtctttctcattctgccgcccaccgaggatcgcttctaactctaggtatgttctccgtcttactctttatctcgcacacttttatgtttggtatttgaacttgattttcgtttctctcattctccttagcctagaatcctcgtttggtttgtatttttcttttcaatagttgattgtttgcaattatatatgtgcaaatgtcatgatcatatgtagagaagttcttgattcaacgacttttgttttgccagagatgagtttaatatctcaaaatgttgtccgtaaggctaagagggagaagaatgacccacctttgtatcctgaagagggagaagacgctaaaaatggtgaagaatctaacaaggatactttgaagatcaaaaaaagaaaaaaaacactgaaggaggaggatgagaaagtggtagttgagcaggaaagggagatgaagaagcttgagaatgttttgtttggatcacttcattcgtcagctgaatttgggaaggacgatgaatttgacaaagggtctgctttgtactttgtggaccgctctgcgaataatgccctcactgtttgtgacgatggtgatgatgtattggcagaaacttctgatgaggaggaagatttgaaggttaggaaacctgcttgggttgatgaggaagagcagagggccaagattaatattgctaaagttaacagattaaggaagctgagaaaggaagaggatgagagtgtaatttctggttcagaatatgtctcgagattgagggctcaacatgctaagcttaacccgggcacagaatgggctcaacttgataggaaagcaaggggtgatgggtactcctccgacgatgagtcgttggatgaagaacatcaggcagtaccagcccgtggttacaaggatgttgaaggtgttgatgatatcctcagaagaaatgaggatgttgttgtgagaagcagcgcgaaattgttgcctggacttcttgaattttcaaaacttgtagacgcaaatgcacaggagccatctaagggtcctatacattctgtccagtttcacagaaatgctcagctgttacttactgctggattagatcgaaggcttaggttttttcaaattgatggcaaaagaaatactaaaattcaaagcatctttcttgaagattgccccattcggaaggcttctttcacgcctgatggttctcaggtggtaatagcagggagaaggaagttcttctataccatggatttagtgaaagcaaaagttgataagataggaccactggttggtagagaagaaaaaagcttggagttcttcgaggtttctcccgattctagcacaattgcatttgttggcaatgaaggttatatcttgttggtttcatctaaatcaaaagagttgattggtacactaaagatgaatggaacggttcgttctttagcttttgcggatgatgggaggcagttactgagttctggaggggatggacaggtttatcactgggatctaagaacaagaacttgcttacacaaggccattgatgaaggttgcctaaatggtacatctctatgtacatctccaaatggatcaatgtttgcagctggttcagacagcggtattgtgaatatttacaacagagatgagtacttggggggaaaaagaaagcctatgaaaaccattgagaatctaaccaccaaagtagattttatgaagttcaacaatgatgctcaaatattggctatttcttctagcatgaagagaacagcttaaagttggtgcatgttccttcatttactgtattttcaaactggcctccgctgaataggaacctacagtatcccctgtgcttggattttagtcctggaggagggttcatggccatgggaaatgctgctgggaaagtgttgttatacaaattgcatcattataatcacgcctagatcatcagagacttgtgatttcagctgggaaagccaagccattttggattggagaagcaatatgatcttatatcaccttccattggcaacaactttgaaaccaaaatttggcttttcttgattgatgactccagagtgtcataaaagcctgcattatttaattactgttatgcattggagtggagcaccaaattcggttgctacagaaattttgttctgttgaatttatcatgtaaaactgaggtttcatatttgggaatctaattgtagtatcagtttttgttacagaaatatttttctctttaacccgaatatgtttaaaaaagtgcaataaactacaaagtagtttcttatgaaatcatatattgatttctggaacattatcttgattgaaatgtcattgtcaatacctgttaggtgcttttgaacttaatttaaaatcaaattttccaaagagcctgcattttttagttactgtttgtattgatcctttacctttttctcatccacaaatcgtttgtgaacataaaatgtgtagtatttttacattccagaaatagacgatatttttctagatattgaggaacagttcatttggaacttcactcttcaatgctcattgctctaagacatcatctcactatatttgactgactctttgtttttgaaaattaattttgttttctgttgaataatttta

SEQ ID NO: 382914 - DNA, 2790 bp, Cannabis indica
atgcttgcaagctaggggtccgatgggtctgataggggggtccgaccggtccgatggggggtccgaccggttggatagggggtccgatcggtccgatacatgtgcgggttgggaaaaatggggttgagttatgtgagggttatttttgggtttttgataaaagtgtcatatattttttagtttgaaatgtattggtttaagaataaaatattaggggttttaaagtatagtttttcaaatttcccttgataaagtatatttcattaaatacgagaagtaatgagtaagattattatcttactatgtataatttgggtatttgggcctattatgagaaatgagcatatttagtgcaatttttacaattttgtaaattttattagattatatgtgtaatatatatgttatatataaaataaaatattttcaggtccaacaatagtagaaacttgattgattggccaaaaatatcacatcagtataagtgtattttagagatactgggagattttatgtgatgtttacaagttttgaggttaaacgaattatttattaatgacaattttacccctaaattttaataggaatattattgtatggaagcgcaaaaagagtaatgtattaagagtttaattaaataaattaagttttatttaatttaatttattctttctctttattattataatttatataggttttggaatttagatttctgtagaaaatcctcaacacaaaacccttctctctccatttctctgtctttctttttggctcaaagaaaactaggagggaaaccttagatttttctcatcttttcttctctaattcttactataaactcaagtgaggagctgtctaagtttgaggtgagttgtttttagccttttcttggatttggctgagttaaggataggtttttaaggaattttgaggaattaggttctgtgatgttttggttggattagaattgatgtatgcattttttaagttagaattggtagttaattcatgtctaggaatattgtgttgaatttgagaatgaggttagggcttttgagttcaaagcttcactctcacatggtgaattttgattcctcgtataattttgtgttctgaattgattaaactgtttagaaggtatatttgacctgttctagatgttttggtttggtttggtttgggcatatgtggaagagtagaacttgaagatttttgcgttaatgtacctctcgcagaactggtcaactagtttcgtgaaccgatgaattggttgggtccatcagaaacggcggaccgattcgtaattcagtcaatcggttgggaattctcggggtatctcgttttttatattttatcgatatttagggtattgtcacgtaatttatagatagagaaaccttttgttttaagtttaagtcctagaaagtgttataacgagttatttatcggtttaccgctgttgtgatataagatcttggatcgtcgagtgatcaccattcaagttgagcggcacacctgaatttggattagagataaaaaaaaatataattgtacctcaaagcatgtctatatgtgacacgattattaccatatgcaagaaagggttataactctatgtaaaactgttgtaaggttttgttgtctcattagacaacgacattgaaatgattactttataaaataagagtgaagtattgtcttattagataaatattattaataatgtatgttttacaatgtgtagtgtgatttcctgaatatgaattaaagtacgtgattatttggttatgtttgtataatggtatatgatatttataatattgtttttcttgttgagtttttgtgactcacgagtgcttcgtggtgcaggtaaggaaagaacaaattagattagttatgagttggagtctccactggaaaatatacatatcaacttatccagctagtaggatagagttgtcgggacatagtttcaagtcgctttcgagatctcaaagttatattttgaatgtaatgttgggtggaaacttttgtaaagtctaaaagtggatccctgaagtttgaaaaattataacgtatgtttggtttactttaactaattagtaaattttatttaaattacatattttattaaaatgtcagtttatttttataaattaacttgtaaaagcacacacatggcgtccctagagattagagtgttacagaatttggtggttagttttggttacgatttttgaaaaaaaaaattggttaaaccaccaaaactgccaaaaactgtacgttcagtttcgaacgattataatttctcaacgatcaattacgattgtcataaaataaaaactgtaatcgaacgatcgactataaaattaataaaaaccgactataaccgactgaatttcacccttacttgagagtgtagtattctttttcatgtaacttcttcgtggtagatgattttgttggattttgtgccctaaataaaacccatttcaatataatcagatttactaattaataaaagatcagaaatcacttttatgttgcatggttcacatgattatgtttaatgtataaattctattaagtttagaacatatataaatatatatatatacttgttcatgattatagtgtcgtcagcacagtagaatataatcataattatatgtttaaaagtttaattcccatgatttgtcagttcactggatttagactggcatgataatcggcgataaggtatacttacaccttggataagtgttatgtcatttccagggcattagc

SEQ ID NO: 382915 - DNA, 3389 bp, Cannabis indica
aattaaaattgataaattaaaattaattaagtgagtttgcaatcagtattattataactactgagcggaccatggacctatataaccgagattccaataagtagatatataatttaccaaataaattatttaacttattaattctatcttgcgccattattaatttaaaatttacataaacttaagaaaatatcaagaaaaacttcctaaacagaatttacatatagaactatacatgaatggttctaaataagatgctaatttcacatagcagctcattcattcattttcattcatgtgggaaagactataaatagatataaacgtgcaagtctttcttttgtcaagtatgaatgattatatctctgtatagtattaattatatataagtagtactatatatctatatatgattggagttgaagtaattaatttatgtatgctgcagttttcaatggtcatcatcatataggtataaaggtatatgaactcttcttccttctcgtttacaaaaaaaaaaaaagaaaaaactcttcttctttctttctttttttcttttctaaattttgggtatataaaggcatgatcacttcactatttatatacgagttaagacatgtgtcataattaataatgccatgtggtacaaatgtgactatgtgagccagacaatattaatgaaaaatagttagaattaaaactaataaggaaaaaaaatcttaatgaaaaagttatgtactttttaaattagaatattaaatcaatattgtatatttttttaaaaaaattaaagttataatattagtattattataacaaaaaatgtaggatattgttgtctaccataaacaattatggtgtgacttaatgcagaccacaccatatatggtgttgattttatagttggagagaaaatagagaaattttgtcactattttagtgtccaattggagttagcctaagcaggccacaaaccacaaacttaaaattgttttggcataacataaagttgagaacagaactttctcagaaaaaaaagaaaagggcttggccaatctggataaaaattctatccttaataccatttgattttgttataattgttaggttagatttgttcatggttttgtatatgcatgaattagcagtgtttttttaatacatatttatcatttaaagaaagggagacatttgttgaaaaaggataaacaaaaaaagaaaaatgacagttcagtgtagcatgcacttggaggaaagcaaaagccaataaaaggggccatatttattgaaataataagaagccttttgggccacatacttaaaagttaggctagaagattgtatattataaaatattataaactttacaattgggctaagcttagattgagttaatatgaaattgtgttgtgggcaggacttcttgattgtcactttttaaaagcttgggcacttattaatgctacccttcacatgattaattgtgtaattttgattagtaggccattctctttgggaattttttattcattagtaatacaagaagagctcccctcaattcaaataaaaaattatgcattcaaaagattaaagtaatttcaaaatctttcgctgcagtggcagattcagaatttaagttgaagatgggcgacattttcttttgtaagtgagggagggtgtttttttttccccatattatatatcatgttaaaaattgatttaaatttgtattttaatattaaatatagtataaagtaaaaaaaaaattaacaataaaaacattgggttcaattgttaagacactaaatacaagtcttattgatagaagttcaaaaagtaaaatttaaataccaaagtaaatatgttttaattgggattagaactcataacctacactatgtaataaaataactttactattatatcaaccttgtgttatatttataaatatcactttttttcaaaaatatatattgtaactaactgaaatgtatatttatttttttttcaaagaaagcaactgctcctcggcccctacttcggtgacaataatagtaataataaaccacaaaaattactactatgaatatgatacaatacattacatgataggtcttgaataataataacaaaactaacacaacaattatcactaaattattacaatgtgaatcattcggattattcaactcaattttcgagtcactatcatgaatgggaaatacagatcaaactcccaatcacatggtttaaaacttttttttttctcacattcatttgaagatttaattaattatttcaatctccatagattgccgacctctaaaatttaatatgaacattagtcaaacgagtagagtggaaaaataaaattataatacacatgaccactcaacaccacatggtgttcattgacatgtcgttcataaaaataataataataaaaaaaaaagataaaaataataataataaaaaaaaagaattattacatttttttggggtaatatttaaaaatttattacaaaagagaaggcctatatagtaaagtattatacaatgaagaatttaaggtgtttggtttatagtcaaggactcaaggttttttttttttttttttggtagggcatctttgcttttggcatgtaaataatttataaatttttttatataatatgtacatcataattctaacatttatcgtgcagaaacaaatctcaaattattagttgcacgcatatataaaaaaatagaaacatcaactaattatttaaactctctttctttctgtataattcaaaaaaatttaaaaataaattaaacatctattataactcactaaaaaaaattatcttttaataataactttttagtcacatcataattttttacaaaatattacttatgactaaaacatagtatgtagttacaagttgtcacttaattagttttattgacaacaagtattgtgactaaaaatatatttagtcacaacaaattgtaatttttatgactaatacttttagccacagatcttttagtcacagcataagaatgacgatttataattagtcacaattttttcacttttaatcataaattttgttgtgactaaaagtaaatttttttgtagtaactaatctataaaataaataaattataaatttttctatagtgtcaaaaacaaaagtgcacattgttgaccatttttggtgaacgacgcagagtcatactgtaacgtcctcgcgtcaagcctatagaccaacatgagtgtttccagcgtgctttgtcctcactcgtacgtttcttgaaaaaacttcccaggtggtcacccatcctaaaattacctcaagtcaagcacgcttaactgtggagttctttcgagatgggct

SEQ ID NO: 382916 - DNA, 2706 bp, Cannabis indica
agaaaaagaaaaagagagagagatgtattatctttaagttatgcctatgattaacatgaacatatttaaggttttttgtttttcttttcttgtgtgtaaatactaaaccgtctctgcatatattttaatgctaaaaatcaacttaactcacattttaaatattttattattattagtaaggtgcaaaataaaattttgagagtattgttaggcttgttttttaaacgatatatcacatgcatacaataattctttttatttaaatcttataaataagtataaacaacacattctataattattatcggcctatgaacatgtgcaatattaatttcttattatatttcattatataataaattttattttgtacatatcactaatgattcttttctaagtaattacatagaacaataattaattgtaatttgtttatacatgataaaatttagaagatataatttaaaaaatgaattaaatttccaatataagaaaatggatatgaagttatcttttcatttgatgagtcatactcacacacacatgtataataaataatttttaattaccataataataatattgaatttttttatgagagttttactaaaatctaatatggaaaaaaatgaatttaaatataaaataattagaagtaatattttattaccatctttactaatctaaactgaatggaaagaaatcagattattagaataaaaaaatcagattaatttaatttgatttacataattaaaaaaaataatcaaaatatatataataagaagaatgctttaatttaactaaatttcctttctaaagaacataattatcttttatacataaatttttgcataatacctttaatttttaattaaataaaaaactaaattaagaaagttcatattctttatgaaaatggtcatcaaaatgtgaaggaaacataaattgatttccctttttattttatgaattttcattttctttaagtaaagccattaaattaaaaaataaatactacttaaaaaaattaaaaataaataagaaataaaaagagaaaagggaagggagaaactagaaaagggttgagtacgagttgaggagttaaacacagccatgtactgtctctcgtgaagaacctgctcttctaaaaaagattgtattttttatatatatatatattttttttttccaaatctcattaaaaaaaaaaaaactgagaaaaattctttgcttgcttcttttacatcacgggatccatctcctgtgtcttctcttttttcgtatctctctgtctttcttcttcttcttcttcgttgagactctcacattctttcggaacagagagaactagattcttagatagatataaagacacaaaaccaaacccagaaacagctttttacttttttttttttaatttttgtagttcaatatacagataattatactggaaaaaaatgtcgcatgctgggaaatcaatacaagaaatgggttttgattctctgacaaacaggtttagagatgcgttgagctgccgtggtaatggtagtgagaatgataacaagccggactttaaagagctcgatctaggctcacccgtttcgcccttgagaactcggggctcggctaatgcggccggcggaggtggcgctactacttcgagtagtagctcgagctcttccggttcggcttcgggaaaaactaataatgcccaattgggtagaagatcggatgccaaagaagtcaaaaaccactccggtgagctatcgttctcgtcggaaaccagtccgagtgtccacgagagtcaccgatctgcttccgcaacgcgtaatttcaaaccgggtcatcggagatcggtctcggctggacccccattgatctactctggtggaagctttagtgccattaacagtgctagtaatggcggcggcggtattggtggtggaggcagtgggaacaccgcaacttcgtccccttcaaactccggcggcagcactattttcccgagcggcaatatttgtccctccgggaaggttttgaagtctggaatggggtctagaacctccactaagactgatgtgttgggctctggtactgtgaactacggccatggtaatatcatgcgagggggcgcaaaattgagtggaggtgccggagaatcgaacaccaccgttggcggacctgggattgtacagttttccggagaaccaggaacgatgaagagggcattggcgaattctgatccagaggaggtgaaaaggtcaggaaacgagctttatagaaaaggatattttttggaggcattatcgttgtatgatcgagctatttcattgtcaccggataacgccgcttaccggagtaacagggcggcggcattgacggctcttgggaggttaggggaagcggtgagggagtgtgaggaggctgtgaggttggaccctggttatgggagggcccaccatagattggcttctctctatctccggtaagtgtcagaaaacagtggggaagtgctcatcttgatattatcttttttcttatcttatatgttttctaggaaatatatttgtttattttgattcctttttcttcgattaatgtgattggtttatgaaatctttgatctatctaaactttgttgttttacttgttggttttggtgcttctcatatgggcctttttttcctttttttctttttctct

SEQ ID NO: 382917 - DNA, 826 bp, Cannabis indica
aaaaatagtatttttgaagaaaagataaatttcattaaggaagcaataaaatataaaaattcaaactcgtgggcctccatataatgttcaaccaagctagagtttattaagcttattttatcttttttattttattttacttaattctgattataaccttaatgaataccaaattctttttttaacaaaactaaacatattgacttacaaaaccaaaaagacacactagccataaaaactaattaagctcttgtacaaaataatctttaataggcattatgctataattgaatggtagatattatattgtatttaatttaaaactattataacacgaacttgataacaagttaaaatatttaactctaatggaaaataaaactgtctatagtctattaaaagtaaatttataaggaaaaaaaataaaaaaaaattacagtgtatactcattttttatttcttattttaattaatatctttattttattactcttttacttttccttttattgatttttataaattcttttatctattcttttccaactacatttttaaaaataattccattgtgatttattttttagatgtgatcttgaataggaaaaagacacatggtaaggtattcaaaagatagcacaattggttttactgctaatttgtcttttttgtcttgtaaggtaatatgtctagttataaatggcttattttttgattttataaggccaatatggctagttttgttttgtatagtcaatgtggctagtttcttttgtacaatcagtgtggctagttttgattttgtaaggccagtataactagtttt

SEQ ID NO: 382918 - DNA, 3310 bp, Cannabis indica
agttcaaatggagccacacccacttctacacagaaacgagtgaaatgacttcaaagtgtaaggtgtgctctggctttgacatgagcccactccaagaaccgaaaccatctatacaggagtatggcaactccccttgcagtaaaatcttattccaaaataggctaggaatgttttggagaccatgtttctcctcacaagattggaatatcagataattacataacttattagtttattgatccatcccccattgagatgagttggccgctgttacatgctctgtacctcctacttcccaaaccatgtctccctcgcagtcaaccatcacttcctccgtgaacttggttgtgttggccatatcaaaagctaaaaacataaatagaagccaagcagttaatacccccacactaacaactatagcaagggtacgagagtcttcccctgtaacttcttggagaggtcccaatcggaccctacatttgggaacaatgtcctcaacgaacattttgttgggatgattagattaggaacaaaggaaatggaggaaaggctcgttgaataattcatttggcaccataagggttccgaacgaaggactttatcacaatatttttcacttttttgagttcaaaaattcaacagcaattttaagaagaaaaagataacatcgacagaacctaaattcttctacaacagagtaacaacaatcaaatgtgcctatctttatcaatgtaaaagttcttcccacgggattctaccctaaacgctaccacaaatggtaaaatatgcaaactaaaaaggggctaaaaattccaagcagtatgatagaccttacacacggcctaaccacaccaatgtgaagagaaaatgcaagagcaaagtgaaatacttacttgtgggaggtaaagatgttagagctagaattcggtcatcgtactttaacctctctgggtagaagtacttctgcgtagagagtgaatgtgtgatagtaggtatacgatcaaaaggcttaagcctcgcctaaaaaacttcaagtctctctttgaactcgtcgacgtgcgcctagaagttcaacaattttgtgggcttcgaggaatttattttgacaattgggggtgtgtcgggaattttttttaatgtacttggagaagactgttgcagatctcgttggcaatgttaaacattcacaaaaagattggggctttaggtgaagttttctctctcaaaaaaattgaagctcgaaattcaaaatggcaaaaattagtgaacgtttgatctcagttatatttatatataaattgaggattcgtgtgctttagatccaatgaccaagatcgtattcctaaaaagcacaacacgatccaatggtcagagcatgcaaagggatttcatttaatgccttatgcagaattgaggcaaaacaatgatgatatttgcctcgagaaactttttggtgtgatcagccatcatcttggaaacccagacatcgcacacgatttccaaagagcgtagcctacatggaccaagaagtcgatgtcacatgtattctgttcatgtaaaacacagagtttatcagtatctgtgactccatgtctcaaattttagaagacataaattatacatggttctgtctactacagtgaatccgaaaatgaaactggaagcctccacgactctcaagccttgaaggcttggggtaaatgttatctcttttttcgacaagatgacatatgtattccaagattcgcctcacttcaggaaagcccattcttggacccaaatgagtgggtcaacgcactaagggagtcggtctgtcaatccatgttcagtaacatattaaactcatccattacaaggccagatcctgtttgagttcgagaagggttctaagcatacgaaagaaggcccaatatgccatatttggatactatcatggggtattcccagaaagattgtataaaagacattgggagacaaaggtttaggtggagatccctccgatattgagtcccactacatcaggaattcacctagcgccacatcctctgatatttattatataaatgtgacaacatacgacaactgaaaccgttaaatggaccccataaatatggatgatcattatcttgtaaattaagtctttcttaattagcccaaagtcaatattaaatgtatttaccctatcactggatctagtttcatataaaaatcatgacagtcaaaatcctagctcaggcaaaggattagaaaatcatgattcagacactgagattgaaactagggttcttaagctcgggcaagaacattatccttgtgtaatacatccaagttttcaggctaataattttgactcatggattaaggctcgttaacacctcaactacgtaaattcttggtcttcttcttcttctttaagttttttttcctaagctctatttattttatatttccaaaaaactcagtaaatagattcaacttacgatagattgcaaggatacttgataggtcatgaagaggtaatttttttgtttatcatttttctttttcgatttaatatatatgtgtatggggaatatttagggtggtacaatgataattatattaaaatgtttttctgcatatttgatttagtacctaaaaactaacgcatataacatgtagtggcaatccacttaaaattggtaactagtaagttacttaatttttcaacatttgcaaaataacttcgaattgttcaaaacttcccacactttgtactatttatatacattataattaatagagataattttccaactactataatctcaataccatttaatcctaataacagcttattgtttcaggaagagagaataggctaggccaagagtatgctactgcgatgaaacaatactcgtgtttcctacgacaacaaagtaaagtttcttggctgcagaatggggaagataacaccaagtattttcattctttcatgaagaaaaggaaactgcagaatagaattacaacgtttgagtctaatggtaaaattgttgatgattactccgaagtagtggaacactttcttaaccatttcaggagctttatgggcaagaaaagtgcggctactagaagattggatcaacaatgtctccaacaaggtccaactctgaatttagagcaacaagccaatctcatcagaccttttagtgaaaaggatgttaagaaggatatgtttaaaatccattccaccaagagccctggcttagatggattcggttctgggtttttcaagagcctctggaaagagattagggcggatgtttctaag

SEQ ID NO: 382919 - DNA, 1565 bp, Cannabis indica
gatgactctaattggagcagcaatcacatctttagatttataaatattgtccaatggaagattttgttccaaaacctgttaccaattgatcaatttaggactggaaaatatggtttgagttatgaaaataaggataaatagtaaacctatttgctatttaggtaaaagaagactgaaaaatattacctgtaaatgatcaccaaaaagttttagttgagctgttgctttgtcgtctcgaactccaatgaatgcttcaaatgtggcctaacatgtataaaaccatgagttatagcctattaagtgacataaattaattgccaagaataagaaacataggtgaaaatttgaatatgatgaatgtaaaagcttaatcaagtgtgtgacataaaccataccttgtacccaaagagtgcatcttcatatgtttcatatggaccaatggtaatatcaagctttgagtcctatacagaaaaatcaaatgaggacgattacttcttctccaaaatgaaaacctaaagcatttcattctgtttacatgtatgtgcatgtgaatatatatacacacatgtgtgtgcatgcatacttacatggcaaaaacagaaaaatttaccaaagtggaaaagaatataacaggggtcgagatatctttaaagagaatgctgaaattaatttagtcaaaatgttttactttgaatttactttggtagataaatgataaaaatactgaccagctccatccaggctatatccgagtcgtagtagtcatttgaaaggaaagcatcagctctgctatgaagaaacctcttcaaactgcacgtagaagtgattttgtaaatttgagaaatacagaggtgttcatcaaatacgatatcagtaacagagagcagcaaacaagatacctaggtgagcttgataagtcaccagctttatgtaacaattcagcagcctttctgaggaaagaactgtactcttgagcgaagggaacagtatatagatcatgaggaacagtatatagatcatgagcagaatgcagtagatgctctgtgtcatcaactgttctattataaatagaagcatctagagcgaattcactacgccttttaacaacattgaagaagcctgttgcatcttctttttgttcatctgttaaactgctcttccataattcaaattcctgttgagaaaaatgttggtcatcagtcatggaaggaaaacaatattctctatgagatgccacagaatcaacttagttgtaccgttttgtccatatccgggggatagaaatttgcaccaggtggcttcagcacaggaaatgcagctttatattcgagacccttccacccagtaactgcaattgtggcttcaggaatcaacttcacagcagaatccgcagttgtcaaaaatgcctcgttctcatcaaggctagacctgttgatggaaaatgacttaattttaaacttcgtatttgtgtagctacatatcaacataactagtaaagcttccattaaagaaaactatgtaacatttagcatctaaaaagggaaaaaataataatataaatatat

SEQ ID NO: 382920 - DNA, 2532 bp, Cannabis indica
ttcctactactagcagccttatgaaagtaactactattatgatccccctcccgaagccaaaattgctttgtcctttgtttctaaaaactctcccgttgatcaaacgcatcataaagtttcttcttgatttcggcatatctttgtacagaatcagtatctctcaaaccatggagcttcttcaagtcattcttataatttttaatacgatgatttagagtactagttaattccttaccccaactagataacttttcagcacacatattaattatcctggatatacttacttgttgttcctgagtccaaacatcacgaattatttcaaaacacagaggctccttcaaccaagaattttcaaagcggaatctgcgactaggagcaaaattatttaccacaaccggttcaaggaacaaaggagaatgatccgaagtagctggacccaaattagagaggctagccgaatgaaataattgattccaagttgcagaaacaagagctctatcaagacgtacctcaatccacgcattagttgctcttcctttttcccaagtgtattggtgaccttgtagctcaagatcatccaaaccacaatgcagcaagctttgttggaacccagttaacagccactggggatatgggcgtccacctctcttatcctcctgcctcacaatgttattaatgtccccaatgacacaccaaggtagtgatgacttgtcctttaagcttttgagtaatgtccaggaatcatgtcttctatttcgattaggttcgccataaaattcggtaagacgccaagtcggagaagtaggagatatggaaatttctaaatcaatatgattcatagagtaacccaaaaaatatcccgaatcaatacttttccagagcatagccaacccacccgaagccccattagcatccacaacaaatacaccatcaaaattcaaagcctgggccaggcccactacttttgatttatgacactttgtttcacataaaaatataaaatcgggcttcttttaggaattgaatggtctgttggttcccaagcccccgacaattccagctcaaaacattcataatgcatggcgggcttgggaaccagcacccgcctctaataagttttttgagacttcatcttggactgcaaaatcattgttttctgaaatgtccatgtttttaacctcctgattctggttgcttattacacgacccatctccaaatttttagtttcattgagcccaacctctttttctaagcccattcttcttcttttgttatcaataaaagtcagcccaatattcatatcagattcggctggccccagaactaactcctcatttacttttcctaaaattaagggttgttccttattaattgatgatccaattacattgtcaaccgtcctcatatctggcacttcattagtatcacgagaatcaggatgaattaatggggatccctgatttctagccgccatcaacctctgtcttcccatgactggtgcagcttgattactccggctgccattgctggaacttctagcttctggaccatcgtccattctgttttggaccgcaagacctgatcgtaaccaccatgacccgtcggcgtagttccttcttcttggggcaactttcatctcaaggctatactcctgaataatttgctcttttgggacttcaaaaagcttttcgcagaatttctcggtgtgtccaagcactccgcaaataaaacaaaaggttggcaaatcttcatacttaaataatatgtgacaagttgggccacctctgatttctaacttctttttcttcttcaaaggattgtccactctaagcttcacccgaatacgtaagtagtcacgccacacgcctgagaaattgttaggatctgactttacaaaggttccgatgtagtttccaaccccttgaatcactctatccgacataaatctgactgtcatattgtgtagttgtacccataaatctagtttcagcagagggatattacgaggattctcaccatgcttcactcattcaaagattaggggtgcacgatcaaaagtccaaggactctcctcaataactcgttctatgtcaacttcatgataaaattgaaataagaataaattcgaatcaagttctttcacatacaaacctcttcctggttgccaaagagtggcgattttattttgcatagcctgaaaatcaatagatcagttggtcaagaagcgtcctactagcaaccatctgtcatcaatttcagctaaaccatcatcccctgactcaaaaataaggccctcttcatcttcatcatgaatcgaaaatgccgcatattgttcctccatcgtgaaagagagaagaacaccaaagaacgaatcaaaaaatgaacaaacaaaaaaaattgccaaggctaccgtcaacaaatgatctaactcactcacattcgaaacaaattaactcaccatgtcactagacaagaccaaaaatattttcttttttcagagggttttccttaattgttataatttcaat

SEQ ID NO: 382921 - DNA, 1600 bp, Cannabis indica
aatgggatatatcacttctcttcaattttcaagttcttttttgagttatttggtgtatgtacttactaaaatggtttcatttcagttgcacctgtattttgcctgcctgtattctttacactatattaaattcctctaaattgctgaaatagatagaagacacccttcgttttgcacaagcaaaatgttcctgcagcaaaaatgtgtgcataaataaataatcaaacgacatgtaaattgcaagaaacgacaagagtgttttaagctagagcctaaatgagatgctttagatgcgagacgacggcttattaatgagcaaagttggttttggttttatggagttgtcctaaatcatctacattaattcttttttcccttccctggtctgggtgtaatctgtaatgttttcaaaattgaaccaatttaaaccgatttataattacctcaatatgtttttttggtatacatacatactagatttataatttaatatggaaagaaagaaagtctcatgttaaaagatacatatatacaaattaggatggttgttgatatcattcccaatttgtggctggaaacctcaataaatttagaccaaacaatttaaaggaatctaggttatgttttggtcaattcggatcatgtacaattttttagtttagtcacgattttacaatttttgttagctatccaagccaaactattttgcacaattcttttatatatacttctatatatattttggatggaattttgatatttgagaaaagtagaatactgatgttgaattgatattgttttaataattattttttatgtattgtaaacttatcaaagtaaaaaaattagaataattactaaatacaaatcatgttcttaattggattagttgagtttgagtatttaattggtttagtttgtatttgaattttttgaaagaggaattattctagatactattttttatttttatttttattattattttacggcttgtattgttgcggtggttgctatatgaattcagcttgtgaaattattctgttaattgctacgtgaatttttgtaaaaatatatttaaaaaaattgaaatgtataaatgaaaaaaaaaaaaatcttttaaaaaccataattaatactagtttagtttaaaataacgtagaatccggacaaactaattagcatgttttctttggtataatcaagattgaaatggattagaaattacaattacaatgtttgatgtttagttgaaacttttaacatttgtaatccctgtacataaaaacttttccaatcttctctcttacttctttagcaaatatatgtatagttaacaacaaataaaatgagaacattttggttaatatactaattactcaattttatttttatattaaataaaaaaattaattataatgttcaattcaaaataaacaaaattataatagtaatagtaaaccaaactcgacttaaattattacaaaccgtttttatcgagtaagaatatttgttaattaaaataattttcttccaaatgaaagattagctttcaagtaatgtctaaaaaaatatttaacttaataataaaaagtagtac

SEQ ID NO: 382922 - DNA, 1775 bp, Cannabis indica
agctaataatgtctaaagtttaagcccttcatttgagccattttcttaaagagaaagatccacacaagtggagtttgattaaaaactgatatagaaataaaaaccccatcaactttccctctcactaaacaagcataaagatttcggtcttctcacattcctcacataccaattataagatcaagagaagagggctccactttctctctccctttcttccctagaccaggtaactctcctcttctatcttctctccctcttattacagagccttagttaattctgcacaaatgtttaacaaaggatttacatatgcaaagaaaaggagactttgacaaggaaggatttagacagaaatttcggtcaagaattaatcttctagtatgcatttttgtgataagttcaacctttacagttcaggtaagatatgcttaaagcaacttacgatacacaaaaatataactttgaaacacattattgataactagattctaagcccgagctaagtgtctatgatcaagaaaggactcaagtaagaaaatcacaatcaataagagcctagcctacacttggccaacttactttttaataaaaagagtaagagattagtgatgactttctctaaaatatgagaatagaagtgaatacccacccatgctccagtatctaatttttcaagagcttcattcatgtgttcttgataaatgccaccaccccttgtgataggtatgcacttccctatcagaattcacaacatctttaaagaatttagaaaggctaaacatttattgaacaaaaaatcaagcacaagcatagaaaaggggggaaagattctaatgataagaagtaaagtttaaagtttgaatatttccatataagttcaaattttcttataactctaaaaaccaatctgtatctattatcgaagcttgtcaaagctaatatcacaatgctgactatatttgtatcatgactagctaatatcttccaatagaaaaatctaacatcttgttcttatcaatggagcttgttgggctccaatctaaccaaacaaaaactctttactaagttccaatagttgctaaagataacattgtaggattaagaaaacaacataaaaatacaaatcttctaacacttaacaaaagtaaccaaattttcacaatttacaataacccaacaatctgaatccattcaaatcaatacagaataaacccatttgataaatactgaataaagcacaaaactttaatgaaacaaataagagtaattaatggacataccaattcgaaaaaagtatgaggagaagttattggtaaagcagatatctttagcagccaatacccaacgaccgagattggaatccatggaaggaaatccagggaaaccccagatgagaggatcatccaagacggagatgtgattggcaacagtgattagaggaacccctggagggcgagatcgaacaagatgaagaagggtttggggattttgaacagaggtggaattgagagaagaagcgagtagctttgagagtgaaccgattgccatgaaggcaatctttcgaggtattcctcccaagtgggtttcacttcctgcccactccatcttccttccatggtcatgctcatggtcttcgtcttcgtcttccattagctgcgtggagtccattttctctctcaaattaccacttcaataagttgtttgactttttactaaaaataataaactgttgactttttatataaagagagagattttggccgtctaaactc

SEQ ID NO: 382923 - DNA, 3124 bp, Cannabis indica
tcccaaaactcaattatctttctcactataaatacataacaataacacccaattcaccacaaaataaaccaaccacaattctctcatcaatctcaacattttctttcttttacctctctttttcccaacaaaaatggctccaatcagaatgaggcttttttcgactttggtcgtcgcagtgatggctgtgtccgccatccaaaatgtggctgcagccgatgcaccggctcctagccctacatccgatgccaccgcctttgttcccgccgtatttgcatcccttggagctcttgcaatgggaattctcttttgatttaaattgtttttgcttcgtttttttcaatgtaaatgatgagttttttttaactcgttttatttttattttgattgatttttttagtgacatcatggggtgtcacacaacacattcatcttgtaatatttaatttttcaatatatgaattattgtattgtttgattgtcaactttatgaggagtgtttgatttgttaatgatgtgttttatactaaacttgaaaatatttattctacccctaaattattagaattccattaattatcagctcaaaatatagttttatcatgtttttttgagatcattgtattatttattttttcataattgttcattggttttcttatttttatatttcttgctaattttagaattacatttgataaaatctactctcacaattctgaccaaaaaaaaacatttcaagaatagattatatataaatccactcaaaattgggtgtgaagataaaaatgagtttttttttatacatgtatttctagaagggtaaagtttttctttcaattttttttttttcaaaaaaaagattttgagctattgtaaagtttttctttggattttaaatatttttgtacattcactaataaaccatcaccatgtaaactagatatagcaaattgccaattacaaagagcaacttctctaattttaattatatgtcaatatataagctgtaaaagttatataattgagtcttttcaaaaatctacatacattctcttcaaaaatcacttgaggttagatcaaacggttaaggagtgcgtgtgtattgaatatcttgagttcaagtctcaaatcataatttgtaatatagatacgctataaaaaaaaaaattacataaataaacacacattaagagtggatttgaaaacaaaactgaacacttcttcaattcttatggtttctaaccccacctaatatttgatgagggtagtgatagagaatctcatgatttctcgaatgtgacgagctccattctcttctgttggagtccgtcgcggtggttgtgggtctcgggtgaagcgcctttggccatcaggcaatggagttcattagctctgcttcccttgctgattttgtggttggagttgtgtggtggcctttctcgtgcaggtgtgtgggctttagagtgtgtgattcttgctacttgattacatttcaagcgttctggctccgttgcactcgaacattttttgaggtcaaatttttctcaaatggtggtgtgtccttgtcctgtctccttcactgttttgaactatgtttttctctttgcccatttgtgtttggttgcctcaccagttctccgaggttgttttgttatcatgagccatgagcttattggtctttctttaacagtgtaattggccaataattaacaattgtgatatcaacttaaacatgatcttacccttatggagataaatagaatgttcactcacgaaacaataacaacttcatacaaatgtaatcgaacaaagaattttctcctaataaaataaaataataaatgtaacttttaaccactatgccaattgtagaattttagttctgaagggtttagggttaatttattgatgaaagtatgaatcaaaaatttgttaacttacaatatttatgcttcaataatctcattgatttgactaattatgctgtcaaaaaaatagtgatcaaattgaacaaaatatgaactttccgaactctccaactctaaagtttctctttcaactacaatcaaaaccattgtatggagaataatgatatgtgcacataaaatacacactaatataatacactagtgtgttaaatcatttttaataaggtgaaactcataattaattgaagtgggttgccattcctctattgaagaagataataaacgactttcttacagaaaaaaaaattacatatcttcagtgtatatgaaaatatattggcagtctttattgaagaaaaacaaagacacaatgacaatttctgtgtaagaacaataaactctagtaaaataatagagaacaaggtcacggtcattatgtagaattatggccttcaatcagccagagtagctcattttcacctttccatgcacttcttttccatgtccaaaaacacctttgattgatacatatacatatatgtatgcattatacattgagttattaaaaactagtgtaccaaaagattcctaaatcacaaaattatactttttaaccggactaactcaggtccaaatgaaattgagcattccgagccacgtggcaccacgtgagtagttaagaaacatacttagcagcattttgcaaaatccaacttttcatgtagtgtcatatggctcggaatgcctaattccatcgacacaaaaatagcctcatagccaacaacaaatgaatgggtgaagacaaattgcattgctctagagcacatggtaccaaacaaccatttcatcggtgcaagtaagtagcggatttacataataatatgtgagacccgatattcatttacaccattagcaacataggatgttggtcaccctagagtgctcttttggcaaacagatagttatcttcacatctgcacatattaatgtttctatcattttaacaaggttgacaacacaatttacaatgcaatatgaaacatgaaaatacctacatctaaacacataatttctggattttgttttgagaaaagttatattgggatggatcagaatattggcttggtctctcgaaagagattaataatgcgctcagtataatcaacttcgatcatctggggaaaaagtcatca

SEQ ID NO: 382924 - DNA, 1083 bp, Cannabis indica
agtatagaaaattaaatttcccaccgtaaacaacaaattcaattaattattttctattttatcaaaatcttaaaaagtagttactgagagtaatttgaaccattaataatagcctaataaataataatgataaaaaaatccgtgagagataagagtacaatatattaatcaagtacgaactattgcctttatgaaaatgaattattgacaattttaagaaaatatataattaattttactatccacttacatttattttcttcacacataatcatttttcactaacatatatcactacaaaaaaaatgagttctataacgagaataaatggcctcgttataggttaaaatatcatcaatataaccgtataacgatgacatgtattctcgttacaaaattcttgttagagactcgtcattagaaaaaaactttctgccgaggacaacaataatattctcggtaagggatacaccaagagcatgtgtttttcggcaaaagttaaaaatgttatcggtaactgacttgtttatacctaggacatttttttggcagggccagcccaagcatatggcagcttgggccattgcacaaggccggccccctatattaaaaggtcccactttgttatcatttcttatatatataatataataaatattttttttttataatgtatagtatacatataataaaagtttataacagtaaatatgtactttaaagaaaactgttaaaatattgtggtcccaatacacatgattttaaaatttttgtctatttttaaaatttatgaagtattttttttagtcaaaattgaatttatgtagcattaattaattttttttttaataaaatacccaatttttaatttttgtccaaggcacccaaagtgcttgggccagcccttagtagaagattttaacaagaacatactatgtgtagaagattttaacaagaacagactatttttaagttaaattttgatactaaataactttcatactaaatatatcttatacatattcattttgacattagttttcttcaaaataatgataaaaataaaatttattaataaaaata

SEQ ID NO: 382925 - DNA, 1386 bp, Cannabis indica
ttttgccgcaattatcccttttcgatatgttttctatatattcttgatgacttcttgatgtatggcgtataaggttagggaagaccaaattcaacactattttgattattttctgatagatttcaatagtctatctatttgtttgtttgaataatttttcattgatttttgatagtaaatttgttattgattttttgacatattttcgatagtttactgaagttatgttatgttatttgcttgattattttttgatagttcttgatagttttttaatggcattttaataggatttttaggaagtttgtatatttgttttgcccaagataaaatttatttttgatggaattttgatgagatcttagatgtgtttttgattattttttttttttaaaactaaatttatacctttttttttatcaaatatttctagagcatatattattccagttttagactggagactttagaggtcgtgtgacatatagagagtgtgacatatagagagtagaatatttagcaagatcgtcacacactttacaagcataaacaatgtaatttaaaacaaaccaaaagcaatttagttaagaaataataaacaaaatcatcaacaaactacaaaattattaggcaaaacaaatatacttgaaatcttatagaaataccatcgaaatcttttcggaaagaaaaagtaaaaataacataacacaacttttagtaaacaattgagaaactatccaaaactcattaaaaaaacacatgtcgaaaaagcaataaaaaattaactatcgaaaagcaataaaaattattcagacaaataaacaaaccatcgaaaatctatcaaaaaataattgaaaatttgtcgaaaatgacattccctaaccttggtactgttagacttttatttaggcttacattaacttttattagttttattaaaacttcggttgattgaatagttctttgttatattagctcatattgttagtaattaatagttgatgggcttagtatctgtgtgtgtaaaatctagttgaagcagaagtgtggacttttctagttaactgaagcctttgatgagcaggtcttgtccaactagggttatgtagttgagtttcatccctaactctataaatacatattgtttcatcacaattgtataattttgatgatcagaaaaatgaaattgcttcaaatttagagacttggggaggaagacttagttgatagtattgcattatcaaaggaaaatttgattttatatacttaaaaattaaaaaaatttattattaaaccaaaaacctaaaccctaaaaaactatgacttttttttcaaaaccccaaaaatacccccctcacaattcacccattctctctctgcaccatc

SEQ ID NO: 382926 - DNA, 1367 bp, Cannabis indica
catcaacaatggtgataaaatacgtaaaaccagcaagagtaagagtgttaaaaggcccccatatatcaatatgaataaggtcaaaagggtgaacaacaatgttatgatgagatataaaagttaatcttttttgtatggtgccatagtgacatactaagcagtaaaaattgggagaataattattgtaaaattgtaaatttttattcaatcaatgatttttgatacaagcatgatggcccattttatagtgccaaactgtttcattggttattttggaatcaagaaaaagaaaaagtaaaaggtacagtatttgcaaaatcagaatgtaagtagtaaagctttccaatcttttcacccgtcctaattgtttgcttcttcaaattgtcctggatatcacagtgtttagcatgaaagaaaaaagaataaacaccagtttctgctagtgtagagacaaataacagattgggttgaaaagttggaacataaagaacattatgaagagacagatttggggaaaattgcattgtaccaaaaccttttactttggcactacaaccatgtggcaatttgacataagtgatagaactatcaacatatgtgtaatgaaataaagaaaaatcaaagtaaacatggtgtgtggcaccagtattaatgatccacttagagttagaaaaggatagattctcaccagaaaaatgagagacaagaggtgcctcattggaaggagtagatggcacatttgatgttctttgagacaacaatgccataagtctttgacactgcacaaaagataagctcaacaccaggtcttaatctcccttctcccttaatagcatctccactgtgattatcattcccttctaaattagtttcaatatttgctgcagaaggcttcatgcgttatttacagtaggattagcatttcgattagggaactttccatacaatttatgtcctggaggatatccatgtagcctataacacttggacatggtatgactagtaataccacaatgattacacaccattttaggttgaaaaggttaaacactcctaataatttgaccaaaattagattcaaatgcggacttatcagcatcaggagaaggcagaggacttggagcattggttaagcatatctgtctttcttcttgaataacagatgcataggccttgttgatattaggaagaggatcctgcatcaagatttgtgatcgagttccattataagactcatttaaaccaatcaagaattatagaacacgatcttcctcttaatattcttggatgattttcatagcaccacaagtgcaagttggttgacgtcgatactaggggtgagcaaaaaatccaaaaaatcgaccaaa

SEQ ID NO: 382927 - DNA, 2028 bp, Cannabis indica
aattaaaatcatacaataagaatggaataaatatatggtcttcacgtaccatcattatcacgaataaaaattattattattattattattattattattattattattattattattattattattattattattattattattgtgttatgttaatatttacttaaaaatttaaactttgggttatgaacaatgttatacacacacgtgaatgatttaataaattagataaatattaatattccatgaacctctcatatattccccataatttagagggtgttcacctaatccaatcaacattatttagcttatagtgcatttgatccgtattaaatgcggattttatattttggatccaatccaattcgcatcatagcttcgatccaatccaatccaatccgtaaaagtacagattagatcagttattttagattggttactttataatattgaattacttaatatctataaaaaaaaattattttttacataactgacaacaaaaaaataaattattattgtcttatgtctctaacaacataataaaataaatgaaataaaaaataagaaattcgaaggaagaaaagaataaatatagaaagaaattgtttaattttgttttaacttatatttttcttatatataagaatggaatatacatttgatctattaagttttacaatatatttgtatcatatgtattaaatttttaaattactattttttacattaaaatattagttgtatatataatttttttaaattatatataaatatgtatagattggattgggtcgattacatttacatgtgaatcaacatccgatctgcacaagtgtgaatatctgtattttacgaattggattaggttgaatcgtgcgaattgaatggattagatattttatgaacaccgttaagtccaaacatatactctagttatgtaaatatgtgttcattgataagatatgatgatattttaaagtgatgatataagaataattatctatgagatatattattactaaaataattatgtattatatgtgcatgaggtagagacatattcatgttgcactcgttttttttagctcaggttttgtaccactgaatttttctaataagatttttaacgaggcatcttgcacataattatgaatattgtatgaagatgagatataaatgtattgtacttttttttttcttggttgagattttgtctcgttgggttatcctgataaggtttttaacgatgtaaccttaaatcatgttgagaaacttgcaattcataaaacaagtaaaaaatgtgtgcgactgaaattattaacgtaatatttttaggaaacatgtgaattaacacccaataaaaaagtactaaatacaaacagtgctctaagaagattcttgcatcactcaactaaaatgaaaatacactaaacgagatagatataaactcataattttcaaaaacaatggtaatattactcatgttaaacaaatttgatttcaacaaaatcattacaaatatcaacattttagaagatctctaggaatgtcatgaagggaagtcaatacacactctactacttttctcttgatcaagtttttgtcctattaatatttttgacaaaattttgaataagagagttattatgcacattcaaatgagagtattataaaatattattatgagtgtccaaatcacataaatttattatcaccataaatatttaattatatttcactttattttattgatttagtttcctatttttttaatatttttttgtataaataaaaaatcactatattaaaataaatttgtcaaaaattctcattcccacgttctctcttaatctacatttacatttacaacttcttctttgctatattatatgtattatttataattgtttcataacagtttgaacattctcatatacgtacacagattagatttagattaaaaatgttaaaatctaatctacactggattagatgtaatttgatgttaagtgtgatagttcc

SEQ ID NO: 382928 - DNA, 1092 bp, Cannabis indica
acttagatttttgtaacccgatccttacatcagattaaataagatgtaatgtaaactgaccaaactgactgatgcattttcaaatgcatatgcaaaataagtaaaatctttcatttgatgaaaatttaatttgagagaaataagtatctacattacacttatagcttgtgagttgtattatattatattgtaacaatgatgagaaataataaatgcaatattctcaactaaccgttaaatgtccacgtgttatatcaatctaaactaacttaacttctagctcccaactcccttaagatggagtttaatagtctttaacagagataattatatacaaaactatttttttaaaattttgtatatttgtacctttaaagatttttttatatatatttttatagtattttataaaaataatacaaaaataataaaaaatatatataataaaataatattcaaacgacatcaaataataatatataaatactaaaaaataacaataaaattaatatataaaaatataaaaaattcatattttccttaattagtatgattaattaaagtggcacgtagtttgtggttagtgcaagtgacataagagaagtgagtggaaaataaaatattagcattatgatgtgacaactattatacagcctgcaattttgggtaagacagtgaaaaaagtatggtactactactgcatctgcttaccctataagttaattattttaattatattctttggttggttgccgacgtctccaaataaattcaaaaattaaaagaaacaaaatgtaaatcatcattaaccatctcttccaattctttagtcaaaaagtacccaattcgttgcttttaaccttctcctctcccccacaaaataaaataaataaacttacacaaaagttctcaaatagtatttcacaaaaaagttctagtagattttccatcattttggactttagtaagttgtgattatttaaaattatttgtaatttttttttttacaaaaaaagttaaacattttataatagtgaataaattttatatattttgttgcgcacacacgcacatgcaaaattatgtttttta

SEQ ID NO: 382929 - DNA, 3010 bp, Cannabis indica
tcttatcgaacacccattgtcggtagcaatggaattgtatactggccatatggtgtgtacaaaactgaaggcctagttgcattagacatttgttcaaaacaataccatttggttggtttgcctcgggagttaggccatgactggcgttctttgggttcaagaatacatgttggagtggttcgggggaaggtgcggctagcacaattcttttggtataaaaggaaacaattctttgttttcaaggcatgggaagtagttgatgatgatgagatgtgtaattggaatttagtgcattatcacgatcaaatgaagatgtcggaatgttgtatgagcttgtcttcgcttcttactatacatgctcttcatccggatgatggagatgtgttctttttctcattatcgaataaaactcttaaagctaaggaggatataaggatctttcaatgtcaaatgcttggccagaatcagagtcatattgaaattctttgtaatcttccacctaaaatatacgcctcaagagtaagtgttgtttctcttttgcatccatggtggcctactcaagtccctgatctctatcacccaactgatatttagatttaaaattgcatatgtttataactactattaatattagaacaaaagtattctatcttttcttgatttttacgtttattgaaagatgaaatttggtgcatagtaaaaaaagaaaaaactgttggttcgtttctttcaacataattatcttaggtgaatgtttaacactcaagttgatggtgaactttatatagatgacttattattattattatttagataatatgtttactgttaaaaacaattaaaaaaattagctatttacacctttatactgtcaattttttagtctctaaggtagtgtttggtttaccataatagtaatgttcattatatttgttttttttttcttttttaacttttgtaatccattattgttacattggaatgataattacatataaaaaccaaggtaattctcataattaaaaacaataaagatattttgatcaatatatattattctattacatttctacatcaaatacaaatactattacaattaacattctattgcatcaaattaattatcacttaattgtattattttatttacaaaattattttacactatataagtaattgctgcaatgtataattctctttcattatggtttatattattactgtttaaatgcaaaaacttgcaaacaacaataattgtatctgtcatgaaaagtgaaaacaataaaactgtggaagtggaaaatgcaagatcactatttaaaataccaaaattaatgtatgacttaaaattttaaatatttatagtattttactgtaatttaattcgcgagcggcttaaattttataatttttattttgtatgaatttaatttattaaatatattaataatatacacaaccaaacacgaaaaacaagttgttaaaaagaacacaaaaaatatgatggttgataaataatttaaaaacatatcaatataaataaataaattattagaattaaatctaatcgtaaactgtctaaaccaaaaaatcagttacaaccaaatcttacttacactaccaagaacctaacaaactaattacaacaaaattcaagctatataaaacagctaacataaagaatttaaagctagaggctcgatcttatacctgccagctcaacaatctacactatctttctccaagttgcttctcttctataaatagaagctctttatccaaattttgagttgatttgattttttgagagagcccttcaattactttgagtctcaagataagaacttagagttgagaaaaagtgaaaagagtaagttgtgagtaatagaaagagagtgttgagagaaagtataaagagaagaaagggcatctagtgtttcgagtcttaccaattgatttgtaactggaagctccattgtttgtagtgaagcttggattgaattagtgcatgggcaagctcattcctgaggtgagctcaaagaaggagtaccccatcaacttagggggaatctctataaattcttgtttttaatctcttctcttcttctacttcttacatctgcataattcatcaccatttacaccattaattttgctttgcatgctagcttaaatctactttcttgctcataagaatagaacctgattaattttattgttgttcaatttggtaaagttagatttagttttgtttatttgttcatgtgtgaattcagagatagacttggttatttttcgaaccaaacatttgttcgttaaaaggtcaaaatttaccttatgatctgtttgtaagtgttgacttgtgtagggttagtctaaaaattttctaaagtggtatcagagcaaggttcttgataaaaaaagtcaacaaaagaagataaagaaagacaagcaaggatggaggaagctgattcccagcaagagaattatggcattaaagatttggtggatattcctttgaataacccaattgaaaatcctttaactcaatctcttcttaattcagattttattaataaaatgagtaatgtcaataaaggatgttgaaagttcttgaagaactagtcgatggccagaaggcacaaccagaattcaacaagaagagtttctggaaataataatagggattatcattttcaatacaaccgaaatttagcaagaagagttgttggaaacaacaatagggattatcatgttcaatttatccaatagaattttgtggacaaggaagaggcacctgccaagatttggaggaaattggaagcagttccaatgaaattagggcccgtttggtacgcaggactggattgaattaggcaggctaatttatccaatccagtgtttgggcatgttagaagtctggataactaatccagttaacctcatctgtctgagattatttatcccatccagcagggtgggataaataatcccatgcaggtgagatttt

SEQ ID NO: 382930 - DNA, 1152 bp, Cannabis indica
ggtgacttacaagaggatgcaacaacaacaaatgataacagtgggtttgattctcaaactgttgtggaaacccaagaagaaatgagttcaaaggaagaagctgaggccaagaatgaatctcagaatggttctggtgagaagaaaacagtttctgaagatgaaaatgctaattcagttaatggagatttatatcattttattggctaaagagtgagttttactgtgttttgttattagtgtatggcttagatttatatcatttatattttcttctccattaattagtagaatcttattaaagtaatattataattactttgcagggacaaatcttcttctttttacatcccctatgatgtttataggaggtttgagctgtgtttatcttcatctccagaagaaatccaataacaagtcatcctccaacaggttattaataatgatatttgacatgtgtttgagtaatatttttaattggttttctgattattgagataatggtgagttgtttgctaatgtcgatttattcgagtaaattagggagagtattgaatcgagtgtagttgatagagtgtcgagtgtgtcagaaaaactactttgcaaataattgtcaaaagaagactagtgtagtgtgtaacaatttcaattcagcatgtatacaccttttattacttgtttgtttgtttttatttatggcattcagttcaagtctttagtcggtatttacaattgagaaactttgatgatgattctaacttctagattacatatgtatttgctattggatgcatagatggactttttatatcataagatcaaagattaaagtctttaacttgtggttctctctagtatgatatagcccgaaactttggtttcgaatgaatttatggagaactttttcccaatatgaaatggtgagaaaccataaaaataaaagtatacatttatagagaactttttccaatgatcatgtgcaactttgatgtgtctatgtggtaactacatatatttattatgatgtcttttttgttaattacatgaatgtggatatgtggtctgtcggttgcatatttggttaggaatagctcttctgttcccttctctcatttttttcctccacattttatgtctttaaactcatctctcctt

SEQ ID NO: 382931 - DNA, 2529 bp, Cannabis indica
gctaagaaataatattttcatattataatttaacaataaaaaggatctatatacgatatatatatacaattaattaatgatctttttcttaatttgtaatactaaagtatccgtacatatgaattaactgaatatactatccttaatgattgttatcaatgttgttaatgattgttcagttatagatattttgtttctgtttgtaattaagtagcatggcgcttcagttggctaattgctaattttctaaggctcctaggatgtttaattcggatgctcatacattataacactgctaaatgggctttagccaatatgatcaaaagtacgattgatttgtatgatattattttgtaatgagctgttggttgatttttattaatatactagtatcctctatacaatacaagataactaattgcattacacggcagccgtaaatagctgataattaatatttatataattattgtgttaattatttatatacataaaaaaagtgctttcattatttactttttttttccctctgagttaatttgtgatgatataatatcttcttaatggcaaaatcaaagcatataagtactatgttgtgattatttgcatgttccacccgtagagtactatgttgtaatgccctttgccaaatgagtaatgaaatgctctttataattagaaagttgatcagttatatcgcgttatctaatttgtgtctcgaacaccctttcgtattttgctcctagatgacccttgaagatatcctccttaagttttttctgttaaatgtgaggtctttattcgagactagaggcttggattcatcactataaagtgtgatgcgaaaatcgaaccaaccgtcgcctttacctaagaactaaaccaactgtccgtctttgcctattctccattgggcaagtggttgaacagctttgggttaaggtagcctggtaggcctctgtaaaagtcttcgtgtcactgatcatatccggaattatatttaagagaggctaatttagaaatattaaaaatttaaatacacataaggtaccaaagtgtgtagtcttttagaagagaggataacaattgattataatcttaaacaaaagttactaaatataaacacgtattttaacaaaacataaagtactaaataaataattaccctatattatattatagattggaactaatgtgattatctatttgctatcccattttctcgttcaaaaagggttttctttgaacatcctgaaaacacttattattcatttatatttctgttaaagctcatctataataataatatcacacttttttttaaaaaaaaagaatacatattagaagaaattaaaaatgaatttcatttgtaagtatattataaattatttaaattctccctattttattaatcttttctcgggctgacaactttattaatggcgaagcacaagtccttgtagagaattgtactgatttgagtaaatataatgtaagcgtgtgcatataccaattatattgcttataaatatgggggccgaaagtttcattaaggtatatagttgattattaattgcacaaaaaaagtctgacacttgtaattaaattatctttaaatgctctacatacaataattattataagtatacacagctcggattaaaaagaaaaaatatatatatttttttttcagtggaaagaaaagttaatattttacattattttagctctgtataacaacccttttaaataataataataataaataatatgtgacaaaagaatatttattgaaagataattgatttggtcagtcaatgtttcctcgaaatagttctcttcctgaagaaccagatccactatttattagatcttcgatacacagtaacacttataacatttttttatggggatataaccattttctttagaaattagaaataaaatagcgacagtatataatgtaatatatctttattaattatgagcaaaaactcgatctataattttcttattttaatattgattaataattgtagcactttttatatgggaaaatagttgatcagatacagtaatggaagaatgttttcttatatatatatttctcaatatatgttgtatatatttcaaagtgtcggtgcatggatttctattgaaatttcagatttaatgcactttgaattttaaagcatccagcaagaaaaaagaaaatctttatcgatctaccacattttctttattcagaagcttagaataggtctctttaaaaaaaaaccgagacctgttctaatagtgttcatcacatgcatggtatagcaacatagctatgatttttcatttctttataaaattgattgagagagtaaataaaaaataagatcaaggctgttaattctatttttggtatatttaattgacaaaaatattttattatttcctattaatttcggctggtatgtattaatatggtttccttattttgtgtattcaaacttggaaggaaagttgtctagctttcttattttt

SEQ ID NO: 382932 - DNA, 1357 bp, Cannabis indica
agtacaatataaaatatatcaatagactgtatattttgtaaaaaattataaaaattgtaaaaatatttaaaattatatacatttgtatttttgtatattttttttttgtttttgtatatttgtgaaataattctaatatattattataaggttattattttggaccttgtattttgtaaaatttattgattgaactctctattttattaaatgatacaataaaccatgtattttctaaaactgtaaaaataggatcatgaactcaatttttaacaattttaaaaaaaaaacaaccttgtagacaattcctaatatgaacagatacagaaaatgtagtcaattttgtcatagcacatttagatcgaattattattaaattttattttaataaaaaattatttcagtgtcctatttgtaccattttaaaaaatataaggtctatttcatcatttattaaaataaattgtctaattagcaacttttataaaatacaatatctaattagtaactttaatttgttggctgccttagtttaaaattaggtctgttgagatctttaataataaattacaccgataataatattacactttattacagtgctcacacatcacctttaccatattttggtaacaaaagttgagtaaataattttgtgtagcaattttatagccatgggaaaaagtaagtattatattacacataatccaataacaaaaaaccatttgattggatgctacagtattaattgtcttggaagaatgtgaacattgtgattagattaacttctaatcatatttcctttttaagaataaaatgctttttattttttaaaaaaatgtttataataattccctattgctttaacgatatttaatataaactagtaattaaaatagttaataaagtccaataatgatgatcctactaggattatttaattggctatacaactttagatagatagatagtgtatgcctaatggagaaccagataagtctaatccaactggtttattataatttttttaaaaaattaaaaaagtaaattaagtattaacaaatcaataatgagtgtgacttattcaaattaatcttaattattcaatagacactaatagcaaattaatataatataatctactagggtttttcgttcttaaattcttacccaccggaggttgtattttttctctgactaggctcgtcggcccctcttggacttaggcgtggtttgctcggggtttgtagttttggtaatgcgatttcgtttcttctattacgattagtcttatctttgtgacataattttaaggctaattatgatttttgccccctaaactttaacatgcaccaaa

SEQ ID NO: 382933 - DNA, 4686 bp, Cannabis indica
aaattagacaactaaaagtagattatcagtcaaacaaacaatgaaagtctgaaattgaaacatgttgtgactgcagaccattaacaactaccaaagaatctgattcaatgaagtccactgggagccgaaggtctttaagccattgcaggctatgaattagtgccaaagcttccataatttctggtttaaaacaacccgggaaagggcgagacatagcagcgatgcagtcgccactactattgcgtaagatagcaccaaaaccagtaatttgtttagctttgtccacggctgcatctgtattaagtttcagtctgccagatggtggattcaaccatttaggaggaggttgaatcgggctcacagcatggggttacgccatggaattttgctggtgcgaaggcatctgctggtgtgaaggtttaaccaaacgagcagcatggaactcctccaggtatgagttagacttaaataaaagcaattcaaccggatgaggcttagtaccatgacattctttatttcgttcagtccataagctccacaagatgcaaataaattgttccagttccagctgagagtaaagtgtagaggctcggatcataatctcttgcaaagtagcatgtggagagagaatgttgtcaagtgagaagtgtgaagatctccagaattttttaggccgtgtgcacctaaaaagagcatgaatgatggtttccttctcatggtgacataaagaacaaagacttgtatcgctaatgtgcctcagatgcagagtatttaagactggcagacagtcatgcattgctctccataaaaaaattcaaacttttgaaggtatagagagagaccaaaattttttccaccaactaattgcagcagtagtactggtgtttgggagctgttcttcaagtgataatgccatcttatactctgatttaacagtgtagcatccatcagtttcatggtgtcgtatgagacaatcaatccgaggaaaggtgagagtggaatgctgagaatttctccacatcagatgccaaaacaaagagtgtaacaatggaatatcccatctattatccgtagttaatagatctgaaacagtgatggttttgtccactcctttgaagagaagaggtttaaaatatgtaaaacctggaatccatgaatcagtagcacaagtaatggtgcgaccatcaccaaccttccattttaggccttgaatgagcagttcttttccccatacaattcctcgccaagtgagagaaggataatttcctattccagcatccaagaaagagttattcctgaagtatattggcttcagcacacggcttaaaagtgagttgggatcgaaaaaatcctccaagcttgttttgcaagaagagcttgattaaagtgaacgaaactcttgaaccccatcccaccttctaccttagaagtagataaatatttccaagttttccaatttataccagttcccgaagaatttgaaccccaccagaacttattcatcatgacttcaatttgatcaatgagcgtgttagaaagtttgaaatagctcatagcataagttggaatggatgcgctaccgccttcaaaagcacctctttcccgccaatggaaaaaagctgttcttgccaagaggataaaaatttccaaagcttatctttaatatcagcaaatagcagttgtttgtccctcccagagtaagaaggtaggcctaagtagcgttcatggcatggttgaattggcatgtcaaggatttgttgaaaaactgcttgaacttgtggaaccgtgtttggagaaaaggagagaacatattttgttgcattgagttgctgaccagaggcatggcagtaagttattagagaacgtttgatagcttcagcaaaacggacattagctttgcaaagaactagactgtcatcagcaaaaaataagtgcgaaattgctggtgcaccccttgcaacacgcaatcctaagagattaccactgccttcttcaaactgtaacaaccgagagagtccttcagcacatatgatgaataaatatggcgatagtgggtcaccttgacgtaagcctctagtgggaaacaaatgtccatgaattgaaccattgatgagaaaagagtaagagacactagaaatgcagcgatgaatcagattaactattgtgactggaaaccccatagcaagtaacattccatagacaaaatgccattccaccctatcaaatgccttactcatatccaacttaatggcagagtagccttctttccctcttttcaagtgtttcagcgaatgtattaattcaaatgcaaccaatacattatccgtaatcaatctggaagagagaaatgcactttgtgaatccgatatgacttgggaaagatacggtttcagcctcagaactatagacttagacaccaatttatagagaacattacacaggctaatcggtcgaagctgagacatattggttggcttcttaaccttaggaatgagtgtaatgagagtttgattgaagcttgttgggtcaccaccttcattgaaaactttgagaacaatacgggtaactagatcaccaacaatggcccaataagctgtgtaaaacataacagccataccatctatacctaggctgccatctgagttcatagattttaaggcttcaaagacctcttcagcagtaaatggttagttaagagctctgctatctaactctgaaatggtacacgggatgttggagcagaccgattgcaaagctacattatctacaccctcagtagcgtagatattctggaaataggactgaacaacattagcaattgctgattgggaagtatgttcgacaccatgatcatccattaatttcttgatagcattattcttctgtcgattattggccttttgatgaaaaaactttgtgtttgaatcccctgacttcagccaattcatgcgtgatctttgtttccaatagtcctcttcttgtgatctttgttcacaatgtttgagctcctcaaagtgatcgaaagtagtgagagttgagttttgaagagtagaaactttatgctgagtactgtgaatttgttttggtaattcaccaaatttagatcgatgccacgattgaaggcgagaagagcagcaagaaatattattggtgatctggagaatagggtcagttgttgtgttaatccaatttgtggtgataatgtccaaggcttcatcctcattcaaccataacttttcaaattgaaaccgagacttatactgtctctgagatctcccaggaacactgccaactgaaaccattaacgctcgatgatctgatttaaaaaaatcatagtgagtgacttcatccgccccaaagtcaaggccaagcattattggtaaaagcataatccaacctctctttgacattagtgccattaacacaattattatgccaagtataacatgcaccagtaaaagagatatcatgcaaaccacaatggtcaatagcctttcggaaattttcaatttgtaaatcacagcgaaatggtcctccaagtttgtcagtatgagaaaggacttcattgaaatcgcccataacaagccagggcatcaaaggagcagtatccttcaagcccttcaaaatctgccatgtgaaaggtctttgtgaagttgcaggtgctccataaaaacccgagaaatgaaataagggaccatcagtagtcgaaacataacaatcaataaagtttataccataatttaggacatttacatttacatcagctttccatagcaacaataaacccccactaagaccaactttaggaacctctaacccattagaaaaattaaacttagtacgaaatttagatacaacacctatattaagtttagaccccataataaaaagtacattaggtaaatgcttagaaatgagcaaccggagctgtcttaatgaacgaggactgcccaaacctcgtgcattctaacttatgctattcatgatgattggcgaggctgtgaaccagccttcgccaagagagcaccatcatcctcctccactagtgagagagtagataaatcagaaaatgggttctgggtgttggtgcagagatgcattggtgacatccgtgtctgtagagtccctggttcgacatcttttaagaacttgcctgacattcccaccttgattaattatttgacgtttagtgaaagtggtatgaaggtttgctgcactggttgagtcagaatccagagttgttgctgcagtattgtaatgcaagtatgcaggaggagttgccacaggtaccacaattgctttttgtggcaaataaccaggaggatattccttagaacgatcgacagttggttttgaaatggatgaattgctggactgcccaatatcttgagagagtgatgcattggtagtgcccatatgaagatcatcattaacaatccgtttacccttgagatcaatagtgttatttgcactaggcatatctaagttaactcttttggtttcagaggagagagttttggcatgtgttgaatgttggaaatttattttaccaggatctagatttactaataagtatgtttgattaacaacctaatatgaattctaaaacaatgaaaataaacacatatgaagttagaaaaccttacagtgggtgcagcggaataacatgactccttccgttcagat

SEQ ID NO: 382934 - DNA, 1381 bp, Cannabis indica
aataatttcataaataatactattaacgataaaatttgagattgtgtatctacttaagttcagccattctctttctctcctctttccttcatatctccctcccttaccccataccaatacaacctatggtacactattactatattatcaccaaaattgaagctttaatttgatttgcagtcacaaattaaagcaaccatctaaataacaactctctcttaattcttttccttctctttaaaaaaatataggcaccccgtaatggctaatcctacagtatccaacaatttttggaggctaaaaagaaaaatttatgtaagtgtctaggagaggggctcgaatctgagaggagcaaaccacaaacatgaccgtttgatttgagatacccttactctacattgaaaagactccaaaactaacacattcccaagttcctagactacttacgctacaccaactcatttcgacaaaactacactaacccatcaaaataaatttaccaacatacacatttaaacagtcttctaacttcaacctcggaagaaaactcctttacagaaaagtaaaattatgcgaaaaaattaacaaaaacatcaaagaggaaagtgggttagaatgatgtaccggtacagaattggctgtcaaggtgctgttagcagcgacgagggaggacctacggaatcgtaagaggaaatcggaagacgtggcgttggatagggagggaagaagccggggagcgagaggagatagaaagggatatgggagacgggaagtgaaaggagaagaagaagaaggtttggtggtgaggtgagcggtagccatggccatggatagagaatcagcaagtggaatggagcccatggttagttggatttcagcttgaattctgctttggaaaaccaaccgaagaaagggtttcaaattccaaagcttcgtttcctttcctttccagtccaaaactcccagaaatctacagattttatttctttttattattattattattattaaaataaataaataaaataaaaattgaacaagtaaccgacttggcaacttgcttgactgatagtgaccattaatcgtttatttgtattctttctttttagttgtttaggatttttgttcccaaacaataatttatactgatgttaatggtatgtttacttagacttcatcagaatagaattgaattactatcaatcagatttatgaatttaggtgtcgtttgttaatatttttgttttttaattttttaatcacaaaatgaaagtaaaatttttgtttttaaaaaattaatttttgaaaaacaaaaatgcgttctgtaaccacttttatttttcaattttaaaacagaaacaaaagtgtgttttgtaaagtt

SEQ ID NO: 382935 - DNA, 1813 bp, Cannabis indica
tttttttttggtattttttttaaccccaaaattagagtactaactttggtcatggtggtataagaagtatcgtatccatgtcttccatgttgccggttctgtaaatcacactacaatatttatcttcaataaccaaaatagaacgattggaacgaaagtggccaacaatgttcttctcaaatcataattggaataaataatagatgattccaaatcatatatatcaaacttacggtaattgaaaggggagtttatcattgatgagagtagttgagcacccaaaccatccatccacatcggcgcatctacagtgtaagaaaaatgtggcggtgaggctgagaacaatggcgatattaattatgaggttgagagaaacacgataagtagaaagggaataagggtcaccgacattgagaattagagaagagctatagagtttcactggtttgattgaaagaggcccctagtttgcatttttgaaagaggcggctttgttatgcttatggtttttttttggagagggaatgttaagtttagagttgtgtgtgtgaaatgatattacattagagaatagaaatattgtgttttatttaataataagtaaaaaattttgtaataataatacgtgtaaaaaaattataatttggaatataatgatatgacattacatgattgataattttttgatatgtcatcagacgggtgtgctattaatgggtattacacatgaatggatatttaattattgaccattagatttgatccaatggatgatatttatagttgttaatttttttttttaaattaacattatttatatttacctataacttgatgacatgtcagtcatcctatttttgaaatcgcaatctttgtattccattcacatattcctaaataaatgaaacaattaaaaaatatattaatttataaattgaattgttaaaaaaagttatgattaattttaaacctttaactctctgctcttctctttccctgtggtatgccaaggtccttctttcttctcctcccatggcttcatcctcctctgctcgcatcgccatctttggcgacatcataactcactctcactttctctctcttatgtttttttcttctggctttagagatcaagtttctctttgtctctgttatgatcaaaagctatgggttcccaagctatagcatttgtgattgctatgaatatgatggaggtatttgaaaatgctttcctttatttcgagttttttttatttaagtggttgattttcgacagagttatctatatatgattcaagattttcttttgctctgtatcctaaagcttaacaaggtcaattggtttagattttttcgtaatgtcttagtttaactttcacaagccaaaagcttgagctatattccaatttgtttgatgataaggatttgaataaatttcttgcctgaatgattgaaccatctcagtgattggttgttagactgaaattaaaaacaatgaaattagaacgaattaccgatagaataatctggctgagtcgcggacaatgtcgctctctttaagacgtttcgcagctctccctgaagtgtgcacgacagtctagcaaccatggcgtccccaagataaaataacctctgtataagtacgatacgttctgcaccgaactgtatcgctctataacaccctaaaatttgctctgagagaaatttggaagaaagaaaagattttttttggttgaaaaaagctacattcttacgttgttctgatatgacttgtatagaagtcgatccaagaaaaaacggtaagaaaacggta

SEQ ID NO: 382936 - DNA, 606 bp, Cannabis indica
atttttttttttaaaaaaagtacaaattgcacccttgaacttaacccgggggcctagggttttcacacagtgcccaagttgacgtcctaaatagggttttagatttcgagtgcatattagtaaaagtgactcgaactttgtacttctacatgaataattactatcacaaaaatattttaggcattgaaattagaatcggaacactttcaattttgagcacccgaggcaccaggttcataggacacccaacgcctaggttgacgtattgtcaacatggggtgcttgtaaccagaatcttgaagaagcatctagagcattttattcatctcaatccgattatagaatcaagtgctttttggagagaaaaagatcgaataagaggctaaaatgaggaccaagcgccatggttgatacatgggccatttccaacagtagttcaaatgaagtctcctagccatattctttgttttcatcataaattaagatttgagtgctttcagggaacaaacagagtcatttgagagctagaactgggagcaagcagctaggttgacactggtgctgggcccaacaccaaggttgacattttgtcaatctaggccattt

SEQ ID NO: 382937 - DNA, 2342 bp, Cannabis indica
ctatgcctagggccggccctgaagagaatcatcaatacatatggaaattagtagaaagtagaagtggagtactgatcttaacattctattataatcttttaataatctttttagttagtttttgtatccaatatatatattagaatattttttaattttttattttcacggtgtggtatttgttatatttaaaacaccattcttataatttttttgaaaatttataattaataatttacggtgttgaaaatagatttaaattttttaaaacactcgtgataaactaaaatattagtaactctatttttagtattataaattatttataaatttattcaaaaatttaaagaaataatatattataactataactaattaatattgctaagaaaataatttaaaaaaatattgtaacatataatttcaaatgtagaaatggactaaaaattataataaaaaattgtaataagccttgttgaatgtaaaaacatgaatgaatgaatatggtatgtatatagttaggaagaaggggagtatattggtattgggtacgtagtataactatataggaataagcaagcatagtatattagtagtaatgtatggtatgtcaataaatgaaaggcgagggtatatttgtcattttatatagcttgtaaaatatctatataggtcgaggcctgaggggattggttgttgggagttaaatatttagtttaattagtagtactttcgtgttgttgttgacttcatgactatttgaatatatatatattattcatgagtttcgtgtcttccttttttccatataacatattctcacaaatattaatataaaaggctctctctatctcatttatattttattgtagagaagaaagagagagagagagaatgatgatgagaagaagtaggaaagaagaagaggatgagtactgtttgacgttgttgagagaaaggatcattggaggaggaaacttaagcaaaataagaggaaagcatggactcacaactcctgagattcaatctttgagagctgtctgtgacactttaataccttctttgagttactactattattctaaacaacaccaacaagaagatcgtgatgatgaagtagctgtactcaaacacttcttggcttcttctggggctcaatttccaatccctgaagaggtacgtccgtaatattcgattttaaatttaatatatatttatgatacctacaactaccactattagtaattagtaacaatattgtgtacatgtattatatatgtatagcaggtaggagagttattaatgaaaagatcatctatcatagaagggaggtggatagtgagattggtgttgatgatgctgggaacaaggattggaacactcttcctctctggctcactctgcttcactaattctactaatagtaatagtagtaaatgggggggattattattccttaataacaatattaacaccttctcagcaatgtcaccgcagaagagagaaaaagttgttcaaaatggttgaaacacaagtattgcacacctctcaggctcgcctttctctacctcaaagtcgttactctccacactttcttctccagggtacctacctacctacctacctctataatatataaataaatacctttaattatttgctgacaccatgccatataattaatatataatttcaaacccaattcaatttttttgtcatatattaattaatttttaaaaaaccagttcccttatcatttacacatttatatctattatttatttcaacatcacatctcaccataaccaaataatagtagctacgtataataaatatcgcattcattcatttacatgggaatctatataatatggaataaattaatacaaaacataaccgaataaataaaattaatatttctaatatattatttattaaaattgtttgaaaataaaataataacgatttattatatatttagtattaaaaaataaaataaaaataaataaaagctgttactcttaatatattctttaaaaaatgagattatttcacaaaattttttgttgttgttgttttaatgttatttagatgttattttcatgttacttttatgtagttttcttattgtttttcgtgttatgtctatagaaaattgtaaaatattaaaaaaattatttaaacgtaaaaatgtaattttttttacagaaaatagtgacttatgtaattataccttagaaaattgttgggagaagtattacttttcttttagagtaatttgtagcataaatacctaagattataactccagttgcaaataaatactaagttattttacgtta

SEQ ID NO: 382938 - DNA, 1305 bp, Cannabis indica
cattttcagcaagttggcaggagccaaagctgtgtgagctacaatagatggggaaccgtccaaaaaaacccgatggctcgcagggctttgctcgaaaatcaaagtagcttcatccatggaagaaagatgtattctcaaggtgctacttctcagagaagcaacgactattatagcccaactgtatcctcaatcatgaagaagcgaaacaactcggaacaaactagcagaccgcgaccaagtgcgtcggtgcaacctcgttcctcctcaccaaaatggaacttttaaatgattctcaacttgtgcaatacatgaaagtcattgacaacaaaagttaatagtgttttacagtttcattagctgaaaatttcatttgagagtttcattaggcataatgtaaaccatatttgttatgcctgtacatgacactgatctgaggtgaataagaaaattcggccaaagttgtgattttcctcccagtgagtcatgttatgaattcttttattcttaatatttctcagaaaatgcttacatgggatgttgttgtcttgttgattatttcatgttttggttactaatttgtgtctccttgtaaattggacctaaccatttgagtttgagcgttcattgcttggatacttattttaggtgacaattaatgattgtataaacagaaattccttagtagtaactttattgttttataagtaaccaatccaagtgatatcataatagactttaaattttgattatgtaaagttaaataaaactacaaaagttgttattttgattgtgcatataaattcatttaggagaaaatataataattaaagatagaaaatgaaaattttatatattataatgaactagaatttcacaaatttattatttacttagatgcaattacttgtaccaaattggtctaagtcaatttaagtatgtatgacgataatactatattgatgccaaaatctaaatatttgattaagtaatttattgtataaatactaagtttaacttttaattgcaaataaatatataagtttaatttatggctgtaataatacataaattatatttctgaaacttccgtaagtatataaccgtttagtgtcaaattattattcaaatgctattttttattggtatatttaattaatttttaaataaaaaattaaaatttaataatctgaaccaatcaagattggaaaaaattagattctatacactttttatattgttctctttcatttttaccctctttttaaaactatcagttttacctttttttctaaacactttaccgat

SEQ ID NO: 382939 - DNA, 3061 bp, Cannabis indica
tagaaagttgatgcaatgaaaatcaatttccctttaattttaatttgttggtattcattattattgcctatttgttaattttaatttaattttattagttttacaaattctttttttgattgtcatataaaataaaaaatttaattgtttgacacttaaatataattctcgtagaaacaatcttacttacttgaatatcatttataaaacaacacatatatttgtgtatgttattttcgcaacacatataaatgatctaacagaagaatcccaaactcaaactcaacagatcatcttaagaaagctaatcaactctacaggagtatgcttcgcgaaagcaatagaggattgttaatcaactaaacgttactgcaagcaaccgctctcaatcaaacagtagtattatttgtaactgccaccacaatggacccaacaggaatctgtgaagtgttcgaagactcaatccaaatcgccccagacgacataacattcaccctcaacccaggtgaggtagacgaacctcaagaggaaaacaaagtgctacttgagaaaataataagcagatataaggtgggaaaggcggcgatacaaggttctttgaaactctcatggaatgcaatcagaggatggaagtggaaggagattgaagatggattattacagttcactttcgctcataggaatgatgccatgaacgtcctagctagacgcccttggttcgtatgtggggctttgctagttattatgccatggccggcctggttaaccccgcaagaagtccggttcgacaaaacactcatatggtcaatgtggagagtattccccctttctactgcaacttgtccaacctaaaataaatggttgcaaaagcttcccctgttttcgaactacctcaatgcatagaggatgttatgggcatgagtactttacggtttagagccaccatagacctcaacaatcccatcttcgttggttttttcctttgaagacagaaactcaaagacctatggatttaatataagtacgagaaactaccgaagatttgtttcaaatgtggcctattcacacacgatcagagtacttgcttcaaagcacccacagtggttaaggatgaccaagggaacttttatcctttgtttggcatatggttgaagaaagatgcccaggagaagtccactttcacaattccattgcctaagtggtttcagggttgggtgatgcaaaaacgacttgggaaggatcccatgttgcgcaaccaagtgaaggtacagaaggcacttcgaaatggggaagaggcggagataagggagtgtagaatgcaattccctgggaagagacgaatcatctccgattcagatgaagagagtgatgcacccacggcggaggaggttattacccagctcccactcgtttatctcccaggtattggagaatttgctcctttcgacaataactccaaaaaggtctccgttagtgacctgattgaggcagctgcagagtacgcaagaaacacgtcaaagaacaaagcacaaaagaggaataaatttgaaaagaacaccaaccaaaatggaccccccatctcaattcggtatgagagtgaaagtggacagccgttggaggaaggcgacactggaggcgtacagaccaaagcatcaaatattcccattttggtggaacaaggtgaacccagcaaatgctcttagcttgtcgtttcccctgagtgtaacaaagcagtaacaggcgcctatcaaggaaaggttgtggaaagcccctcaaatccctataaggcctccccactaggctctcaagcccagattattcaatggccaagtaaggaatgttgggccacccaaagctagcgaattgctaatgggctactctaactatagataaatgccatagagagccaacccttctaaacccaataacaagcattgatgaatttagagtccaagaacacctccaaggccccgagaaagaggaaggcctctgatggtttcatagtcagcccaccaacaaaaataaccaccattacagagcagagtaaaaatgcagaacagttgaaaataaccatagacattgatcaaagtgatatctcaacaaaaaaactgcccatcaattctgaatcccctacagtcaatcgacaaaacctccttctagctgggatgcgacctgagcagtagctcctcaaagcggcagggtagaccaaggaaacaaacccacctggcctcaatcgaggatgatgctcaacccaaaaggcgtgggaggccgcctaaatcgcagaacggtctctctgttaccccgaagccgtttaaatggaggaacaagtcgaagtcaaccactagtatgggagccacgataaccaacttatgggaaagtaaagcttttgatctcaaggtggaccttcataatcactttgtggtgatcgaaaacacaggctcagatattaacaaggtgcaaaataacagaactcaatgaagataacacagaaggccactcatctaaacaaccacaatatgctatggattttcgttttggggctatggagacttgcctggaaaagtctccacagtcgccatgaaaatcttggcttggaactgtcgtgggctagggaatgccacgacagttcggcaactgacggcgcttgtccatcaacaccaacccgaaatggtcctatgatcggaggctcgtattccctcagaaaaattccaagctctaagtaataggttgaagtttgcaaaccaccattacatacctccaattgggctatctggtggacttggcttatgttggatgcaaggagttcaatgcaagattacctcagccaacaaatttgttttagaaggagaaatctcttcagaccccccaggacaggtttggcaactgtatggtatgtatgctcctccccacgaaagagataaagaaaccttctggacgacaatcggtgagaagttagtctacaaccaagctgttaggctatttttagcctatgttttggatctaatttatgtgcgtttttcactgtgttgggacggaattacgcttgttttctatgttttca

SEQ ID NO: 382940 - DNA, 937 bp, Cannabis indica
tttaattcaaacaaatacacataattaaacttttatttaattaggtcccactcccaccactataaaactcaatttttaatcatgttaggttatcttattaggtacgccaaaactgacacgtgtatgtttagcttcctaagtgctctatttacattttattttatttttaaggtattctttttaccaatttcaattttacaataattaaaaaaacatcattgatgaaaccacacacaatgaaatgacatttttaataaatgaaaacacaggaataatatggaagaaaatggttagttactactttttattaactttttgagatttggtttatttttatttttttctgggaattttctcagaaaaaaagaaagagaaagagggcttacattgagtgtgcgttgtatgaatttagatcttttcttgggtctttgaggaagtttagaacccttgaaagcaaagaaatcttcttctttctccttattcgttaaagcaatcacaaacttcggaggccaaagagcagccgccgccagttcgccgcttcccgacgacgaaccaccaccaccaccaccacccttcttgctatcgtgcgccgtctccgaagaagctccagacttattgttgatgttgctgttatgatgatgatggtgattgttactgttctcgttgttatgatggtgatggtgatggtggtggttgttgttgttggtggtgatggtggtgatggtggtggcccctcctttcttatcgtgcgcacccctatccggtgaagtaattcccctaacaacaccaccgttgctatggcctctcatggcagttgcgctctctgagtttctgagctcaaaacaaaaaaacatataacaaaatcaacaaagggattcattcaatcaatccccaaatttaatttttcaattttcaaacaaaaattaacaattttttt

SEQ ID NO: 382941 - DNA, 1058 bp, Cannabis indica
aatttattaccaaatctttacttggtatcagagcagtattaggcctacgccatgtcgatccctcaagatcagaccaatccttccttctcgacaaatgaaggcgatcagactcccactggccaaaccagtgcaccaacagccatggttccaacctctgctgctacaagcagttttccggttgctagtccctttagcaacacgttgagccaaccattctccctgaaactcgatcgaaacaactttcctttgtggaagacaatggtcaatataattattcgaggtcacagactcgacggcttcattaatggaactcgaacaccaccaccagagtttattcctacatgaaatcaagttgatggcgtccctggatctggaatggaggttaacccagattatgagacttggcttgtgtacgaccagcttctaatgggctggttgtatggatctatgactgaagggatagcatccgaggtcatggggtgccaatcagcttcagctttgtggagtgctcttgaagaactctaaggagcacattccagagccaatatggatgatctcaggaccaaaatccaaaccactcgaaagggatctcagtctatgactgattatctcaagatgaaaagaatgtgggctgattccttggcccttgcaggtgaaccctatcctgaaaaacacttagtttctaatgttttgtctggtttggatgcagaatacttgtctattgtggttctcattgagtctcaagcccagacttcatggcagcagctacaaagcactctgttaagctttgatggcagattggaaaggcttaatgtcatttccaacaatagcaaactggtgaataatgcatctgccaacattgctcataaacatggttcaacttcaagccaaggaagccaacaatattcaggctcgagaaaaccaaatccacatcagaatagtggaagaggcaaccaaaattactttggaaactcgagaggtggtggataccgaggtcgtggtcgagggggaagaggaagtggacccaaacccacttgtcaagtgtgtgggaaatatgg

SEQ ID NO: 382942 - DNA, 2310 bp, Cannabis indica
ttcaaaaaatgctaatatccaatgtgtcatattagtagttggagaattaagtatggtattttataaaatttaatttaataattttttgaaaggtagggaaattttttttttctcaaattcgacgattcctacttatacaatggcttgttttcgtttttggttgcaacttgccatactttggaatccatcttggcaaaatatttggtttcatgagaaaaatcgtcctaagactcattggtaaaattggcaaaagctttgcaagtcaaaaagggaagggggtccttgattccgatccttatttcactttaaccaagttttgcttggcaagcaagtttgtcgtatcttaaatcatccaaactccattgtggcaaaaaaaatttgttgccagatatcacccaaatatgtcttttttaaattgctctcttggtcactccctcttttgtttgtcgtaacatttgttggaaaaaatagttgctacaaagctcttatctcaaaaattgacaacggacataacacttctcctacacacgttttttggatcctatgccatagtcgcgtcaccccacacaacccagttccaaatcgtgtagcctctttcatcctggataacatgacctgggatactagtcaccttaactagtgttaccctccccgtattgttcaaaacattctcaccattctcctccccgtcttttccactgaggatagccttatttggagactcgcaaaatctggaacatattcggtcaaaactagatactataccaccttagtttctcgaccatttccccatttgacattccctcatcctcctccccttccaaatggtggaaatacctctggcaccttaacatactttccaaattaatatattttgcatactgagcttccacctcaaccttaccgacaaacaagaattttgctcataggaagattatccattcctccgtgtgttcccgttgtggtcatgccactgaatttgttactcatgccctgttcttttgcaagagagtacaaaaaatctggaaggtacaatttttcacctttatatttttttcaaatattgtttctttccattatattgtttatattattcatattaatttaagcaaagaagaagtataattctttctttgtgttgcttggttatttggcacaataggaacaagaaaattaagaaccattctccggatcagactcatgccatattggatttagcgggaaacttcttggtggaatataaatctccagtagctgctcacaaggtcccccttattggtgcaagcccttctgttgttactacctggatcccttgctcaagagcttttcaagttgaatacggacgtctcgaagacccgatctacaaaaggttttgggggagtcatatgcaatagtgatgggatgtggttgatgctattgcttcccctcacaccggcgatggagacgtagctaccattgaagcaaagtttttactcttttcgcttcattggtgcatcgaagagaactttccaattcaccaagtcgaaaccgattgcaaaaccatcacatatgctctagcgaaccataaggaggacctctctctatttggcgaccttgtcaggcaaatcaaatctgctttatctcactttcccaattcatccatcactcatttcaagcgttatgcaaatatttttgctcacaaattggcaaatttggctttggggttagataaagtttttatttggattagagatgacccttgtaatctcaaagctcttctctttccttaagggcatattttcctaaaaaaaagaaaaagaatgaatatgcatgggttgtttaatgattttcttctttaaaaaaacacttatagatgagaaatgttaaaagatactattataaagtgtcatattactattggtaaaaatttaatatcagatctaatttatttaattttaataatgattatagaaaattattaaccacatgtctggccttaggtataggcgggttaaacatgtatttaaggctcacttagcctaagagcccaaaagaaaaattcttccttttaaaattatatatttttctttggtttgaaaaatattacattttactttaaataaggacttaaaaatatttttttcttatgaatcattaaatttcagagtgggccatgactaaccatttttagaatatcaactcataaaggtgatatgtaacataatgcctaatagtaatattttgaaagaaacgataagtattttcaaggtgtcattttataatagtacagtagaacatttatttaagaatactctattcaagaataacctc

SEQ ID NO: 382943 - DNA, 3054 bp, Cannabis indica
ggagtcatacatgatcatttattttgatgtttttaaaatgaaatatgctacatacctatagaggcaaacaaagtatgatctttggtgatgtgacattgaagaataatagtaatatgacttcatcgttttttcacctttgaacagagccactcaacagttgacttcatattgatctcccggctgctgaagggtgatcctcactctggaattccagatccatcgcatcttttctctcaccattcttgtcattgcaggcaagttccagctttaaaggaatcgctatatgtatctaaaattgaaattgcaatttttccttcttttgaaaaaggctgatgttctctctcttatgattgatatatagtattacgagcagaagccctatatcttggcatgttgatgggcctcgaacattacatcacaacttctctgcatccttttgcgaaattaaactaagtatgacaatatacaactcgtccaacaactctgcatctgtgcacattaacactcatgactccagtggcaattcaagtgaatcaacatcagctacaactactggcaaccaagtaggttggcacgatgtctcactagttactgacattaaagtcacaactgatgtccttgcaactcaatctgcaaagccaccatctcttgattctgtttctccttacatatggtctgctgcaagttcaactagagtctgtattgagcccatgtcaacgatcgaaattcctcttcagatttctgtattttcacccgggacgtatgatatttcaagctacgagttgcattggaatcttctactgcctaatggtgaaacaaatgttgattcttcaggtacatgccaggggtatccttattatcttactgtgctccaatcagcttgatgttcacttttttgtttggttccattcggactgtactgtaaattattatgtgtaatttactctttacgacaataggaattacgaaaagggttaggatctgtaggaagggtgattttttttttctttttgtgttgtagttttggttctgctcaattgaagaataagagcaattaagatgaatataatttttataccatttttggatagattttactctttttactcccaacactttttcccctcttgtaatcatatggcgaatgcgattcatgcattgttgtcactttgaaccaaaatttgttaacgtttatatttcttttaaaaaggtaatttttttttgatagatgtttaattcaattatcaaaaccttaatgcttagtaatataaattgcacaaattactcacatgaacaaatacacataaattggattaatgctatgggtgtggttgaattctgcttattcagttgatcaaattgttgagcttttcaaggcaatgaatttgatatttatatccaattagacatataaaatttaattgataataatgtcaaactacaattgatttgttttctttctttcgttttcatgcggctttaactagatatatgagaagttgtaggaatctctcatctccatttgtacatttctcaacttccacacattttagaaacaaaaaaaggagacttactattttataatatttatttgacatctacctttatgaatgttggagtaaaaagctatcgtgttgaaatattttagtctacctcttcaatacctaagggtgtctttattatccagctcgagattgcttctggtcaacgaagccattttcagtatcttaattatcaactatcccactttatatacattttagtaatattcaatctcaattaaacacccctacctatcccatcccatttgtacttaagatcttcattctcatccccaaagaaataaatgattttaatttaattaatgttcaaacttcagatttaatagcaaatatttaatcataggttaaatagtaactatttagtatttacaagaactatcaattatcaagtacataaccgtaatcaaagattcctccgaaaattattaacgaatataattagaaaagaaaaacaaaatttattattaacaaccagccaaaaaaaagatatatagagaacaccaaatgacatatgaccaagtctcaaatttacttattattattatttttttcttaaaaaaaagtctcatatttacttcacaagtcatttcccaacaatgtttattttctcaaaaagatgcgatcaatcatttgaaattgaaacaaaggaaaagaagaaaatacatgataatcagacacacaagtaggttcgaaaagacgtacaaagccatcaaattttcaaattttcttaattaagctatgacattttgcatctacttctttctacaaactacaattatttatatcgataaattatacgtgtacttctatatgaaacaagttaattatatggtttacccaaatgactttgtctttctaaccaagtcatttcacctttggattggttggggatgcttcccttgtgttggtcttgctgtttcttttttcttttttccttaaaaagaaaatcctaaaaagggaaagataaataaattaaaattaacacataaatgtaaaaatgtcaaaacaaaaaataaaataataataaatataaaattagaaagaaagagtgaaagagttgcaagttgcaagccgcgtatactaatggaattggaaacaaacaaactgaaacagcagtctatgtggaattatagtaatactaataatcacataagataataagataatgagtattgttattaggcaccatatgttgtgttgcaaatggttagcaatactctttaaaaattattatatgaaaaactgtataagactagatacttaattagatcaataatgatatttacacatgaaaaaagaattaagtaccacccgtctataagataaatatcaacacacggagaacagaagcatggaactttccaatttataactttcctcctttctttattttctctcattttcccgaaagttccattaaataaacctcaaatctttctcttatctctctctattctttgactctttcattcctcttctctctctctctctc

SEQ ID NO: 382944 - DNA, 1452 bp, Cannabis indica
tttgctctcaccctctcccaatatctaaatggaaatagaaaagcatgtatcaaattattgatcataaatcacatctaaaaataacccattattaaggaatgaggtccaatattagtccaacaaaaccacgtttgagtaatgtacgaatggtccgtgtgccagttgttctcagaaagtgtcactcccattttggtaccttcaaacgtaaacccactcattttcttagccatgtcttcctagctattttcttaatttagcaaggccactaataggagagcctaattttgatttaacaaccagactaaaaaagcccttgacgtagtattcgtagtctagagataatatatttataaatgaaacttaatcttatcagtgtagaatgttagtgtatgtaatattgtatatcattgttatataaaattgaatgtgtatctcttggaatgggacaagggagaaacactcccatgtgcatagccaagttcaaaccaccaagaaacgtttattttgttttgttcaaatgcgagacgtagccagccataacgtgtggtggtagactatgtacatatttttatatgatcatttacttttagggctttatgttatgcccatttgtatataacacataatagtaatgaggttcatttatgtccgcaattactattcttaccaaaatataggaggctatattattaaacccaactatacaatgacgaacccctcacccccacccccaaatcaaattccatgatcattaaagcctaatcaatactcaaaacctaatgactaatattagtatatttataaaatgaatgtgaaagcacactatacattagcatatggttactaatactatactaatcttatgcatcatgcacgcacgtggccccaacaaatatgctttaaaatgaaaattagagagtcaatctttcataattggaagagaattaagtgatgtagagaagtgaggggaatgatcacatggattcaaagatgaagattgaattcataaagacgtgatattaatgataggtcagaaagaaaaaaggtctgaaatattggatttgtattgtcccctttggtttttggtttggtcttcggcctttggccctttgataaggttccattcacaatcacatgatcatgcatgttgttgttgttgatctttcaaatcagcccatccactcttgctcctagttttcttgacatctcccttccctcttcatgtgggcactatattactttgtacatatatcttgtttgaatataaaacaaaacacttattactcaatatataaatatatatagagtaatattatatttgcacacataaattacacacaaaattgaaacacttacatagcaaattcgtattatataatattataatttagagagaaaatagagaagagatgataatttttttagtatcttattccaatgtgtgatctccta

SEQ ID NO: 382945 - DNA, 1612 bp, Cannabis indica
tactgagtttcagtactcttacacatagtattgtatatcatatgtattgaagaattctaacatacacacaaatatgggtatctacaaatagtaagttgcttataagattagagattagagaggttgttgagaaatccacctctcgaacatagcaaagcattctttgggattgaactctggagctgtatgacctcctccctgctccaaacgaaaacaatgaaaaggttatactatttgttatttaataaataatataatatatataaaattaaatttgatagatcatatgtttgagtttatattatatgatatatagtataattatatacataactaatttatgaagagttagaaatctcaaaatagaaatgttagagtttatagctattggaaaatgtttggaacttatttatatcatttaaatgaagttttgaacattggtatgaagtttgaaacattgatgaaagagttggttcataaagaaatttccgagaaggtcttgggcaaccaattgggcaagaaggtcccgagtgactaacttggcgagaaactcactacaaagaatcttacttttagtcacgacagaacttgtgactaaaaataaaaaacatgtgactaattataaattatcatttttatgttgtaactacaatgtcaatgactaaaagtattagtcacaaaaattacaatttgttgtgattaaatgtgtttttagtcacagtacttattgtcaccaaaattaaactagtgataacttgtatttaaaaactatattttagtcacaaataattttttattacgactaaaaatcacatttagtattacaaaaaatttatgttatgattcaaatgttattactaaatgtaactttttttttttttgtagtggccttaagctaggcactggcattggcgagtaagtattagataattaagctagtctgggaccatcttggcctggtgaaaaattagtctaggactagcttataagttattttgggaacaacttgtcttggagacaagccaacccgggcgaccaacttggtctagcgacaagttgatcttagaatctccaagttttagagtcccagagtgttaggtcctagagatgttagctccagagttccgaagacgttactgaatgttgagaatttaatgggaatgtttctgtgccaatgtatctcatcccatttactgcactatttaggttagtaatagctattaggtgtgagtttcaattgtggttcctaacactaaatagagggctatagttcactttatcaacacatttttttcttctctatctatagagcactagctatagaagataatctaaggcttgttgattcctgggaacatttctatatcatcccaagtgtttgatagtaaggagaaataagttttttagacaaaaatgttaaaacattctccaaatttttagtgatcccccacattgctacacttagtgttctttattttcttcctcttctcttttataccatattatatatcatatattatttagactattgttgcttttacttttattttttaccttgtaattttgtgtttttgagttgtattgtcttctatctctttctaatctttctttt

SEQ ID NO: 382946 - DNA, 1137 bp, Cannabis indica
atatatatatatatgaaactgagtataaagaaattaatacctgacaaagggagagtcaaactccagggatttgttgaagaagcccgtgtagcatgccaccaagaccatatcaaaactatctcgtgcttaatattgtctgggcccattacaacaaaattaacgagtaaaaatgagaactttgaatgtgaataaaacggtaggctgcctaagacctactaattcgatagaaaaactgggtggacatgaatgagctgtaaagtgaggaaattttagattttttttttttctatgatttatccaaggatgactgatgaggaaagtgggtgttgaatgaaacttgaaaagaaaaaatattaaagaaaaaaaaaatgggacccaaaactcaagccaattgagtcatagtttggcaatgcaatcactttcaggatcaaaaagttgaaaaacatgtacaatgataaggaaaacacaggaaattttagaaaaatacaaacttttaaaccccaaatataataagataaagaacccagttatggtataagcttcaccaatagatgctaaacccagaatttactcgcaaaaatataaagaagcaagagagagagagatcagtaccaaaattaagtcttcatatgaaaagcttagaagggtagatttcgttttctccgtttttctcttcctgagcaacattttcccgagaaacaaacagagaagtaaaaaagcgaagtaactgaaactcacttcataactgacaatggagttcctttctggttagattactggtcctgaacccccaaagaaacaaactttgagttaaacaactgagaaaaatgagagcttgagtagaaaacaacagagtatgagattcaaacgctagagaatataccataaatgggtaagaaagagagaaagggaaatgaagtgaaacgggaaagagaatatgaaagaagaagaaaatgtggagttatagagtttgaagggagaaaagggttgccggaattggattccgagaagggttcaggctgaagagattcagagaatgaatggcagtgtgtgaaagcaaagctctcagagagaagaagagaagtagtggtcagtgaccataatttttttttttttttttttattattattttactt

SEQ ID NO: 382947 - DNA, 1618 bp, Cannabis indica
actataacaatttgtttgacaggttattttttgctaagtgataatgtagggttcaaatgcaaacctaattatatcatttacattttcattttttttatttacttactataaataaaattatttatatttatttttttttcaattatccataatatataattacatatgaattaccgaatatactatgtgtcttttaattttttttattttttatttaaaaccacttatagtgacgctctaagagagttgggacacattttcctagtctctcctagtgtgactctataagttggtattttttattgaaaaaaaatcaaaaaattatggatattactatttagtaacacttcaaatttttagtgacccacattacaggaggctaataccgaaatttagagtctaactatgcgtgtcactaaaaaataatcctaactctttagtgacgcgcataaaagtgtaagtcactaaataatgtcactaaaagtctaaattatagtagtgacagtgtaatatcacaaatacaacatatttcaagcactaatttacaataatttaacaattatctcaaattaaaatgtcaaaacctaaattggaccctattatgcaaaaattcttattccatacctagcagccccttagaatcactcattccaaactcaaagctattccaaaccaggcctataaacacaatttcaatcccatttaatcccacagccacaaaaattactaaatcctactccaaaaccaactcaaaaatagaaaattctcaatccataaagtaaaaaagacttacctcaaagcttttatggtatcctaaggagtagttcagctagaaaaatagatggattgcagcaagaattcctcccaaacttggctggcttctagttgcacgaaagagagagagagagagaacaaagtattttctttcttagtatctaagttactaatttatttctttccaaaagtaaattcagcatttttctaaccttaaattaataaacttctgactaattatcactaaagacaaaataaaacttaacataagaaatgactatattacccttctaaagaaaacttaaactatttgaaacctaggggcattttgataattttcactaacacgtcaaaccgacaacctaacactctaaactaatccagaataacatccaattcaattcatctcttattatcgtgacatttttgacctctctgccaaattccacggtcgcgggccgtgaaaatattttattccaagaattgtatccacgatacccacataatccaataaaattttcgtaattaataaattacactttatttaatcatttattaaatttacactaattaatctaagtaagatcataatcttacttcattacgagaataattacatatttaataaaatatgtctaattaaatacaatgttatttttcgagatattacagggtcgttcatgttttagccagttatagtgctatgtagattgggattaccccttgtgcaagtcctgcttacagcgagactcacctaatcccatgtaattttctcttgatgaaggaatgtggtttgaaggtgtttcagaagtcagattcataaagtgcaatacaaaagattgcg

SEQ ID NO: 382948 - DNA, 1264 bp, Cannabis indica
ttctgatcaatcaccatggttctcacccgaagaaccacttcctcaggtcttccttgggatcctatgacaatcgatcctgatctccatgttcctcccaccacagaaggccctactaattcggctaataccgtcaaccctacaaatcctacaaatcctgccgaccctagtaaccttgatgatcctgctaactcgacaaatcctaatggtcaacccttgccacccaggacaaacccaccagtaatgcctcaaatagaaggccctatcaacatggaataacctccacagagcacaactagggttattccacggtactacgcaggagaagagggccaggaatcggtgaaccatctattagtgagcctcacttggaccttagggatgatattgagttagctaggctcagagaggttgtacgccaagccactcaaacaggagaagaggaaccatgcgctgctggttgcgatgctttcacccagcagagatgcaatttcctaaggtagatggatgaccagaaggccatcctgcgagcccatcaggtggagttgaactgccgtaatcgagaagtcaatgacctaatgaggcagtttaatgagataactaccagaaggggtcaaaatctcataagagaccctctacaaggaaggcttattgataggtcaggcaggtagaaaatagacaaacagtccaacaaggtcccttaaacacgaggatagaccttcccctgcctgaagacaatcaaatcttcccagatagaccatatggcaagaacaaccagttcctagcaccaggaggtgttggaggacgagaagacaactctgggtaagaaacattgccaattggctaggccctagctggatagcataataattctctcccctaaaatattcgagaacaatttgttctaagacctagggatcttatttttgacagattaggtcctaggataggagaaaacgcacaatacaacaataacttgaggagggagaactggagtgactttgttccacctctagataatggtttctggtaggtggatcctccaaacccaagtggttgggaggaccaacctatcaatccacaaacttggttggctggccaaaggaacttggccggtctggccggccaaggaaggttggtcggccatggggtgctggccggccaagggtatctgtccagccaagaaaggttagctgaacatgaggccacaagaacagatctatttgtgcaagcacagttggatcaactcaaatacatgatcaaagac

SEQ ID NO: 382949 - DNA, 3256 bp, Cannabis indica
attaaataattatatataatattcataaccatttatcaaatgccacctctaataataatgctgtgcaaaaatttatttgtccaactaatcataatagtaataattcacttgtttgtagcttattcgtccctttaaggttttgccaagtggtgtggacattggagcatgaaacaaactcgtttacttgctatatttgaaccatttaaagcattgatcataatatatttgtcataacaataatgaaagtctattcggaaccatggacgagttgcctaatggcatctgacctgatttcgggtttaagggtattccaccatttaacaaaggtggaattacttaagaatacatcctttccaataacattgtctttcttccattgcaaaacccgttcttgaatcttcttagctttatcatcctcgttcccatgagtacagagctcctccacctctgcccaaaaacaggactcaccacaatcaccttctctcgtctgtttgccatgctcgtaccatcgttgagggtacttgtaacgttttggtcttcctcctgccatgtatggtccggtgtcttcattcttcaggtgtctgtagtagttggctatgtctagtggctcgacaaggcggcggtgtcgagttcctagctctatccacttagcctggccctcgaattcgtctggaagtttgtaccctttcaacaattcaagaatctcatcccaaatgcctgctagtaccagcctttggatattggctttgaaatcctcctgcctcttttgaagcttgaaggaatcgtagtacccgagtttgtgaagctcacactcattcttgtaacgctctatattttccaatgccttttccatttcccttacctttgattcaactgtttttttaaggtttgtcttctttcgcacctctgcctctcctgccgcgagcaggcacaatctgccgcttgtactctgcaaattcattgtcttatgatattccaaacatgactgaagagcttaattgttacaaaaggtttgaacacaagtgatggagaaagagaactttaccagtgcaaaggcatccgcagccttgtttactgtgtcgatttcgtaagtatctgatcttggttcaccaactgagaagcagtctttatgataggtctgcagtgtagattcgtaggcatagtgatctgctaagcttcttttggcaatctccaaaacttcagcctccacactcggctgacaagtgtaaaacaagagctgcaagacagcgttggagttgtccaaagtgataagcttttcttgcccattgaagaaggcataaaccccaaaaggtctgtaaggacttagctcgatgaagctcgtcacggtttccagcagcagatttgtgctctccatgagcttacaagcaacatggcttgtaagagtcagcacattcctcattacttcgacgaagtaatcttgaaccaaagcgtttggtgcttcttgtgattgtccactcaagtatttgaggattgttttaaactcttcttctttggtgggaagaggagcaagaaagatccgaggggcaatgtcgaatatcgaaacgaaatggatgaagtagttggaccaattctctctccggagagcatgagcaaagatatggcttcctactaaaggagatccaaaagtgacacataatggaggtgttgagaatttgatgttttgttttctattttcttccaacaaccagattgtggctagaactgcgattgggcccccagaagaatgcccagtaaatactattttcttgttctcccttgcagcattttttacctgagtagaaaaaacaatacaacaaaatggtacacttgtgagaaaacatgtctgcaactcaaacaaatcccagtatgaagtttttacaaaccccagatgtcatttttctattttctaaccaaggaatttaattatcaatcaaattatctaaatttaaaccaattaacaactacatgtacagcacataccttatctttaagatctgatttcgccaatattgattggaatctactctcaaaagcttcattgactagtgctttttcctcgttgcctatgcttctcatagaaggaaatagttgaagattaatttccttttctccaaagggtcttgttctgttaccataccaacttgtgacagaccaagatcccggaaagctgtaaataacttctgaatctgagggtgaactactagcttttctcaggaattgcttttctggagacttgtgagccttcatggcctcagagagagctctcttgatgagttcattcttggctaacaaagtttcaggctttgcattagccatcatctttcccaacacagatttttctcttcaggctcaaaagatgcttgctttgctttttcagctggtgaaatatgatgatcgatcaggctgtgtttcaagaaaataccctttatatagtatggattttggggagctaactatgcattacagatgtaattatagtctattatatgaccctttttgtcattagctcatcatggactgaaacattattagtagacttgtatgtctttttatttttatttttggtgggggagactttagttgtagatggttgacttgcttgataatagtaatattactagaataccacaaataccgaaatacgtactgttatttagtttttactttaaatataaggtcactttttataatttttcgtttggaaatttcttatgtgctactttaaggggaaaagtagtgagaatttcaagggaataatctttaaagagactagtaaaatatgtgttcatagtatgaaccacataaatttgtcaatggatatcatatggtaatttcttggcattcgtaatgtatttttcccagtagcttacttaaaaaaaaaaaaaaaaagaagaagctgaaatgacccaaatatttcttggtactgaataataataggaaaaattcttcccaaataattgcgtttcttctacctcaattttgttgcaattatttcaattatttaagttaaaaaaaataattgtttaaagatgtttacttattaacaaactgtataaaattaattaataattattagtaatttaattttaaatataattaattttaattaaatttttataaagaaataaagtatcaagttacaagttatttattattttttttttaattttttaaattaatcataaccattcaacaataatctaatggttaaaataaatataattgtgatggttatatttaatgtaaccattaaaac

SEQ ID NO: 382950 - DNA, 5493 bp, Cannabis indica
gttagcaatgtattttgaaagatcaagaagtatggtcacaggaggaacgcgagttaattttgagaaggtagtttggtgtaagctctcagccccaaaacacactgtttcatcttatgtctggtaattcgtagtaatcttcttaggcgggataatcttgttaagaagcatgtttatgttgaatctactatttgtccaacttgtgagatgggcctagagaatcatgcttatgtattctttgactgtccatacttatggagagtgttacaacaaataacgagttgactagggagccaactgtggccaagttcctttgaggagttgagttgattgggtgaacacaaagaggccaagatggttaaatcgtaatttgtacatatttgagaagaagtgcttggcaccgaagtgtatagatagtcattaaagagaattcaaaagttagactgagttttgtacaaggaaagaaagttatcacaatatgatagatatgtgcttaaaagtgtaagggagttgtaatcaggtttacttggggctcatcccagttaaagttgtaaatatgctcagtttgattaatcaaatattacttcttgatcaaaaaggtgccaaacacctcttagtcttaatggacgactgaatacaagaaaacaagttttttatcctaccctttcatttcatttcattaattgacagccactaatcttaccgttatcactaatcaagtatgtaaaattattataaattgaccaaaatcccatacaccaacaagagtcaaaccttatgtcattttccacaatagatttcctctgacaagttcacatagaacaacttaaccacaagaagtgtcttcattcttgagcaattttagtagcctagtttcattcatcatgtggcttcttcttctttttcttcttcttctgttaattctaattcaaaaaaagctcaaagcaaaacagtacaacacatccacacaacttcctccaggcccttcaaagcttcctatcataggcaacatacaccaacttggctccacaccccaccaatctctatggaaactctccaaaacatatggtgatgttatgctccttcgattcggaagactacaagccatagtggtctcttcagcagaggctgcagaagaggtgttaaaagttcatgacttggagtgttgcagcagaccaaccttagctggtttggcaaaactttcttataacaaacttgacttgtctttcgcaccttatggtgagcactggagacaggttcgaaaaatatgtgttcttaaactatttagtgttaaaagtgttcaatcttttcagttcgttagagaagaagagatagattctttgatagaatttctcaaggagtgttctccttcggctactcctgtaaatctaagtgaaaagatgtatagtctcatggcaagtgtgactctgaggactgcctttgggaagaggttccaggagtgtggtctagacagtgatacacttgaagatattattcatagagcaatgactgtagttgggaccttcacagcttctgatctttttccttatgtgggttggattattgaccggttgactggtcttcatgcaagatttgagaggagttttcatgaattggatgacttcttttgtagtgtcattgatgaacatctgaaaagaacaccagaagaaggaaaggaagacattgttgattggctgctgtgtatagagagaagtgaatctgagtatgcagattttaaattcactagagactgtactaaggctgttctcacggtaagtatagtaattgattagatttatataaatattgtttagcttatgattggtaaaattttgaaatgactttttgtgattgcctataaaaatttataatttatagcgtgaaaacggttagtttcagttaggatgttagttgctgtgcaagatttgacaatatgtgaaaactaaatatcatacataagatgtatgtgctactcctctttttgccaattgatttggagatgaaacctcatgattcttaacatccaaaaagatgagccaaaagagtcgcttgtgattcagggataataagccaaaaagaactactgtgagcgaaaagagccacttgtgattcggggatagtgaaccaaaagagccactaactatcttgagagaggatgttagagagtcagtggaaactaaataccatacacataagttgcatgagccactcctcttattgtaattttgagatggaacctcatgcactataccatacactcacctatccatacttcctcaactatacacttccacaattctaacactatgtaactaattcttttgtaccagagtttgttatagctattaattttccccaaatcatatttccattgcttcttcttcctctgtctttactctgctcgagttaaaagtttttgaactctttcagtgttgcttgatacttggtataagttcattgatataatttattattggcctcataagattacaacaatactcaattttaaatttatcaaaaagattaaatcatattcttaaaaataatgtctattctaattaaaataaaaacttaattttccaagtgtgaatttatctttgtgttaggatatctttcttgctggtatggacactggtgcaatcaccttaacttgggcaatgacagagcttgctaagaaccttagagtaatgaagaaagtacagaatgaagttagaggtttgagaaaagaaaaggtcacagaaaatgacattcatcaacttcaatatctcaaaatggtaatcaaagaaactttgaggttacaccctccagtcccacttttactcccaagagaatccatttctcatttcaagcttgccaattatgaaattagccccaaaacacttatccaagttaacgtttgggcaataggacgtgatcctaagtactggcaaaacccagaagagttcttccctgaaagatttagtgatagttccattgattacaaaggtcaacactttgagcttttaccctttggagcaggtagaagaggctgtcctgcaatgtatacagcaatgactatggtggaactcacacttgccaatctcttgaatagttttgactggaaattgcctaatggaatgagagagtcagatattgatatggaagaggcatttgggcttactaatcataagaactctgctctaaaacttgttccagttacctgtaattgagcatcaagagataaaatttagtgaaacaacttcttataatatcttcctcttaagtgtctcctttaattcttgatgtattttgtgtcattgattttgttgtttcatctatgaagtttattgtatttatttaagctgtcgttttcatgtttattgtgtaagaaattttatatgaaaacatgaagtatatataataatgtcgaattaatcgaacgtacacaccgtataactataggatctatatactttcagcgattaattttttgagatttaatctcaaactagctttgaatctgaaaaaaaaaaaatggaaacttattagtgtgggtaatgggcttccaatctctcaactctttttagataaatttactgtttcgtgagctcgggaccgaaaccctatatttatataagtgagacttttcatcaaaatttctgccataattaattgtcaaaatattttgacatgttaatttaagaaattaaatcgagaaatcataaatttgctaaattgtaatctcaccatatattgaatatcaactatttagttgtgtccacttggtcagcatttattttattcttaaaatagaaaatattctaatattctctcacttggtccgtatttaaatttatctcttaaacccaatgttcctcattacataataaatatatgaattatagcgataggtcatcattatacgtcaaatattatcttccatgtatttcgatatattcattatataacaatatacttaatgtgacaatgtacttaagcgaacacaccctaaattttatgcttattttggtcctcttacgatagttttcttagataaaattaagctacacgtgaatatgggaaaaatatcgaaattagaattttattgaataatttcgctgtacccttttcccaaattcagaccaatatttatcaatattacaagctcttgaaaattttttggtttcgtgaataagggttagggaggggtaggtggtgtttgacgagaagaaagagaaagagaaaaaaacaaatagaaaaaaaatattttttattttataaattgttttttttaatatttttaaattatttttaaatattttataatattatgtggaccactaaaaatttgctacgtgtacaagtgtgtacacgtgtacagtccactgtggcacttaactgtgatttttggacggaggtgtgcagagcaaaacgaaactagggtttaggtagttatgctgccgaaatttcagtttttgtggttaagtgttacaaaacgtaaagtttaggtggtttaaccgccaatatccgttattattatgtagtttttaggtttaaatgaatcatgtttttaccaatgtataaacatacttaaatatgaaattttattaaataaaaattgcatgtggactaaatttttaatttaataagattagatttagatatagattatgataaatttaagcaatttatgaaaaacttaaggtttaatatttttatctcaatgaaatgtgtgaaatatttaataaatattgtaaaattttatactttatgataaaactatggctaattagtaatttttccccctgaactttgacatatagtaaatcgtgccccctgaacttttttggctgttaaaaattcccctcgaactattgagattgttaaatttaaggaattttgtctaatttcattcaattttactatttcagtgattgtttatatactaaaccatgctccccagactttgatatctaccaaatcatgcccctcaaactttgatatgtactaaatcatgccccttgaactttcatccatgttagaattgttttactaaaattagacaaaagtcctgaaatctaacaatctcaatagttcaggggaaatttttaacggcaaaaaagttcagggggcatgatttggtacatgtcaaagttcgggaggaaaaaattactaattagcctaatttttattgcagctaatgtttattatatgtggtataatagaaatatttgtgtgtttaaatctatatgtagttttgttttgataatttatgttcacgttaagcaaactttaaaggccagaggaaaggtatggtcatttaagcaaaatagatgttgaggttctttctgtgtataatagtatgtgaccatttgtgttagtgtgttcgtgttgtgttgaaattcatatataacatctatatatttgatttgaacacgatttatttaataattgtatcaaaaaataaaattcaaacacaatctgtttattaggggtgttcgtgaagtgggtggtgca

SEQ ID NO: 382951 - DNA, 1163 bp, Cannabis indica
aagaaagcaaatcaaattaaaaggtaacacatagaaactaattacctgaaataactaaataaaataactgaaacatagaactataaaaggaaataattacatacacaaaccaattatctaaccaattaaaaatttaatcatatataagacatataaactaaaaaaaaaaaaaaaaaaaaaaaaaaacactaacataaaactcttaataaatgacttacaaagttaaattaaaagccttgaactctaccaaaacaaaacaaaggccatgaactgtttatctgaatatgtcaatgaattaaaagcttacaaaggctcaaaacactaatactaaatcacataagaccatacatctaaaaattcagaagaacaaatttgaattttgaagtgagtaaaacttataggaacagcacaatccctaaactctttagctgtgaattcaacatttggattcactgtcccaacaagatgatgaggcacccctacaccatttttaacaacaaaacaaacaatatttacacacataaacgtgtagcctaaagtctctgaaccaaatcgatctgaaatataagcttaactaaatctaaaagaccgcaagaaatggttcatcaaactcagtcaaatcaatttttctaaactaaaatcatagttcgttctccaatatcacacgtagaaagaaggatttgcagacgtaatcaatcaaaatctaagattcaaagcacgataaattgaagaaaaaaaaaaatcagatttacctttctataggtggttccgtcttcttcgacggtctagccagcttcattgcagagagctttaaggacttcattgatgtcacagtgcttgagtagcttcgttgttccctccgctagttgttatctctctccttccatgacgacattctcgtgtcggacgccatgattgttgtttatcttttgtttttctaacttgaattttcatgataaccaaacagaaaatcggatccaaaaagtcacgtggttgggcgaccggatgtttatcgtttaaaatcttggaattttataaaaaaacttagggaaaaaaacaggaatattctaaaaagggaaaaatattacaacaatactgtgggccggcccaatgaacatttgtacagcccaaaatgaaaatattacaaaaataccacttgccct

SEQ ID NO: 382952 - DNA, 1774 bp, Cannabis indica
aacgttgagaccaacggacaaataaaaagtgtgaccttgaggactatgccgcttatttttggaccttggggactaatcagcatcaacgtgaacgttttttggggactttttgaccgcaaaattttccctaatatatatgtgcatatataataaaaaatggaaatttttccaattgttgatttggtgtgtgaaatgagaaaatgttaaccaaatgaacaaatcaaatgaaaacttgttcgagagaaagtgaccttttgtgtgacttgtgaggatttaacgtaaaattgtctacaaaatagccttgaaatccaattagcaagccgttaaatgtgggttattgcttacaagaaacatattaataccaaataattcatcaaaaggttgtactacttttgtgagacataatggtagtacttctaattgtaagcctacaatacagaatatatactcatatttatgaattatgaactgccttgctagacttgttacacaagaaattgtgttacccctctctcacgaaatagaaactatgtaatagcaacaaagtggagtaaaatatgaactgtgtgagtagctgttaacaactttctagtataattttctattaagggtgtaggtatttttaatttattatcaatcaacatgcccattttttatatcattagcgtataaaaagaagattattctacattaggagaaataaactagaaaaaggtgactaatgaatcaaattgaaccaaatctcaactttcaatggatgtgtcagtgttttctatgccagaacatatatattcaatgactgaatgataggaagataggatcatcgatggatttggggccaagtgtttgtttggtgaaaaggaaaatacaaaagaaaaaaagtaactgtaaaggaaattaagaggtaaaagagtaaggtatttgtagagagagtgagagagagaaataaaaattacaagataatacaaatgagcattattgttccttggtgtcttttttttcttttccatataatatagttataatttaaatagtttgataagcacaagtaattatttgtttgcaaaaaaaaaatatttaaatcatgatttgaatttttcttttttatttttattatttataaggatgatttcaatattttaaatcatctaatatttctttaaaaattgtagaaagcctccattaactatagaaaattaaataataactcattcatagagaatattttataaataataatgaaaaactatcacactacttaattaaaataattagtaattttatcccctaaactttcgacattctgatcttaccccttaaaatatactggttgttaaaaattctccctcaacttttacatttacaaaaatttttcttattaggtttcgtttcgttattccgtttaaatgcatacgtgtcttggtaaattaataattttttcccataaactttggcaactatcaaatcatacccctctaaataaaaatgagaatattcaacatttttttagtaaatcttaaaatattaatttagatcttaaaaaaattattttgaatgattaataaaattaaagaaataaaattttaaaattaattaagtgatttaaaaaatccatttagatataaaaacactattaaaaatttaatttttgtaaaaactaaggtgacgtttggtaatacttttttaattagttttctgtttttaaaagtggaaaagtagaaatatttttcaaaaacatgttctataaaattgtttttacttttcaattttataa

SEQ ID NO: 382953 - DNA, 1660 bp, Cannabis indica
ggagagaatctagaagctatatgccgtggcagaacctttcatgctccctgtgagataacattctaaacatgatttcttttgtatgttttataattttatttgtgcagctcctttcaagcataaattaattgagaaactccacccatgtcatgttcattctaacctacacgattttagagtgaactgctgattaactgatgtatgaaagatgttttcttgggttgtttttaaacatacttcaattctttcaatattttgtcatttatgagccatattttgcatcatttcttaatgtaacccattacggaaaacatttttatttagtacaatacatcaaatggaaaagctagaagtaaatccacttgaaataataatttgagaggtgatcattaggtatttgattggttcaatagttcttagcctaaaccaaattatacctggttttgttaagtgtaaagaagaaaaagctggagtaaccgggagtaaagccttcattaatatctcgagaaattacaggctgaggaaagtacatatacaagagtggaaaagaatctagcattagcactagtccataaaccaagacaaacagaaactgaaccaaactttacaagactatcattaactatacaactcactaacaatatctttaaagtattctaatttttattagagtttgcaataaaaggactcctatccctaataagagaacattcctttcagccttcattgcaattagaagcctttattaattctcattggggaatgtcttgataataggtgctctatcacaaggttttgtcatataagcaatagcaactacaagctgtgaactaatttggttgatagccttcctcaaaagatactttgtacataaacgacatatactgttactgtggtaatctatccgcccttcattcacattgctgcaactcccattttcgttagcgcaatgaagctagagattgattgtaatgttcacgaaagaattcaatcaggaattgttacgctatgaaaatattactgaggcattattagtaatttgcaagtggtgtgtagagcctattataaatatgtaatcgtctaaaaattaataggtatggaataagaaaataaaacttttagtttatttttggagatttgtcttgtctagaaaaagactattcactatcaagaatgcttaaaaaactttgtatgtgtctcaaacgaaaacttgatgatgttcttaccaagtccttatccagttcaaattcacttttcttattgacaatatggcaatgttcaacatagacatttcatctggaggtgaattagttattgaaatattgattgagaagaaaattttgttttattagaaattgattggaaagaaaattgaaattattttatattgtttacattatgaattaacctaattaaatggactaaattgttaaatttttattaaaatatgtacctataaagtagtattttagtgagatacattttaaactcatgaatgaaaatatttttattgagatatattttaaacttgtgaatgaaaataattactatacaaatgattgaccttaggtaaacacgtcattaatctatttgcaatatctaattaactaaagtgtggtggttgatgttctctaagaaaattaaccaaacgataaactga

SEQ ID NO: 382954 - DNA, 2053 bp, Cannabis indica
aatctagatcctggtaaataatacccaacaatctttacacgtggtgtaatggtagatcgaagctcttgtttttgagagactagatcgtgtttttcgtaatatggcatactatgttccaggcggccatagtgaaacatttgcctcgatggaactcgaatcattgtcctttgctgttacagcatagcgttctcccctaatctccaccttcctccaagatgtggcattctagattccattatgaacaagcatgggatgatgatgaagagtgcaaatccatggttaaagattgttggacagttggaaggccaaatcagttgcttgcccatttggttgggagttttgatagatgtggacaaaaacttgctggttggaatcaaacaaagcagaagcttacaaaacagaaagtgaagaatcttaaagctcaagtggaatccctttcttcatccaccgaaccccaaaattggaagcttttatctagggtggaaagggaattgaattgtcatcttgccaaggaggaagccttttggcgtcaacgtagtcgggctctatggtgcaaaaatggtgaccaaaacacaaaagttttgtcatcagcaagcatctaaatgacaaaacaagaaccatagccatggtatccttgatgaaaatctaatttggcaaacacccccaataaaagttgaggaaatattcacaaattatttccagcagctctttacaacacaacaacagtcgacaatggattttggacagctccaccattttgttccttgtcggttgtctttcctagataatgaacagctgttgttgccttttactgagactgatattcaggcagatcttgctcaaattgatcccctcaaggccccaggcgtggacgaatttcttggattattttaccgtgatcattgggatgtgatgggtaaagccataaccaaacactgtcttgccatactcaatgatgatttggactgccatgctataaacaagacattaatatgtttactccctaaagttgaccatccgaccaaggtaaccgaattccgccccattagcctttgcaacgttagttacaagattattgctaagtgtttggctaactacatgaagacatgtctcccattagttatatcgaaaaaccaaagtgcttttattgaaggtcagctaattcaggataatgcgatcttgggtttgaaagcctacattgcttgaaaaaaggtcgcttccgaaatggacaaaagatggctttgcaattggatatgtcaaaagcatatgaccgagtcgaatggaaatttttggtagcaatgatgaagtgtttggggtttgacgatcggtggactaaaaagattatgaactgtatcacctcggtttctttcgcgattattcttaatggccgcatctgtcatgagttcattcttcaaaaggggatttggcaaggagacccgctatctccttacttattttgatatgttccgaatcattttcttgtttgattcacgaagtagagagagcgcatgctatccacgatattcggttcaacaccaaggggctccacttgtcccatctatacttcgcagatgatactctagtctttatgaatgcatccgtaacagaaggtaacacttttatgcgtattctgaatgagtatatggatctttctggtcaaagtataaatttggaaaaatctgaaatttacatgggtaagggggttaaagaagaaatgggtgacttgattgctagctctattcgagtcaaactagtccattgccatgctcggtatttaggtttatcggcttatgtggggcagcgaaagagagaagtttttgatacggtccaacaaaaaatccaaaacaagttgcaaggatggaagcgaggtctcttttctcaagctggtcgtgaagtattgatcaaagttgttgtccaggctattccttgctacataatgagctgttttcggctcacaaagaaaattatagatgaaatccatgcaatggaagcgaggttatggtagggtgtgttgggttttatgccctaaatataactcatttcaatataatca

SEQ ID NO: 382955 - DNA, 680 bp, Cannabis indica
aaaaaaaaaaaaaaaagtttaatactatattctcaataatttgcttactttttggtagcaacacaaaattatacaatcactcatttaaaaaagaaaaaaaaatggtaaaataaataaaccaatgaagtcttgctggaatgagtatttgaaattgcaggagcataattactcacataaactattaagaaattctaaattagtaccgaaaaaaatatgtaacaaagaaaaatcaaaattaaatcttataaagaggaaagagagatccttaccattccagaaaactcgtgttttctctccacaaagctttgctgggtctcctccttttcttcacctgcgaaaatgaaccaattttgaatatgcacatacatatatatatatatatatagagagagagagagagagagagagagagagagagagatgaccattagaagaaacatcgtcttcttcagagaaaagtgaagacggagaaaagagagcaatgtccatagattagttagtccttccctctcttcagttctgctaaaatctcttactaaaaccctgctcacataatattttatactaattcatattaacccctctaatatcatataattaaggtaatatttttatttttaatttcttaatcacaaaatggaaattaaatttttgttttataaattttatttttgaaaaac

SEQ ID NO: 382956 - DNA, 2915 bp, Cannabis indica
gcctatagtacttaacttagttcttttggaaagtgagtagtacaaatagaagttctgatgtattgatataaattctttttttataggatatatattccaactaagttaaattttatttattgtatttttcgacaaaaattcattttcacaactgggcataaagctaaagagttagtaagagaaaattttttaattttttattttggaatttttaggagtttgtttatggaaatatttttaaatatatgaggtgattttatatttaaacttttaagttgtgtgttgacttatatcaataaattttcttgaggcaacaattttacagagaagatgatgaagaatagaagtaatattaacttatatgatattaagagttatgaaggttaaaattaggagaaccatttctaatcattttgtgaatcaaacatacaaaggttagaccagaataattttaatgttaggctcttgtacaataaaaatcctgttatgaccatatatatttatagatattgctaattttgttatgatcatattgtatttacatttataatacttattattattattaatattattattattactattattattattattattattatgtataaatattatgttttccttaaatgctttgggtgatggattttgggtagcttatcttttatatgactataagaatataatttatttatgtttttattattattattattattattattattattatgtataaatattatgttttccttaaatcttttggctgatggattttgggtagcttatcttttatatggatataagaatataatttatttatgttttttttaatatgtacaaaggttttaccgtgaacattattctcggtataagttatgccgactactttttatatgttctcattagaaagaaacttgtaccgaggaagcactaacgaggaccttctactggtgacttgttctcggtgaagagttgtatcgtggacatttcagcttgtaacgagaacaaatgttcttgttacaagtcttattttttgtagtgggtacatctgaatatttttcttacctcaattcctgactcaagtgtgtcggtcaacctgagtggaactctgctcggcagttggaggccctatgtcacattagcattaaactagtaagtggatcgctcaaatactccccaagactaaaatacataatctaaagtttttctattgatgaatagggtggaaataccctaaataatttaaaaacaaaaatatcaaagtgccatcgaattgcccaaccagtccattgaatttcttaaacccaaccggttgaccgcttcttacatcccctcaaccaattctgctactggttcactaactcaaaaacttttgagttctcatcttctatacctatccaaacggtccaaaactctctagaacaactcacaatcacagtaagaattaaaatatgaactcaattcaaagcttaaaccagaaaatcaaaaatcactattaaagagcaaaacttaaactaagaagcttaatgtcatcctttttgaatttcatttcagcaacctgaaaactatactaactcaaaatcaaatccaaagaactcaatataaccatgaaatactttaattaaggtattatcttaaaaatctaacttagatcttttaactacaacttgaaaaagaaatcataaggaaatcttaccttgtaaatacaagctcagaccaccaaaagatcactcccctccaagattaactaagattcagctcctatcttcaacaaattttgaaaacttgatgaaaattgaagatgtatttcttgagtgtttagggccaagagagaggggagaaagggttgggatttcttttggctttatcttcactattctagcataatcctagtagataagataaataaaacttatcctaattcctaacataaaaaattaacatgatgtccttaaaagtcatatccctcataattaatataccaaatgaataattttcttacccctactaactcacataatcacaaaattttttaattttccataattaattctcgatactgctaaactgctaaaactatactattgtgactttttcgccaatctaccaaatttttattgttgtcgataataaacatatcaatattattacacatacatatattaattttctaaaattaaatactaatcttatatctgcctacttctataaatatgttttaatctctaattgcacatcatattctatgttttactatgataccaattaattaataactttccatgtctaattatacagtcattaaaattattcctcgttaaaaggtgttataccgaaaattcgactgccacatctcagtggaggacacgtgttacgataaaggggaatatggatcgttgcaatcgcattatatggaataactcattaattacgtgagtatcagagtatatttgtaacttgtagactgaaaagtctcaggcgaggaactaatatacaaactggtacttagtatattagcgagaaactatatgtcgctgaatgcgaattgcgagacatcaaggacagtacacattggaagacgaaaagcgacatatatccattgtgaaagttcttagagtacaaactacgtacaaacggttatttcgactcaaaaccaagtaagcgaggtgcccgtcttgctatgggaagaactttctatagcttcatctagctaacgtcagtaatgattacaaccctggcgagttagaagataacattcaaataggcttcaaagaagtctttgtaaataagaaccgcaatcgacactagacatacatcgtcgacctcggaaggaagaatggccccagctcgctattgggatcaacggaaccaagtttctgtcgtagacatctccagatacaacaactaaa

SEQ ID NO: 382957 - DNA, 2248 bp, Cannabis indica
taagctgaataggcgcttcctgtcaagaaaaaaaccaaagaacccttctatatgatcctttaaagtctaaacattacatgagaacatgatcaacaagaaaagtgtggcaaaaaaagagaccaaagtggtcttctggcaaaatatagatataaattgcaaaaagaaacaaatgaacaatcaaaagttgcataaagtaagataagaaaatattatttaacctgaagtaattcaataaacataagggagtcgatttcaccttcctaaacccaaaacaaaaatggagaagtgaaagaaagaaaccaaaacaacaaaacaaacgaggtggtcctttgttaactttttaagagctaaactgtacggacatatgaactttccttgccagagtacttggtaaggggaaagataagcacacagtcaagtgttcacatcaccacacaggtgggacatggggcgtaaaaaggtgatccaataaacttgtatagtaaattattttcactgtaatgataaaatataacagtgaggctcgcagaaatctggattaataaaacaaaaaacctcagcagactaacaagctaagcacgagaatgaagaagcaaaagaaccttggcagaaaaaaatgaatgaagaaacaaaagagtggcctaataaaaccaaacataaaaaaaaagtaacttctaggtaagtgcaaactacaaaacacagaaaaaagacactgttgatgtccacagtgacatggttattagtttaaagcatatatagatctaacccaaatttcaaaaccagaaaaaccatctgccaatatgaaggggccacaaacctttcattgcgattaaggcgagcaccgaaatagaaagccaccgagagcaaccaagaatcagtatgaactgcaaccaaggagagccagtctttacgtttcatcccatctctggcaaaatttatgcccaatgccggctcaggaagctcaggaggaacctcctcagctgggagaccaacttcccacgtctcatttgggtgtccataaaagcacagattatctttctctgaaaatagagatagagacaaacacaatctctgaatgaaagttgaaccaaaaatgttctaactaacataattcaaaaacccattagaaaattcagccaaaaataaataactaaccctaaacttagacatcaaagagagagctctttcggtttctgagaaaatgcgggataaaaagggaatttttcaaatctgaacgcaaatccatgtattctcaaacgacccacattttgtataaattcaaaagtcaaaagctaaaaaatttcatggattcaagacaagaaagaaattaacacatttcatcagaaagagaataaccgcaaacctggatcacagagggcatagaatgcatccacatctgaaaccacaacagaaacaaaaatgccatcattcatgtgtgcgtgtatatataacaaatatacatataaagggagagagaacgagagagacggagacagagacagagacagagaagcagggaaggtatgggtaccagaagtgagagcgcgaataagagcggaacgacgagccgtgtagtctttgaagatgtcttcaacagtgcgaggtctggaagaaatggcggaagccattatggaaataaaaaaggaatagtatttgtagagtggtgtgatgatgaaaatggaagaagcagatcgggcagtagtagcaatgagatgaaacaccgtgaattgaatatgatgatgatgttgatggggtagctggagaagggaccaaccgaaccactttgtactgcttcttcagtcagagagcagagccttatattctgataccatactatactactacaacattcaacaacaactgctattttactctttcttcttcttcttcttcttctgtttcaaattcacaatcaggattttgactccgtctgttgtcttttgggccccaagcttaggtttcttctcgaatctcatgcaacaacatttgggctgggccctaaaatttattgagacaattacatataataccaatttttgtaaaatatttatatatttaccgtctaaattttttgagataatccattaatcaaaaatacccttatattatatttttttcaaaatatacccactttttttgagtgagttgctcaatataccctcactctctacttaaatctagggaaacttacaaaaatactgtttttttctccaaattttacaataatactgccacacggcaataattt

SEQ ID NO: 382958 - DNA, 4009 bp, Cannabis indica
tacgacgcgacccttctgcttgaaagccttagctggaactggtatcaaagtcaccgtagatctacccaacgagcttctttacgcggcagccaaacaacagtcctttgccaactcatgggttcagaaaaacgtcgctgcttattacccatctaccgagattgaagctcttgctgttggaaacgaagtcttcgtcgacccgcataacaccaccaagtttctcatcccagctatgagaaacattcactcggctctaattaagaacaagctggattctgccatcaaaatctcctctcccattgctctaagtgccctacagaactcataccctgcatcggctggttcgttccgacctgagctcgtcgaaagcgtattcaaacccatgttggatttcattcgcgaaaccgggtcgttcctcatggtaaacgcttacccatttttcgcttacgagtcaaactctgatgttatatctttagactacgcactgttccgtgagaacccaggtgtcctggatgcgggttcaggtttacggtacttcaacctcttcgacgcacaaatcgacgccgtttttgctgcaatgtcagctttgaaatacgatgacattaagcttgtcgtttctgaaacgggttggccatcaaagggagataagaacgaagtgggtgcaagcttagacaatgcagccgcctacaacgggaatctgatccgtcgaattttaaccggtggtgggactccattaaggcccaaagatgatctcaccgtttatctcttcgctctcttcaacgaaaataaaaagaacggtcccacatcggaaagaaactatgggcttttctacccggacgaaaagaaagtttatgatatcccttttactgccgagggtttaaagagctaccacgatgaccggtcaccggctagtggaggagaaccatccggtcaacaggttactagccctgtcaatggtggaggtgtgtcgaagagtttaaccggtagcacttggtgtgttgcgaatgctcaactggggaaagaaaagttacaggcagctctggatttcgcttgcggtgagggcggtgctgattgccgtccgatccagccaggctccacgtgttacgatcctaataccattgaggcccatgcctcgttcgccttcaatagttattatcagaagcagagccgtcagatggggtcttgctattttggcggggcggcttacgtcgttactcaaccacccagtgcgtattttaacactctctcttaattataattttacttttgctgcgcacgttaagcatacttgcggcgtatggtagctaggtttcaccgtttcaatgcataatgcgtaagttacggtgttcatgttagcagtaagactgcacggctaacatgcacttggtaagttaaaagcttaacgctggtccacggaacgtgtggaatggagttgtgcatcgtctacgccaggtcatcacgtgcctattttatagtggcagtgatgttggtcacgtgccactttttgttagctataaagtaattttgattgggtgaggaggggtttaatataatagggacgataccgaatgatatacattgataaaaccaaaagggtaattaggagaataattgaacgttgaaaatcgggtaatagtttttgcattgataaaagtggtggtcaaacattacaacttgtttgctgtgtgtactgtttttctgcttttgttttattttattttatttttctgaaacagtatatttgtttttgcagggtatggaaagtgcgagtttcccacgggttactgaagaaaaagaaaatggaggacgaaacagggatgaatggtttcgattagtattaggcttttatgtatgtttgtagtttggacatgttattatgagatgcttaaaatttttgggggccgctggctttgtatgtattttgttggttattttaacgattttaacttaacccattatgtttatatataattagacgatttatttcacttactaatgttcaatcgttttattattgcaattttcatttctactatcagattttgtgtttataagaataaaatacagaaaaggaaaggtaacagaaaaatctgtgtgtacaaatagtcccaagtgtttctctaataattgcgccatacaacaactctactatatatcacagcgtaacatgtaacaatcaatggatctccaaatctgaaatggaacccccatagctaggtcatattttctaaggattattaagaccaaaaggtccaaatcaaaaaccaatttcacaattatcattcataataaaaagaaaagaggattagtaaaaggcaatgaatggtaggtcctgcatataataaaaagagccattattttatagcctaactgctgcctaaaagttccattggatcctcagaattattcaatgcttcggataaaaaagaaaagagtacagtggaattggtctgttccagattttcaagtgaagcattggcatggaggatggtagatagtaacaattttttaaggcataacatgaaaggctgccaataatttttgttttttggttccaaatgaaagtgggttttgacaccctttccttttgttctttcaattactcagtattgtgtactgttgatccccatgtgaatacgggaccacctactcaagtacatctttttctttacaagacacgtaattttgaaagtgacatatactacttgtaattaattaaaactaattaatgttacatatgtttttttatttttagggactgcggcatgcaaactagctaaaaaatattattatgggaaataatgcaatttaatgaaggtgtattaggtgccattgtcaccgaaagatgagaagatttattgtaaacctacttaatttgtccatgttcttaaaccgagtgacttttccaactaacctaattgaattgtattgaaagaaacaaattgcgaacatgtaattagtactatgtaataataatttataaataattacttggaatgtgacattcttcaacaaaagatttgtaagagaatacaacaataaataaaataaataaataataagaagcaatatgtatgacataatgtctgtctctatttgtgagtgtaccactttatgtttcagaagagattctccttgcctcctctaatggcatttactgtggcattcacatggtgaattattgagcctcttacttccatttcaatggttacaatatggtttttctcattgtccatttcaataagttcaaaaccacatagagtgggcagatttaagcttatgagaagataaataattgactccttattgtgaggttgacacactaaagagaatattttgtagaaagagacctatttccatttattctattatcctctttattttattaaaactattaatctttatattcgaaagaaaaaaatctaaaacaacacgttttttttaatccagtatgcactgcagaatataagaatggataatgaaaatatggttatgaatatgaacggaaaagaaaagaaacattatggagaagagaagaaaagaaatagttgtgtcttaataaaaatgttgaaaatttataatgagagatgttgaaagtgtgctctatttggcacaataaaaataattttgtgatatatttgtattaatttttagtattatacttcaatacgcacatttctaaaagttatacaaaatttaatgcttaatatatgttattcgtattttcagaaagaggacatgtggtatattcaagttaaagatagccaactaaagttcgaagataggctcggataaggtaacaggttggatccatatggagagatgggccgcagtccatccggactataagttgattattacatcctgattcggactactccgaacccaagaagacatccaggacagagaagaaggaataacaaaaatcctctggatgagctattgggatacttctagttaagggcacccaagagacgtcgtgaaagccaaagctgatgtggcgatcctctga

SEQ ID NO: 382959 - DNA, 2530 bp, Cannabis indica
aggctcgattcttttggtgaaaatgagcagagaaagagagagagaacagaatcagagagagagtttaagtgagatcatgcagatgaaacttaagtcaacattagctaaattgctctagttttgagtgttgaagagcctagaaagactaagggtgttcatgatgatcttgtactgaaattggtgtttgtaattgcaagttcatagtggagaaatctccttgggggagagctggagtaggactcaagatttgagatccgaaccaggataattccttgtgttttctcactgttttttatgttctaattattctgtttatgtttctggttttgttagtttaatatttgttcattctttaacaaattggttgatctgagtttgtgttgtttgtttacaacactaactataaaccaaacattgtaatcaatatctattactattcttattccattaaattaccattaaaattaccattacattacaccaaaccaaataccatctttccttaacgagttatgactttgccaaagaaaaaaatgtttttaagggtaccattatttaccattagtactacttttagaaaaagatatgattttttatatatacaaagttgtggttggagatgacattgacagcctcaaaacagttcaggtgcatgtcattactcaatcaataattttgtgaaattattaaaaaaatatgacagaaatttataaaacaaataatagtttatttttttttcctgaattagaacaaagacatgtcacatgtacaaggtatctaatatctatctccacaaaattgtttaatttatgaagaaaaagaaattggggagagaaatgagcgccactagtacggcccaagtgatgacgtggcgagagtagaacgagttgggacttgggaatgaaaacagagacagagagagaagagaatcaagtactttcttttcttcggtctcatcatgggtcgcgccttatgcttctctgcttggtccaaacacagaatcggagtttgaagagagacaaactaaatatatataaatgaagaaagacaagggcatcgcactgtttccccaccaagacgatgaacaccacaaccaaaactaccatgccgccaacaaagacaatacctcctttccttctgttagattctcttctcgtaatgcttcttccaaatacgacttcgtcaaggtccttgctttctttttgatctctttttgaatgccaatgtgaatgtgattgcgtttgttttgtttggttacccagaaagtttcactttttttttaatcttacaggtgaaggtgtggttgggtgataatgcggatcactactacgtgctttccaggtttttgctcagtagaatgctgactgttactaaggttttaaatttcgtacccgccttcttttacaaaatttttaaattcatctacgttttttatgcttgattgaaatttcaaattaatggatcaaagtttgcattaaccgattactttgattgaatcgatgtttagtgcatttgattgcatagaatatatttagacgcaagaattattgttctattgagtttcatcagctttgtagttttgggtattgtatatgggtttgtgctgtttcccctctttattagctctctcttcattgtttttgttcacctaatcttagttagaatagattacaacttaatggtatgtgtcgtttgatgggatgacttgtgctgatttcagatcccaaatcatgtagcaataaaaatcgcacttgagctcaagaagctgcttatagacaacagccttctagatgtgtatgtcctacgccacatcttctttttctcatttgtcgaatgatcatttttcattttgtttttgacttaaaaaattctttctgtttctttttcagctctcagtctgatttggaagctaatctgtttaaggtatgtgctgcttaagtataagagtcctgatttcttttgcttttccaatatgttaaatttgacaagagtttaactgggagatatttgcagcttatggagcggaggggttatggagaggagtacattaatcgttacaagatgatgaccaggtcagtgttccattcttatctaggatatcatcaaattctcattggtttccaatgtagatgatgttcatgtgaagtttatatttatggtcattctgaaataatcttacgtgtgtctaaagacaggtaatcccaagattgacatcgttaattttaaattggatattaggggataagggtactaaaagtaaatgaaatggtaatttcttcatgagatgtggtattgctgtattttatgtcacaggtttcatcatcaaagagtgccactagtcattcttgtttgtggaactgcatgtgttgggaagtccactattgctacccaacttgcacagaggctaaatttgccaaatgtcttgcaggtacttatgtatacttatagatgctctcctactctttgacttgagtttgatgtctttgacatttgtttcctatttttcattttcagacagatatggtttatg

SEQ ID NO: 382960 - DNA, 2858 bp, Cannabis indica
gtatattaatgtaaaatccccttcaactttccacggtagttatcggtccacacaccgacacacgtagtcaatgtttgaagaagcatggagctctattaccaactaaaaacccatgattagtacctctgttcataataaattttgtgccttttttcatttcattccttaatttcctcctataatccaaaaaaaagtactctaaacccccatcaatctaatcaaactttgaaaataataacataaataatattaaagtacattaataccgatacccaacaaaatgaacaattataaacatactatacttgcatcttaagaaaaccttaataaattgtccacacaaggcaaataataaattaattaacggggacaatttaattaataaaaacgtagacgagatcaaattattaaaacaaataatctacaaaccaagagagaatgggaatcccgtagctctcaaccagctccctccaccaatgaaattgccagctgtgtactgctgtgcctccgtggcacttgtaattacctcaaaccccttccacgtcaccctactcgaggtacccgacccggctcctctgttctggtactccctatacaccaaagtattcaaagcaaagcttccactccactcgtgccacccggcggggacaatgacgtcagttatgtccgattgcatgacaactgtcctggaatactccttccaaggcctacccaagtaagtagggaagctgctcttgactgaggtcaagtcggatgtggatccgatccggcatttttggatcactatacccgtgttctggttcgggtcagtccgaccctgggcggtaaccatgttcttctgacccgagttaggtcgccgcgcgtggatgtcacagtcttggagcaccgccgcggcgttaccgaagatgaaatctacggtgccggctacgaggcagttgatgtagaattgtcggttggagtggacgtagagagtgtcttggtatgcaagcatgtcacacttgtagaatgcggatagatccgacccgacccggagggcaacggcttggtgctttgaggcacccgctgtgttttggaaagttatatctcttgctaagaatcctgaaccaaccgcagctgcaaagggagggaagaatgataatatggtaagaagagggactaaattgtaaaaaaaagttaatgaggggtgtttgataaatttttaaagaaataaattacaaaaatataatataaaatttttttgaaagaaatgtattattttggggggccaagattcccaattgatctaacgtggatgtggatcagtcaagcacatgaaatcaattaatttcttttgtcattgttgtagttgtagtgtgaagcttcttcttatctatatacgtaatattatgctagtgctagtggttgataatattaaattttacagagtacaataacacctatagacggtttcaaagttcaagagacgatacacgtaagaggaaattttttcgaaaaataaaatcaatacctaacctttctatccagcctaaagcttatgattcaaattgaacattttagtactatttataatatgatcaataaggatcttttacgaccatgaaaataaagcagttagcaagctaggctatagtcgtgaaacgtttttgggtccatccaaaaataattttgtcgatctaacacaatttaattattcagtatatatacatgtgtgtgtacataactagctaacacactagactagagaaaactaactagtggtagctagcaagatgatgcaagtgtaactctaaattagaaatctgtaatgaatttaaataatgaagtctcacataaaaaaaaaatgagttgtaggtatctaataataagaaatgtaagtaggggaaaattaataatggataataaaatttatgatgaccgaactttgtagaagcaattattaatgaagtttaaatatatatatagagggcaagaacaatggagccccctcaaagagagaaccaaccgaaattaaccaactacccaaatttctgatccaataattgttatttatagacgtgtatcaacgaccataaataaaaataagataaagttatatataggaagggtacaaacagtaaaaaaacagattgaggagaaggattgggatttcggaaccaaccacccgatccaaatgcagggacatatataagtgacaagtctatagaaaagaaggaccaattccttttgattgtaccagtggatttaaaaagaagaaacagttgacagtggccaaacatgaccgaaaacataaagtgactgttcaataatgttgaacacttataagaacaaaaacaaatataatgcacatttttacgactagcgtagtgtgtgagtgtggccaataaatatgtgtgtcccatgaaagtgttttgttgaggttaagaggggatgcacttatgagttatgacttatccatattgttgtgcggatggaattaatcatgcatgacagtcagatataatcggtaccctattcaactgcttacctttacagttacttgtaactttttctgagaagctacattagtactttaaaacaaagaaaaaaaaacaacattattgctaaaaaagcatgttgctttagtatgagttttcatatagaaaacaaaaaattgtgtagtttactaaatattatttatttatttaatcatagtaggaattttcctttcaagatctagaccgcaaattatgctatctaattaaggggaaaataatattattatagctgcaatctatttttatatataagcgtaggggtgttcattggatcacatccaatatttttaggcccatccagatccgatccaattatatattgga

SEQ ID NO: 382961 - DNA, 2585 bp, Cannabis indica
tttttttttttttttctgaagttgtgcttacaattataattatcaggttcatcacaacattgcgattgcggaatattttctaaatggttgttcagatccaaagaggttgctagacaaactcaataatgtaaaggtgaattacctttctctttctctctttttgttgcatacatgtttgtttaatatgccagtggttctcttttattgcatttcctcatatatgggtccacaagtatgtaaacattatttatacctacttgttctgtaatcctagtttatctaaggcccttaatgatattttagagattttacattaattttctgtaaataaggttggatttctagatgtcgcattgttcatgaaacataaaactattaagtttgtaaatatctcttttcttcgctgtgtttctcttccattgtgtcagcataggctacttatggaatataatataattactttatttctgtctatctgcttccttagtttttgttgtctatttgttctctatcattattttgtacaaaatcataggaacgatatggcagttgaattttgggtgcctttatattcatttgtttgataattctatgagggtaatcaatgccttttattttttttatatcggagcagtgatttatagtaaacatgtagaattgaaatagtatttatttatttttgactgatcaaaaggtgaagatattatttttctgtcatgccccaagccataggcagtggcaaaaatataatgtccatagcttagggtgtttttagggtgaaggtatctgagaaagttctcttcaccttttgatcaatcaaaataattttccaaaattatttaaattctataggttctgcatgtatagtgaataattacttgttttgtggtacttgctacatattccaacccacacaccaattattttaattgcaatcatatatattgcagaactgaaatagtaaaccaaattaggatcattaacacaattaaccttggttctttaaactataaattctcttagattattttttagggtgtgtactcatttggttccgtgttaaacacttatctggtactctgtattttgatgttttagataattgatatcatgaattcaaattcgattaataaaattttatcattatgattgaaatggcttcaattgtatttgttccaaattcaaaattaattatttaattacatatagctgggagaactttagtgaaattgataaaattttattgatcaaatttgagttcagggtattaaatatgtacaatttcaaaatacaggtactagatgagtattattgaaaacacataactctatattttaataaaacgttgggtactaagtgattatgttccctttttttataccgataaatcctctccctcaaacttgcttagtgggccaagtttgaaattagggaccttgcttaccctataatatttcaagagcagaaaacgatagcaacggttgtgtagatgcaaaggcaggcctcaacgttagatcttgtggaagcaattgtatgccatgcccaaccatttgagctagcccctttaggattttagaaaatgcccttgtggtctaattttgtcaaaatacaggaaaaagagaaaaatgaccttttgtttaattgttttgcagccaaacactctttagttactagagaacaagagtttttggctgcaagttttgtttatatttaacattgttttaatttgatggttaatatgttttgtttttttacttcttttgcaattgtaactatttctgacgagagggggatatttgtttgtggacttaaatccaaaggggaatcttgattctaggaaataacacctgagagaattctgtagttatcccagacaagttttcaacaccaagttgaaactagtgatccagagtagattttttctacagtagtattcttttccctgataagaaattgtatattaaaagtttacaatgcaaacagaacaatgaattcttaaaaaatgatgtcgacttgcaccaacttaaattagtctattcagaacaactcccgaaattttaataacgcagaaatatcatagtaattattcatagataatatataatatacaatgaacctcagcatttctgtttggctgtcattatgtttatatccatttaacaaaataattgttcatgtggtagccttttgctttgactctctcatttaatttaaaattacatgataaactaagtttcttttctttctttttgatggaaaatgctgtcaagtagagaggttatgggaaaaaatcaaattctggactgcaacgtgggtttacaggactaaacattttgaagatttctcttttctagacttatgtcgtgagtggaaatctttgatgtactagatatgattatgatgtgttttgttttgtttgtgcttgttttagtatgttttatgctaaaactcatgtaatcacggttttcctccgccacaagtgagggttttcaatatataatgggtagggaccagtctaagacaatggcctctgtctcttttccaaaaaaaaaaaagaaaaagaaaaagagacaaaggtttcatgt

SEQ ID NO: 382962 - DNA, 571 bp, Cannabis indica
gaagactagattaagattgattctaaaatattggagagtgggttgatgagtgttgtagcattagctcgagatcacttgggaactattttttgggttgcttccaacatatcactttctttgatctccttattagtgttagtgaaattgtgatttgtcaattggctcttgagacgtccactaagtgaaagtattgttttatgttaattgagagcaactctgagattattatcaagactttgcaaaggacatgtttcacttgagatatattgataattactctgaattgtaatttgtaatagttcttaattattttttgacttgtaattttgttgttattcttaaattatgttattttactgctcataatgttattaagtgggtgtatacataaaactttactactataattgatgtgcgaactaattcaacaaatattatttgtaatgaccatgatgcctaaataaaaagtctctttctatttttttttaataaacgttatttttcaaaattgatatgaatgtatttatggtattcaatattgttagagataattacataatacattattttt

SEQ ID NO: 382963 - DNA, 2211 bp, Cannabis indica
gatttttcaaattaatataactaatcgcatatttggtccctattccaatgttagattattattccagaaaaaccgttgatatattgatcaagggcacatgccaccaccaccataaattacagttatgagtaacattcattttcataaattcctaataagttggataatcttacactcaaaaattaagaccacaaccttgcaaagttctcagaaaaatatgatccgctgttggtaaaaattatgcaataaaaagtttaatggcttcaaagtgaagatggaactatcaattatccaccagtgcaacagcactgggaattaaagcttaaatatatatgtcagacctaacacacaaagctcctcatatgctgcccacattaatggatctattgacaaagcctctctgaagtgatgaattgcgcttttccttcggtcagtgtacctaaaattaaagccaaaaattttcattttaagaaacatatctatctatagaagaagaaaaaaatcattaaaaatacataatcagacaatctgtacagagtgactacccaatttttaaatgtatgacatcaaaagttcaagaagaaattcaatcaaaagcatcactagttgtggcactagcatctaagaaatggttcaaccaaagagtgagtgctcatagataggacagcttgtgtgtctgtctagttgagcttttagagaaatgccaaaaccgatgtcgggaatgatgtgaataacaatgatcagaagatgccaagtccatgtgcatgtatcttattaaaaattgatgccaataataatgaatgaaaggaggtctaattatatttagctagaaaaacctagagaagaactcagacgaaatgattagaagaaacacacaatctttcaaagataaaacttagtaacatgccctacagccttttaaagcttcggaacattataagatcatagctaagcaacctgtaaataagcccaagaaggtaatgaccagctgcaccatttggaacctggagatgcaagacaaacaatagagctagttatctgcttctgccaactgaagaccaacaaactctaaactttacaaaagataagagacaaaggagcatattctgccattcatttctctatttaaaggaaaccatgcaatgaaggtgctgctagactgtaagtagtttaagcttatagacaaagcataggtttttacagtctacaagtgaaataaattccaaataaaaactcatccactacctcggcactgggttcattaggaggacacaatgctgtttcagcttcattaagaagatccattcgaaagcaagacattgcaaacaagtagcgggattgagccaattgtgttccttcagataatagtgtaaaggaaaaaaataatcaaactcaagcaaaatgaaaaaatagtaaaccgtaaccatagtaagctaaagatatatattttatgacatatgtacctttcaaaatatggtacgcagagtacgcctgactgttccgcaagtagcagctggctaacaattgcaaatttgtctgcaggaaaggaaaatatacattccacataaaggaccgaactttcatataatttaataaatcaaacgaagttttcttaagcaaaaataagcaaagaataatgtcacaaacagatgacaataagcggagcaccatgatcctaacagcaatagagctaaaagccaaaagcttcaagaaacataaatttctctaaagaatcactggttgaatctttcactgaaatctttgaagatacatcaattgagttttaattaacactgttgggtaggtgtatgtgcaccaattcagtgcagtataactagtaaaacaaggtaaagaaatcccatttatgaaattacctagagctcactataaaacaacttaactatccaatcgaacccttttcagttctgagctcaaaaacattgaaattttgaaagaaaaaacaaaaaatcataagacttttaaccacacctaatttcttgtaaaaatatactagttgaagaggaaacaaatgaatcacttgaaaccatgtacagaacaacatgaattctataaaatagcaatttatatataacaggcaacaaatataaaacccgacatgtgaaatcaacatttgaaaatgttaaatagtaaggaacgtcgatcttgataattaacactagtaaacgttccgttaggaaattgctgagaaac

SEQ ID NO: 382964 - DNA, 3363 bp, Cannabis indica
agaatagaattctcttgtattatattacggagttaaagaaaaaaaactaagaaacgatttaaaaaaactatttcataaactctttaaaaaataaataatttcattaaacgatcccaatcgtttttgtcttgccaattcaaaatagaaggtgtagagttcaacaaaaacttcttcttctttggccagttaaaaattggtggtgttgttaccggttgtgtggaactaaaattattttttaaaagtcaagaaaacctaaatttattcgatttagttttagattcttattatttactttttatttattgttcttaaatttttatttacgtgtttttattctatttggttttttttttttcatttaagggtatacaagttttcaactactatctgttagggatgacaattttaccaaaaattcgtttacccgtgagtattctacccatgtgggtagggtaatgcctgttgaattagagttttggccaggataagagtatgaaaacatgtaaccgatgcgggtatagagtaaggtatgagtataagtgtaccttgcctattatcctacccgaccctattcggttatatttatatgtatatttgaataatataggttttattcatatttgaaaaatatataaaaacatatagtcctaaaataattatataatactttttattattttaattgttagtaattatactttttaattcatattcattttacaaataatagaattaatactaattactaaagtaattacatatatatatcggtaaattttagtattgaacataattttattgggtttttttttaattatttttcttaaaagttattaagatatggtttacatgtgggtatcctatacccgttagggtaatacatactttacccacaaaacataataaaataatgggagacgattttgtcccgtgatgtactttcacgaaatgtattccgtagtacattagatgggtctcagggtacattagatgagtgtcagggtacgttactattttttaaccttaattacccgtagatcaatcttagccctcagatcaaataactccctcatctaacgactgtcatacatcacgtaatacattccgtgaaagtacaatcacgggacaaaatcgtgtcccataaaataatatggggtaagttataggtaaaaaaaaaattcatagggtagggtcatggaataagtgtaccgtacccataccctacttgttatcatccctgccatctatgtataatgtgacatcatcaatttaacagtcaatttgaacaaaactatacgtgttaatctatcatattttgccattttttttttatagaaaaataaaaagatggctcaacatgctctgattcattatgtgcattccaatcgaggagcactaccaaagtatttcaaagaaggattatcctatcgtaagtctgcttttatcctaaatcaacttaagttaaatagagcttttatcactctgtttgactcaaatatgaagtatattactctaactgatatattttaagagtatttttaacaatacttatagattaaggagcacaatagtacaatgtcataagtaaaggaaggtaaaaactaattattattatttttttatcacaaatttcaggatttttatatattttttttgttgggatataagtatcagaattttcattgatcacaaaatcttagatggccttctccttcttagtaaacttcttacggcctgtcaaaagtataattctagccttaagaattatttttttttttcttcaaaatagccttaagattttgcaaggtgatcaccactaaaagtgttctgctcatacaaacaattgtttctattattccatattccatacacactagctgccatagctattaatattactattactatttttttatgggctttgatatacttgtaggattaatttaggaataattacataaaatatattttttttgtaaaaaatttacaaaattttatatttttatgcttaaaattttttttttactatttttacagtattatataaaaataacacgaaaataataaaaaaaactacataaaagtaacaagaaaataacattcaaacaacaacaaaaaataacatacaaataataaaaaattaacaacaaattaacaaaagtatatcataaaaatacatcagaagtatttttgtaaataaaatcattaaaaaaaatatttaaaatttcgtacaaatgtatttttgtaattttttaattttttatttttgtgtatttgtgaaataattccattaatttattactattactaactattacaattttatttatattattctatctttcaaacaaaaatactcttgaattcttcttttcttttaaaatataataatgataaaaaaaaaaacccctaaaattaaagaaaaaaaaaagttaaaaagtctaatgatcagtactaaaatttaattttctctattatacaccaaaattttagaatagttattgagagctcttacaaaaatataaaaaagtaaaaaatttatttagtttagggaaaaaaagtagaagttaattacgtaagggtaaagacagttttatggcacttaaactcaatatgaacaaagcgtatgactgaatggaatgggacttccttgaagctatacttcgaaaactgggttttgttaagagctggattcaactcattttgaagtgtgttaagtccgcaaggtattatgtaattcatggtaattatgaagtcaacctaattattcctacaaggggtatccgttagggagattcactttcaccgtacctatttattctatgtgctgaaggcttcacagttttgctccgtaagtatgaacaacgtggttggcttcatggttgcaaggtggcgaatggtgctccaagagtctctcacatgctctttgcaaacgatacttacttatactgcgaagctacagaaactgaggcccttcgaatttaggaagttttacacaagttcgaattagcttcgagtcaaaaggttaatctttctaaatcttctatcttctttagtacaaataccttgagagagataggattaatcttttattgggtatggtcacggctactgagggcagcctgtacttcggtttgcttacctctatgggtcgtaacaaatctgttgctttgggttttctaaaggacaaggtgaggaaaagatttcttggttaggaaactaagtttctttcacgggctggtaaggaaattttgataaaaactatagctcaagcgctccgaagctacgccatgagtgtgtttttgattccacaagaggttacaagagataaggaaggcttgatgtcaaagttttggtggcaat

SEQ ID NO: 382965 - DNA, 2877 bp, Cannabis indica
tgtccctctatcaaatattaaggtgaattttttataccattaacattttggtattaatttttattaagggatatttctctttgtttattgagtaaaactatggggatggcctttttttttatgattttcatttagatattataaactgtatgagcctgtaatttggtatataagctgatcttgttatctttttccatctttcttttctctgtttttttaacttttattgtacttctttactttgttaatagatatcatgcaattcataaagaggtctatgattggttcaacataagttttgatgaatttggagaacatcaacgcctcaacaaaccaaatttgccaagaaattttcaccaaactgattgagaacaattggctttctgataacacaatgcagcaagtatgtcatttgttttttgtgttcaaacattcatcttttacaatctatgcatcacttgtttgtcttctttgttttctctaaactggaatgactattcagcttttctgcgaaaattgcaaccggttcttggctgatcggctcgttgaaggtacatgtccactactggattgtaactatgattctgctcgcggtgatcaatgtgagaagtgtggaaagctattgaatccaactgaactaagggatcccaagtgtaaagtatgtatttttctcctgagttacaattctgagttttttttgggtttttgtcttggtgaaaattcagctaaatgaacaacaggtatgcaacaaaactccacatgttcgggacaccgaacacttatttctagaactcccattgttgaaggagaaattggaagaatacatcaatgtcatgtcagttgcagggtgttggagccagaatgccattcaagctacatatgcatggttgaaagaaggacttaaatcgcggtgtataacaagagatcttaagtggggtgttcctgttccacttgaaaagtttaaggataaggtttagtattgtactaaattctatgtactggtgttttcttttcttttcttatgttcttttttgtttaggtgttctatgtttggtttgatgcgcctatcggttatgtctcgatcactttcatgttacacttctgattgggagctgtggtggaagaaccctgaaaatgttgagttgtatcagttcatgggaaaagacaatgtgccttttcacacagtaagagtttttcatatacattctaataataatattaaggtgttgccaatctaaaactcttaggaaatctaaacagatttctagctcaagatccaatactcagaacactcagaaacaaagttagattagatggaatatctcacattattgggaccctattcaccattttaggctttctatcgaatcgagatatagatttgattgtccatctatttgatataatatagataaatataagacgacctcaaaattgtgaataacccatccttctctctttcaaacaaggagcgtttctagatagttttgttactacttgaaacaaattttgtcttttccatattactatatgtctagagtcgataatttacctggggaactactgaactcaatcatttgttgtcgttactctagtataactctcaagtgtttttcctctcaaactctctaacccgagcctgcactttcaaacagttgtgcagctcattacaaaacccaagttagttaaaacggctaaaaagtgagccgttttaatgagcaagtggaactaagagactaaatatataggctctcaactaagaaaccaacaccatatgcctcataaatccctctagtacatatggggtctgcaactgtgataatttacaattattcatgtttggtttaccttttacacttttttcaggttatgtttccatctacacttattggaacaggagaaaactggacactgatgaagaacattagtgtcactgaatatctaaactatgaaacaggtacaagttaggctttatgttttgtttcataattacttgttactatatagtagttttaaattttcttggtgcaggtaagttctccaagagtaaaggagtaggagttttcggtaacgatgcaaaagatacaaatatcccatcagaagtgtggcgatattacttgttaactaacagaccagaagtatgttgtgttggacttcagcattactaatgtcacataattgttttgacccaatttctaatgtcattgtttgttttgttttaggtctcagatacaatgtttacatgggtagatttgcaagcaaaattaaatactgagttgcttaataatcttgggaatttcattaaccgagttttgagcttcattgcaaaacctcaaggtcagttcagtaagttagccaagtttctgatctctttggatgaatatcttgttagtttttaataaacaatgggggtgatatgttattattaacaataatcaacacaaaatcatgctcataaattattcaagactgaaatattttatttagggaattagtttagtatagaacacacatccaatgttgagaattgaatctccattatagaaagtgaaagagagagttatggtaagcaacactctctcaaaaccttaccaccttatcctcacaatcatatattcaccagcatagccaaacactagactagtgaaattatctaatctagtccaatccaattatgcgtaccaaacagactctaaggtgtaaagtggggatgttctgggctcaaatactattggcggtggactatatcgtaatgggccaatctataattattagaaggaaaatttacatagtatactaacttttgtcatttttttacaaaaatactgtcaggcggtagtttttactttttactgtatttttttataagtttcatac

SEQ ID NO: 382966 - DNA, 2055 bp, Cannabis indica
aaaaataataaaaaaatattttcactataagaaaagcaattttgtttgccttggcaaaagttaattaaacttgtcggtaaagttttgttggtgagttaatctaccggcaaaagctgacgacaataaatagttggaaaagtgatttttttttggcgcatataattattttgctagtaaaaattacttttgttgacgtgacaagtcgatggcgtaaatgtggttgctggcattgacgcgacggttgagcctcttcgacaaagttttcccaacgagctaggtccctggcaaaatgtttccaaccaatttcttaactcacgggaaagttttaccggtgcatgtaattttgctggtaaaactttttttatatatttttcaaaaagataatttgtttgatattttaaaatataaatataattaaaattaaaatttcataactaataatacaataacatgatctcactgtatattataattatactaaattcaagtaagcattataaaactaattaaaaagtcgttgtcatagtttatagaaaatagtaatatttcaaaatagtaaaataaaagtcacatgaatcaacaacatcgtcgtcatcgtcgtcgttctggctaggaggggcggcctatggtgaagatcataatgccaggtggacgtattggtagaatcagggacatttcggaggtgttgaagccaagaataatgtcggacaaatacctaaactactcttggaatgaattcaggtactaattcagagtttgcatcatgttttgctgataattattacgtgcttcatgctcttccatgcttctcttcaatgcgtcatatttctcggggttgatagtaggttgcccaaagaggcctgccttgtgagtttcccttttggcccctgccctaagtctaggcaaagggacaatgcctcttaggtggcgtgactgctcaccaagcacctgtatcataacaggcaagtctgcgggaaactgggtgagatatacatcgtattgaaaggggacatccaggttgagtttcacgtctctcaactatttgggcctacaaaaaatattaataaactgttaaaattgaatataaattaaatttagaacatacgattaaaaatataaaattatttacatacagttgttgcgtgtatttattttgagaagtgttgttcttgtggtgaaacttcttaaaagtacccacggtactggaaagtttctcctctcgggattagtttattttttaaaaaaaaaatagtaatatattattaagatcttatcaatttttgggcaataatatttaaaataatatactttgttgatgatgtgcccgattatggtcttagaccccatccacattaaatctttatcttgttttatttttttgcgttctgtttggctcttccttgttatttaaaataattttatttcaactaaatacttaaaaattattagttaatgaaaattcaattttagaatttttaatccgtacctgttgttttgggtccttccagtaggcgatgacctatgtccacgcctcctatgtcaccccctctggacgtctcctatttgcctccgcctatacttgtttgataatattatttttccatatttttttcgagttcgatctccagttgcgtagcctttttaattttgctaataaaccgtagtctacaaatttaggattgtcaagtggaaactcaaatttaatttgcaaaaaagataaacactaaagtcatatatattttatttgtacaatagttttgtttgaaatattataatagaaattgaatgttactgttagtctatccaagatagtctgaaggtctgctttgtcaatgctctccttaatgaacctattcatgggaatggtattgcaaataaaaatttaaccatgttgttaaacttgttcccataattttttatggagcccatgtacatgcacgcatggctggactatgtcatgcatgtaacatgattcgctatgaaatcttgcctttctcttatattttttttttaatttaagccactaaggctagcttagtggtgagggagggatgg

SEQ ID NO: 382967 - DNA, 3134 bp, Cannabis indica
aatttagatcaaacaataataggatttataaaaataagtttgaataaacaataaataaaagcacacatgtatttacattggatagttggttataagatttatttaatttaaattaaataattaattaattaaatttcaaaaatcttaaaaaatatatttgatttcaaaatttaataaataattaatttaaaattaaacttataatttgaaaattaggtttataaaaaatctaaatatcttttcaaaattatccaaggaaggcataaaaaagaaggtggagaggagggtgagatcaatagaggtgtgggcaaggcccctaaagtcaggttgtgtaactgtaggacttcttagaaaagattttcttaaaataatcaataaattaacaaataatatgataatgattagataaccactcgccttgaccatttttaattcgatccataaagtttcttcgacaacagatagtagtggtgatgaaatgaaactttgtacagcgatccccatctctcagccaattaatcctaaatttttttattccagtggatatttttctgaatgagaagttcatcaagttaagatctcaaagcatgctactactcaaatgggaccctcatgtccctatcaatttgacaggaatcgagctgagtttgaacctcttgtatcttagcattaagatcaccaaactactaaaaatttcatttgaccaaggtagaccttgtagcacctaatatgcagtagaggcacgtgacatgatgctggtagaagtaggaaagatagacattatgaatgacaaggacacacctctcatctctaatccacatggcttcaaactggaaagctttttagtttcttacaatagctccattagtatcaaggagcaaaggtttatgatcagagtttccgatgaagatagatcagatggtggacttgggaaacaattaaagccacaaaatgttcgacaaccctctgtccagagcatatttaattctaacatttcctttcatgtggttgtcccaagtgagggcaccacccaggaaggggatgttgggaagagcatgatcagcaaggatagattacatgaagagcaacatgaggtcttgagaattacttccaagatcaaggtatttcaaaataatattcagatcacccaaaattagctagggccgagggaagcaattacacagaatcatgaggtcttcacataaaaatttcttttaagaggcataaggagggtcatatacaaaagagagaagtcgtggctgatgggggtctgagtacactaaaccagagattcggttcttagataagttgataggctcaaaggtgaattcattttctaagctacaatgaaacccctgcatagcctgctggaggaaccgttaagatgttatgggaatgagcattccataacacactcttcatagccttggagttagttttagtcgcaaataaaaagacataatctggtttggatatgagaaacaaggccttgagttcatgaactgtcgtggcgtggcctaatccttgacagttccaagatagagtgatcattgctcctatggagtgggccctgacccgaactccacaggctaactaaacaaaacattggcattaaagttgtcgccagagtaagcttcattttcaagattacgtactaggaggaggagttatgactggaactaacctggattaggctttccatttagataatctttggtgcaaattagttcttttccttttagaggggccttccacaacctcatcatcaatagagtaagagttcagttctaactccgagccaagagggatgaaggaaggtagaggggaacagttgggatgaatcatgatctgtgagcagtgatcagtatccaatgccaaattttttcctttaagcttaaactcaaagggagcgcccacctttttttttctttaagttgcagtttatagcttcaatacgactcaacttaccaagtctgtgactagaaaaaaaacaagcagccaaatttcttttcttaaaaggggtggtgagttcatttacttcaaatgtgtgcttaacacccatctcactaggagtatccctaacagtggttaggcccaccttaaagaggccttttaattcttccaaatacgcttcttggccccttgagagtctggtagaaacatgggtctcaattgaggctttattaaccttattgacatcggggcccaccaaagtcgtaatagtaaagttaggaaactagtctttgggtttagagggggcatgcccaattgtgatcgaaggcaaaacattcttgatagggttagtcattaccaacgccttatatcctttatccactaagatggggttttaaatatcgtttaaatcaggtatacaagttggaggctttatcattgcttatagaggctcatcagggacaagcctagaagaggaaataccaagctattgttgcaattcatcaccactcttggttttggggtgccaaaaaggacaaactacgttctgtatgaccacacctttattaacatgctgataagaggtttttcttgggagtgtccccttttccccagcgactgaaccttagacgacgagccatctacattcaaaggggttcttactggagaagttggtgaaccattagcaataacaccctggggcacgatgagcagagagtgattgactgggatggcaactcgaaagaagcaatctcgaaatctagtaccaatctttagtcggagtccataaagagggaacggggaacctagggattaataattgtgttcggagagtgttgagaacattcacttcttgtatggtcaagccgaccacaatggaagcaaaaatcacccagcttttcatatttgaattggatctaaattttctctccattttgctttttaaaataacacctagtgaaatgaggaagcgaggcctttaccccaactctaaatctcagccattcaatccattttaacttctcctccgcatcctcgtcaatctgaagtacttctcctaattacaggccaagcttttgagcattctcagaagtaagatacaaaaatggaatgttgtgcacctgtacccagaaaatagaaataaatgattgttgggttttgtgccctaaataaaacccttt

SEQ ID NO: 382968 - DNA, 5238 bp, Cannabis indica
aacccatgatcagccctagttgttggtgttttttaattcccgtaaaattgtaaatttattaattattataatgttgtatcatgtagatcaacatattagtaatactctgcaattctttcttagagctcaattcacatagatctgagcagcgatggcgaacaacccagagcctcagaacttcaaaaagtacggcgtccctttctactccgtagcttgggttccgtacaactccattcgatttgacccaaaacccaaacctgaagacgaaccagatcaacctaaacccgacgacgaacccactgccgatcgtaagtacatcgtattggccggcggcggcggcgaaggcaatagtggcatcccaaacgcggttgttctctctgaattcgatgccacatccaattctctctctgatcagcctgtaaattcccagtcttttttctccttatgcattgagccgaaccccaatattgttttgctccctatagagttttcttagatgggttctgttatttatgtaggttgctaagcatagaactggctctaatttgccatatagaatggcagttcatcctggtggcgagggcctcatttgttcatttccccagagctgcaggtttttttttttgtttttttgtaaggagattcttcgaaggtttaaatatttatttagtgcaattatacttttcttttttggggccattttatattaaaatcgtatgctcattgccctaatagtatttatttagtagtacttgaccttaagtggttactggttattgtatcctctatatgcccagctggttaggaattgggctaggtgtgtttttttgttgtgttcattggatttgttttgtttagctatctttaatgatgtattaataatgaaaacattattttgcagatggtttgaatgggatggagaaaatagcatggaaggtcatcagcttggtgtgaagcaatcagatagagtgctcacctcattggaagacgttgaacaacagttagcaatggcatttaacaatgagggttcaatactagcatctggtagtgaggtagatatcagcatttacattttattttttggttgtttatataatgaggagaaaaaaatagagtcaacaaagaaggggagaaacttggtcgtattgctctttctgatatctttcacagtgataccgtttctatattgctaaaagaagttatgttacttcttcttatgaatttctctagtattttccaatttcgcatgtatccatttgattttgaaaagttcattcaaagctgttgggtaaatgttgttttttatcatgaaaaagcatggcatgttttataatgacttcactttgttgcagtacaggatggaaatttaaaggttttcaaatggcctagcatggaaattgttcttgatcaagctaaagttcatagtagtgtgaaggacttacatttcaggtttgcaatgccattagctattagcatcaaaaatggaaggcagtttaggggctgctacttttgttgttatactgatatgctttctcaaatcgtgtttgtacagccctgatgggaaactacttgcatctttgggaagtgttggctgcagagtatgggatgttatttcatcaaagcctgtagcttctctagctaagggaaatgtgagttattacttgagatcctcatatttgaagaaaaagaaaaattatctgtttttatctgcatgatcattgtcttcatagcttatcttttttcttaactttcattttgaacatcaatggaatggctattaacttcaacagaacgagagtgtaccgtaaaattgaaaatggttaaattgagtaaataaacaaagttagtgctatgataagaacaccaatgaccaaccataccctatcaagaattatgactgtatgtgcaattgattatgcaccatcaagaggtctgcatggaattgtattatctgttttgttgatttagttggtcttgaaactgacaacttatgataaacaggacgaaatattttgtgcgtgtagattttctcaaaccaacgacaagaatctggttctatatacagctgcagttacaggtgagcgtactcttcaatgacccagttctggttctagattcagtccttgttgtcccatcattacacatgctgataaacatcacacgacttttgtatgatttaggtaaaggtggaagcattgtgacatggaatacaaccacatggaataggatcgcctcaaagtcaattgtccgtgacccaatatctgcctttgatgtctctgctgatggcaagttccttgcatggtaaatgtttactgtttggaaaatcattaagttgatgaattttctccagctatcatctaaggtcttcttaaaagcaacgaactggcataatatgggatgtgattgagccttttgtcttgaaaagacctcaggatttctaacatagttacatagataacttacaaatagcataattgtcaaactggcccatcacttattctgcgacatctttaccatgttcaacttttaaggcgtagtgcttgaatagtggtactaccgattctcattgtcaagattctaggacattattttctcttacaataaaatatttgatcaaactatgtcaatttgcagtcctggtgttaagcttcatggaaacatcatacctattcccttttactgatatcttttttttttccagtggaacaacacaaggggatatttttgttgtgaactcatcaagtatgcggattcgacaagtgattaagaaggcacatcttggctttgtaaccacattgagattctctcatgattcaaggttgctgctgagttcttttccgccatagtaattattgtactgtatttgcatctccttctaacatctaatgaaccgtgatgtattatataattacagagctttggcatctgcctctttggattcaagcgcaagagtaacattgatagaggagaagaaagatggtaagcaaatttattattacaaatattgtagacaagaatatggaacatgaaaataggttgataatagtaactagttttagaaaatgaaaagattgttaaatttgtgtctgtagacattagacacttggagtaaactcattcttccattttctcagtttcgagaattcgaatattcagctgagttggattctctttgttatatttttcatttttttaggtgcaggaggatttagcttgtggctcattatattgattattctaattgccattgctgcatatttcttgaagaacccccagagatttaaggagtttactactatgataaaattataaaatgccggctcttatcgtcggaaagctttaaagcttgaattcctttttgtactttataaaagaataatggtgtcttttcttgtatagcaattgagatgctgcctcttttcaaattgttcctagctcaaataacaaatgttgggaatgaaagaatagtgtgaactgttttgcagaatttgaaagcataattactatttatattcaatccttttatttgttggtataaacgcttttctttccaattgttcatgcaattatttaacctgcttaattttctatttgcaattttgagtttcaataattttcatttcattcattttgttaagttgcattttaaaatattaaactatcatttcaatggaatggtctttctacttttttagtaaaatgattattctattttaaaatagaacgaaagactacaccaatattataagatttgaacaaatttaataattgttttatcaatttttatgtattttaaatttaggggtttttttatttttacacttcaaaataggttttttttttttgtatttttacagaattccacatagaaatttctattgcaattggcgctacaacctaaattgcaacaaaaaatcgtatagaaactcctattgcaatttgagttacaactattttaaaaatctaaaccgtaaatttgaaaaaaagaaaaaaaaaaaaaaaaaagagtaatttccttaaatattattctattcctattcttatatttttatttattttaactaaatgccacctaagtgtattgggatattccccaagagatatttgataggccttaagataaataaagaggataattaggcaattgtaaggggtatatatgctatacatatgagtagtgaaggattttgggaggagaatgaattagttaagtgagcaatagctcttgggagagtattgagtttgtgataggccttaggataaataaagagggtaattactgtatagagagggatttatgttatatattatatatatgagtgagcaatagctcttgggagagcactgagtctctcgaatacccagttaacactggtatcctcatcatctacatcaatatattgttcactattttcctataattgctactgctgctgatactaaattgataggaaattcctatcagtacccaatgctcactaaccaccacacgcttgctaaggatttttattaattaaaacatgttccaggctgaacaactgttgcttgctaagggaaaaaaaaaaatctattcttattcaattgtaattcagaataattgtaattcatgagtgaccatataactgaatggacaacattcttaaaaaaaaaaaagaaagaaagaccctaaggtacgaggttgatagattgtctcgaacaatttgagctgtgaaacatcttaagaagagcaaggctgtctgcactcatcccagaaatgaatatttcatttggtaaattcattctagctttattgctgcagcaacatcaaatcaaatacaggatacaaggtttctctttctccagtacttgtcatgattctagccatattcatgtataacactgcttctacatgttttgttaatcaacataacatgatattgaggcaaagtggtcgaacatacttgtgtgaattcaagtaaattgtgtacgtacattaaatttctcgacaagttattttcatttccgaattcccgaaaaagggacaagtacaacatttctgtttcaaagtgttttatgtgcagaaatcaaaaggtatggcttgtactgatcctatagaccaaagtgtttgttaggatgttcattgtaaaaggctctgtcattaaatcaattgattagagcctggcgaaacagctccatgaagccattctttcatgaagaagaagaagaaaagataccgcaatttcaatttacagtcaagaa

SEQ ID NO: 382969 - DNA, 2727 bp, Cannabis indica
ggtttattcaaatgatgctgtgcatgaattaaattaataattaaacatagatttgaccaaaaatcacaccacccattttctcttatttatatatattttttgagagacattttctcttatatttatttgattttgggaatatagaataataaataaagtttttttccgtttttttttttggacccactcatggtggggagcatggtatccttccatggtcagaaagaaccctacgtactttgcttcttttttctttttagctcctatatatatatgtgtataatgtatgcataattattataccagttattattgttgcagatatattatgttttgagatctattctttggttaatggttaaaaatcaatgaatatactattatccaaaacttaaaagcataatccaattattattaactgagatcaactactatactcaagattttctatatagttataatacaagttataactagtgaatataatcaatatatatataccagaatggtttgctattgattattaattaattaattaataattagcactataataaaaatgattccttttactttagaaataatatatgctctatttctatatgtatatatattaactaacattataattttctatattttaaatttatatatatatatatattatttcaatcaccttttttgttgcagtctcccaaaacccttctttaatctttattctctctactcatgagaatcttcacaacttttctcctctcatctcatatatatatatatatatatatatttataactatttgagcaaattaatcagttgaaaataactgaatagacattccctatatataataaaaagctttactaagcttcaacaatggtgaaaatggagttatttgagtacaaagaagtgttagaagccacagacaatttctcccaatcaagaatcatcggtaaaggaagccatggatcaatcttcttagccactttccccaaattactcgctgtagttaaaaaatctcataatcataatttgattattgaaaatgaggtaagaatattattatcattattatctcataataataataataatattagtaataatcacataataaaccttatcggaacgagtcaagactcggtctcaactcaccgagtcataatcctcgagttcatgccaaacggttcattacacgactcgctccacgtcatcaaaacgccgccgtcttggcctaaacgactcgaaatcgttctccaaatcgccgccgccgttaaattcctccaccgatcggggattatccacagagatattaagtccgagaacgttttgttcgattcagattgggttgcgaaactcgccgattttggactcgccgtcgaggagttttccggtgaggctgttccgccggccggtacgattgggtatttggatccttgttatacgacgtcgtctaagctcagtacgaaaaacgacgtgtttagttttggcgttttggttttggagattttaagtgggagaaaagctatggagattagtaataaaacgacgtcgactgatataagagaatgggctttgcctttgattgaaaaacgacagtggaatgagttatacgacaagagaattccgtttccgaatggtggtgatgacgtggcgaggggtttgaaggagttggcttacgtggcggcgagttgtgtgtcgttggatgaagattgtcgtccgtgcatggttgatgtcgttgatggaatagtaaggagatcacagcaaaaacgacaacaagtggggaggatttggagtagcgttttgagaaatgttatgcttgttcggatgattaaggggcaaaatggtaaattggtgaaacggtgtcgttttagtagtgggattgaatattgtgaagaagaggaagaggaggctactaatcatgtttcgaaagggaataataataagaagattgtgttattaagagacctaattttggctgatgattatgatcataccaattaggtatattatttggttttttttttttttacatttatgtcttgttttaaagcacaaacatatttttatctttcctaatttatatatttttgtttttgtattatcaaattaatgtttggtgtaaattttcaaccgtgtgaataaaaaatatatagagttaccatttatgttggtgtaaatatataaattgattagattgtataatttggaattcccttcccatacatatttaggatttatcaaatttaataatagttaattacaacctactactaaatattaaatatttaattgtttgtgatcatattagattggatgttattttttaatattcaattaaattggatcggcggttgaatgttttaaaatttaatatatttaatattcaatcaaattaattattattttcatttagtttggataagtaattaaattttatattgttatataataaatatttatatatatatcaaaattaacattataatttttttttttttagattggatgaatccaattcaatgcaatatatattgaatctaaaatattgaatggatccgatcttatctaaaaaataattgtctaaaatattagataaacctaaattaaaccactaggtataaatgaaatttaccttcaaatgaaatacatctaatagatagaaccaacccaatattaaatgaccgacatataataaaaaaaaaaaaaacgaaaaaagaaaagaagaa

SEQ ID NO: 382970 - DNA, 4781 bp, Cannabis indica
ataaaataaaataaaaagaactagcacgtgcattgcataaacaaataaaaatacaaataaaataaaataaaataaaataaaaagaactaatctcacctagttatcatcaaataaaataaaaactcacctagttatcatcaaataaaataaaaaataaaattgtgaaaaacaaagttgccagaaatattatccccactaaaatatgttgtctcagtcccacaaaagaagataaagatagaaagaaagagaatgtgggtgcacttataagattgtgatttgtgatcactcagaaagctccataattttttttcttaaaaaaaaaaagctaccaaaatttaggtcttgcttttctctcaccccaaaatctttgccttttgaggtttttattttctttcatctcaattccaattataaaaacaaaaaagttggttctgcagtttcatgagctggtaacatcttcaactgtagttcttaattgttttgtttagttttcataaagattgaaactttttttttttgacttaaatagttaagacagttttctagtgtgaacgttttggttgacaatatttgttagccgttcatgatctgaatctattctattccattccctttttgattgattcattgtctcaaagcttatcttcttcttcaaagtttttatcttttcaacaaagactttcctcatttccctttttctattattggtttcctcaacttaattcttcacatttttctattcttctcaagatttcgtatctgggttttgcaattagtagcaactcaaccctgttcttgtttcaaattccaaaatttaaaggggtttggtagctaaacaaagcctttttctttaatgggttttttcttaacctttgatagtgttgaatttctggaagtgtagagaaaaagaaagaaagaaaaaaaatggtctctagatcatattccaatctcttagaacttgcttcaggtgagccaccatcatttgggagaatgagtgggagaattcctcgtattatgagagtttctggtttgatatctgaggttggtagtgactcttctgagagtgttcacttagattcatcatcttctgtccaaaaagataggttcataatagtagctaaccagcttcccataagggctcagagaaaatctgatagtagtaaaggttggctttttagttgggatgaaacttcacttcttctccaattgaaagatgggttaggagatgatgagattgaagttatctatgtgggttgtctcaaggaagaaattcaaccaaatgaacaagatgaagtgtcccagattctgttagagagttttagatgtgttcccacttttctcccacctgatcttttcagtaagtactatcatggtttttgtaagcaacaactatggcctttgtttcattacatgttgcctttgtcaccagaccttggaggaaggtttaacaggtcattatggcaggcttatgtgtctgtcaataagatttttgctgatagaattatggaagtgatcaatccagaagatgatttcgtttgggttcatgattatcatcttatggtgttgccaactttcttgaggaagaggtttaaccgtgttaaactcgggtttttcctccatagcccttttcttcctctgaaatttacaagacattgcctattagagaagaaattttgcgtgcccttttgaatgctgacttgattggtttccatacatttgattatgcccgccatttcctttcctgttgcagtagaatgctcggtctttcctacgaatctaagcgcggttacataggcgttgagtactatggtaggactgttggcattaagattcttcctgttggaatacacatgggacagcttgaacatgtcctgagtctcaaggaaaccgaaactaaagttgctgagcttatgaaacagtacactgatcagggtagaatcatgttgcttggagttgatgacatggatatattcaaaggtataagtttgaagcttttggcaatggagcaacttcttcagcagaaccctgaattgcaggggaaagttgtgttggtgcagatagcgaatccagctcgagggcgcggaaaagatgtgaaggaagttcaggctgagacatactcaaccgtgaagagaattaatgagacatttggtaagcctggttatgagcctgttgttttcattagtgagccacttaagttttatgagagaatggcatattatgtagttgctgagtgttgtttagtaactgctgttagagatgggatgaatctcataccttatgagtatgtaattagtcgccaaggtaatgagaaattggataaagttttggggttgaaatcttcaaccccgaaaaatagtatgttagttgtgtctgaattcattggttgctccccttcattgagtggagcaattcgtgtgaatccatggaatgttgatgctgtatcggatgctatgaattgtgctttggaaatggctgtgcccgaaaaacagcttcgccatgagaaacattacaagtatgttagtactcatgatgtcggatactgggctcgcagtttcttgatggatttggagaggacttgtagggatcatgtgcgaacgaggtgttggggaataggctttggacttggttttagagttgtggcgctcggtccaagctttaaaaagttgttgatggagaacatagtttcggcttatagaaggacaacaagaagggcaattcttttggattatgatggtaccttaatcccacagtgctcaatcgataagagcccgagttctaagtgcattagtatcttaactagcttgtgtagagacaagaacaacatggttttcattgtcagcgcgagaagccgagagaaacttgctgaatggttctctccttgtgagaagctgggaattggtgctgagcatggttacttcctcaggtaaaagtgttgtttagttgaaattgtattgaaactaatgtaaagttttgtttggtactaaaaaaacaaattgtatgctgtaatttcaggatggagagagacatagaatgggaaacatgtctacctgttgctgattgtagttggaaacagattgctgagccagtaatgagactttacactgaagcaacagatggttccaccattgaagataaggaaactacacttttgtggtgttatgaggatgcagatcccgatttcggttcgtgtcaagctaaggaacttcttgatcatcttgaaagtgttcttgccaatgaaccagttactgtcaaaagtggccagaacattgtggaggttaaaccgcaggttcgaaacctattttccttaaaaactattgttaatgttttttttttcatgagcatcaggtagcgctttacaaatggttagtgatattacataataattaattaaatttaattatgcgagactcgatatttagttgcaccaatagcagtatgacacctcaggtagtgctaggcatcactagtttggaattctgcaaagaccaaaggccaatcccttcatgtctttgtactatttttgcccactgaaagctagctgcaaataggcttaccgaatttcgtgtgtgacttactactgagcagggtttaagcaaaggactggtggccacacgactactttcgactatgcaagataagggagtagccccagatttcgttctatgcataggcgatgatcgatcagatgaagacatgttcgaagttatctcaagtgccacatcaggcccttctatcgccgcaggggctgaagtgtttgcctgcacagttggtaagaaaccgagcaaggccaagtactatcttgacgacacagttgaaattgtgaggttaatgcagggtctagcagctgtttcggatcagctagtaacatcagcaacacaatagactcgatcgatccatcgattttcttacattttcagctagcgaaaacacgaatagagatcctgttttatactactacattttcacctttttcagctcatgttgttggcctttcaatttgatttcatgtcataccatattcctcaagtctccattctttcacaatgtaaatatgtgttttttttttcttttactaagagaatttgtgagacccgggaacttatttttcatcttttgtattttgttgtcttttgataatgtaaagatgtaaatatgtttgcccatgaaaagtgagtatgttatcaatttagcttatctaactttgttcacagttacaactttttaagtgtgtttagcttcacttgatgatggtttttgttcaaagtttgttttttttgttgttttttgaattgaagtaatgtagcaaagaattgatttttcaatttaaatgtcacacaaagctccttaacattgctcattctccatactttgaactgaaattgacagagcaacattcataaaatattcgcgttttcgcctatgatgaagttcgagtttcgatttgtattttcgatgaattcttcaagtgattagtcagtgtattctgtaacactattgatactgaaagctctcttctatgttcatttgctcaaactctagtctttagttgtttcattaattttcgaggttgctaaattcatattctgaagcttcacagggcatttgtggatgtttttggacctctgtatcaggcccagttttgtactaaggtgagttaggtccgtctttaggcccaaactttttaataaatgacccaaaaaagaaagtgacattgtcataaagttattaatatacctcaattttaataatttttattttatataaaatatatatatttaatt

SEQ ID NO: 382971 - DNA, 2598 bp, Cannabis indica
aaaaggcaaatgagtaaataaataaaaaatctaatagttagggcttaagagatagtggatggtggttggttgaaattaggagtgtgtataaatcgatccaattcaatgagaatcgaccgatctaattataattgaccgccaaacattggatatccaattgtgatcggatcagattggatgttatttttaaatatccaattggatcaaatcggatggtggatggggtgtctaaaaatctaatacatctaacaatatctaatcgaactaattagtattttcttttagtttggatgagtaattatattttacattattatacgtcaaatttatatgtatatatgaaagttaacattaaaattttactcttttttttttggattggatggatcctcagtccaatccaatacatactggacctaaaatattcgatatggatctgatccgatccaaaaaatactaggtctcaaattttggataaacccaaattaaacaaataaatatatatgaagtgcatccaatagatagaaccgatccaatcaaacatccaatggatgttagatcgattggatgatagaaattaattgaatcagatcagatggtaaaatctaacatccaatatatgattggattggatctggataagcctaaaattagatgtgatccaataaacacccctagttaaaacatcttttatagaagaataagataatattgataagatgaagacaaatagatcataaaagagattcaaaaccaaaacttattatacatacatattacatactataagaaaaaggaacaaaatattaaaatattgtaagcctttactctcactttgtacactttgtttccttttttgtcataataacctcttttcttgttctaatcctattagatcattgtcattgcatgcatgttttcatgaactcgtacgaagaagattttataaaccaaataattcatatatatattaattatttctttcattatttatgcttaatttgttagtattaattattagattaactattgtatatatgtattctaaatctttaatttaatctccttggactcatatccatttgtgactatatatctatatacccattgtacaaaacccctttttaatatatgggaatataacacacttcctcactttgatattatttaaaaaaaaaaaacaaatatatatatcattattatatatactatgcatgagagaacatgcgaccatggtccatggaactctgtctcaattcctgcatgaccatatatatatatataacgtgacttgaaattgacttttcactgtaatttttttttatatatataagaatatgattttgtcccgtgagtactttcaagaatgtattttgtggtatattagacgagtctcagggtacattaaatgagtatcagagtacgtttttacattttaaccctgattactcatagatcaatctcagccgtcagatcaaataacttccttatctgacggctaccatacatcacggattacagtccgtaaaagtacaataacttaatttaccaccactcatattataattatataacagtatatacaatatacagctacatttatcaaaaatatctagttctcagtctagctctatttatagaatatacatcatgaaacaggagtagctagctatataggagcgccataattttattgttttatttgtatacatagaatagtgctgaaaaacatcacctttttatttgtatattatttgtgtaaattatagtatgtgtattttattaatttaaattaaaatatagggagtctaccattataaagaaagttactttctagtgacaattatatcttttaattgtattatgtaatatgtatagttatcataaatgtttttttttaataatgattaaattttattaaactaaatcatctaaaactaaggatgcaatgacaaaaggtagagagttcctactaaaaatacggtcagcctcagaaagagaagatcgctccaaagcatgcgcaaccttattagcataccgcttagcaaaattaaaagaaacaacatcaaaatcagcaaccagagtcctacaatcataaagaatatgaccataaggagaagccatacttttaaacttttgcaaatcattaatgacctttaaacaattcgactcaactacaacatgtgaccatccattcgctttactccaagaaagagcttccttgataccaatggcttcaacaatatgaggttgcaaagagccttctctagataaaattctagcctccaagaccattcccgcagcagaccttgcaatcaaacctaatccatactgcccttggatagagaatagtgcaccatcgatattaactttgacaaaagcactactacaaaattgggctttagaggcggtttttaagggctttcagcgtcggtattggcgaaattcgctaccgacgctgttccgggtgacgctaaagggttaaaaacaaccgacgccataggacccctatggcgtcggttatttcataataaccgacgccatagggtcttcctatggtttttttttcagcttccaattttgtattttagcataatt

SEQ ID NO: 382972 - DNA, 2642 bp, Cannabis indica
catcaaaatgttcatcacaccaaactgtgaaggatagttgcatggatagaacaacgaccaatacaatgcacgtttaagcatttaaaggcatcaagttgcaattgtaaacatataaaatttaacgacaaatgtcaaaatcacttagaagcaaaagggtaccccaaatgatacattgttcataagatgagaaaaagaaagaaaatataattgtcttaaaactgtcaagtataaaatgtgagtacccatgtaccgctcaaaagaaattcaaaaaaggaaagaaaaagattaagcaggggcattgagattttctgcgactttgctagtgccatctgtgacttcagcagcagttgcgtcttcaacatcttcaagaaagaggttcccacctaacccttgagtctcagtaggcaacatagtgtgaatagcattaaccatctcaaccacctctagtccgaagattgcaaagtcaaagtctggcatcttggtcagggtggtgtagatgtagtcagagacagcctggtcataagctttctttgcgttctccttctcagtctcaagattacgagtaagggtagaattttcttcctataacttcttactcttatcttctaactgcttagccctcccctccgcctgatccttggccttgccaagatcttagacttccttctcttttgcaacaacatccaacttcactttcttcgaacattcttgtaaagccaagttttgtttcttcaagaggtcaagatctttcatacttgcctaaaggcctgcgaatataccgccatgaactgcgatgcgagttcgattgaacgagataagaggtcctcggtaggagccctttcaactttagcaacaaagttttcgctcacgaacctctcctgcagagccatgaatttgcgagctttggtggtaggatctatcgtaaccttttttcctttgtcttgtgcaactttctaatgctttttctataaatcaacaacaggagtggtggtggcttcactcttcctcttttgaggtgtcgcagtagaaagagtcacaatattaaccttcggcttgcgattaaaggagggagcttgcttcaaaacattcatatctgcaaaaaaaaatacttagatgtaagaatttgaaaaattaagatactattatcagtcagtgttaaatcatattacatgatgtttatctcgaggtctatttgggaagatgcttatctatcttctccttttgtttctctaaaggcccattgtataatggttctcgctgaagtttagcatcggctagaatcaacttgtgtgctcgtagctttgcagaggtacacaacaagcgccagtcgcagtcttgaattggaaggccacttaacacttcagcgatttccacacgacttttgtttaatacaaattgagctagtctacatgcgaacataaagtagatattagtgtctgtaaaataacaagaataaaagctaagtgtaaaagtatgcaacatacgaggttggcagttgaagtaaatcctgaccctcaacatcttaaacgcataaaaccatttcgacttccaatcactcatattggaaactatgccttccaccccatttatctcagagttggcccatttgctaaaacaatagaagccattaccatggccaacactttttatatcataaaagtagctaaaatccttgactgtaggttccccttgcgtgtattccatatacatccatataatccgaggattatgcgataactgttaggggtaagttagaaggggcaaacatcgtagtgcgttatgatggcctttacaaatggatggaaaggaaatgtcaccccacaacgaagaatgggaattgagaccacaacattttgagttcggatgatcgcaaggttagtgaatggaagatgaggtaactacattgacatgggctttgaggtagcagtatggatcagatttagcctctcaaatatggtaagatcaaactttttaacccgcgagactaggtcctcgcaggaaaaaggattgtctaactgagcattgtctactgaatctgttttgctaccctcaccatatgcctcatcttcaacttcacgatcaagtcatttaaagtcctcaccaatctcttcaaccttgacgtctgaggaaattggtggatgagcaaagttaccttgagcagacaccatggattcactatcctgcacctctaaggtgactggttccgctaattcttgtaacattcgatctatctcattagtagacagcgaaccttctcaagccctagctataggagtctcatcttttaatagcaaggtgggtataaagctatcgctcctttgagattcatcggtaaaggcccattcaccaaaatcgtatctctggctgtctaatagatcgctcatctgaaagatagaagatcttttcactgtggtgcgagtgcagtttgaaaaaaaagtgttctcacctgaattataaaatttcaaagtaatgtttacaaaactggacgcttgtctcaagaagtggctgggggtttccgagtagggctgagcatcggccggtttggttggtttttttctatataaaaatccaaaattcgattttcagtttggattggtgcaatccgaaaaccgactgaccaatccaaaacatatcttaaaacc

SEQ ID NO: 382973 - DNA, 2199 bp, Cannabis indica
agttttaatattattagtaatttaagaaatatgatgaaattgaattattatgttttagtacttgtgttttttagttaaatattattatacgatcgataaatatatagatcatataagaaaaaaaacccataagacattattatgaatattaaattcacattgcccgttaacattatttatgtaaattataattaatgtgaatatctgatctgaaattaaacttttttttattttcaagtggaagtacaaatgcaaggtttatctatggagaaacaaattaaatattgtacaaagtagctatatatagggttcattggggagctggttgggttgagtattaattaagaaaatcattaatggcatggtgccttaaagtcgggggtgtatctactactagggtaggttgatttttggaagaactccaccttgcattcatgatatcttcccatatctcgggtctattattataaatattactaattataaataactaatataactcttaataaaaaacaaggaaaaaaaaaactaatatacgaaaaaatatacttataatttttgtttgacaaatgatccattgattgataaaaatagttaagtatattagtcaaacgctactaaatcccgtggtggctaaggtatcaaacttatggtttgaaaaatgtggttaaagcaaatgatattcttaaaaatggagtgtataaagtgattactgatggtaaaaatacaaacatttgaaaggatccgtgcttacagtaaagtagtagacctgttgacagagtttggagattgggagattgggtaaactttctggccaggggaaggacaattggatttggactaagaaaggtaatggttgcttctctagcaagtcagcctatttagtccaagcttaacaacagatcccccgctgtgaggttgcccctcgctctggaacaagttatggaataccaggattcttgagcaccacaaagtcatgtgatggagcattttgtctgatgcgctcccaatcaggtcagccttgattaaatggtttcctattattgagaacacatacccatatggtacatagaacacgaatcagttgagcacctttttcttaattgcagtcaggccttacctttggcactcatccatggtatctttcctgtctctagtgcatatattcgtgtgggggattggattaaatttatttagagccttaaacacaaaagtattaatgcatacaaggtcttcctatatgcatctattgttattgacacaatttggtgggttcaaaatgataaggtacataataataagatgagtaatgtgaatcaatgtataactctattcttcactcttatgcagatatcatagatttccttacgccttctttgcctccgacttactgtgttatctggttccctcctcctcaagactagcttaagttgaattgtgacgttaaagtggggatagagcatgtattgtggttgtagctagagaccactttgggtgaggtggtttgggtgaacacgacaaaattaaattttcagaggtgaggttgtcattgtttgttggcattggaagtggcgaaagatataggttgcaaatttatcacggtagaaagcgatactaaggtagtgatgataattttatcaatgtcgtggaccctaggtgggaaattgagaactatttcttattttgtcaaagaatcatttcctcctttgttacctgtttattttgtagtaccttacgaacttgtaattttatggcacataatatggttaagtgtgcttttgtccacattcagtttgagtaattatctatttcggctattcctaagaacatattttggaatgatcgtgaggtctaacttattattctaatgaacgattcttttcaaaaaaaaaaaaatgctactaaaaaattgggttttccccattattttaaatagtcgggtaaagtattcttatcggtaacgcctattcgacagtcgcaaaattggatagaataggcgtcggtgaaaaatgtcaaaaaaaactttttccaaaaaaaaaactaattaatttagagttgtatactattggagtattttttgtatgaaaatgtgtcaaatcttacgtggatataaaagaaaattaaaaagtaatattttaggatgatgtatatattttgtaacgatactgcccattgttatgctctaacagcatctccaat

SEQ ID NO: 382974 - DNA, 1100 bp, Cannabis indica
agagagagagagagaggtaataacaaacacagcacaatcccctggccaagatagattctatatttctttcattctcactttacaaaacaagattaactactcctgtaaaatgatgcatcgatagctccaacttggcttcctatatcattacaataaattcacaacaataattatgactaataaaaagattattgctctttcaggagcttgcttcttggaagatatagagaaacttctcttactgctactatcataatattataattttctacatcctttcgttgcacttggcatttatggatccttcaagagttagcgacctgttccaagactctgttcagatcacacaagatgatattacgtttgctctcaatccaggggaggtcgatgaacctcaagaagaaaacaaggttttactggggaaaattattagccgatatcgtttgggcaagactgcaatgcagggctctctgaagatgtcgtggagtgctatcaagggttggaaatggaaagaaattgatgagggtatcattcaattcacatttgcgaataggaacgatgttatgaatgtcctggcccgcagaccttggtttgtttgtggagccctccttgtcatcatgccatggccattgtggctaacccctgctgaggtgaggtttgacaaaacacctatctgggtgcatgtggacagcattcccccattctattggaacctgtcaaacttaaaggaacttgcctctaatgcttcgccggtttatgaactacccccgggtatcgaagacgccgtgggtatgagctctctcaggttcagagccacaatagacctaaataagcctattttttctgggttttttcttcgcagacaaaaacttaaggacctatggctccaatacaagtatgagcgactcccaaagatgtgcttcaaatgtggtttaatgacccatgaccagagtatatgttttaaatctcctacggttatcagagatagtgttgggaatttttacccaatgttcggtatttggttgaagaaggaggtgcctgagaagtccatgttaggttttatgccctaaataaaactctttacaatctgattagtaatc

SEQ ID NO: 382975 - DNA, 2172 bp, Cannabis indica
aaaaaaaatgtggtttttttttttatggtaatagtactttttccgacgtcaaaagatctccgacgataagactctatcaccgcaataatatcttatgaaaattagatgatttgcatggtatagtatttggattgagaatttaggtattgtcatcgaaatatataaaatgttatagagagaagctagtgagacactttgctaggtataccaacctttcacgtttgatcgaactcatgcatgctcttgtctttgaagggccttttctcgtacttgcaccttaggaaatccttgtcaagacctaggatcttcgtgtctcaaatgaagatggttcggaactctcgcctagcctctgcactaatcaagactttttctgaggattcctcaagacgattcttggatgcctttggaaattgggcgatcgtgggtgggacatgaaaattaaaggtaagtccaataattctttcctcttcttgaatttcaatttctccttggatacgcgagactagattcttggcaaaatgccatatggtttctttctaatggtttgcttattcttggacctatcgaggacattggtgattcttgggacaatgccttgctccaattccctatttggggtcgaccccttgatatccctcaaatggctagggattgaaatcgaaaacacagatgttacttgaattgctatcaatgtatattttgtggtactaaattaagtgtgtaagcattttaataaagattattgttgtactacactttagaatcatcccctccatatgtatatattttattagaaacaaaagagatgaataggaaagttacgtacctcttgatgatctatcaactattctcaaaatcttttcatacgttgtatccaaaaacaataataaaagttacaccaaatcttttagatcaaatactacacataacgatcactatgagctaataggatatacaaaataaaattcttgagtttttttcaactcacgaacaaaaaaaaattagtgaagacaaaaaggagaatatatcactacaacaaaaattaacaatagtcgcagaagtatcaacagccaaattcttcgctaatacatgcaggggcaataatagcgcactagtgggttcgccactaatgtagtggtaaattaaagaaaaaattaattattatcggtggccctacccctattgcccaccactaataattgttggaatttattttaacaaaatcttatttagcaatcatgtatttatttactaattatgtatgttgattatacaatataatttaatattctaaacgtgaaaaaaaacaatgtgtataacgaatttaaacataaagtttaggtttctcacattggaatctagcaaaataatgtatctactttcgttctaatactctattctttgaattttttttgtagcaagattttaaataagtgtagaacttagatcttcaatctctgaatttgataagaccacgatctcccacaatttcctaatcatcacattggtacaagtgtgggctaatactcaagacacaaaggttaattctcttgatttagtgatgacccaattaaaattttgccatttattttatatcatgtgatgattaaaaattattttttttactaatttatttattaattcaatttaaactatttaaacactaattttaatttaataattataaatacttatacaaataaaatataaattaaatatatttattaattagactcacaaaatatcataattaacaaataaaatctaatctctcttttattctcaatttaacacaaccttagtgtaaattcttaaacatgacatagtcagtttatgaattttaattgattaaccaaatcaattaattaagttctacaaaatgatattagtccggacattgtggggaccatttacctatataatcaagcttccaataagtcatgatctaaaatttatccccgtaaattttctaatttattaattcttcatgactccagtactcgaaattacattcttgattatatagaacactctatcccaatatagacacgctatgaattatctattattacaattaaaataatcaatgatctttgttgaccgaggttttcgacaaccaataaaataataaaagattaaagagctgtaagaaattaagagaaggatttttac

SEQ ID NO: 382976 - DNA, 5153 bp, Cannabis indica
gtaaaaaaattaaaattaatgcaagaaaaaaatggcaaaaaatttatatttttctctgatttttccattataacaatgaaaaaaaaactgtcgtagaaaaaaaatatttttaaattgaaaacggtcacttgcagtatatgggacgatttaaagtcgttgcctatagtagtataggcaacagtttaaaaccgtcacctatagtataggtgacgatttaaaaccgtaccgtatactcgtctgtataggcgacaattttacactgtctggaatggttttcagtgacggtttctaatcgtcgcctattccaccttttttgcaacggttgaataggtgatggttataaaaactgacaggaatactttacgcaaccgtttaaaactgtcgagaaaaactaatttttttagtaatgatatcaactgttagaaatttatatgaatatataaaaaataaatcaacaatttatgcaatgaggaattaaatcgaacatatacacgatataactaaacgatcgaaatacatcctgtgattatttgagctttaattccacatgtgcttcagatctacaaaagaaaaggaaactagttagtgtgggtaatcgggctttcaagctttctctactctttttaaagacttttttagtttcacagaatgagtgaggagctcaaggaccgtaccttatatttttaggtgagatattttataagtatttgcaccacattaattatcataatatttcgataattaattcagggaataaattaattggtaaatcaaaaacatgagatatataaaatatttatatttattaaatgattaatttggaataggaactattcatacatgtaaaaattaattaaataattttatacttaatataaaaatactctaatatgtaatatatagttgcaggtttaaccgcagttattaaattcaaaaccgcaaactgcattgcaccgcaaaaaatttcaaattgtattttttgtgcagtgtagtgcggtgtacataatttgtgcgtagtagacattttgatgaacacccccactaagtatggctaagtaagaattttaacctcatagtttgtctataactaaataactagctcactaagtgtggttaagtagaaaatttgtgggtttcacggttatttgcgtgtatgattatatgcatatcagcatatgttggctacactcgtaatttttactccgagaatcatatcgaaatcatccaacgggaccatcatgaggttggactgagactcccacggcccaacctttaacatcaccgtagcagacccttgaataggtttcggttatgagtttaccgcttttcaaccgagttgaactttggaccacttccaacccaagtcgggttgcttctttctgagccacaaaattattcgttgccctcgaatccaccatggtcgtcacttctccccattgacaaacaccttcacatacatcaaacttttcaacagacttaacttctccgtagttatggcagagagaagttgtaagggattcattctaggcgttgtttcttgcttggtgtcgcttcttccgtcttgtgcgatcagggcattcaacttttctcgactaggacattccctcaccatgtgaggaccattgcagatgaaataaccaacacctttcttgccattcatctgtgatcctttctggttattcccaccagcaccgtctttcttctttccatcgtgattatgcccacctttggacgaggaaggcttctaattatttttcttttcccccgtggatttcttcgaattgtcaccttgtgcctgattcgaattatatttgtagtccactagtttctcggcagccactatcgccgagggtaaatcagttaccgcttgcctcctcaattcagcttgtgcccatggctgcaatcccgacaaaaagttgaacagagcaacaaagaactatattctttcacatactcccgcaccaaaccagtgtgcttaagtttcgttagggactcacgagcgatccatgtcgtgttacatggaaggaactggtctttcaactccttcttcaacacgtcccaagtctcaatcttgggcctccccaaacgtgcatcttcctccatttgagtacaccaccatagtttggcatcaccctgaagatacatgcttgtgatggtcactctatccgagtctggaattcttgctgccttgaagtaatgctcaacatcccaaaggaaattctccaattccttcgagttcctactgccattgaaggctttcagtttaggcactttgattcttcgaggaatgggacgaagaagactcggttccttgggacggatttgttatcgcccttttaattactgctacatctgcatcgagatccatgaatctctccttcacaaaattagacaggtccgatagtttgtcgaacacccctttcatcttctcatcgaatttctcttgaacatcaatcatggccctaccacaacccacaacctaatccgatctgacgattccttcaaaacatttcgagccaatgcctcaagggagtgttgtttactgagaagaaaaaaactaacaacatcatctttgttgggagaaccaactaactctttgaatctctctacctgagtcgatagttcagcattcgtcaccatgatttctgctactttcccaacacgattcacccgctctgataccagtagtcacaaggaaaatttctcactcataaattttccctgtgatggcctagattcaccccaatatagtcagccaacccaacacccgtttgcatgcacacacacacactcatggtttagtttgcccatcgtcactcaacaacactctctcgttatcaagtaaatgcacataaagtataagaacacacacagcatacgggaaccccttcctaaccttgttattcacacaatatcacggaatataatgttcaaacgttggacatcacactctgatgactcaagcgcacaaagcctactttataacccaataataggttgcagtcgacatctccaactgcctaggccatgctggactcaccagcattttacacatcaacatcgtatatacaaataaccaacacacctacgtgtcagccattcaagccttctacctgaatcatctgttcaccaacagatgtcttcagcccacgtgcatgcctttggatagacattgataactcacggcaaccgtcattcatatgtgtcactatgcacattgtctaagaaatgcatacatccccatgcaatatcacgtccatcttaagaccatcacgtagacaagtccagctaacatccccaaatgttgcagcatgccaatgatgctgctgtgtactgtcccctggcaggtacacttcactcgtatgctgctatcccacaagcaaatcacgagtgatgtcgaggtccaccgagcgaacccaggtgagggtctcacaatatctaccaaattaatcttgaacatcaatgaaaaggaaaaatatgtgcctattattaatttattgtcaaataaatatatatatatatatatatatatctagcaattaagctcctacatatttataatttgaaaaataaacactaattggagacaaatggagagagagtatagtactatttcacattataacaaattcaaaagcaaatacattacatagacagtaccatatattcaataagatcactcagcagaaggatcaaatgaaaaagctagctagtttgttttttctgtatataaataattaagaccaaattaacagctgcggtatatataaaaataaaactgaattatcgtagttgaggagacacaaggaagaagatcagattacaatttggtgcaaattacaatattgtgtatataggtaggctatgtatgtaatatatatcattaggtttaggaccacagcaaagggagtattaatggaccaccatgcatgatgcatgcacagttatagtagtacacaactcgaccatccagttggcggctatacatatatatctgtgtatatatatgttcttcaatgtcgccttgatgccttttcttcggcctttcgcagtttatgggaaccaaacatatggttcaattattagagaacgactacttttcatttgattctgtctagagcttttcaatcacaaacaaggaaacgtaactagctagagatattttcattcatctagctgggctttttggtaattatatatatgtatcctcttcaatacggcatatatgaatacgtacgtgtaatgataagtgcatacaaacaaaatttacatacaaatttaatacacatttatttactaaggaatttcaactaattatttttaagaattattatatgaaaaatagaaattgacactttatttacaaaaatatttttataaggtgggacaatatttattttatgtactttttaattactaaaataccttttacactatcacttacacaatcagatgatagttgttgggtggttggtcagagttgcattagatgaaagtttcaatcagacgaaaattgttgggtggttagttgaaggttgcattagacgaaagttttaatcagacgaaatgctgagtgattggccgaaggttgcatcagacgaaggtttcaatcagacgaaataactgttaggaaaatgtttatgcaactgttatgaaacattaaaaatcataacagtgtttccatgtatgtaactcaatctacatgtctcttcatgatttaatatgaacaaattcaccattaaaaatttggaaaacaatgaaaatacacaggataaatattttactatagtatgatgtaattttttttggggggggggattatatttgagttagattatttgggaactccagatcaactttttgagatctgcatttcatggatctaaaaattaaagtcgggacattaattttatgcaaattaaattggatttctagttaaattttagttttgtagttgtttttctagactttttttcatgaattcgaaatagcccctattttgattgattctggttgtcttttcaggtgaagtcaccagaattaatgttggtttcctatctggttgaattttcattttgattgtgttgggttgttgagtggttgcgcggtagttgcccaagaagcatggtacctggattgaaggtgtgtgtaag

SEQ ID NO: 382977 - DNA, 2671 bp, Cannabis indica
tttttttttttttcttttgtatagatcggattctcttcatacttgtctgatacttagaatctatatattatctctattgttaatgtcgttttgccgggttggtgaccttcactgttccctttgccaactatgtttgctcccatagaccaattctccacatttccctcagatttaagataaggaaagtagtaagtattatatataagtctgactcaaaataattcatatatatttgaggatagaatatttgactcatactctactctaagctaatgccatttcttactgtttagcccttcaattttaattttaataatagttttcaattttaatagtgtttattatgttcattgtatatgtgtagttttaaggctcaattagtgttatgttaccactggtgtagctggcctacatggttgaaggaagctctgcagaaagagcacgcttggttaggttcctcattgattttcaaagtaagagataccacactaagggcatagtttttgctaataaaattatgtttgttttgatgtaatgtaatgagaatgatagtaagtaaaatataagcaatgctaggatgcggccggagagtgccatgacacctttgtatattttttttttttagaaatgaaaataagtaaattttgattttttgattttacatgtattggtcatcttttaatttacgagttggtttcactattagaaacaataagaataataatgagaatgatattatgatttttgataaaattctataattacattctaatataaaataattttttattcaatttgatgtggaaaaaaaagtaatatatattgataaaaatatgtttagtttaattattttttatttaatttgatgcggaaataaaataaaatgtaatatattgacggaaatattcttagtataattatttttaaatattaaaaattctaataaaagtaaatagaacaaaaagggtattttattaatattttctaacaactaatgtaatcatttttacattagcctatataataatgtcataatgattataataatatgttaatgtaaataataatttattttttcttttttgccctcactaattagaattgtagctggctcctactgagagatgtaattagtattttgtagtgtatatttttattttatatgcacatattgctgctaaactaaacttgaatacaaagaaacaaagaagaggtccaatatcttctacagcctctactcacattgttattattattattcattgaaaattttcaaaaacagtttagctacatgccctagtcagtaatccttaagttggactagtttttgtttttggaacaaagtattggacctagttattagaaaacacaggccctattgaaggtattggatgcttaatagagtagatatatagggctgctaccctaaagattaaaatgggccaagcctttgaaaatttcaaaagaaagatttcactttttgaaattgtattgtagtgggaaacatgagatggagatgagaatgtcattatcacaaagacaagaaaacctacttgttttagtttattcactttttaaagtgaatgaaagtgaagtaaaagaaaagggagaaccattacaaagaaagaaagatagtggtagacacctttgtcagatcagaaacaagacacccaataattatgatatatggaactttgtttttatttgggtgattttcgtgacaagtagctagctaaacaagaagcttcaaggaaaaattaaataggaaaaaacaaagtatagtgaaagagtgggggcatgtttattttcaattatcaaagtaccactcataactaatataatattacataaaaaaaaaaaaaaacatatgaacaagttcgattctctatcaaaatatcacgtttttatattactttaaaatagagaaaaagaatattttgtctgaaaaagttcattaatttttatttttttttgtggcaagtttatggtcattttaaaggtggttgattagacacgttacccgtatataagtaattagtgatgattatttttaactactcataatatcaagattcataaagcacttacaattataattaatgtaaaataataactataaagttaagagcaacaaaaaaaatatattaaaaaaagtcatccaataaataaattattatagttcaaaattttcattcaagaataatatttaggtaaatgtagctacaatttctaagttttagtatgaaactataattttgttattatttttatagtgtttttttttaatgttttagtgtaaaaatattatatattatatattataaattaatataatatataatattttagaataatttttggcataaatacttaagtttaattgtcgattgtaaaaaaaatacttaagtttaattttagacgataataatacttaagttatcataaatgtattatttaaatgataaggagaaaattttaaaaaacttaaggatcgtttgcactacaaaattttttacttttagtcacaacaaaacttgtgactaaaagtaaaaaaattgtgactaattataaatcatgattcctacattgtgactaaaaggttcgtggataaaaatattagtcacaaaaattacttacaatttattgtgactaaatgtatttttagtcacaa

SEQ ID NO: 382978 - DNA, 1965 bp, Cannabis indica
aaaaaaaaaaaaaaaaaacatgctagaaattgatctattgacctcttagcttaaaataacatcattttgttatatttccttattatttaatattttgtttatatactgataatttttttttttcataatttcggggtcctgagcgtttgggggtcaaggcgaacgcctgactcgcctcacctcagggtcgaccctacctataataataataaacagacgaaaactccggctcagaaagctgttagaaagacttttaaaggcactgcgcacttggccaaccttctccctaccggttcagttctagcctttcagattctctccccggctttcactcaccagggtcagtgtcgatccccagtcagccaaaccatcacactcggcctcctcatctgttgtgccgcctcctgctttctcctttcattcacagacagcttcagggaccacagaggtaaggttcgctacgggctagccacctttggagggttgtggatcatcgatggctcgtcatcttcatcttctgatttggatcattttgcagtcatcattacgcctgaggaggcttcaaaataccgcattagggctatagattttgtccacgcattggcatctttgcttgtttttgcagcggtggcagcatttgatcagaatgtagtcaagtgcttctatccttcgccttctgaagaagcgaaggagcttcttgtggctgtgccagtggcagtcggcgttgtgtgtagtttgttctttgttgcgttcccaagtaggcgccatggcattggctttcctttatctcgccattaataaccaatttttttccttttctctttttgggcattttacgtataatttgttgaaaattataaattgctttattttcattataatttgaaagagagaggggtaaatattaaaccacgttgttgtgttgtgtggtgatagagattgtttttactgtcatcttttttgggtcaaggattcgaaaagggattaaggcttggccattctaaaggttaacttagctatattaatttgggcctaaaaatataactttttgggccctttttataataataataataataataaatgatatttttaaaaattattaaaagaatatgtgaatttattaaaattcttttatttgggcccttaattggagtgggtgggctctaagcacgggtctaacccgccttaacctagaattaacctaattaattgtaagtggtgtcatctgtatgataagaacccttaagagattaattaagaccggaattatcgaaattgccaatatgaccgaaaaagtataaaaaagatctgcattaagtgatccttttattttttttttaaaagcaatattttaaaatcgaaaacttgcaaaaatataagaaaaaaacaaataaaagtgtcacaatttactaaaaagtttttttatgaaattacgtttacgttttgttttcttatcaaaattttgataaacgtgtttagatatatataatattaattaattaatatgaagatctctttcttcgtgttgaaaacatatctatacaactatatggtcaactggtcaattcaatagaatttaataatcacgcgtttatagcaaataattttattttattttttttttttatgaaggaagaaaataatgcattaaaaacttaacaaagagattgctaccaaaaaaacttacaacgtttattaaactggaataaataatcaattaaataataaataaatagagtttgatataaaataatggataaatactattggaaaattctacaatgcacccctttaaaatagatatattgatgcacccctatctgttttagcatccgaaataattttttagtgaaattttttctcatggtcatgtacgttatagttatttaagacatcctgcaaaattaagaaatttggaaaagtttaacatgccgaaaattatgttcaaacagtgtgttgcac

SEQ ID NO: 382979 - DNA, 1566 bp, Cannabis indica
tctgtatactgatgcttattcatagcagataccaatagtgattcgaatttaatcttatgaacaatgcttaatggtttgattctgattgtgtataaatgataatattcaaataataaactatatgatcattattattgcttttcttgctaagtccttgtgactcatgggtgctatgtggtgcaggtaagggcaaggaaaagttagagctatcatcaggtgacggccttctccagcaatgtacatattgaccccactggcctgcgtgctgagtttccaggagttgttttggactggttgtatctgttgtattttgaattgtgttttgaattgcttttgtctatagtcttttgggtaaatgattttataacagggattcccagaacacactttttatgccattataatgcccattttcaatcttttattttagtcaaagtttttaataactaattactctattagtattaaattagtttataaatccatatacatagtgtccctatgaaatagggcgttacaccttatttcaagcaacaagggctatcaaccagaacaacacctaaattatcgccatttgaaagaaaatacgaattagacaaatcgttaaaacttgtcgatttcaaattctcaccaagaatagagaatcgattcgaatcgtttgagttatcctcaagatcacgattacttcgagttcgctctccttcttccctagccatgaacacaaaacagaagcggaagcaagaagaagagaaagcaacgaagaagagaacttactcgaagtcaaactctgataccatattagctggtataaactaaaaaccagaaaaaatagagagaagaagaaggaaacaataaaactttattactgagattgaaatgaatccattagttacaaatacaagtgaggcaagctttatatagctgcaaaatagaaatggttacaatcataacaactataacatgattcaactaaaataacagctaagaccaaccagctaataactaacaaattattgataaataataatgatgtaattgcattgtgcatgcctgatcaattatatataaggcatttaattccctttaaatactatagcattcggttttggatttagtttagaatattattattataattaaaaaattgaaaggatataatttgctacataaacttttaaaaaaaatagtttttttttaaggaaaggttaggcctgcattcgattgtgtgagattattatatatattgatggatctttaaataatgacttggggcctagggtgatgatcctgaccaagtgttttttctttctaaatttttatactattatagtgtatattaatattaataagtgaacattaatttttaattaccgatgataatcatattcatttgtcactagccagaatgcaaaatataacatcactttcaatggttttggattttatgcaattttcaatgtatttcaagacagattagaaattccatttatcaaaacaaaaatatggtaataagtgcatgtttggcatcataactaaaaaaactgttttttgtttttaaaaacagaa

SEQ ID NO: 382980 - DNA, 2130 bp, Cannabis indica
ggactcacctcccagaaacgcaataagccattacaagaatgggacagaccccatcgagcaagagcatgcgcgaccttatttaaaacacgagaaagccaactaacagaagattcatttctgaccaacatatcataaagattagcaaaagagcaatgagagcgccaggaaggagaataactgtcattcaaaccagagaccaacaatgcattgtcagtataaaaatccaccccttcaaactggagatcctgagccagagtaacaccaaaaagcaaggcctccaattccccttgaaaaacatcaagattcgaagctttcttagctccacaggccaagatcgcaccagaggaatcatagaaaaccacagctccagctccaaactctttagccaacgcaaaatccacgaaacccctcacccttcccggcctagggagaccccaccttatctccgtcacaccacgacaaatttcaggcctcgcacactcctcgcgcaaggttctgtcatgctcaagaaaacactggtcaatggtctttttcagagaaacaaactccacaggcaccccattatggaaagcatcatttcgactaagccacaatttatgatacagaactgcaccataaaggaaaaaattgggcaagtccttcgaaggaaggagatgatggaaagggggtgatggagccaagaaaccagacccctgccgttgtgaaaagaaagggcatcagggcgaatactccatcgggacgtgaaccaaagccgtctcagcatcgaacaaccagaaacaaaatgtccaacatcgtctccgccctcactaccacaaagaaaacacaagcccgggggcttccggaagagactttgcaactttgaaccaaacgacagagcatcatgacagagtttccagaggaacactttaaaatgctcgtgaatttttgattgccaaatccatctacaggcttcatctttatcagcaaaacgctccttgttatagtcccagtaagccgcctttaaggagaaccgcccattgtaagttgactgccaacgagccatatccaggacaggcagagagtttctatccaaagagagaatccacgatgccgtctgtggattaaacaccctctccaccatccggtcatcccatcccgtagattcaagatttgtcaattcttccacggaagctcgagactgtaccaggggattgataaggcccttatgcaaaataggtccatccccacaaatccatttttggctccaaaaatcaataaatgaatttgacccataatccacacactattagtagcaatgaactcccgagtggcccaaatacctctcgccaccggtgaagccttagccgggagatgggaagttaagaaaccagattgagtacagtatttcgcattcataaccgaagtccataaagacatagaaccagaagccaaagaccagccaagcttcgctataagacagaagttaaagtccttagaacgtctgaaacccaaccccccacaagacttgggtttgcaaagactatcccaagcctttaaagaaaggtatcgaccctccttacattcgccccgtccaccaaaatttcctcgaaatcgagtcgatacgatccgtaatctttacgggaaagtaaaaaagtggacatagtgtagattggaattgaagccaagacacttttgataagggtcatttgtaatattattagtttggacagactgtatatgacagattgaagaaaataaactaatgaattttggtccatagatatataacatgtgcttatctataacctttataaaagtgagaatcttttttagggttccatatattaaattaccaaaatatccttacttctcaggtttagtttattatgttgaggttgatttatataatacatgtggtgtatttttttttttaactaaattatctattatatatgttatataatttggtttaattcattaataaaattaaattttaatttattcgatatatatatgggcatgctcttaatgggtattacccatgaatggatattctattattatagccattggatcaaatctaatggttgatatttatagctattaattaaaattttaaattaaatattttttattttaacctattacctg

SEQ ID NO: 382981 - DNA, 1187 bp, Cannabis indica
tcatcatatagaatgacattgattacaagtgatacaatactaaattaaatagctacgacctagtgtagttttacttaaagtatatatagttactatagatagacacaataattaaacatctaaaaattcagtaaaaaaaaaatactaaaaagccaataaacaaaagtaaaaaataaaaaaggaataagaaaacaaaatatgcagtcaatatcaaagccctcattctgattgataagtagtctctattatgggagttaatgattctaaaagccgaaggaaaaagtttaaaaagtgcataaaagactctccatttagacgtttagtaccaaaaaacataaaaagagccaaagataagagcaaatatactaaaaagcccattttaagagctttttgggaaagagagaacggaaaaacagagagagagagagagaaaatactaccgggggacagaaacgcagaaactgggcgcaaaccaacatcatatatggcttcgtttaactcaaaccctctttccactcctttacgctcctcctaaatcccaccaacatcaaatacaaaagaaaacccactacactctcactctcaccaccttctttcactccatttccatggcgtcaacggctactttttggttttttttagtggcttacttcatggcctttacttgggctcaaactaaactaagttcagatacattgttagaaacaagagctttaacctctttcaaacttgcccttcatgacccggctggagctttggatggttggatttcgtctacgccatccgctccctgtgactggcgtggggtcctctgttatggtcaccgagttcgtgagctcagattgcctcgtctccacctcggtggccgaatcagtcacagactctctgatttacgccagcttcggaagctgagtctacattccaacaacttcaatggcacaatcccaccttctctttcccagtgtgcactcttacgagctgtttatcttcaggacaactcactgtccggcgattttacctccatttcttctcaatctcaccaaccttcaagtcctcaaccttgcccggaattttttctccggcaaaatatccggctacggcatttcgccgagccttcgatacatcgacctatcatctaatgggttctctggcgacattccaatgaacttttcatctatctctcagct

SEQ ID NO: 382982 - DNA, 1851 bp, Cannabis indica
gctcatcgtcatagaatgtcagtcttcttaccaccaaatgggctgccaccaaagaaggattggaatatatcaaatggatcgtggccaccgcctccaccacccattccctccttaagggcatcctcaccatactgatcatagatctcacgcttctctgggtcactcaaaacttcgtacgcttgagccaactccttaaactggagccaacaaaagaaaaccagcgttagtcatcaacaaaatatccaaaagatcatttaaacaataacacatggatcgccggaaaagaagagttaaaaccagtaaatagcattctaagtcaagcttaaaattcacttgtgtaactgtataatcgccagcatcaactacctcgaagaaggtaaactaaaagtcagtcaaacagtcatggatggattacaatcctaggtccatgcctgaaaatttcgcaatgaacccatcttaaagaaccgcatatacaaacaagtaatgaccctctaacgcggatctacacagtttcaccaaccaataactcaaagagctcacgaacatcaacccagtcacatcaacaaactaatccgagacatatatcataacaacaatcacttaattatcaggccgatccacccatcaaaatcaacaaccaaaaaataaagttataccttttctggatcaccacccttgtcggggtgattcttaatggcagctttacgataagccttcttcagatcatcttgcgaagcgttcttagaaacgcccaacacctcatagtacttggtattatcacttttcttcggtgctctcccaaacatcctcttataaattctgcaaaaacaaaacccaaaaaagtaaattcagaactaaaaattcaaaaatcgaactaataatttcagaatcacaaaaacccagaagctaaggatcaaagtacctattccaaaccctaaggagtatgcaaactcgattattcccttcttcctttgtgtaaggagagcgaagagaaagagagagaaagcgagagaaagagcaacaaggcgagacggctagagagaaagaggaataagaaattggggtagatctgcgattataaagagaggaagtgaacggctgggatttattgtgttggaaagcggtgatgagggcagtattgacaattcacattaacttcgaattagatggctagacgagtggatggccgagaagcataggaaggatctagaatatttctatttccaatctaattctgaaaaaagtgtttgaaatcaattatataatcaaccgtttgatttgaggaaaacatcacgatacttctcctactatatatattacacacacaggattagtaagattccacatacttgtagaaaagtccaggtctttgtgttaacagatatttattttattgtatagttttatttatttatttagtagttataaatcttttaacttcgttaaaaactaagttttacagtgatattagtttattatcttttcaaaaaaatatgttaaaaaaattgtttatttgaagtgaaaatataatcattaattttaaagttacaatgttgtttatttaattaattatctttttattttttaaaatgaattatctttttacttttaaattttacattatatcatacataaaaaaaaattatcttttctcttatatattatctaaatattataaaaaatagaaaaataaaaaagaaataatgtgtaagaaattaataatcaagtaaaaatgataaaaaagaaaaaaaaaataaaaagaaaaatgatgagaaaaaaatataaatataaaaatgtagggtagtcaaagtttacaaatttaaatataaatttttaaattatttaaaaaaa

SEQ ID NO: 382983 - DNA, 1579 bp, Cannabis indica
aattaagggttatttcaaaatttaaaacataaattcttaattgctatgatgaatgttaatttcttagttttcattatattgaattgcttttatttttctattttcaatgctatgattattattttaatcttgattagatgatctgcttcatagatttattgcgtagttaaaagagttaattattgaacgttttgtcttgattacttacaaagagagattgagataattgtatgctttttcgttaattgtgggattaataatttgtttgaaaaattaaaattgcattcgttattagtattaaagatgattgttgagggtggagacaaacgtttagctatttcttaaatcacgtagcatcatattttatttgctttcttaatttgagttgtttaatttgttctttaagaaaatcccctcctttatttactgtttaacattgaataatggagtaaacatagtcctcatgagatcgacttgtacttatttatatactgaaataattaaaattattacaataaaaataattagtaaatttgatatggcataggacacacatcaaatttttagagctgttgttagggattattgtgctagtttattattcatatttatttttctatttcactaactagttttcacattaaaaatcttgggtgtacatggctggtgaagacgatactcaagagaggtcatcaaagctaaaaaaatttatcttggctcattgtcagcttctcgaacttcaaggactatcatttataactctatttcaacgttttgctcaatattaagatcctgttaaagagccaataccatttgatgacaattctaattcagacgatttagttaagtcttacaagacaatggttcaaaataggacattgaaagagttagttgggtcggatattgaccaacaactgttatgcatccagtatccacatttgaatgtgaattttgaactaaaattgggtcttatacaattattgacttcatttcatgggctttccgatgaagattcaaataaccatctgaaggagtttcatattgtatgttctactataaaacctactttagttaccgaagagcaaatcaagttgcgtcctttttctttctctttgaaggatgtagctaaggagtggttgtattatttaccacctggaacttttgacacatgaaatgaaaatagtgttcttggagcataatttttcattctcaaagttggaagcatcataaaagaaatatatggtattgggaaagttatagtggagtcattgtatgagtattgagagcgattcaagcagttatgtactagcttccctcatcaccaaataagtgaacaactcctcatacagtactttaataaaaggcttactataactagataggggtatgattgatgcaaccagtaaaggagcactaattgataagactcctacagtagccaagagcttaatttcgaatatggttgctaactatctttcaaatttcatgttattttataaattaaatattcaataaaataaaataataatttaatatccttttctgattttataatttaatttaaataaaaaataataaa

SEQ ID NO: 382984 - DNA, 932 bp, Cannabis indica
cgataatagctacgacagaattagctatttcagtttttcatagaagctgtttcagttgatcatggaataattgtacatttcaccaatggctatcgttgagaacacacagaaaagaatgagaagaaagttattttttttttggatacaactagaactacatgttcccttgtccaagccccatatagatcccaactcttagcaatagaacaaatgtaagacaccctagaaaatactcaaacattctaactttctctgaggcattttagcaaacataattgcaaaatgacttgtaaagtcttagttatcttatatttaggaataattgttagttttttttttttttttttgaaataggaataattgttagttcgtttcttattttttagacttatttattttgatttattaccgattgtaatttataaaaagccatttggctattcaatgaataataagaattattattcaccaaaattagatagtatcagagccgatactattctgatcgactttttttttcccatttctttcttcctttttcgtcttcttcttatccttctaaatggttgatgattccttctaaatggctgataactacacatcactccctatttatcctaaaattaagatttgcaattagggtttgttcttcatctattttaaggttcatttttcaaaaaacacatttagagagcacgtgagctctcattgctggcaccaacggacaacccagccaccgttctgcagaacctcaaagtttggtggctggaattgtcgcgcgtgagccacacgcgctgcctgaagcttcagcgacaacacccacgtgtgaggtgtcttttcctaggtgtttctctgccgattccatttttcagtgtttttgaccttttggtgcatctatttcgaccattgttttcttcttttgtgattgttga

SEQ ID NO: 382985 - DNA, 1548 bp, Cannabis indica
atatcattttacactaaccttgttaataggaagatccaaagtcacatatattgaatatatttcgaatgaaaatgatatgactagctagaaaattttctaatggacgtgatgataaatataactctttcttttttctctcttccaattaaagtgaatctaacctatgttggttatgattaatttcaggtcatcttttcatgcaatatatcatttttgccaatgagatatatggttgagaaacttgtgaattagtagacctttttggtaattggtagagaataattaagtataatggtagtgtaaatcaaaaggtaggttgacatttaaattgtaccaaagtatattgatgacactttatatatcgaatctcttcaagatacataaattaatgctattagattcttgatatttggtctatacttaaaattaatgaaaaattatagaagcccaatttgactttcttgatctattattcatgactgccatttcagaagcgtacattagtacgagccatatcctccatcaagtgatctcgtggccacccaattaaaacttgagatcaattattatgagaccgttgtgttatagtcgtagttgagtagatataattatcattatttattttattttttaatgagagaggaaattggtgaatcaaaattcaaaaataaaataaaatgtttgttggaaagtaacatttagttgtttggtaagttatatttatttatataaagaatatcaaggagtgaaaatactttaaaaaaaaacaattattagacattaatatttaaatccttttttgatgtctttattgtgctatgggcgatgaagacttcaagactctctagagcattagttttcggatgtagaagtcaaaagcatgtccaaaactttccgacctttctctagatagccatgtccaataggaggctcgaataaagtaaccattgtgcgttgttaaaatttgaaataaggtaaatgaggtaatttcatctcaaaatcaattggtaacgagagaagtagttcattcatcttatatatgataatttattttcacacattaacaatgtgaaactaactctaatatacgtgaaagtcattgcgacgaatctaaaatgtgaatgcattaattttcatacattaatcataaatacatataagaatatgaaaacataccagttaatgcctattaagtgtcattgtaatatttttgtattaataaacgattttccttatcaaaagttttgcaaactcaaaccacgatcttctaaaacgttttctaaacggcaagatgtgacaatctgatttttctgtgttaactcgcaacgaacttctgcaagatctaagcaagtcaacgacctataacagtcatttgtttgaatacatacggatgtggtaacataaatacttactaagaaagattaaactttatagaagaaaatggtttatgtactaagataccgagagttgaaaataaacatattttgagttctctaaagtcataagattttaaagaataccataaatcccaatagaaaaacatagtaa

SEQ ID NO: 382986 - DNA, 1749 bp, Cannabis indica
cagacggggagaaacgtaagaaaaagaaagaagaaaataacgttgggacgatggaatgagcgattgagagaggaaagggagatgtccagtctgagagaagatggagaagccatggatggttgctatgtggtgagacttctctctcttactattttgtttttttctccaaaggcaaaaaaaaataataattctttaggatttatctatattacccaactaaatattaatgggaaaaaagatattttattaatgataaatactctttatttaaatttcagtaataaataagaaaaaagaaaaagcgggaccataaaaaagtgttcatatatatctctctctctatatatatatcaccgcgtaacagaacagagctaattctcataattcccttagctaaggcggtaaatccaatccccatccctctgagttgtatcgtataaccatggcaaccaccaaccacgatgatttagatgaactcctcgatagtaagtcaaaaagctccaaactttttcttatgggttctcttccttttcaattttcaattcatttttatgtaaataattatatcattaccaggtgctctcgatgatttccaaactctcaacctcagtaccaagtcaagtccagcttccaccattgcaaggttagtaatttactttctaaacaatgaaaaagaccgagaattgatgtcaatttctgattatttttgttaatttatggtatagaagtaatgaaagtagagataacacacaaaagactgttccgttgggtagtggggttcaaggattggggttgggtttgcctgacctcaaggccaagaaaaagggcaaacaaaaggcttcaaaggaatcccatgtagcagatgcccttgataaacttagagctgaaactagagaggctgttaagggtctggaatctgtcaccacagctgccaggccacctgttccagacttgggtaatgatgctatgatggaagattgggttaagcagtttgaggagcttgctggctcacaggtactcctcttattcaatcattttgtcattggatttttcttttttgctcttcaaaattgttcttgctttttaattgaatatgatagtgcttgattttgcccatttgcttaattattctaaattagggtttcattatcattgctttagtcctttagtattctatctagagtatgattcattttgcccaattcatttgttatgatgtcatattaggtagttttcattacaacaatgatgtgttcttttaatgcaaatttttatttgaacagtagtggaatgctttccttacagaaatttgaagtttttaagattcggttgtggaaattgtattatatgtttgtttggggtgctcctactgaatcagttttacccaattactatgcaaaatagttttttcatatgtcaatttctgtttggacctaaaattgagattaattgatcataaatttaggctgatatatctttagaattgcttctcactaaaaagtttatcctttaacacccttgaattgaatccctcttttcagtctcatctttagatttgtttgtgggaaaaacatcaaagtttatccttttacatttgaacactacatatctgaatattacaaggttgattcatggtatggcagtaatcaaactttgatataatacttatcattctcagcaaatgagaatcatcattgaggcacggtcatcaatatcgtcaatattctttcttcttcttttctgtttttg

SEQ ID NO: 382987 - DNA, 4242 bp, Cannabis indica
cttgactagctaaacttttgtctttgtctcaagcattcatggggttttaaggctattacaggccggttctgggcataagcagattaggcctgtgcttaggggtctaaaaataatttttttcctatgactcattaaatttcaaggccggtcctgggctatttacttgccttttgttttgacactggaagaggggagattcgaattcgggatctcttctttgtggggagagatgtagtaccactagggtatatgactacaagcatgactattctttgcccttttgttgcacttattatttggcttttgtgtttcatggagttttaaggatattcactcgcctttcgttttgacactgaaagaggagagctttgaactcaggacctcctttttgtggagagaggtgtagtactattaggctatgactacaagtaggctattctctagtttttggtgattcaatgggaaataattcaactataatattatttcatggggttttaaggctgttctctcgatttttgttttgataattctggagagagtattcgaatttgggacctcctctttgttgggattcaagctatgcctatgaccacgactattctctagctttcggtgattcaatgggatacaattaaactatattttatttttacatttttgtggtgagaaaatgaaaatcagcatggtttactatataagatcagaataaaaattcagcaagagaaaaaaaaaccagcttattttcatgtattgaaatacaatggtttcatcaaacatagaaagctaataatgatagtgttataatgtaatgcttaaatattagaacagttttacttagaaaccattttttgattagtaaatttgagttgattcttactaccattttccctgtttttctctgtttctgtattttggttttagtttctcaagctcttagttatgatagcactaaatttctttttcaagttacttagaaaccagttgaaaatgatagcaaaattcttctatgaaaataaacaaataatttaatgctcacattaaatggtatttgctatggtgaattcaattttaatccaatgagtttagaaaatgtttaactgaaaactattatgtgaacttttggtttcagcttcaaggaggtaccaagcagcacaatggcttcgtcagatggactttggcgcctcggaaacactctccaaagagccatccgaagaagagttctgtctctcgcttcgaaatggcctcattctctgcaatgtcctcaacaaagtcaaccccggtgctgttctaaaggtgagcatttcgctcatttttgtgtcgaatgaaatcggtttctcttttctttttgcctaagtttgttacaaattttcttgaaaggttgtggagaatccaataataccaatacaatcagttgaagcagcagcacaatctgcaattcaatactttgaaaacatgagaaactttcttgaggctgttaagaacatgaagctcttgactttcgaagcatctgatttagaaaaggtgaaatcgaattctttctttctttcttaacacattaggaaaatttgccaaactaacaacatgaaaatgttaaattagcaaaataactacattgaatttacactctccgaccaagattatggttgcaaaacgaccataattgtctttttatggtcgcacagtgtaatttttgacactctggtgagaatcatgaggttccataactcttttaacattttcaaatttttagggaggatcgtcgagtaaagttgtggattgcattctatgcctcaaagggtattacgaatggaaacaagcgggtggaattggagtgtggaggtatggaggaacggtgaggatcacatcttgtcctaaagaatctccatcctccttgataggaagtgagagcacagatgattcattggatgaatccgaatcctcacaattcgaacaacttctagagttcatccatctttccaacgaggtttcggttgaagaatcaagaatcgccaatgttttgactttcctattcgatcgctttggacttggacttctacaagcttatcttcaagagagtaatggattagaagaattgccttttaatgcaatggtaggtaagactcttaccttagtttgatcatgttaatgtaagccaatgttttttgttaacattaaggttttattaacctctaacatttgacatgtttggttggaaattttaaggttattgacacttttctcagtaaggtagtcaaggatttctcaacattacttgtctctcaaggaactcaggtactcatgacattttctttatcaaattacaatactaatgtactttgattccttaaagaaacatcaatgcaagtacacttaatgattttttgctttgatcttcttcttcttcttcaaagcttggattgtttttgaagaaaattttgaaggatgattatggaaattgctctacatctgaatttttggaaaccatttcgcgatatcttagccaaagaactagtttggtttcgaatgatttgtccacattttgtatctgtggcggcaagcgtgagcttgttcaacacatagttagtcactcgtctgatcatgacgaggcgattaacatgagtcaaaaacagcttgaggtaaaggattatccttacaacaactttaatgtataaatttttgtcatgtcaaatcttacaatgttgtaatggattcatcttcatataaatgtctttttttaggagctgaaatcttctttcaaagagacaaaagttgagattcatcatatacattcacaatgggaagatgaccttagaaggcttggtaagaatataaagatttggtcacctgattatatgaaaaacagttaagggtaactagtaaccagttgcgttacataaaaatacatgttcatataggagtagataaacttgtaactttttctcttctttcttttttagtgtatcatgttaaacaccttgaattggcctctaattcataccaaaaagtacttgaagaaaatcgtcatctatacaatcaagttcaagaccttaaaggtgaaatcttctttcataaactctactattttcaatatttttcttatagtatatttgagcttgattcataattctcttttccacaggaacaattagagtgtattgtagagtgaggcctttcttacatggccaatctaacttacaatcaaccgttgattacattggagaaaatggaaacatcatgattgtcaatcccttaaagcaaggcaaagattcaagaagaatatttacatttaacaaagtctttggaactaatgtcacacaaggtatgtgagtatgttactagataccaaactgtctcgagaagtaaaaaattacttggggtgatactaggcccaaccttgagaataggcaggctaggcctgtgcttagagcccacctaactcaggcgcccaaacaaaaattatccccttttaaacacatttttttactaattttttctaaataaggatagaaaaatatttttttttaatgactcactaaatttgaggaccggcatttaaagataccaaactgtctcgaaaagtatctttgatatcaatgtaacacctatgtgctaattctttttcaagatctaaactaggacaatagtgtgttgaatgtatcatcactttatttcttctaatcattacataatcatgcagagcaaatttatggtgacactcaaccactagtgaggtctgtgttagacggctacaatgtctgcattttcgcttatggacagaccggttcgggcaagacttacacaatggtaatatgctagactagacttgttaccattagtcataaccagtttatgtttatgatgtgttgagaaacttgacaagtttatctgcaatttataacagagcggtcctgatttaacaacggataaaacatggggagtaaactaccgagcgctacaagacttgtttgaaatctcaaaggaaaggttgcaatttgtaagatatgaagttgctgttcaaatgattgaaatttacaatgaacaagttagagatttacttgtcattgatggctccaacagaagatatcctttgcttaatgatttaattaattagtttctctaatgatttttgttgcttgatcataacatgtctttattactcaagaggggtagctcaaatggtcaagcatgtggtttgctccttgtagtctgaggttcgagtccctctcgagtacctaccaa

SEQ ID NO: 382988 - DNA, 1517 bp, Cannabis indica
agacacgaattcaaaactgaccacatatatgtaaaaatgatatataaagtaatatatatgtactaattaatgaactcctaaaatcataatttgatataattggttcatatatttttccgtttgatttattagttattaattagttcatgggatcatcctcagccactagctatatatattttctacgcatcagaaagcaaggtacatatgaataccataattattttgaagattgtattattttattcgaaattcactcaaatcctatcacatctggtcccccatcgttttcgaaataaattatgatattggaagaaataaactacaaaaatatgtataaaaaaggttatggtaaataatgttcaattattcatttcatcatcgatgttgtattttatgaactacttactggtgatatatcctatcgcatagattttcataacaaattaattatgtggtttcctatagtataattttgttcaaaatccaaacagaacaatatgctgtacaacaatgagaaaaaagtactcattattagaaaacatattcttgatcagtgtgtgattatgtgaaaagacgttatatgtaaatatatgcatatatagtttatcccacttgtgctaccggggaatctaatggaaataataaatattgtttaaaagtactgtggattcctattaattaatatacctaatttataagtttaaaaaagtatatatgaattggatttgatgtaggattcggtataaaactttgtaatgaaatttgaaagaacattgaattaactaaaagaaaaagaagccaaccaaagtaatcagaaaaagaagccaacaaacttagacaaaaatgactttgtacatatcatagggaaatatacaaatgagcaacttatttaatattctatatttttattcctatcttttctgatccaataaacatgacgaccttgtaccttcatatatataaatatattatatttatatcggttccataattaactgtagattaattaattatttcattccaaatatacagcttctatatatatataattattataaatactcaaaaaaattattatttagtgataagttattaattgttacaatatatgtttgtgacaacaattatttgtaattatcacaaaaaaaagtagttgagattaaaaaataaatacaaataattgtcaccaaattactgttatatatatgttaatgataatttatcatcataataacaataaaatttatccctactaacatagttaattacaaaattatacatttttttttatttactagtatatgtagatggagtgatgagttaaaataataatgttttttaatttacaaagtttgttaacatttttcttgtttttggtggtgaattaaggactaaattatatcaacatattgttacaatgttaagtagtcacgtacttttttatcatccaatattatttctatatttacttattatttcctaatgttatctcaaaaaaaaaaaaaacttaatta

SEQ ID NO: 382989 - DNA, 2735 bp, Cannabis indica
tttttttccttcattgtttatttatattgtatgtatatattttgtttgtttgtattttatttagttgttgttgttttttgtttttttttttttggaagaagttatatttgtggaaatatggttgcaagttactatattaaaaattagttacgttagttagtacttaaagcaagctctttattcattcaagatgatggaggttaaatgtgttgatgaacaaatggatgaatttaacaaactaattcttgatcttgagaacattggtgttatcattgaagatgaagatcatgccttgtcgctgttgagttctttgactaagtatttaaggcatttcaaagatacaatgttgtatggaagagaatcgatttctcttgataatgttcaatctactttgaattggaaagcgttgaatcagagaagtgaatcaaagaataatggaattgtagaaggattattcactagaggaagaagttaaagagagaaaatagcaaaggtgtaaacgggagataaatatcaaagtctcagtctcggacacaatcaaatggcaagaagaatgtgagatgttaccactgcaagaaagaggtacatatcagaagactttgtctaaaaagatagaagtgtcgtgatggccgatcacagggagatgcacctgtgatgagtgatagttatgaattaagtgggacattgttggttaccactaaaaattcagactctgaatggatcttggagtctaggtgttcatatgatatgacaccaaacaattcttggttcaaggaattaaagcctagagactttgctaaatttacattggtgataacaagtcttgctaaattgttagaattggaactattaggctgaaacttcatgatggcattgaaagggttacattggtaccaaatcttaaaaggaatttgatctttgcagggattttagatgatcaagaacttcttggaaggattgaaaatgggatcatgatcaaagcgtgcataggttaaatgttggttatgaaagtacgaaagtataatggaatttatcctcttgagggtgttattatcctcaacaccaaagcatgtgtgtctagcaaacaactgaactcagaaactgaagtatggtacaagagacttggccatgtgagtgaaagagggctaaataaattaataaaatagggttttcttagaaggtaaaacttcaacaacttaatttctatgaatattacgtgttcagtaaatcttgcagggtcaaatttgtaactggtgaaagaagaatgaagggaacactagattatatacatagtgatttatgggagccttcaagaattgcatcacactcaagaggaaggtattttctatcaattattggtgatttctctagaaaacaacgggttattattttgaaaaataaaactaaagtattagataaattgacatattggaaaataaggataaaaataacattggtaagaaaattaaaagacttaggactaataatggcctagaatattgttcagataattttggcatgttgtgtaagaatcatggtatagccaagcacaaaactgttacaaaggctcctcaatagaatggacttgtaattggagagagttagctgcatgctattgagtgttggattgcctaagttattttaggccgaagatgtgaatactgcagcatatttgatcaacaaatgtccttttacaacactggattttaaaacaccaaatgatgtttggtttgtaaagccatcttgctatgaccatctcaaggtgttgtatgtgctatggacatgttagacaagacaagcttgaagctagagctataaaattcatttttcttaggtatctagaaggagtaaagggctacaaactatgttgtttggaacctaggatgagaaagtccataataagaatagatgttactttcaatgaagtagccatgggattcattgagaaatctattgaaacaaaagctaatacgtactaatcaagaaatgtataaagctcaagaaaaatgagcttacggtggagttacacaccagaaatgagacaaataaacctattgatcttggaagtagtgatcctaaagatgttgatgagcaatctaacatggacgattacaatcttgctagggtatgatcaaggagagaaatgaagccaccagacaggtatgattatgtttatttaattgcttatgattttaacattgctactaatgttgtgatgcaacaaccaacaagctatgctgaagtaatgaagagtaaacaatgtttgattaaataaagtcattctacaataacaagacctaaatactaattaggaagccaaaaggttccaaagttatagctaggttgtagatgagtattaacacacaaagaaggtatcctaggagttgaacaaccagggtacaaggcaagattggtggcatagggatttctctaaaatagaaggtgcatgtggattacagtgagattctatcacctgttgtcaagcatagatctattggaattattctagccttagttgctcaatcaacttggaacttgagctactagatgtcaaaactacattctcatatgggaatttagaagaaagaattctgatgaattggactaactaaaataagaacagttacgtttgttaagcttttttcaaatatgttttcataattaatttagctttgccacatgccaaattttttgttttttcattaatatgggacaagttgttgggttttatgccc

SEQ ID NO: 382990 - DNA, 1793 bp, Cannabis indica
tgcacttcctgtttaaggcacttggagcttcagaggcagagattttccatgtccattcgtcctgagtaacccgaaaaactcagactcaccagctgtttgaatggcattgccgaaatagcttcccggggtaccctatttggcttggttacagtcatatccaaaatcacagcaaagcactaattcgctcctttccaattgttgtggactttgtatggtctataacgatatataatcaccaccaacagagttagaatttctgcgtatgtatcaatcatggagctaacactaccatatcggctaatacctactaatactccccaactcaaaacttggactacacaaagggtttaactggttcttttgaggatgaaatatctaggctaaataatttgaggacagtgagaagtggaaagaaaaatagtctttggtcattaaattcaccaactatacaaaaaaaatttaaaaaaaaaaatatgaactttctaatttagaaacaaaaataaattatcaagaatttgtattttttttatatgttttaaataatttcttcatttactgaagaaaaagaaaattggaaaacaacagtgcgagcaaatttataaaacaccagaagaacatcaatttctttaattccaaaatgtttccatgaaaatattcggacataaatttagaaagaaggaaattccaattgaattttgaagttaataaaaaaaaatggttggctatgaaactgtgttgatcaatgaaattgaaagctttacgcacagaaaaagattgtgaaaactcaagaaataaagaaaaaaccctaaaccattgattaccagtgggtgcacgggctgcccaaaccgaattataacctttgttccgcaagagtatcacaagacttggcgaccaagaaaagttcttagggcctgagattccagcagaaacgaacgaaaccagcaaaagatagaacggaagaacgagagagtaccaagccactaaaaccctaataaatccgaactctgaagaagctggaaccccaattcggatcgcgaccttcaatcatgagctttcgaacgcatacaccatggaaaaagaagagagagagagaagatttggctctgaagttctgaacactctttatttaagaacccatcggctcgagcgagttcggctaagttttaaccgttggattaaatccaagctaatccaacggatatggaaatgccacgctttagatcttgaaagagcataaaattatcacagcttttatcagttataattctacgcgtcacaatcatttcattggcgcttaaatctgatacagtggaatttagtgtaggatataatttctgtgtaagaagattctcgagacgagccatacaatgtcaatattttagtccacgcatatgacgcggaaatgtcactggtgcggcgatctggtacaacgcattggtaggatccacggtaagactccgtagcttgtacgttagtaaagattgaaaagtaattaaaataaataataaaatattatattttcttaaagagaattatcttacatattgtttttttaatttttttttatttacgggtttagatttctaaagtgcctgcaagattagttacaatagaggtttaatttctatacgattttttgttataatttagattgcagcgctagttgcaattcagtatgtcgtacccacttctatggccctcaactctcacacaaggtatgtagaattccgtaaaaatacgaaaaaaaaaactattttgaagtgtaaaaataaaaaaaaatccatatgtaaatt

SEQ ID NO: 382991 - DNA, 2800 bp, Cannabis indica
agaaatgaatttttataatatcttacaaattcatattcttgagaatcttgaccaatatgtttccgaatgtataagagaagagaagaaaaaacaattacttaattaacatatcttttactttgttttgatcgaattcgatcgagcggtacgttatatgacattgaactcgtaattttaaattaataataaaagaagacattagttatgtttagtgttatattcatgtattttcctaaaataattatcagactataaatatatatcgtagaattttaaaatttttttaaaatataaatataataaattcaaaagggtttttcaatgtatacaaaataaaaaatttgaaatttaatattgttccccttcgaaatgatagaatattattatgttgatgctttaatttatataataataaatgaaaaatgtaatttttattgatcatataataatattattaatttttgaataattttatgcttcaataaatctttatgtattgttgattccttgttgttaattcaaaatttacataactttttgattaaaaaaaattccataagtttataataagaattatgtattattataagtatttacaaagtaataataatagagataatatacttttatattatatatacctgaaataataaattttgatgcagctgaaatttaatatgttgacacatacattgacgtatgtataaataatttagtgagaaattaaataatgtaagagcacaaatttaaactaataatatagcatatatatgatactaaaggaagtgctaactagagacccataatgcttttaacaatattaatttctcacaatataaacataatttaaccgtaattttatttattcatttatttcatgtatgaatacatataacgtaaagaactagaactgatttcaacagacctttcaacagagtaattgaaaaatgaagttattgatcagggtgatgatcatataagtagatatatattgctcaaagctacgtacacgccattacatatatatatataactaaagactatatatattagattattaggaacattattttggtccttatcacagcaaggacaattttttttttgggtatatatgtgtagcaataaaatctaattctttttattatatgcatattataattatagcatactatatacatatatgatatatcctattattttccttttgtaagaaccattagtttgtttatgaattaaaataaggtgggatttaaggaggtataaattcatataatcccttcccttgatacaaaggcattattcccgtgacattggttacctagcatctgtatgcattttattaatttttgaatattactggtatgtttacagtattaaattaagaacgttcaatatactagcgtgtttatatactttttagaaattaaggatatatacctttgtttattttatctctattttcaacatcttcaattattttattttttaaaaaaattatgaagtgtgtggtggtataactatatattattatatatacatcattacataaaaaataaacaaaatcataattaatttcaattttgtactgaaagtagaaacgtctataccaattaagataaaaataatgtctctctctctattataatttttttatgtgtattataatacacgtgactagatgtgatgtattaattatgtgacagaatcacacatattccttcaaatggattgtgattgattttccttttaattttatagaaacaatccgttttttattttattttttgagataaagaatcggttttagatttggaatagtacagtgagtactgtatgtctagaattattaatttacaactctggtaaatatttaaaccaccacaaatctttctctttggtattttgattttaatacggctaaatatattaatttggaggacttaaagagccagtggattatttaattttcttattaaatgattaattatttaactaaatatgatttagtctaatattttactgttggataaggtttttatttataacaaaaactttacgtacgtagaaaaagagggtcagatggatataaacaaaaggtatccaatttaactgttgaaacgtaagcaaccggtcatcacaacattactctgtgtggaaaagtgacacgtgtgagtcaattggtgggacttaattgcttctgtctatacatgcttcctcttcacaccactgattggacatttaccggacggcgcggtgacacgccgttacgacctgtgacgattttttatttatttatttcattaccatttaatcttttgaacccttttaatgaaaaagttgtgtgcatactactacgtacctttatttatttaaaaatgaaaagataaacatttccaaaagagaaaagtaaaagataaaattgttatttaattttgtattttgatgagttaggaaaggaaaactgaaacgttactttctttacaagtgaacggcgtgtgggccccggtttgaaagatgaggtcagcttcttacagggccgttgcgttcttagtcactgattcatacgtggcgatcttacattttttggctttgaacgccgaacatggctttgacctctacattggattattgtaattacactgcaacacctcccttgctcatgcatatgttgttatctttcctattttattttgaaaaatgctaaaaggtataagaggaagcggggtttactattctctcatgtgttaatatacataatatttgtctaattaattaagtattaaattttatatagttt

SEQ ID NO: 382992 - DNA, 4439 bp, Cannabis indica
ttagaaaaaaaaataaaaaaaaaaaaaccttaaatagacagttaaaaaaaaaaagtaaaaattaggcgtgtaaaagttgttttgttattctttcgttaatatagtaatttatgcaaaaaatttaaaagaaaaaaatagttaaaactaatgatctgacagatcttcatactatacactgaagatttattttagagacaagacacgaaccttatgtatgaactataagcatagtgtcttcagtttccgccttttttccattccaaatacctctccacaatgtccagtccacaacactccttcacaactggcatagtagcaggtacatccaattggaatatggagtcggatcctcccgggcttccccatgaattgatttgttttcttgctgctctgatggcagctcttgcagcatagtgaaccgaagccgaaagaaacaatggtggctcgccggaagctgcacaaaatgataatttttgtttaagcttgtcactagagtagcctttggaaaatggaaagacttcattgattaaattatgtaaacggaatagagtagcaaaggcttttttacaaaggaactaatattttcatgtggcacattttccacccgaaaaaatggactgcactttcttttggccaggaaagaacaagaagtgatttagctcatcaattgaactatgagaaaataagttacccgaaggagagaaaataaaaaggcaaacaaatgctgtcgctaagctactagacaaagcatgaaataaagagtcaacccctatctgtgtgaagtcccactggaagttgcaaactatgtttatttaagagtttaaagtttccgaagccaatacagttaaaatttctcatcccagaggctgtcttttctatctgtctaccaaataaattttgaattgtcaaactatttgaggtcctctctcccccaaaggtaccttgttttaattatgtaaacatcagatcatttttctttcgaacaatttcattatgtagaattgctaagggatctttcaatttcagagcttgatgctcctaaattttcacaatgtagtacaatactttcactatcttatcattgtctttacactaaacagtaaacacaaatgttgaactgagaaagatgaaaggaatgatacctttggaggagagaacacggtttttgtgacgtccgctgttcaatacttcaacattgagctgtttaggaatggtgtctaatgaaggaatcttgtatgtccatgtcccattagcagtgaccagtccatcagaatttgttaagtattcttcatacaagaaaaacccaactccttgtacaaaagctccttcaatctgcacaaatatatgtgaacagccaagtaatgtttttcttgagaaatcatcaaagatttgggagttatatgtacactcataaatatataaatatatatattttttagagaacggctacattgctgaattagtacataccgtgtgctcccgttcacatacttagactagttacgaccttaggattttatatgatagtgtttactgtaattatagcgaagctctacacattttcgaaattttttagaaaatttagagtgttgcatacaggatccagtccaacataacacttcacacgagtgatggtactggaagttggaatacggtttgcagtaatttaaattattcaaaatttcatgtgtaaggagtttgctataattccaatgaaccccatcatgtaaaaaagaaatttgtatcataatttatctaatgtgtaaaaattcacaatcagtaatgtggtattgtaaatgtttcctactttttaattgttaaatatttttgtaatttttttgttgtttttgtgtatttatgaaattatctaaaaaaaaaactcatctaggcggaaagcaaaagcaccttgtatcattgttggaaatgttgtgaatgttttaacaaaatatacaagtgtcttagtgtgtgtgagttggaaagagtcccacatgggatttgaaccctcatttacaagggtataaagagtgtaactttggcatttgggtttggaccccaaggggtacccagttttgttcaacaatcattgaaaagataagcaaaagagcaccacaccagtcaatttgggaagacactcagaggcctatcgaaccctgatgacgttgtccgcttctgctcacattttgaaaatggatttggtaaccattcagttaggctaactaatttcatttacttctccccatttctttgaagcataaatacgattaaaaaaaagtaagaagaagaatcgatctcccacacacttaacgcttatttttttccttaaatctccattaaaattcttgagattaatcactgacttgagcatcagagtgtcttgttacagaaaaccaccagaaactttgcacgatgagaactcatcagaggagaagttcgatgattgtataaaatcgaatcgaaaagaaggatcaatcgaagtaacttgcctctgttcaatttttcagctcataaagttataaataaatatatatttaacagaggaaggcaactgggatattgctaaacttacaatcttatttctcccctaaggttgttgatgctatactctattcctcagtcatactcatatataaagtatagttatatataaatatattcttaactgaggaacacaattggaatattgttaaactataatcttatttctcccctgaggttgttgatgctgtactctctattcctctgtttgggttttgggagaagataaacttattgggaatcttacttcttctggagactacactaaatcaggatatcacacagcatattctgttgtagctactacttccccatccaactcttctatcaggaattagtggaaaccgagtactccaccaaaggttaaatctttagggtagctatttcctaccaaaatccaggttccaaacaaggtttaagaagcacctttttcttttccccttcagaattaacattttccctctttgtttttctttttaagaacaaagatgacacagataatcagatttacagcctaaaatgccagtgtaacattctgatgtcaccccatacaaacagaaggaactgttttgcttttttctatcatagcataaatgaatcattttcaaccaataggacttaacataccaatataaatctatggaatgaacaacaaatcagaaactttgtaagataacaaaagcaatcaaggttacctgtccaagatctactgcagggttgagactttgtccacagtcatagataatatccgattgcaaaatcgaggtttctccagtcaaaagatttatctcaacctatggtggatagattcagcaatgcatattaattatatatcatcggctaaacaccaactctatcatgctgttaatctgattgttagtaagattaataaactgtttcatgtttaagttaaaaccaattataactttagttgagaaattattttatgtaagcaagtcttcaactaaatatgaatatttttgcaagagactcacctcacttactgctgcaccaaagttcaagtattttagggaagacttatcagggacatagtaggaaattgatgataattgtatagattgtgaataaccctacattgcacaaagaccgaggaaaaaaaatattatgatttaatttgacaataatgcaaacacattaaatagaatgccagaaccattagaaagctacacccaatcgaccaaaaaatacatatatagcagttccatgattagtaagttcatagtcaagaaaaagacttatgttctaatcatcaatatggaaagaaacaatgaaatctaactagatacctgagcaatcagcatctcccatttgatagaatccgagccaagcgattcctgtaacttctttttaataggagttaatttgtcaatcaagacatcacagcacattctgactgctgcacagcttgtctcagatgtagtgcttcctgccgttaatcccccttggatcaagctcagagtatcagcctgtatgactcgcacattatccaataagtgttcagttccatcagcaatgattgaaccgagagcaaaagcagccatctgtttcacctttgtccaaagcccctggcccagctctattccccctacttcaacagcaacagatccatctgataaaatacttactttcgctggagttggtctgaccgtcatcccacctataattggtaatctagatattccccgttttttccatctattacacatattaaactcttctatctttagagccctttgactaaattttgaagacaaagctaccttatcccacattgaaggtaaagtatactcttgagcttcaccagcactatctccataaaataaactaagactattgtatgtgtgaagatttttttgtctgacagaatcaacttccattgagag

SEQ ID NO: 382993 - DNA, 1315 bp, Cannabis indica
ttgaatagagattctactgtattcttaacatgtgatccttcgtccacattcccataaagctaaaactaacaccaaaaaatatgtatgaagacaattcattgattattatgggccaagctatttcaaaggagcaaaaatacttttatggcgaggcatcttatttaagataacactattattggctttgaaaatctatgttgtatggaaaggggcggtggtttggcaattacaagaagctcactctcaagcttgatgtgtccaaagctcttaatcgcgtggagtgtagtttcattgaagttatgatgctaagccttgagtacaagagtgcttggattgataaagttatgtattgtgtgcaaaatgtctcattgatcttgatcaatggtgagcaatgtgggtggtttgctcctttgttagaatacaagaagaataattgggcagttagtttgttaatgtgtaataaaatttcagttagtagttgtaagctttttttcttttttgctagctatatcagttatgttcttgtgttcagttgtatcaatcttttctataaataaagttagagtcaatcactaagtgattgagcattctatttattccactttcatttctctttgactccatctttgtctctagttttcttctcacaagaactctgcaaatccaaagttttgacatggtatcagagccatgtctaaccaaagattcaaccgattagagtaagaacgagcacaacattaacaaaatagttgagctcactagcaaccgaatgataagccaaatttcctttcccaacaacaatcttctacttctaaatctttgattgaatcgaacaaattacacaatttagatatcactagtgttggttgttgttcgtgcatacaatcttaatgggtatgttctcagattacacccagctccactgatccttcttgcaggtaatgtccctagtccaggccatcaatagtggatgagattcgatcaattcttgatgcattgacttatgaactctatttttaataatatgattggacatgttatccattatcgcacctctactgagatctagaatacctttgctcaactttttactacaagattgagagtaagacttctacagctcaaagaacaactctaataaaccaagaaaggatctcatttgaattaatatacttacattatcctaaaattcttcccctaaacttatacttaacataattagttatatatgacactttttgtgttttccccataataccctccccaattacatctactcactccaaccctttttctcatcaatttcacatgagaa

SEQ ID NO: 382994 - DNA, 4005 bp, Cannabis indica
aaaaaaactaaaaaattatttagacaatgagtattattttgattcgaagaggtattttgtattgattgacgaagagctattagttaaatttattagtgtattctaattactatgatagaaaaaaaaacaaaaaaattaaatatttaagtattataatatgaaaaacttagatattttcgcatcaataactcaaattatttcaatataggtaggtaaaatccaccactcaaggtttatgagatgtaagttgagagatataaattgaacaaatatgactccttactattgggatgtactactgttttcaattattcatgagtgacgacatcatcctttgtcgcacttagttatatgcattgttgtgtcgtaatcattagtcaccaatatgggctgaactttttgaaatgacaacctgggaggcacaagtatgacttgggacgaacaaaatatgagaatggatatgatacggtataaaaaatatgattcaaacacgatacaatacgataaacctaacgacacgatacgtaaacacattatattttaaaagctttataataataattcattttttatttattagttatatataatttaaaatagtaataaaatttaaatataacaagtattataatctatattaaaactatttaaaaatattaaataaaattatacatgaatttattgtaacagctcttagttaaaaatataagtacttatcagcaaactagttatgtacaatgtacgtatacttagttatattcttaactagaaaacatgccgtgcttcacatgcatttgtttacgaaaattttaacttatatatggacaaatttactttttttgtttgatgataaaaatacatactacgaaaattcactaaacacataattaataataacaccaaatttatatttaattcataaataacaaacttttattatgtttgccttattactttatcaacatttatctcacaattatttaaaacttattatttattccaaaattaattacctaacatttacttttcattaataagctaactaatataattatactttaccaattttataatatgccctcttaatcaaataactttaccactcataggttaaattgcgtgcctaatctcctaatccgagtccaggtcctcctcttacccaatcctatatgtactgaaaaaaaaaacagtaatttaacatgattctcttcagtagttaaacaataaagtaattgactgtaatcaaagtaaatttaaaattgtagctggaccacaagtgaagtcaaaggctaaagactaaaggtggctctcgttgaagaacgtaggtggttctatatatgttttctttttcttttaataatgaataattctatatatatagttaatttgaaaatatttaagattttttttttttaaaaatatgttactattataagtttaattttgagatatttttgttttttaattattaattaatataaattataaaaaatgcttttgaaaaatatataaattataaaagatgagaatttaaatatgtgatggatgtcatttgagttacatgactatatgtatatttttaaaaaatatatttatttattaattaattataataagttttaattaattaatttagggtaaatatcattttagaccacgtgttttgcaaaagttaccaattggactctctgttttgttaaataaaaaaaacagaccctgtattttctaaaattgtagaaatagaactctaaactgattttttgttaaaataaaacttaataataatctgatttagagatgttatgacaaatctggttatattttttgtatttgttcatgttagaaattgtcttaaagttgattatattaaaaagtagaattattaaaaattaagctctgggtcctatttttatctttttggaaaatatagagtctattttatcatttaacaaaacagagtgttcaattagtaacatttgcaaaacacagggtccaaaatgatatttacccattaatctatcaatatttataaactaaataaaaaaaattaaaaatgaaagaattaaggagataataaatcatggtatttagagtgattatagaccgtcacatcaccgtcttaagttttatatatatttatatagattgatattgatttttattttagttatttgtatttttagttgaataattagtttttatttatttatttatttattttgtggatgttattcaataaaaatatttaattgaagtactatttataaaaaaaaaatttaatagtatttaaaaaaaataaatgaaaatattatatacagttttaagcaaattaaattaaatccaaaatattaccaagatgtatcaaaagcaataatattaaaactttataaattaaaggaaaccacttataatatttttattattttttccttaaaaagtaatttttaaagttttaaaaatttgaggaaaattaatctaaaatttaagaatattgaacgtgaacattataattgatgttgtttgttctggggatggaatatcttactagaattatgagaagaattggaatgaaacctgatttcagatttcatgacagatgcaagaaacttcaactaaaccatctcagctttgtggatgatgttttactgttttgccatggagattacaaaagtgtatcctatttgttgcagtgtctcaagcttttctcactatcttcagggctctttccgaatgcaacaaaatcagccatctattgtagtaacatgcctgaaaatgaactgaatagagtacttgctatatctggcttcacaaggcatgagcttccatttagttaattgggagtccctattggtgcaaagaaaatatcaagcaaggactgtgcaattctggctgagaaaatgacagggagaatcagaacatggagtacaaggcacctttcatttgctgggagggtggcattgatcaattcggttcttctttcaattcactcatactggagtcaggtcatgctattgcctaacaaagtaatttaagagattgaagctatttgtagggctttcctttggaaatgtcaacatgcttttcaagggggaggagccattgcttgggatacagtttgtcaaaaaaaatcagctgggggaattggctttagaagagtcaaggaatggaatatggctgccatggtcaagtatatttgagctgtaacaaagaaaaaagaaaatctatgggtcaaatgggtgcattcgatatacattaagcaagagagctggtggtgctaccctattccaatacatgagagctggtattggagaaggattgtagcactaaagaatcaagtatgttctcttgtagatactgctcaatttgaaagctgagagtaccatattgcagcaggatatgccctctttgcactagtccaggagaaaaaaaggtggtgtgatcaggtatggggaagattcaatgtgccaaagcatagtgttattctttggataactatttatggaaagctgagaacaaaagataggttgtacatgtttgccattgtggaaaatagcggctgcaacctttgtaacagccatgaagaaactcgagaacacttgttcttcgagtgtacctggtctggacaatgctatcaagaaatagcagattggctggggtggaggtcgattgattcgaacctgcccagggtgacaaagtggattcaaaaaagcaaagtcagtaacttcaaacgaaaattcatggttgctgctcttgctagtttggtatacaatatttggaaagtcagaaatgagacaatatggcaacaaaagacaccttcgacaacccaagtgattagccgaattaaattgatagtgaagcaaagagttacacttgtatggccaaaaaaagtgagcaaaaaagatgaagattggttccacactttgtaaataaaattgtatagaaatcaaggccttgcaatatttgcttggtgcttttagagcatctccaaggagtacactaaatttg

SEQ ID NO: 382995 - DNA, 1505 bp, Cannabis indica
tttctttttttttttttctgaataatggtcaaaaatattttttttttccaatctctaatgcaaaatttaaatattatactaattttgacaaaaaaaaataattaaatttgataccgaatttattattgtgctccaatacacaatattcactgaaaatttatggcaaacattaattatcaacaaattaaaatattataattaaaaaatgtgtattatatttatcattaaagaccaatgataacactatactatatccattaggatgctttcgagtgtttatccaatctagtgtttaatataatactcttttttttttaattaatagaagatactaaaaagtgaagttaaggaagagagagaagaaaataaaagatggggttggaggaggtgaatgttattgttaggtgaagtggaaaggaatgtagcactttcctacgtcatttcaaacttatatgccttcactctaagattcttcaacctcttcatctcaaccgtgggatatgggtcactgtcccagggtcccattctatgttagatcaccttcactaacacctcaaattaccaaattaccctccattcaccacaaaaaaataacccaatcctttctaactttaccctggttctattttgtaaaatattctttctaaagggaataaaagaagagttaagctcttaaatatgttctaatcatgtttttaaggtactttattcgttttattaagaaaaaaaaactattcaaattgttgttttcataaactctcaccgtaaaattaagccggaaaggaagtcttctattctagaataaaatagcaaagactgacttatttttattttattttttgacttttaattaaacaaaaagatattcagaaatgctaatgaatgttttctttttctttcttctaaattttctcatctcaataattaagatgagaatattattaataatttattatattattaaattaatataataaataaattacagaaaatattaaaatgtagaccctgtttaatacctaaggctaaggtcagcattcactgattttctttttttttttttttgtaaaaggattcactgatttcttttattaatttttttttttctattttttaaatttatattttactctttacattcattttttttaataacacgtccatattattcctattattaaatctcagctgttttttttatttttaaaaaatatatattcttttttgagtaaggtcgttggtaaaaatgaaatccacaatgaaagaaaattctattttgttgcaaaattaaaactaaaattaaaaatacatggaaatatatgttagtgtctaaagctcctaattaattgagttgatgtaaattttcataaattttgataaatgtcaaaactcccgaacttaaattacggtttgctagcgactaatatgtatgactaggactagtcatcgttttacattaaataacacatttgtggctttaggatattcatggctctttgaccact

SEQ ID NO: 382996 - DNA, 3663 bp, Cannabis indica
ctagatagcttatgcaaatacagtgagacaccttgcgatcgtagacaagactctcaatagaggatagactgtctccactcacaagaaggatcatggcattggccatcctaaaatttacgatgctactaagatggactacgtatacgagaaaggatgatcatctttctgaactacataattttgaagtgcagactaatctataaagtatttgacatgattctcgatgtcagatctttctagctatgttgttagaaatagcacaacaatggtatatcaagcttcctctgggatctattgattcttagggtgcatttgcaagagcattctatgaccttctcactatcaaggcatagaccaatcgaggcatccactcaaaagaaagtactcagttaagatgcaatgattcttagaggcatccactcaaaggagcaagaccagcctttaaagaattacatgcaatgattcttagaggcatccactcaaaagaaagtactcagtcatgaagatgctaaagttatggcaatggcagtaggacttactcctatgagttcattctagcaggacttgaaactcaaagcagtgtatactgttcaagaattttagacagagctgatggcttcatcaagctcgaagaggccaccaagaaggccggtgatgttgatccatcactaattgcacattactttgcttatccacctccccagtctcaaattgatacttatcaggaagatgaggcatcaacatctagtacctccactgaatcaggttccccctctgtctcccatcatacctcaagtagggggcagcgatgaagaatcaccatctgctttcaaagatgactcaaacccggcgagaagtgttgaggttactccctctatttctcatgatgactaggaataaagggcatcgacgaagacgtttctgtaagtctcatgattatagtgagcaagaagtgacactgaggagtcccaatgataaaagggagaacctcatgttgtcatggaaacattagtacccagaaaatgcatagttggcacgctaatttccccaacatgattccagtgtcagtaccaaggaactagattagggagcatctgagatgatccctaaaatcgtattgttcttcaacagtggtccattttatactttgcaagtggatgaaaagtcacctactgattcgaagataccctgtacaatctctctttatagatcaacaggattcacatcattaatgcatgatgatccctacaccagtatagtggataagcttttttgaataaatgaggcctacatagccgtctcatttatatttttcaaattagctaaagacccgcaatcaccgtctcctagcacttgattattaatataatgaataaagcattggattattactttttggtacttcaattttaatcaatcatttgtgcctcacaagtcaacctggatatgtggctttgagataaccttagttgtcactttagtgagttaacactgctaagtcacaagtctccagatgagcgacactaatgtgattggatccaatagatatacataaaatactatggataaaacagatgcagtcaaatatttttgattggatcgattggaataattgaaattgtatggattgtatcggtaaaaaaaatgtaacattctatgtatgattggattagatctaaattggcttaaatacactaaatgtggcctaaaaaatacccctaaatatagttctttaaggttgcttttacaaagtattatcagtttttttaaaaaaaaaactgtgatcaagatcacattaggtattatcacttactttagttgttgcatgttgtaagatagtacaaagaaaaaatagaacaatgaccatcttctcatgtgtatatatagcccaacatttgcgatattctcttgagaaattacgcttgggcaaaaaatatttttactataagtttaaataagttcatttaagtgttttaaaatattgtaaatggttaagtgtgcacacacaaattgttttttttttttcaacttatacgaatatttgatatttgttaataaaaatgttttcttttcatgctattgtttgtcttatatttcaggtcattataattaagttgagtttatgatttggtataactgtttgtaatatcccaaaaaatataataatatttatttggacatattttattaaatgtgtaattatatgaatattggagaaattataatctcacttaagataattatgggttaattagtggatttcgagtaaatgaacaaataaagcgtaatttatttatttcgaagattttatcggattatggggtattgtagataacccttttaaaaaaaaaaattaaatatttgtgggttagcgaccgtagaaacttgacagattggtcggaaatgtcacgacattaaaggatgagttgaattggaaatagaccgaactagtttaaaattttaagttttcggtttggcgaattagttagaaattacttaaatacccctaagtatagtatagtttaagtttggtgggaggggtaggatggtctttttcaaaagttaattcttttgtctcctagtgattagttaggctaaaatctagtgttagaaaaaggattttatgcggaaagttattttgggaataaaaagataacttagaaattgagaaaaataaaaagagtaacccttttcttcttctcccttccttcgaacctagaggatcagcatactagggggattttcttcttcaatttactcagtttcagtgttcttgcaagagcttgaggctgtccaagctttgaggtgagttttcttggtgtttgtttggagatttcttaagtttaagctagttcttgatatgagttttctgattttggaactatggtattaggttgagtttaaattatgtttataggcctgatttagagcttacttaagtttagattaagtgtatttgatggatgcttggttaggaattagaaattttggtttaaaaacctaatttttgattctaacatggtggattggatatagtgctgaatttgtgagaattgtttgattgtatacattatatgtgtgttattgaactgttctagagctgtgtaccaggttttgatgggggttggttcgagttttggagggaagaaccttgattttttgtggtctgccagaaccggtcgaccggtttgttctggtgcaccagaactggtcgatcggttgtctatagagggaattcttaggttttttctcgagttctgttttggctcgaggttgtacctaatgtctgatttaggttatttatgtatcgaaaggcctattttgggattgttggagattcgggttgtccagtttagatttcgagttttatttctagagttttggtttcgatacttattgagttttgtatgttgtgatatagggttgggattgtccagctctgtttccactcaggtcagcccgcacacttgatttctggactgaggtaagaaaagtgacacgtactacttatggttaaataattaacgactgtgattgataaagtctcgattataatggatacctgtttatgtgtttgttatgccttggctatgaccaaaggttggaaacagtcaatactgttatgagtaactactcttgaaaccgcagttaggtttcttactt

SEQ ID NO: 382997 - DNA, 3215 bp, Cannabis indica
atcattccacctaccattagctgcataaatattgtgaagcaaaacataaggtgtggagttttgaggatcccattcagacagttttgtacagattttttctgcaactaaaacatttccatggatgctgcaaccacccaaaacagcctcaagtatgcttgtggaaggtttaaaaggaagcccttcaacgatttcgtaagcctcggtcaagttacctgttctagctaagaggtccaccaagcaagcgtagtgctcagctcggggcaatatcccgtgctgtgccatcgagttgaagaccctgcagccttcctcgactaagccagagtggctgcaggccgataagattgttgaatacgtgaccccgtttggttttatccctgaaaattccatctttgtgaaaagatcgagtgctgatttaccgtcgccatttaatccatacccgttgatcatcacactccaagaaacatcgtcttttccctctaaccgattgaatagctttcttgcaattgaaatgtttccacttcttgcatacaaatctataagggcattggtgatagtcactactttgttgaatcctttgcatattgtgtaagcggttatagaattggcgagctttaggctgtttagatgaacacaagcagaaattaggctcagtatggttagattgtcgggttccaatcccaacttaagcaaatagaagaagaacttgatggcctttttggtgttttgtgtttgtacatgagcagacatgatagcgttccaaagcgaaatatcttccttttcacccatttgaaacagcgagtgacacaaccgaagatcgttgaatcttgcatacatgattattagcgatgtaacaatggtggtttctttaatgattcctcttctaactgcaaaaccatggacagacttaccttgcaatcggctgaagcaggctggcaatagatttagcaatgttatatgattaggcctctttccatcccttgtcatttcgccaaatgagaccataatctccttatgtaaactgtgctgacgaaaaccagtcatcattgcattccaagacaccaaactcttttcaggcattgattcgaaaagcaacttcgcggtatcaagatccccacagttacagtacatgctaataagtaaattaacaagagaaacatcttgtgaaaacccggttttgacagcatagcaatgaatagccattcctcgtcccaaatctttcttcttgctgaaactagggagtatgcttatcagagtcaccggatccaattctaggcgctctttttgcatttggctaagaacatttgctgcagtttcggtttcttgattgtgtatgcagaccgaaatcaaagtattccacgaaatggtatttcttaaaagcatttgattgaataagttcaaagaagacgaaatcttgtgacaaccagagtaaaatcccagcaatgaatttgacacattgaggcttgattcgaaaccttttcttaaacaaaaggcatgaactgacttaccgagcaaaatcgcctcaagttttgagcaagcagagagaatgctgacaatggaaacttcatctggatcgaatcctgcaaattgcatttcggaaaaggcatccaaacttaactcccataatccattgtacacataacccgaaatcatagaattccatgaaagtctagttctggttagcatcttatgaaatatataactagctgaattgatatcaccaagcttggaatacattgaaagaagagctgtcatcacagaaacttgattgcttaacccttgtttaatagctaaagcatgaatagattcaccaaacaacaagctactcagatttgcacatgaaggaataacagatacaaaagtgattagattaggttgtttttcgtcgcgaagtgctgaccgaaacataacaaaggcttccattggtgattccatctgtgtgtaagcagagatcatagcattccaaacagtaatattcttctgtagaacaacagaatcaaacaagtttctagcattacataaatcattgttaccaacatacattgaaataaaagcaggaactaaaaaatcattgctgaaatatccaaatttcacagcaaaacaatgcaaagatttaccaatttcggtccaaccgaggcgagtacaaacaggaaccatacaagccaaagtactcaaattcggcttcaaacccgccacggaaaccgccctgaaaacctcaatagcttcactatcaaaaccgtttaacgaataacccgaaatcaacgcattcgaacacaccaaatctggttcagacattttatcaaacacatcacgagcactcttcacaaaccctacttttgcataaaaatcaaccaaacaagtctgaataacactattctccacaaacccatttctcaaaacaacacaatgaagttcttttccaaccctaatttcattcatagccgtacaagctttaatcacagatggaaaagtgaaatcatcaaaagaacaattcaacaaacgacaatggtgaaacacacccaatacgtcgtcgtataaaccgtaatggcttaaacttctaatcatcaagttctggaaactgagtctagggttttcgattcttctaaacacagataaagctaaatcagatgaacccaaatgaaaacaagaccttaaaactcaccagaaatggtgtgagtcttattaagaccatgaacgttgagaagagaataaagagatttcaaatgatgggtattgttgcagagcttaaggagaccatgaaagtcaaagacttgacgagcaattgccattttcttctcatacattcgttcatggctattcgaagaagaacgttaatggtagttatttcagttagtaaaggttagttattacttttatattataagaaaaataatattacaaattaaatttttgcataaaaaagataatttttaaagttaaaaataacgggcgtttaaaaaataaaaagaaagtttttaaaaataataatttaaaattttaaagcattaggattagaatttttttttttttgacaaagtagttagaatcactcatgaatttacgatatatatgtctgtcacgagcgctggaatctcctcgaaccaagatagctcatcgtctaaccgtagagcatgctttgccaaaccatgggctgctaaattcttagagcgagccatataggacaaaactgcccctgaaaatttagacaataaagctat

SEQ ID NO: 382998 - DNA, 2066 bp, Cannabis indica
aatatatataatctaatgtatctttgtattatattttgtcacgcaatcatttatgtgcgcaaccaaaagtttattattatgttaatgtaggttgttttgtttgagcaagtgtatatataatttgctttaatttacttatgcgataagaataataaatagtacacaagtacgttaatgctttaatttataaggttcaacaattgttaatttatgacaaattaggaaatcatgcaatgaaacctcgtttatagatctagcagcagcttgaattgaaagattgtactgatttgatatttgtagcccactccactttgcatgtttttactgttaatttttcttttcgtcatgattaattggtcttttgcatatatgatgcataaacatgagaaaattgcgatggtctaatccaagaagtcgggaaagccaggaaaattggggcaagagaaaagaattgagtgaattcccataatagtattagtaatattttgtgttgaggcaattttggtattcgtgtttaaattaacttgtcttgcgagtataattatgaagcataaacataatacaatgataaaagactaaaaatatgcatcgaatattcttatcttttgtgttttattaaaggttgtagtgtggagctatgatgtccatgcgatataaatggggtctacttaatagacaaaagtgtggctggctgctataaactaataatatacatgcaaggactttattaggccgaaatcattaattttgggtttctagtttaagtggtaggggaccatttcctttatatttgtaggtagccttaaaccctttagagggtgattctctcacatggtgggggaaggcaccatactttaccttatgtgtgtggtttggtgagctctcttatgttaaaaaagtatgatggcaattagcaaaataaagcctttaacaccatgtttggttgaatggaagaagaatagacagggtaaaaagttgagagagagagagagaagtactagaaggatgtattattaatattatttagtaaaagtcttcttaataaaaaaaaaacaagcagtgaaagtgtatttaagaggatttgtatttcccttctccttttcaccatctttcttgctaaataatagattttactccttccactatccatttctctcatctcaatcaacttaaggctactttttatgtatttttttagaaaggctttccaatggtggtccattaccgtgtttctatttttagtttgatgttattagtagtgtgctcatcacaatattcctacttgtttatgcataattttttatatctaacactgatatcgatattcttaaaaaaaaattgtggataagcttctctttttcaataaaaacattatagatctctcacgggaaaagtcttttattttttccttcttcgttgtggggttggggacttggcctctatcctcaataaaatccccacaatgtaacattggaaatgataacgattgagagaaaactttcaaagtcaaatcttttaggtccctagtatactagactaggcttggaatacaatacttgattatgctaattgtaggtggagacaaatctagcaatctcatacttaacttttaaaaaataataataataataaaaaaaatctcacacctaattggagtaagttccatttaaaataggatatttatattattttaattaattacaaaatatatgcacaaaaaaatttattatcattttctcacaatttttttttaaaatttttataatatatatagtaataattattgactattttatatttctttttttacattccataatttttttttaaattttaaacataaatatacttaatataaatacataatttgaatataaatgtattcatactgtatatatgtgtttattttattttctattaattaaacatactaatttaataaacaaaataataatattcacataagtttattatatcacttgttgaccgaggttttcggcaactattaaaatatgattataataaagagctgtaagaaagtgagacgaagatttttacgtggttgg

SEQ ID NO: 382999 - DNA, 739 bp, Cannabis indica
acatgaatcgtaacattatttgattcctaataataccacctaaaacaaactacaccaagttattatttttgtgatattatattctattgtatatgttaatgtaacactgtacatacagattaagatcgttgtcgtttttcttctttctttcttttctttatttatattattcttatacgaaatgatagaactgcacatgtggtaatgtgcaataccggtatggattattaagagtttgcatgtgaaaataattaattacaaagaacaacaatcattatatatataaatatggtaaattagaaagaagaaaaaaacagaagtatatggcgatctggttgttgtttttgttgttattagctttgtttttaatactcaataatgcattaatattatattatgatatatgatatacaatgtaaggagccaagaagaggggggaacaaaacacaatcaagcctttgaataaaatttacatttatttttctttttcaaggcctagtcatcatttatatacatgtggccaggaagtgatctctctttaataatttatgtgtgtgatatgatatgatgaatgccacgcaatgctgtcttggcaattaagattagtatattgtgtttgattgaacctcaaaagaccattagtcaattctactcttaaccaccatataaatatgtacatatattatatactaggtgattgttacgtgccaagctacgtagtgttagttttatttaatat

SEQ ID NO: 383000 - DNA, 2652 bp, Cannabis indica
aaataaaaagaaaccattttgattatggttatttggttcgtcttcttcaatcttcatgcaggttatttatcgatgtcgcttcatggcgctacttggggtgttaggctctttaattggctccattctctgcttcatcaaggtacacgattttttaaccaaacaaattcatttgtttcattaactattttctgcttttgaagaggaaagctttcttatcagtagaaataagtactgtgaatctgacattaaaagttgatagaaataataatagattgtgagaaactgatcttcattaattgagcaatagtgttcgagtacaaattatatacaactgagaatacaagaaaaagagctaactaatagtacagctgttgtaacagaatgtaacaaccatagctgaaagctataactaactcctaccagctaacattatctaacacgccggtcaaacttagtgtagctaaagaacctagactaagtttgtgtctcaaaaaaacaaaacgagtggtggataagaccttagttaggatatcagctatttggtcacaagcaggaacatgcttgacaatcaattgctcgtttaaaactctttctcgaacaaactataaatccaactcaatatgcttggtgcgagagtgcaaaatcgggttagcagcgatcagaacagagcttctattttcacaccagatagttggagtagtttgtagctgcaggccaatctcagtgatgagggcttgaatcctagagatttctgcaacagtatgagcaagactacgatactgtgcttctgtactcgatctacacacagtttcttgcttccttgaagaccatgagacaaggtttaaaccaaggaagatgcacataccagaaatactctaactgtcatctgggttagaggcccagtcagcatcacagaaaccagttatagacagtgtagagtgtagaagttggtttaatgtgtaagccaaagtcaagggatcctgcaaggtatctcaaaatctttttaactgtattccaatgtgcttcaagaggagtgtgcatgaactgagataccttgttgatagcatatgaaatttcaggactagtgatagtggcatattggagagctcctactgtgctactgtagaactgtggttcttgaacagaatcacttccttgacttgacaatttttcaccacctggcattggtgttgcatcaagcatcttagttctttccaaaagatcaccaatgtattaagtttgacacaaatgaagaccctgagtagtgtacttcacttgaatgccaagaaaatatgacagaggcttgagttctttgagagcaaacttggcataaagttgctgagtaacctgagttaatgctgctatggcatgaggagagctaccaatgagtataatatcatcaacatacaccaaggcataagctatatggtctgaattggatcttagaacaaaaatgggtcagctttggcacactgaaaaccaaaagacagtaatgcagccttaagtttatcaaaccaagctcttggagcctgtttgagaccatagatagctttgttgagcttgtaaactaagtgtggagcatccttgtctacaaaaccaggaggttgtttcaaaaaacttcttcttgaagccctttattaaggaatacattattcacatcaagttgtctaatgcaccagttatgagtgacaacaattgtgagtataatcctaatggtttggggcttcaccacaagactaaaggtgtcactgtaatcaaatccatattgctgcaaaaaaccttgagctaccactctagctttgtgtttatcaatgctgccatctgaattgtattttttcttgaataaccatttacaaccaataggagttctacctttaggaaggggcacaagaacccatgttttattccttacaagagctgccatttcaaaattcatagcattcagccatttgctattttgcattatagctttgtaagaggtaggtgttgaagtggctaaaagaattctggccttggatatacctggtttggccctggtgaccatgttatgagcactaacaagtatagtaacagtgggcacagctggggaatttgaggaaggtggaggtgattcatcatgaccaactaatgggacattgccaacaaatgttgtggacactgaagtagcaataggttaattgtcaatcagaggagtttgaacagaaagaggagagttaccattgctggtaacagacataggttgtggagtgttggaggatgaagatgcagatggttgagtgttatgagtggggttgttggttggtggaatgtttggaggtgacatagtaggaatcatatctgtcattataagaagtggaattggtgtttgctgtctgagaaaccaaatcagcaaagggaaatgagtgttcattaaagagcacatcccttgaaatatacattcccccagtgggagataactatttgtaccctttgtgtgagactataccctaaaaaggtgcacttggtggatttaaactcaagtttgttttatttgtagggtctgatatttgggtaacaagcacaaccaaagacctttagttgactataattaggatccttgtgaaataacctttgcacaggtgtttggttagtttatggtttaggcagcagttc

SEQ ID NO: 383001 - DNA, 5837 bp, Cannabis indica
acgtatagactaattattatctattattatgtgtctatattatatacaactaagcaatataaccgcgctttgcgcggtcattatactagttaataattatttttaggtaatttatgtattttttttttataatttacgatcactacattaagttatgctccaaatatttttttatgtattataaaaatataacttttgtattaatttaaagtagtaccgaataatggttagtttggcacgatttaacaattttaaatttcatatttttatcataatttattatatgaaaatacaaaaaaattatctctaaagtacgaaaaatgcttaatttatttccccaattttaactatttgaaaaattaagactcgatttatgaaaaaccaaaataataacaaaaacgtttaaatagacaaaaaaatttataaaaatagtgaaattatattttttaaaattcaaataatgaagttgttgactgagatttttgacaattaaatcattaatataataaagatggtttaagaagagtaaatgcaaatatttttatgtggttgggacattaatgagtcttagtccatgagtctctaatattaatcggtgggtatttcttacggagaatgttctgctttttttttctgacctcccctcattaatgtggttgaggggtgtttatagaaattgttaagaagaagaaaggtttcaattattttaagtgcttgccttggctatgcagaagttcccaaatctacgaagtagggcatgcacaacttacgtaataggatgcataggatttaggtgggatagaccctcatccttccttgattgatgtgattattcataatggagtcgtcacttatacccttgattattgcgtaattgttgaaggatgagtttatggcgtttgacatgtcctctcatatgtgtttatagacgctttctccatgttgcattaaatgccaattgacagttcatctccggtaccctaaattcgaaggagctagaccctatccagctcccggagatgaatttaagtcggacctctccagttcggggcatggctcccgaagtagttattgagctgtctcgagaggatttggcctatgtaatgactttcctttaattatcttagagtcttagagtctgacgtgccatgtgcccataagtattgggattgtcacgtatattgggagaaaaccagagcaatatttacccccaagtcttatttagttcttggaaaataagacttgtatattacttctagtctcaaggagtgacgtggcatgtattttacacacgtgggccatcttaatgctcgtaatcattcctccttatcttttagcaggcaacgattcacttcccgcttgtcgatagaccccttccttaatgcaaatgtcagaaagatactcaaatgtttcaactacccttttctcttcaccctgcatttttatcgtggccattggatcaatgggatttgaattattgtgaactctcaccgctcgatgatactcatttgatgccgtctcatacctcaagaggcctataaaaactagtacctcttgcgactggttcacttacactgcattttgacttccaggctttcaaaccctcctaacaaaattccagacttccctgatttcctccgctgttgccaggcaaaatactaccaacgtacggcccccctgcctctgcctttccttcatcgcataagttcctctttttttttattattttttttatactgtagggaaaattgtagcagataatggttcatcctcttttgaaggaaatcgtatgcatgttattcctgggtaacgaccacgatggttatttatggaacaccgcttctatagatgtccgatgatgttttttttctgtttattttttatatttttattttgttattactattattttttgaggggagtgagggcagaggtcctccatcccccgttccttctgtgcatttctggcaatttaagctgcccttgcacattcctattattctcttgatcttcccacattgcttggatgttttgaacccgatgtttttcattgcgaatcgttagatttctttcgacattcattcggagggggcctctttccaacggttaggagacccccatttgtgggagctaactactcgatttcttgtctttcagatgagtgaagttcttcaagaccttcacgaacacagtttctttgggtttgaccaagaaattctcgagattcaccaagccatttctatgtcgaatcctaccacaaccagtgccaaatcctccaagaagagaccaaagaagttggccactctagaagaagttatgcaaggccaaattacttataagaagtattcatgtcgttctaatggttggaggttgatgaactccgttcgactttaacctacgcccattaactggagaggataatgactgtaaaccggatcaaactgtctggctctagagtttatcatcgtctttcgagggacgaagagacgtcaaaccataattataacggttttggagcatggagccagactcatcttatttttggggccatgttacccctgcaagactatttcattgattttcttgtgttcgttggactcgcaccatgccaattgataccccaagcttaccgcctgctgtcaaaccttttattttttaagctaccagaaattttatatttttatgaattttttaccgttcccaagaagggtgacaaatttaaagatggtttttataaattacaagctcattcggctaatgaaactccagtaccttcaatttttagaataaagttaagaaataccgtcataagtttttattttcttccgggtttgaagcctttgagcacctagacctgttgatggactgggtcagggtccgtccaatgcaccgcaccgctcccactcaacttttcttgaaccatgcccaagtgtttgctggttataagaaggaagacttgaatgtgggggacttggtgacaaccactaactgtcagagggcctaactaattttggagagtcaattggtcaatgatttcaacctatccaaagtaattttccctaacgcctggaatcctaggagcgagaaggcttttaggccaatattatctcatccatgaaagacaaatacaacaaatataagtacaagaaagagtaggagcttcattacactcacctccaaaatgcttttgggaggctcatccaagaggaagcaggaaaagaaaagacaccagtgaggcctaaattcccttttctggctctgaactctaggacccccggtgccagtacctctggagctcataagtctcctttgaacattcacttcattccttccgtccaagattattctaacttaaagtcagtgggctttgacatgaggttatataagttttggatgccccattctcaatggggcgataatgcaaaaagtttttatttctccaatttgagtcgtttcctaggtcgatcgcaaatgggctctggtcctcctgtttcgatccttttggattatttctcctacatgacctcgagttggttccttccctcagatagctttataggggatgacgataccagttttttaatttatgatttactagggtagagttagagcgtcggggtaggattagccttccttgctgtgttatacttgcatttgtgatgttttagtgctttttttaactctttctatttgtcatgaacagcgaagcccatggacaacctactggcatgctagccgctactcacagtcctaagctagaggtgcctgagcctcctcgggtgacgacgactcctggggatccaaccgaggaggtacttgggaaccagaaagtggttctgatcaaggaagaagaagaggttcccacaattgaccagaaatggaagggcatggttcccctaccggagccttcaaagaagcccaaacgatcagccacccccggtcctagctctgactctaggatcttggtcgaggccgaagacttccttgctcccccagccattcttctgaccctcgcccatcttgacaaagagagggtccaactccacattgctaaacacaactatgcggtggacaaactgtccaaaggcaatgctgaggccaaggctctaaagaaatagttaagggagttccatgatgggcccttctgaggtgagtacactggtgaggtctaggacctaaatcttgaccctatgatcgactggtttaagcacttcttgggcccaaccctctcaccattcgcctctaagctggtaagccattttgatgccgacttgacccaactcccaataaaaaggtatgcaacatgtgcctcctccaaccccgtttaccagattaaggagatgagcgtggcccttacctccatgagtatttactttacaagcttttctttccttcattattaatttttgaaggcttgaccccattttagtggtagttgtcaaattgatgcgaaggccggtcgtctttttaagacattgattgaccaagggttgctgtctcggagctaggtggcatggatggagtcatgaggaagctcaggaagttggaggaccagatggagactcttcacaatgatgctctagcggagaaggctctcaaggagtaggatcaagaggtgctgaagaccaaggatgacatcattgcctcgaactggaaggacctcctaaatgctcgagaggagattcagggactctccgtgaaactcaagactcttgaggagctacaccagactgacttggaaactattgcaagtatgtttgttgagctcaaggagttgcgtgagttctaggagcagacccagaaagaggctgcaaaggctgcgagggacgctttatttactccggtgacctgtaaccattgtgtgcagcacttcgaggatgtatattttatgtcctagaaatcgaacaagtttgaacctcgcctccacttcatgcctaatcctgaagctactgttgtacgcttctgggataagaataagaagttggaacaagccttggtcgagctggtgggtccttgtcttcctccgagagctgattaatcaaactcctctaactactgatagtatttcgagatgatcagcattccaggctttgggcactatggatccatccatttgcttcaatttataagtcctgaagcctatttcatcttccacttcgtacgagccttcctagtttagtccgagtacccccactcctgattcttgggaggctgggaagacccttcttatgaccagctcaccaatggcaaaatcctgtttttgaatttggagttgaaatattttgccactttcttttggtatgctgtcatgcgtatttgcgactcttcccgaattttatccactagatccagtgcttcttgtaacaaggcttggtttgttgctggatcgtaagtggttcttctatgggaggggattatagcttccactgggactatggcttcacacccgtacaccattgagaatagggaatgtccggcggtagtccttacagtggtcttgtaagcccatagtacggggcaactcttcaggccagttatttttgcaggccaagagttttttcttaagggtcacctttagtattttattgacggcttctgcctgtccatttgcttgagggccttccaacagtatagaaactcttgatgactccgtgtttgttgcagaattctgtgaactcatcacaatggaattgtttacaatttctgagactattttatgaggtaactaatatcaacacacaatgtattttatgaaaaagtccaaagctttcttagctgttatagtcttcataggttcgacctccgtccattttgtgaagtaattgttgggttttgtg

SEQ ID NO: 383002 - DNA, 1357 bp, Cannabis indica
ttgtgctgttgtaaatgcatttcacttgcaggttcatagtgggaaggccttcgatcctgatgacccaaagcatatgaaatgggtttatgatgaggttgataaacaattttctagtaatgttttccttcttttccttagttccacaattttaatccttctgctaccgttctttatatgctgtaggctgtcaagagggctgagctttttggtattccaggtgttacttattctcttactcaggtatatacatgctaaagaaagtctctctgaaacagtgacatttaaagaatagacaatgtttctgatatgctaattatttttggtctctttcctttgctgtcatgttactttagacctgatttttgtcaattttatcacttgatatgttgacattctttattgaaaggtgattcaacattttattccattttatatttgcgaggtaaaggaataaaaaataaaagtgaggagatttgaaagctatgagtcattaaggggctttaatatctttggtgttgtgtatctgtttctcttatgattatgagaagatttttaatccatgtattttacagggtgttgtgaagaatatcataccggcaattgcttccaccaatgcaattatttcagctgcatgtgcaatggaaacattaaagattgcatcaggatgcagcaaaactctgtcaaactacttaacgtgagtcctttttacagtcctgattttcatttataactgtgatgttatacttctctgttatatcatgggttctttatatgtgaatataatattagtaataatacactcttctccttatcaatggatatcttactttcctctgccgccataagtgagtgctctcaataggtcagtcatagacatatgacctctttaaaagaaaatgaatatcttactttccttttagtaactcttatccataagagaaaattaatagaacgcaagaagtgaagataaccaataacatgaataataaaacatttttctctttgtttcctttttttttttaattatggatttttagataattagaggaactaaaagtttataacataggaagaaagtgtattggtggctttgttttgatacttttattttttcaatcttacttgttaagacttagatctatgtagggattggggtaatataatgtataacaagatttaccctttgggggatttgatgctactatgatagtacatattttatgtctttattttataacagtcttgttaccacggttttcctccaccacaagtgaggcttttcaataaacttgaataggggtcaatctaggacaagtgacctctatctcttttttacagaaaaaaaaaaaaaactaaa

SEQ ID NO: 383003 - DNA, 1398 bp, Cannabis indica
tttttactgccagtgtctctttgagtgtggaatggtagtgtagttgagaatctttaaaagtcccacttttgtaactgcacactcttcgtttgccacgattgtcttcttctactaggactgctccctagtgtttgtcacttgcatctgtctgtaagaatatttttccataaaagggggtaggccttgcattatctcttttagttttttgatcatgtccatttgttctctttcccaaggcagggatcctttttgaagcattttttataataggtttgtgatcttagaagggggagggggcacacaaaatctctcaggtaatttaatattttgaggaattgtaggatttgtgtttttatgaggccttcatttgggaatttaacatttcttgggctatgtgttattggacgtcatattttccatcatctagtttcattctgagatggccaaccccagggttccctttagtctacacgcccaacctatctcttatcctttccacatttcctagtgatgccaaaacaattgtctaaagtaaaaaacccaaggattaaagtatagcggtcgctatactggtatctcaccagttcatacactatagcggtcgagatacacacaatatgacttctaacctccgtccatagctacatacaacgccctgacctaatatcttcttaccaacatccaatgacaattttcaatggttcaaaacattgcccaaatagaaggcactcctcacattggagtgggaaaagatctgcaataaatgaattgtgggactcaatttcccagctagcgaaaacaagaaatatgcactgcaatattttacaatgttgccactaaggatacatatcaatctagacctataatttacaacaagtttcaaagtacaaaagtcaagtgagcaccgacttgtcgtaataggaaatcttgaagatagaccgttggaaaagcttttattttcattaacatggagattcctgatgcaatctagccaaaacctaaagatgacacaccatgagaatattatccgtccgaatacctctaaaaactagaagaagatatgtttcattatacaaaacactatgttgaggacaactaggttaactacaatacaatttttcaagatttgcaatacccaaacactgcctgtagctgcccattctcacttaatgaacttgatgaagaaatatgcagacgactagtaatgtcttaacctgtcaacagccaaacgactgcgacaacaaatggcaacaagagagcatgtccatctacatggtgtgaagatgatagtgacacggatgaatgcatgaaccttagtccgtcatgtgagtccattagtaaaaaatgataggtaaagcacctgatgttaggttatttttagtattaattttagattaa

SEQ ID NO: 383004 - DNA, 877 bp, Cannabis indica
gggggatcagtgatcaccgtggggagcttgaaagggtcagagaacttgggaaccttagaagaagggaaggcgggaacatggactgagaagagagccaccaatgctattgaacatatggcgcacgttagcaccttcctcagcaccaccaatgctctccaccttttcttctgcatctcgttctctctctaaaaacacttgagaatacccatttgcgaatctaaacgctacaaaaatcacagatgcaagctccttcctttctttcttttctctctctatatctatctctatttttctctgtggggagaccgaagcggtcggcagtttgggttttaacaattcttctccttctggtatcttttgccgctttgcgttagaaaaagggtagtagctatacaagaatatatatatatatagagagagagagagagaatggtagataattactaaattaattaagtttttatttttaatttttcttttgtctaagaaaatattaataattgaagttgaagaatttttttggtaaggaaagttcaagaatttgagtttattacataaaacttattataaccgtattaagatcctgaggtgggggccacaacaaactgtatatataatatatgaatttattacgagttattaagcagtggtgccagaaaaccaaattagatgagattcaatatttattttaaccaatagcaatattaacacaaaaaaaacactagatactgttaatggcttttaacaattttcttttattctttattagtaaaaatttaaatagataaaattaagagtactaattacaacctcctattataattttttagtcaattttcacgttcgaaatcacatgtcggaatatttttttttcatt

SEQ ID NO: 383005 - DNA, 2190 bp, Cannabis indica
ataatattaattgtagtataaatttgactaatattatattttgtgacaaatttaactaaatttttagcatgtattaaatttggctacacctttttacacttttggagctttcaatttttttttaagattgagccaaaatatcgtaatacaatacttttataaatcctccaatagagatattacattttgcgtatacatatgaacacgatattaataaaagaaaatgagagtctatacataaatgatatttaatttcctctaatgtgtttcttattttgattatgaaagaaataaattttatatttattaataattgattaattaatcctaattgttgttaaatgaacagtttcttgtatttgcttgttctgattctcgagtgagtccttctaatattttgaatttccaacccggagaagctttcatggcccgcaacattgctaacttgattccaacttttgacaaggtaaataattaagtataaatactacagcattaattttaaagatctaataatcctaattatcaacttcttatttttattgtttatttactattagtttacctaactactttaattaatgtagtttaaatattctggagttggagcaattattgaatatgcggtaacacagctcaatgtaagctttattttaatttcctctccttaattttactttgaatttgtaatatattatccatcactttttttgttaaattaaaaatatatgtcttgggctttggtgattagagttgtaattttatcaggtggggaaatcaaattccgaattagtctcgtttatattgtagtttgttttaagatatataacataataatccataaaaaaatgttttgtagtggcataatttcaattttttaaattattacacattaaaaaatactaatgtttacaatttatttcatcaattcaaaaaattcaaggtggagaatattttggttatcggtcatagtcggtgtggtggaatagagagacttatgtctcatccagaagatggttcagttcctttgtaagatatatatatatatatatgtttgattatgaattcaaattattagcttagttagattactaatatatgtattagatttgattgataatagtttattgtgatatatgttaatatgtcaaaatttgtagtgacttcatagatgattgggtcaaaattgctcaatctgccaaggacaaagtcaaagctaagcacagtgatttaccatttgagaaacaatgcgaaatatgtactgaggtaatacatataatagttgatttataaaaagaaaatgttatacaagttatcattttattagatgataaaaatgagctaactaaatattggtatatatatagcatctaatttatatttactactaattcataagatagaaaaagagatttagagggaaaaaaaaagtaaaaaatgaaaatatatttgtaagggaggagagagagaagtacatttatattaaattaaataaaaaagacaaaaataaccaaaataggtaaatgaaaatccatatatatttataataataataattcacattatattataatccactaattaaaaacaaggaaaaaaaagaagaagccatagaccagtttaataaaattattgacaataagatagatatattaaattaataatatatgtatatatcatgtatattatattatcctataatacagctgtaactctaatattgttggttaataattttgtgtaggaagctgtggatttgtcacttaacaatctgcttacttattcgtacgttaagaagggagttgaagagaaaaagattgcgcttagaggtggatactatgattttgtggttggaaatttcaagctttgggaacttgcatgactgaaatattaattaatttcaccccacgtttaagtgtgattgtgttacaacttatgcgttaaataatcaataatgtatgctttataactattatacatgtgtactacttatggtttaagcaaataatatatttatggtgcttcattatgaaatatagattagggagaatctacaatgcaatacactctcctttgtagtggtagtacgaatcactttatcacgtccgtctatatctaggatcgaccttagcaggcataggcgggctagctagacccgcacttagggtccactcattttaggagcccaaa

SEQ ID NO: 383006 - DNA, 2401 bp, Cannabis indica
acggtttattgcaagtacagaatatggtgagtgtgcactcacatggcaactcttgcagagttcatgaaaattgttgagtaacttgttatttaattggtatgattgatctcaattaagtaaatgtctgtgttcttggtgttttttttttttttttcattttatgtcccaattgagtgaatatattatggctttagtcctaagatttacagtgtctaaggcaaccagccgttgccctgtcaaagttgatggttatttttgtgctgggctgtgaattttgaattttttttagtggaaacatttgacatcaaaatatttgccaaatgctaactgtaattcccgttacttgtaatggatgtttgattgcagttatttcgaaagatggggctggacaattggatttactcatattggacacgctttataaggttagcaagtaggattaatctattacggcaaaaaaaaaagagaaatggattagtgtttcctctcttgatattagcagggacacataatactattcaacatctaaaatcatggtaattataaacatctagacatagttctagcaccaagagtggtctttaaatatcaataaatgcatctgccactaattaattcaaacctgtttagttaaacaatgcctgttatgcttatgtgtatgctttttatatcatggacttattttctctgaatgcagacaggatcccataatgttcacttttgccttccacaggttagttatacacactcacttacacagtaactttgcaatatttaaatgctgtttatgtcaaatgattagtggtttctcagactcttgaagctttgaaacgaatttgtccaaaacgagccctgttaattggaatgactcatgaatttgaccaccacaaggacaatgagtttcttcttgaatggtccaagaggtacaagttctggccgacctttaacatatgaactctccaagactccaactaatgttaatgcccttttgtttaaattttttgtcgaggagttatcatcttgaatttccccggttgtaaaaatacagaaccagatggaattataatgaaacatactgatgtctataattttatcattgtgtgcacagggaaggaattcacgtgcagctcgcgcatgacggtttgagagttcccatggacctatgacaaggtgagaaagtttactttgagcttttattaacttttgattaaatatttagttacgtatgatttcaacaaaagcatattgaagactatctgttctgcgagacaactagatgacttgagtttaataaaacgggagtcttaaaaattttatactataatctgaattttatttcattagttgggctttaattttatgtacaataaaaaattaggagtaatgttaacaagaattagtaatgttgaaaattcctttttatttggttatgcaggtgaattagtcttaagactcttttagcacaaacgaaacccgaaaccgatatttagagtatgattttcgccccttgtcgaggggtataaagtaaacacattgttctttgaagtgagtcatctgatccacattctatcaactgagttagatctatagataaacaaaggaaggattaggtgccattatgtaccaaaataacatgttaagacagatggaaaaaaaataaatctttattctcattcatcagcgttatcgtttccttttaacaccaacgaatttgataaatcatgatgttatgtcaaatttacttgaataaaaatagtatatgtttacatatgcatcatttgttaaagacaattattttttttatattcatttcgatttcttcttttctttatataatatagcacttaatcgtattaaaggttcatcttaaatttaacgttagtgtttatttcaaaaatgtccaaagtaggaaaactttttgaataacaaactaagaactttaggtagtgtttagttggaggtaatgaaatggagtaaaatagatatgatatatttttttattttattcttttatttggttgcttgataaatgacttttctatcattttaataggaaaatttctaatgcaagatgagaaaaaatttaataagttttttattaattttttttcatacattttaaatttgattcaatttttatttctgtttctgtatttatattcattccaaccaaatatcactccaaaataagaatataatatttagtgggtggtcaatagagtatgatagtttaaaagcatttaaaatctttttcttttgtgattttgaacatggaaaatttagacagtggcaatcaaattgggcatcaatgataaaacccatttttattttatatatatttatatatgttttacatatatatatatatatataagtaattttaaaaaaacaaataaaataa

SEQ ID NO: 383007 - DNA, 1752 bp, Cannabis indica
attatcattcctataaaccaaaaatattccctgattttcccaattaagaacatttactatcagtattcttaattaataatatattaccgacctggatatatataatacttgatcaaaagatgcctatgtatgatctattgttcttattatatgatccctatatcaatcaagcttattcaaagatagaggtatcattcaataccaaaaggccaataattggtaccctagctagctatatgcttatatattaaaccatgtatttacaaaaccttttattaaaaaaaagagagagagattaaagtaactattaaaaaccaacatttccttaaattccggaaaaatacaattacaattttttaccggatctcacccaaatatactataatagaaggccatttatatacatgggcccaatcggcccatatatgtacacatgcaatgaaagtggaagctatccaactcttagaaaatagaaatattgtagactttttcatctatatttctctctgttctactgtttctttcttctaatatatagacaactataaaaattggtaaaatcatatagaatagatatatgaaacttcttgttttgatagttaaaatggagctgggagagtatcccaaaatatttttatgcttaacagctgtagtttaattcactcaaattacagtaatattgaacacgttaaggatatattaattgttaggactactttaaaaataatcaataaaaaattatccaaaagtatcagaaagtcaaagtgcttattatttatacaactctccaaatccaatcatataatcatatgaagaattaagacatcaaagcaagaggctagagaagtacttaaactttttatttgatgaacaagcatcaaagctaataagtgattaaataacttatagtactaaaatcaaactgatcacagtgcttcttttgttgttctatatcaaaagtaattatttgatcctgctaatttgttttaatgaagctaattcaacttaaccaaaacaataataaaagtaaaaaatgataatataattattataataagatagcttctgaccataagaaaacaagaaacctcgcatattattctcattatacttaggttttgcaccaagcaaaataatactattctataacaaaattatgtttcaacatcaacaaatgatataaatgaaaacatacctgtttttgaataagtctttgccttggatcttaaatgatttgcaagatcatccagatgtgttggtgagacaatatagggtataatttggagaagtttctgcatgaaaacataagtagctagatagatatataatcatgatggatcatgatgaagatatatatgttgaaataaatattaatgttgatgagtatgaagagagaagctagctagatgggtatgtaggtatagtcaaagttgtaaagagataataatcacttggttggagtgggtaggtttaataccagaaagtccaaaacatcaccagataaagggtaagaggctattattattagggcatcgtcagattacaatactaaatttaatgttttagtatattcagatcaagatagggccccatatctcacaaaacaaaaaacaaatatatactgtggggattaatttatatttattaaatatagagtttttagcctctaaaccatcccggttttgtttatgtatatattcttgtatacatttccattagtaaaatctaatttataaaaattataaaaataaa

SEQ ID NO: 383008 - DNA, 4380 bp, Cannabis indica
tattttacaataagcaatcttagctagctatactacgtttcatgtttgtatgtgtttacttttatgttttacatatgccaattctttggaagttgtagctttgcttgtagccatggttttccttggccacaaagagagcctttcgaataaaatttgggaggagatcagtctaaaggacaagtgatttctgtctctttttcaataataataatagagatattattataagaagctaatacaaaactctgtatctaggttcttatttattaatgatcttgtaattgtgtatcaccaaataataatgcgtaatataattacaaaaatatgttgtcatactcaagctatcacctttaaacaaaaattgattgaaaatcagtacttgttttcatacaccaataattagttcatacaattacttttttcattcttacactgattcttcagatattgtgatctattttttcattttcttgctttgtatatttaccaaatcaacctcattttgggacaaagcaagggatgaataacaacagtgaaaaaaaataaataaataagagagaggagatgatgatttgtaatagccaattacaagggtcctattagtctatacaaaattatataacaaaatacaattttaatgaacataaaagagggtattaaatattaatgtgacttagaaaaactagagcaatgaagtgttgctgctgttgttgcttgttgttgggggctttttactgtttgattgccaagaagacttggtttttgacaatggttttcctcattttcatgtcttatttctttgagcattaatgtaacatctttcatggctggtctttcctctggtgaaggattcacacagaggagagccactcccaacacttgaagcatctcttggatttgagtcccacatcggagaattagttgttggtcgaggactgatgttatctctcttcttctctctcgaacctctttgttaacccaacttacgatatgggatccctccgggaatctactatctgttggttgttttccagttaagacctctagtaccacaactccatagctatacacatcacttttctctgtgatcttaaagctgtaaccatattctgcacaaaattatgatgacatgatcacaataacatttatgtttgatttgtcttataataagctatatgcaaaacatggaaagtgttactactattactacactcacctggtgcaatgtagccataagaacctgcaactgttcttgaatttcttaaactttcggtggagttaacatgctttgcgaggccaaaatctgctagaacagcttcaaactgtggtcctaccaagatgttgttagacttaatgtcacggtgaacgataggaggaatacaatcatggtgaagataagctaagccatgagctgctccaagtactatcttgtaccgcgaatcccaatccaagaagagcttcttttcatgaagcaaatcagccaaacttccattactgatgtaatcaaacaagagcatcctagttatcccattgctgcaacaccccaaaagccttactatattcttatgccttatagaaccaagagtttgaacttcagcagaaaacaagtccctctcaggaacctcgctattgctacttgccggtggccacaacttcttcactgcaataacctgctttgaaggagtctcaatgcggtaaaccacaccagaacaacccttcccaacaatgttagattctgatagcttggtaaggatatcagtgacagagaaattgagcttttgaaatggagtgaattcccaatctaaaccgttttcctcatcgtttcttgtactcccacaaactctgatatatgaagttatggcagcaaggacaagcaagatagtagctgttaggctcaaaagaatagaaacaacaagagttctggttgatctctttccatgattatcaccactaatgtgacactcgtttctcttcaggcagagatttcgatttccagcaaatgaactattgggaagatctttaaagaacttggtatttggaatgggaccagaaagatcattatatgaaacatctaaatagacaagattgtctagagtactcaaaactttaaggcttccagtcaagtgattatgagcaaggtctaagctggcaagctttgaaagatttgtaaagctttctgggattgaaccacttagagaattccagctcaagtttaagagattatccaggctttgtaatagaccaatctcatctgggattgaatcagaaagtttgtttctgctcaaatccaactgttgtaaatctgcacagagtccaagtgattttggaatgctgccactaatccaatttccactaagctttaatttgtacaaggacgttagtttgcctagactttcgggaatgttaccaactattttgttcatggaaaggtctaaaacattaagagaagagaggaattgaaaagataagggaatcactccttgaatttcattaacatgcaagtcaaccatttctagctgagtgcagttacctatttcatgtggaatttctccagagaagcggtttttagacagttcaaggaagctcagacggcgcaggtttccaatttcagctgggatttgtccagagaagttgtttgatcctagccttaaacggattaaactgaggcagttccctatatttgatggaagctgacctgaaatcctatttgagattaacaacaactgagttaagttcttgagattaaatagtgactttggaactggcccggtgagttggttccctgaaagatccaatgcttgtagctttttgcagttagctaactctgagggtatgctgccttgaagctgattctcccaagcaaaaaacagatttagctccttgagttctcccatggtggatggaatctgtcctgttagtctgttattgtctaattcaagttgcctcaaacttgtgatattgcctataaatcgcggtatctctccagaaatctcgttgtcagacaagagaagctcttccagagaaactaaattgacaagagaggctggaatttcaccactcaaaagattcaatgataggtctataacaattaaagcagagcagttacctagagcatcaggaatgaatccagagagattgttatgccatatcaagagtctcttgaggcttttcatgaggccaaactcactaggaatctcaccagagagcttgttctcatacaaaaacaagttctctaaagctgaacagttgccaatctctggtgggatattacctgataagttagcagtgtacactgaaagtgtctggagattcttaagctctcctatgctacttggaatctgacctgacacacctgtatcagcaagtcccagcacaattaggcctttacaattagatatcttcattgggatttctccatggatacccgggttcccgccagcacgaaagatttctaaggcctctaattggcctatctctgctggaatcttgccagaaagctggttgtcaaacagctcaagtttccggagtttcgtgcagttccctatggcttcagggattccatcatgaagtgagtttgaattcaatgacagcaactggagtttcgataattttccaatgctttctggaatatttcctgtaagagcattgaaactgaggtctaagataacaagtgatgacaagtttccaatggaaggtggaatgattccagtaaggtttgcatttgagagaacaagagaagtaagatgattaaaggaaaggagctgagttggaaagttggtgggaatgttgattgaggtgattgagatttctgagacaaaaccattacttgaacacttaatataatcccatttgcatggagtttggtgggttggattccatgaagagaaaaatgtagtggcagaggtggaagtggaattgaaagttgagagccatgagagtaaggagagaccttcttggttcagagctgaagttgtgtttgggaaaccaaaaatggtgaggaacaagagaaagaaagtgaatagtactgaattttcaatcatggttagaacttagaaatgttggtaataatactactactactactcctactactaatgctatatctcatcttagttttgagctatactggtttgtttcctcatttgtggaaaattatgaacttctagttcaattcaaaattgatgaacaagaattatgatctgtacacttgaaaacctttcaaaatgctcctgcttttcatgaacaacatgcctaggaagtgtaaggactggactagggagagacagatcagtttgaggcttgaaatgcagagaagatgatgtataatttttttgtttttttttttatatttttccatagaataataataataaataaata

SEQ ID NO: 383009 - DNA, 1637 bp, Cannabis indica
gtgacttgtggtggtgccgactgccgaggaggtgtgactggaaggcggtgtcgactgatgaggtggtgcaattgcaaaggagactgagatagaccacttggtgcgagtggtggtgtagctccgtctgattggcggctactgctgtgctccttcagagagagagacgagagagagcagagggagaacgagagatagcggatgagtgagagagagagagagagataaattgaaatgtaaaattaatgagatatatcttgatttgggggtttttatgtataaaatatatatttatatatattgagtatcttgacggtttgaaccgagtgttgaaaatttcgcttaattttaagtgattatattaaattgtcaagaatattttacgattgtataaaattgttgaaagtatctaattatagccgatgattttaaatagtcacatattttatagttgtgaaaacaaaactaactcagcacaatacaaatccgaacactaaatttataaactttaccatagtgggcaggggcctccctataaaaagttgtgagggcacataatttgatttttcatgagctaatattatccatatttttgcacttgtactttagagctctaatcatgaccaagattaattatgaaaggaaaatcacaaatatgttgaagaaaaattggttgagaattgacttgagagaaagaagggaatgggatgggtgtattaattataataatatatatatagttggagatttgaacccatagattgatgcatggctcataattgtgatgttattatatatgtgtctcctacgtggaaattaattcaaacataaatattgtggtgcatgggcatattattgataatctaaatgaaatgatcttattcgatggatcctatcctatcatatcctgtggtccctcaactcaactcaactagattcgaaactattatgattatcaggttcctgtcactttaatttataatcatctcatttattttatattggcatctatataaattctaattagtaaaataaaaaaactaaacaaacaaacaaaccaaaccaaaccaaacccacttcattcgatttcaaatggaagcaattgtcattttaacttaatttgagggtaagtataatatgatatatataggagtagattttacggaatttattttattttgtgtaataatatgagaaaaagttaggttaaatatcaaataataattctaccaaaccgttgtctttctttgtatagtttctgataattcattcattattatgaaatgaataattaatagcatataatattatttctcattactttggcacgtgtttttctcaacaacaagcccaaccgactactggattctaattgtatgttgatgttgttgtgtacgtacgtcacaacataaaagaaaacacttttttttttttgagcattcctattgctaccattggtgtccgacttactatatcatatttaaaagaagggtgtgctaaatattaatatttcgttatttttatttaaagtagtgctacttacaatattttaattaatttttacttttgaaataacatgttggaatttttattcttattttttttaaaataatttatagttttagattcttgatatttta

SEQ ID NO: 383010 - DNA, 1601 bp, Cannabis indica
ctaccttgatgataactattttattaagtagtattaaatttaatgactttaactatatatatatatatatatatatatatattcaattatcatcccttttatatttaactaataatcataggaatatcgagttaaaacccaagacatgatcatataggtcatgaacatttccttaattatgatatttttaaatgtaatagtgtattaaaattgagactaattattttgatatgtaaaaaaaaaaaaaaaagagtttttaaaaacaattactaaaaatacataagtgaaaataaatgacaggcataattataaatatagagtttattttctgttaataaatttacaaaataattaaggataatttttttgtaaaattgaattctacaaatttgtataactataaactattcgtatttgttataattaattatatttatagtaatgaaaaatggaacttttttagaaaaaataataaataataaagaataataaactagcttagtgtgctcatttggactaaattaacaaattgaaaccaacaattacatcacatgaaagctccttcttaacctgtgtaatcatttgttaaagcccaagctagtcttattgggccacatacggcccattttattgactatagaaaaataagacaaaaacaatataaaattgttttttgtcggcatagaaaatacccaaaattcgtataagaaccctcgaatgctcaaaagagaaaagtagtttttgacttatagctcagaaatttatataatgaataataaaaacaaaataaaataaaataacaaaggtgatgaaaataaaaaaatccaaaaaactaacgaagacaaaatggcttttcttgcaataaacatatgggcctaaaatttgagacagctgacatatagtgggcccacttaaagcccaacaagatcataatacttagatatcttgatttatcgtgtcggccaaccacgtagggccacgttgaattgaattcggaaccataattggccgtcagatcattacagtcactgtcgtgtagtgttagcagtactaaccagctttttgtgatgctgacatgtccgattcttagtcgtttacgaagcggtcgtacagtttgtggtgcccacttaattaagaagaataaataaaaaaatatattttacaaaaggagagtttggttccagtggggtcggtactttacggcataagtacgctgggttctgattggccgttggttaggttattcaacaacaacttcacgtgatgtcaccctgcgaagtgtgagtcgtagaaaaaggctagccaagaaattaagggtaataattgtagagactagagttagcttccaaggatattatggcacgtttactatacagtaatcagaatcggaataaattaatggagaaatgtaacggaataaatgaaaaataatcggaatcaatatttgtaatatgttgtttactaaaattttttagaaatggaatagttgtgatttatcttgtttactttattaagaaacgtaatcggaatgcttaaatagactaaattgcccttttgagttaaactatattatatggtagttattttgcaagacatatttt

SEQ ID NO: 383011 - DNA, 4854 bp, Cannabis indica
tttttttttttaaaaaaaaggatgaagctcggtttggttggtttaaaccgaccaaaccatggattaaaatggtcaattttttttacatttatataatggtcggtcggtttttggattataaccatgaaaattgaaaactgaattttggatttttttgtgtaaaaaactgaccaaaccgaccgttgctcacccctacttccacaaattcaccctacatagatatgttcatcgttttaaatcatcataaacttaagcatttgttcaaacagtgaagaacactcatacatcaagcccaaaattttgcaaaaaagaaaaaaagtgcaaaacttcaaatgcaaggaaaaagaggtaaaacgtattcaagatacttactcattgggaagatggtcacgaagttctcagagtagaacgcttggaaattgtcaaaacacgatgcttgaaaattcaaagagagctctctggttctttgaaaggtgaaaagtgacaaatgaaatttttactctacttttataaatcttcctaggggcacgatggtaatttgggcgtccaaactaaatttccattttccctcaaaaagtggtaatgagtacactataggagtacaaccattagtgcaattaccaagagcacgaaacctttaaattgaagcatcaaatgccccacgtgattgaagaggcctgaaaagaaaacctaggatttcatgattaccgagatcaccacgtgtcaccttactaacccacttcactcatctggaccgtaagccaaacaagtcctcgcaccaaccaagaggttcccacatagacttggggtaaatattatcccaaaagttagtcgtgtgacttggtaggttcctttgggtgacacgtatctctgccatggggcctaggcggataaaagatctcaaaagtcagccgcctaaggtgttttccaatcaggagggatatcaaccgagtcaaacgtaatgcgctgcacagtttcaagacgcacacacctggtcagaggaaatgaatctcatacaagctaacttgagggaagacgcgtgtcgtagatgcaattgacaataatcttagtttgaatatgtatttaatgcccagtcaaaagagaatcatgattatacatccttaattttatgaagaggagttggttccctaaattagtgggatgacaactcgaggaagtttaatcccatcataaacatcctctataaatagtagatcagctctactgaaaaggaatctgaaatcatttctttgagtgagcctatacgctgttcaatttcctgtaaaacttttgagagagagcaatcctttttcttctcttctcacaagttaaatacaataataacgagagtaggccattaccaaaacattgggctgaacctctataacatctggtgttctttattttatgatatgtcgtttacatttcttgaaacttataaatatgttgttgctttagagactcagcgtcattgaccaaaagcgaggtcaacacacacataattaaaaacttaaactaattattattgtcttcatcaagtacattatctaaaaattctaaaccgttggtgttcaagtttaaatgggttgtttgtgcattgtcctgagcttacgttaatggcagtgaagggtaatatggttgctggaaagataataacttaataacttgttgagtctgtggttgttgtggcagagttagagattattgctattataaaaaattcagagattgttgttaaagctgactgggaaaaaaaatattgattttgtggactgaaaaactggccttgagaaagttgctgcagtgaacccataaacattatcaactgctaagatgagctcccaaattgaccaaacattagttgttgtgactgtgatcctccaaacaaatcaacgtagaaaagttgaggagactgggaggagcgtccaaacatgttcagaattagaggggattaggagggacttccatgcatggtaggagagaattattgagcctgctaaaatagttgttgttgcggccttgaacaagttgtactaccttgaggctgtgttggtgaatattgctggaggaaactatcaaatcgcaagtcatacaaatcagaagtgttgtgtcctggtagaaagtgtaacatcctgaaccgtaagggcgccacatttgtgcttttataaatagtttataataataaactagctgtttaagaaaagtgtggtttaactaaaactttagtaaaattatttaaattataacctaacttttcattcaaaataccactagatttaaggatccccttaacttttacaaaatattacaaaataacttattacaaaatactgttacattttcaaaacacaacaaaaggaagatcctgtccagtgaggaccaacattgcgaggagacctctgacttatggctggtccaatttttcctttcccttacctacaccacagagcacccgtgagtcacaaagactcaacaagaaaagcaagtaaatcacaaacatcacatacaacataatattttaataatgcacaacaaacaatgcatcatatagtataaataaacattcaaagtgtaatcaaatgttaacgattaatttatttaccttataagacaaattaacctcgatgctttataaagcatccatattcctcattaccaacaagttatatatgtcactagcgttgcttgattaagcaattaataagtgagaaacctatcaacggtttcaaaagtgagtaataactcattccttgcaacagtaattaccgtatctttacctcgatcataatcgagtcacaaacaataataatcatatcttatttgtcatgttaagtagtgcaaatgacttttcttacctcaaatccaaaatcaggtgtgcgggccgacctgagttgaataacactcgacgatctcagatcctatatcacgacaataaaaacttgataaataacttaaccaaatcccaaaattggccctaaacttaaaactagacaaaccctaatcaatattggcttagaaatagcctaaacatcgataaaatatccaaaactaagttatggaaaaacaccccaaacggataaccagttttagaaaattagggatcccttgctagtcaaccaactgtccggttccatagtgccctgtagaatcgtttaaccggaaatgggaaagcccttatttttgcatcaaaacaacattacaaaaaggcccacccaaagctcctccaaacctaatgaaacattccagaacaatccaacaatataaaaaaacatactcaaacattcaaaactctgaattacactaaaaatacaaatccaccatagttgagtgagatttgagttcttgaactcaactcgctcaattcaaaacctaacagccatagaatcatcaaattcacactcaaacaactttgaattaaacttaaaaatcatactctgaactcaattaaacctacagctccgaattaaagcaaaatccaaaagaaaacttagcctaagaccctaaaaatcaagaagaactagatagagaacttacctcaaagcttgaacagctcctagacttgattaattcaactgagaaatggttgaattcagaagaaaattccctggtttcagctggactcttagggcttcgaagggaaggaaagaaagagaaaatgatatgcaatgttttctttttcttaattttgattttatcttcaaataactaaaacatttaatttaagtttaaaactaaactcatttcagcctaatagttactagaaaaaccaaataggacaaaaaaactaaaatacaataaaatgactattttacccctccaataacacttaagctaaaatataacttagttgtatttttgttaaatcaactatcccaattaaaccaacaactcaacattctaaacttgtataatacaattctaatatatctcattcttttgacattgtgacatctttcaccaatccatcgagttttcactattggcaaatccaaaaatattttatttcaaaaacaatatatataatacccacatgttccaataaaatcttcgtaatttataaattacgcttaattattcatttactcgaagatcactaattaactcatgattggcttaagtaagattataatcctactttaatattcatataactacatatttaataaaatatgtaccattaaatgtaattataattttcagaatattacaactatccctctcttacaggaattttgtcctcaaaatttacctgaataactcgggatactgctcctgcaactacgactctaactcccaagttgcttcttcaaccttgtttctccacaacactttaactagcagaatagtcttgttttgcaatattttctccttcctatccaagatctgaattggctgttcctcgtaggataagtccgtttgaagttaaatgtcctcgtaactcataatatgggtcatattagacatatacttctggaaatatggaacatattgtgaactctaaataaagcaggggataaagctagctgataggctacctgacctaccctttccagtatctcgaacggaccaataaatctgggacttagttttactttctttccaaatctccaaatccctttcattggtgatactcgaaggaagatgaagtccccaacctggaactcaatatctctatgctttggatcagcatagcttttatgtctactttgtgtggcaagcatatgagctataatcttttcaatggcctcactagttctttcgactgcgtcgagtccaaggtatctctattcaccaactttatcccaatgaatgggtgaacgagactttgttctatatagcatttcatacggtgcc

SEQ ID NO: 383012 - DNA, 1600 bp, Cannabis indica
gagagagagagagggcctactttgataatttgaaaagacaaccaattcgggcaagaaaaatatgtagaaaattatggcaaaaaacttttagtcattcactcgatatcagtcacagaaacagtcacccctaggaagtttgaaacaaaacaattattctttactcagttcgagatattgaattggtcaaaaaaaaggaaaaaagaaagtacttgacatatatagtagatgacctatcccctatatatataggtaataaacctatctcctttgacatatatttcttctttaatcttaaagagtttctttgcaaacctttttcactatctcagagaaagtctctaacgatcatggcctcaacaccatcatgcaaatacttgaaaaggccaaatattctcagttccatgattttttctctcatattaatattatctttcaatatagaatttacaggtacatatatatacatgtatatagtttctttaattaatgttatatatatacacatgtttctttggtattaaaacgttcataattaaatatgctttctgtttttaggagctgatcatcatcatcatcagtcatttttacctaaagatgacaataattctgctcatgggaagagtttattattaaagcaaaagaaaatggttttaggttcaaaaccacctgagtgtgctaacaagtgcttaggttgcagaccttgcatggctaccttagttgtttctcagcacgaaaagaatgtcaaggcatttcctcacgcacctgagagctactatcttctgggctggaaatgcaagtgtagggataagttctttcaaccatgatcattaactgaaaaccttcccttattgtataattattacctataaatatgatattataagatcatgcatgtacgtattctactcctacgtactctttccttcctaattaagtactagatattagctatattagagaagtagagttaatcctatatagagccaaaagaaaaaaagaagagtagtaagagttatggttcctttttttagtgttgttcatgcatgtgtatgctacgtacatctttcttaaccgactagtagaccgagttacttaattaagaatctatgtctagttttgcatgtattttctttctctgttcttgagcgaatatagggttttgaattaccaactttcaattttagtaattagcctaatatatatgtataagaatttagtatattaaatataccaagaaggttttagtgcttacattatctaattatcatggttacatttatttttaatagttggatcattattaaatagttgtgattaatttaaaaattaattaaaaaatataattgagtctaattagaattttttttccctcgaactttaagccattacaaattctttctggattattaagattgttggatttaaggacttttttctaattttagtaaagaaattcttacatgaatcaaagttcaggaagcatgatttgatacatgttaaagcttgaggagtatgatttggtagatatcaaagtttggagagcataacttagtacatgaacaatcactgaattagtaaaattgaataaaattggataaaa

SEQ ID NO: 383013 - DNA, 1685 bp, Cannabis indica
ggtctttaattttttgctcaaggttttggagaagcatcaaaagagtgtccctctcttcaaccagtttattagcccgtttggtttttgcctccaagtcagcctctaacttgtcaaccttgggcatatcagacaactgttattgcaagttgtcaaccttcttgtttgcctcgtacaaggcattttcctgctcctgggcctagccttgaactttctttagttcagtaccatctgaagtggcctgggcgaccattaccttagcacaggagtagacatacccgacttggagatttagctgagaaaaataagtaagacaaaatgctttgtaagccatatcccaagcaaagtattcaacggaaataaaaataccttagtgatctcttttagaaggttggctgttaggaactcccctggcagcatgttcgacccctttaaatgctcgttcatctcgaactgaactctatcgtggtagcatccgaccacatcctttgctttcctcatattgattctaataaaatttaaattagagatagggttacgaattctaggttgatcattcagtggcacatccactaaatctccaatgtgaaaatcatcttcttgtggattcaatctctcctgttcttgaggatcgatttcctcctattcttcattgttagtttcttccagtcttgcttgtaaactgtattaatttgtatcttgattcttgtggaaaaaccagctctgatacactgttagaatctgtagctcctaacactaaaaacaaaaatcaatacacaattgacatattattgtatttttgcaaatatttcaagcgtccacgaaacattggtaaaaatcaaaacaagaaaagtctaatagactcagtccaacccaattgctaaactaacaaaaaacctaaagtctaagtaaaactactcgaactccttgagattcaatctagaagcttcttcttcttttccaagagaaaaccctagggtttcaatactaacacatcgcacacaatcacaatccaaaaatcaaatcacacataaattcaaggacaccatcatacactcacaacaacacaaatatatttagggttagagagaaacaaacagagaaaaaatgaagacacagagttgatctcagaggtcactctagaaatgagctacatctccgtcaagctctccttagagtagcttgatgtttcactattcaacatgtaaatacaagtgttttctttttagatttcaaatcacaatttcttttggttgataatttttttgattttctctttgtttttctttctcaatttcttactaatctctcttttcttttatgtctttgtatggggttacaactgagcttcgagtagcttctttctaacctagctcgcatgagataaaatggcttcaagtagttcttctcaacatggatctgtatatttataaattgtagaagtaggggtgttcacaaagtatccgatccaatccaatccgcacgatccaatccaatccaatccgcaaaatgcggatatccacacttgtgcggattggattggattgaaaaatccaaaatccgcacttgtgcggattcgatgttgtttgacttcaaaaagtaaccgatccaatccaatccgcacttaattatacatatttttaaaaaattataatatataatatatattaatcaaaaaaaaaaaaaaa

SEQ ID NO: 383014 - DNA, 2362 bp, Cannabis indica
tttttttttttctttttggattgagaagctaacatccaaagatataactcaataagaatttgaatgagtatctatgcatatggggagagtaacatgtttgttgtatttttttgttgaaatattaggccctgagattttatgggagctttaatgtgacagtcacggggataacaatccagaacagtcctcaatgccatctcaagtttgacaactgcgttggggttttggtccatgacatgagtgtgtcatctcccggtgacagtgccaatactgatggaatacacctacaaaactccaaagatgtgttaatccacaccaccactcttgcctgtggtaattaatacaaactctaattttttctttttactacattggttatagttttatagtatatctggtttttacatgagtatagctgagatgagatcccagaaatacaaggcacaagcttatccctttacctgtatatacacctctgaccaatgtaaacttgacatgtggcgccaaacaaaccgccgcatcctaaccattttaaccactggttgtatggtccattttaaaccttagacatactacttttagtggaccacgagatagcaaaaaagattaggctttgaaccccacaagagcttctttaattcctcatctgtcttcatttggaactagaactttgtccacttttgcactgttattactgtataggatcacataaaacaggtgaagatttttagcctcaagaaccttttccttttcccttttattaaaaaaaaacatatgataagataaggtaactaatatgaaggtagcaaaatagaatgacattgatgatgaaaaactttctaatattgtgtaggagacgactgtatttcgattcaaactggatgttcaaatgtatacgtacacaatgtgaactgtggacctggtcatggaatcagcattggaagtctaggcaggtataacaccaaagcttgtgtctctaacatcactgtccgagatgtaatgatgcacaacacaatgaatggtgttagaatcaagacttggcaggtatataaatctttgatttaagcatagtgtgatatgaccatttatcctagaaaagagttaaaactcattcattgttgtatttgcagggtggtttagggtctgtccaaggagttctgttttcaaacattcaagtttctgaagttcaacttccaattgtgattgaccaattttattgtgacaaaagtagttgtaagaaccagacatcagctgtggctgtatcaggaataacatatgagagaataagagggacttacacagtaaaacctgtacactttgcttgcagtgacaacctaccatgcacagatgtgacactaaattccatacagcttaaaccaatacaagaacgatatcacatgtctgatgccttctgttggcagacttttggagagttgaggactcctactgtcccgccaatcggttgtttacagatgggaaagccttcaagcaaccgacttcaatctgaccacgattcatgttgagaaactatacaaattaagcatcatctgaactgaatgaaatggtgtattctcttgtgtggtcggcatgattttcctgacccctttcaacaccaaaaccgggttagaatttttaagcgtgtatagtttgtcaggcaatcctagtttgtagggagtttacttacttattattagttggggtactacattgccattatgagagagcatacagaatttgcttttttagctggataagttatagtagttataagtataaggggccattgtttattgttatggcagattgctttgagtgacatatattattatacgagtgagttgcatctaagtttgaaataaaaggtttcatatctacacttactggtgcttaatgtatgtttcaattatgagaaactaatgaaaaacaattccaagcagaagaagtaatatcagattaaaccaactactttcctagcaatgttaagaaaccaagaactcataaataagaaacttttaaaagacagctagaacactttcaatctaagatcacaaactcaaaaacaaggtttatgtggttcgaccataaagataatctcattttcaacatagaaacaagtcatatacataagaatatcaaatttcaacaaattctatgagtaggtcataggcttaaaatgtgtcatagcagttactctttcatatttcaaaagtcagttacaagagttctgtttcaaaatggggaattcttggagggaagaaaaagaaaaaaaaaaaaaaaaaaaaggaccaatagtggatataggcattgtaatatgaaaaaccgtgtttttgcaaatgtcagttgtatatacgtaaatataaaa

SEQ ID NO: 383015 - DNA, 3120 bp, Cannabis indica
tttttttttttttgctctacttccattgattctttttgggggagttggatagtcgttagtggttttttttgtttgtttttgctctgataccatgttagaatttggcatatgatgaataaggttccttcttaaaactaattggcactaggaggagtagctcattcatcttatatatttaattatctttccacactttaacaatatgagactctaacaataataataattgttgactgtaaatataaaacctacaaataaaactaacaaattttgctctatataatacttatctaactattactttttttctttttgatatgtaatcgtaaaaaatagttttattttgctctttactttattttccttttcaatttgaaatactacttttagttacaccgctagtcaattgagctcaacaataacacaattacaatctactcttgaaaataattatgagatgcggaaagcatatgttttctatctgtcttcaaaattaaagcaagaatttagttacttatgttagtaattagttacatttctacaaaaagaaactattatttttgttaacaactctagtttatttttttatatttgatcaactcttttatgtacattaaaagtaattttatagtaactgtttaccgagattttcagaaataaaatataaataataagaactgaagaacaaataatcaaaagaaaaaagtaaacagagacaaataatttttatgtggttagggcgttaattaaccttaatttacgagttagtattatttagtagatttttagcttgtaaaatccttcgagaatacaaagaatatatgtttactaatttttctgagcaaagttcgcaagagagttcaatccctaatccataggattcaaggggtatttatagtagtttgaggattacattaggtttctctttttcctccagtggagactttacagaagataatacccttaggctatctcataatgtcttgcccgtaaaagaagacaatcaaatgaatagccatatcggatttagattgattaggtcaacaccgtgtatgttgattctcgacaattaatctgtgaattaattgcataatagttgttataggacgttttcccatttatcttcatacgatactctgtcgtgatctgacagctaaaatttccttaattgtgtgcaggaatgaataggaaattggaaggatcttccaggaacacactatctcatccttctgatcttgtgatcataccactcatgctttcgggtacgactcacataaggcagagggctttgtaagggtggagctaagattcatttctagaaggacatatcaacgtgggctcgacctactttacctttgatgagggttccactgatgggccttggatgctaacttagaatctatgtgtccaatgccaaaaatgtaaataatatttatccccaagcttctagagtgttgcgtatggtcggagcttgcatcattccttcaatttgaacatgtggaaattaaaggataaaatcgtaacattttgaatgctactcaaccgcaggaggtggctttcgcctgagatgattatttatccacgtgtcaatcgcatgatagtagaagggcacgatcatcgaggagtcacttttcagaaacaactatattttttacggctattcattttttggtgcgaaaatcaaaaaagagcattttcatcattgatctacggattggttttacgaacattaattgggaggatacacgcagattgttggactccccgatcgttgaatgaaaacttgagtttctagaagtaggatcgtggaccgtgtatctcctttcacgtggattttccttttagtacaaatacccttaataacttccagttaccacttttccccatttttcaaaatttcaaccctttgaagctcataattttctatgaactttccaaaactaagaatcgaaatcaaaataaagttttcttcttcaatctggaaaaagtcgtagattttttccttcatctattgcttaggattagggcatgagagttcccacatcatcaacccccaatgatcgagacttttacagcaggagaaattatgagcctactcttcaatgcaaaaattgattggttgatcgctttagcatctcgtctttgtcaaaggtgcgatcaacttccccatctacatcaaacaatgattagcttaacatctctgctatcagtatctggtatgttgctctttcacctatggattgtgttttctgagttagcctttataagctatattttcatgttcttttttaggatacgattagggattattacatgtgcgactgccgtcttaagtagaattaagcatcgcgagccatactatttttcaaattcgctatttagaaattcttagaattggtggatttgcagcaaaggtgctgacaaaattttgcatttgtccaaaatccttctggttttgggttcgtcattaatttttgtcatttttctctttgtgttgttcttaacttccaatctagaacaaattactcctgaaagttcttgtttctagatagttagtctagttgggacctctctaagtaatttacgggggaggacccctagctccctttctatgctaggtagttagggtggctaactgcttgggttttcttcttttgtacggaaattatgtctaggaaaaattatcgagaagaggagataatggagcaagaaaatgctctaaaattaatcttaaatgactgtccatgagaaatggaccagcacgtcagcaagttcaggaattataataacctcaagaaatacgatatcttgcgaggtttgaaaagtgttctaggactattctagaacagactttctgttcacagggagagccaataagtgtgcaaaaggaggcttcggtgtttggagatagacccatatcgagatgggtgcacacctactgtaaatactgcttaactttaatttggaaattagcagataattagggtttaattatgaaacttgcatgttagttatgaagtatcattttatgaagatttatttgaattcagaatgcattttatatgtcatatatagaattttatatttttgcatgttttgtgcctggcaacattggaatgc

SEQ ID NO: 383016 - DNA, 6518 bp, Cannabis indica
ttagaaaggtgcctttcaaattcttaaaggactaatttcacaaatgtatacacatatatggggtaagttgaaaaataccacttttattaatcaattaatcaaatttacttttactttcatatttatttgaaacatacctctttttatgtgtattgtacctaaaataccctgacataagagagtcacatggaaagtatcttgaagtaacaggggcaaaattggtataatgtttaaaaaaagaagtaaaatgatagactttaaaaagagggtaaaataaaagaggacaatataaaaaggtatagagtgtaatttcctccacacaaacatatatttagttaatttggttgatgttatgtgcaatgcacgtataattaggtttttttttttttttaaatagggttttaattaagtgatgttaagtgtaatacatgtatgttcaatttttttaattagttgatatattcttattttttaatttttgtaatagggcttgagattttaatctttgagatttttttaactattgcggctacatttgtgtgctttttagaagtggctatatatacatattttatatgtataataaaagaatttagaaaaatatttttgacaaaaatatatatttttatatattatatgtcctaaacatatattttacaaaaaataataatagtgaatagatataatattcttaaattaatttatagttaagaggatgtggttataataaagtgtacaaattaaggattaaagattttttacttgttaacatttgacgaagcattgtatcaatcacgaatagtaaaaaaaaattaattttttatattttaatttaactatttaacttaaaaaaatatcaaaaactagtttatactatatcaaaaaatatatttatatataaaatattaaaccaaactcaattttaattttttttcagtggataaaataattccagctaatataatataaaaatgagttatttttttaattaaatataaaaatttaaattttataaattataataagatgatgaaatagcatacattattttttccatagtacaaaaaatctagatggatacagaaaaaaatccactatatattccatcaatatatatgtgaatacacatatgtatatatacatgcatgcacctaataattaattatgataaccctaggtaaacacgttacccacgtgcaatttggacaaacaagagttgtgtttattgggttcaaagtatattccactcattttatacatgtttaaataataaaaacccaacaaaaagagtatatttgtatagtgacatatgaattttgtcctatatatgttaacgtacgagtacatataccttaatttcctttatttaaatatggcttatattattgaagggggcacttaaaattattggggttaagaaacttgttgagtaaatagggccacatgatgtagtgatagagtcacataatttaatcacaatccaagctatacaaagttcgttagatatgagttttatttttgagtttttcattttagagttttatttttgagaccattatacactgtatgatggaggtctgcccactttgtgctctgtggcagttaatgttcttttggtagttattttttaaatttttatgatttcttcttttccctctctatttttctgccggtttctagcagtttttctcaagatttgcttcccagttcttcctggttttccttgttatggatcctttcattgacagaatgaaatcaacgatctctttaactgatgatgagagatcagtggtggccattactgatgatggtgcacctgatcagagtgaaagacttgatttagtcttggtcgtgcgcatcctttctcctaaaaaggtttggttgtcaacattgcagaaccagatggctcaacactgggatggaaggttcaaagctgttatttcagaacaccactctgatttattcctgatcacctttggctgcattggtgacaaaattcgtgctctggagaaggaaccgtggcatttccagggccaccatattgtcttgcttgagccatctgcattaaactcaatcactcctcaacagatgatttattctcctttttgggttcaagcctaccgactcccttttctcagtaagactcaaccgcttgctaaggctttgggaaatctaattggggaatttattgaagtcttccaggattcttgctttgagggttggggtccttttctccggtttagagttcgattggacattactaagccattgcttagggggaaaatgatttctcttcccaatatcaaagatgaattttgggtggaatttcggtatgaacgtttgcctgattattgtatggaatgtggaagaattggacatgtttttaataagtgtctggtccatcttgaaaatatggataatgggattgaatcagaactggcttatcgaccgagtctgaagggtgctcctttgcctacatctagttatgatcgatatagatcagatttttctaaaggaagtgcgtggccactcttaactcgactagcacgatcaacactctctgctacaattccacagatcaacaatcggccaccttcacatccaagacctctcctacagggagaatcctccaatactaataagaatcatcttcctcctacaaccactcgcactatttctccctctactacacaaaaaatgcagccttctgttactgctggtttaaatgttcagcatccacttactgctgccgttcctgcaagccattctcctggccttaaaactgttccttgcgataattcagtggttcatctaaaagatgttttcactcccaacattggtcctttccctgttgatcacacctttgccacttatcctcctattcctaatttttctcgtgaagaaatatgccaaaatgttactatggatatctcttccaaaaagactgggaaagctattgctgctactactgtctcgcaccagccccattctgatcttgatgatatggatgattttgatgaccaggaaaataccaatccaaacaaagcttttaagagacaatttgatagtctttcactaaggaaaactcttaagagatgtcgtgcatcaaatggttctagtccttctccttcctcaattgaagcgactgccaacctgccagtttctacctcttgtgatgattctgctggttcagaggacatttcagcggtgattgctcagcaatcccgcttttcatcatgaatgttgtaagttggaatgcacggggtttggggaatccgagtgcgttccgtcgtctgtgtttgcttgttcgtgagcaaactccccacttgttgtttcttatggaaactaagttaatttctggttgtatttctcgttttagacaatgtttaaagtttaacaatggtttagaagtccctcgttctggtcttaagggtggtttaatgttgctatggcatgatgatgtaaatgtaactctattatcaatgaactctaactattttgattgttatatctcttttaatgatggtcctcgttggcacttctcggctgtctatggttttcctgaagcatctaataagaagcacacttggactcttttagaaagacttgctgatgtctctccaatggatccatggttgcttgtaggtgatttgaatgagattttttcacattcacacaaaaattctggtcctttacgttctgataatcatatgatggcatttcgaaccacaattgacttatgctctcttattgaactctctcacacgggtcctgatttcacctgggctaagaatagacggaatccactagctttacaagaacgtctcgactgggtgttcattaataccatttggaaagataatttggcttctccacatgtgtctcacctggattactacggttcagatcatagagctgtccttagtgtaattaatctgcaatctactacctctgctgtccagtatcgatcgagatttagatttgaaaaattgtggcttaaggaagctgaatgttcccagattatttctcaatgctggaatttttcttcaggaaacccgattgatgttctgaatggcaatttatcaaagtgtgctgcttctcttcgatcttggcataaggataagtttgggaaccttaaatctcagatctctttggcacaagctactgttacagccctttctaacacctctacaccagcaacttcacattaccagcaagttcagaaagctgaagctgttcttgatgatttattggccactgaagaacaatactggcagcaacgtgccagaatagattggttgcaatcaggagatcgtaacaccaagttctttcacgcgaaagcttctgcaagatactccaataataagatcaaactgttaacagatgaggaaggatctgtctacacttctcaacatgaaatatctggtttagtgactgcttattttgagaatctttttcaagcacaaaatgaagaccattgggctttacagcatgttcttaatgtcattcctactactgtaacagctgaacataatgcttttctttcgaaagactttactgctacagaagtctttgaggctctcaaaactatgaatggtgatggcagtcccggaatcgatggaatgtctgctttattctatcaacataattgggatattgttggtgacttggtaacacaggcagttcttcatgttctcaacaaagggggtagtcctgaagctctcaacaaaactctgattactctcattcccaagatcaagaaaccaaaatcaatgaaagattttcgcccaattagtttgtgcaatgttgtctacaaactaatctctaagtctttggtgattcggtttaaaacaattcttcctcatgttatctcagaaactcaaagcgcctttttgcctaataggctcattactgataacattttggttgcctttgaattggttcattgcctcaagcacaaaactaggggtaggaaaggtttttcagcgctcaaactggacatgagcaaggcttttgatcgagtggagtggtcattcatagcggctgttatgggaaaaatggggggcacactcccgtgggaacccctatcatgaattgcctacaaactactcaactatctttcattgtcaatggtgcaatttcaggcaatgtgaaacctcaacggggtctcaggcaaggagatccactatctccttatctattcttgatctgttctgaaggattgtctcgattgctacaatatgaagagtctattggctgcttaaaaggtttagctatctcaagacactcgccgtccatttctcacttgctctttgctgatgatagtttgttgttttgtgaggcggatgatagatcttgtggtgcaatcaaaagagttttggacacttatcataaagcttctggtcaacaattgaatactgataagtctgtcatgtccttttcacctaataccactgaggctgcaaaacactctttccgaaacattctaggcatgcctatatgcgattgtcatgagtcataccttggtctaccagcttattctgaacgtgataagaagaacatgttcaatcacataaaggagcgtatttggaaattattacatgcttggactgataagatcttctctgttggtggtaaggaggttctacttaaggctgtcattcaatcaattcccacatatgcaatgagttgcttcaaacttcctgttaaattttgtcgggaaattgagagtatgatgtcaaattactggtggggcacgactacagataagaagaagattcattggaaacaatggaaatttttgtgccattctaaaatggaaggtggcttaggatttcgtaattttatccatttcaatcaagctcttctagcaaagcaagcttggaggttattccaaaatcataactctctgctattccgtgtacttaaaggtcgatactttcccaggaatgattttctctctgctgcaacatgtggtgcctcttctctcacctggcaagggatctgctggggcagagaattactgaaaaaaggaattaggaagaaagttgggaatggctttagtatcagctgtgcaaatgatccttggatccctggcaatttgattttcactcccatattttattctggtaatccgaatagtgttgttgcagactatattacaccagatcgtgagtggaattttagcaaattatctgctgacttttcatcggttgatgttggaaggatattatctctgcctttatccaataatgcaggcccagactattggatttggcatggtacggggggtgagtatgaagttaaatcaggttatttctttgcttgttcctcttctgctgatactaatgagtcggtctccaatccaaacactgcatggtggaagtctttttggctgctcaaactccccctaaagtgaaaattttttcttggaaagctatacataatgcattgccggttgcagctgaactttttaagaaaaaatctctcacttcagcttcgtgtagtttgtgccttaa

SEQ ID NO: 383017 - DNA, 1227 bp, Cannabis indica
aaaaaaaatatattatgcgtgactgtacgaggaaaatatttttcaactttcttttgccccgtaactggagaaatatgtacaagactatttgaccattattatttttctacaccctactatctttggagacagaaagctctagtatattattaagtagatccatacaagaactctaatccaaagcttcgttggagtactctccatgagtaatacactcgacctatccctatcctaacatttactcggacgaaataatctatcaggctatcagctactttccacaacaaaaccagtaatgaaattccttaaatgatctttattctgaaatcagcgacaaggttacaagatctagcttccggcgtctctcctattccaacctttcgagaggattcgtctttccacaagagtactctgctctaattccaagctatccttacaagagaaccccctctcctatttataggcattagttaccattactaatgccaactagcaaccacaagagacacaagaactcagcccacttattaaaataattgctaagtgtacaaagaattaaaacataaaaaacattatattttaaaagactaacacatcactgctacgggtggaagcttgcgaattgctccttaatagtggtaaagtcttcccaagtggcttcaaactcgggtagagaggtccacttgatgagaacttcagtagcatccccatgtggctttcgactgctcttgaaggacactttcaagggctacccgaagttccaagtcatttttcagttgtggtgggatggttgctgaaacatggcactcgcatatggcatgatgaagcttggaaatggatacaagcgagtgtttttcgagaagctcgtcagatctatacggggcctataagacgatacccccaacactcgtaagctgatacatttaagtaaagcctccgctttacaacctgtaataattaaatattcatgatgttcctcaaagtgaagttccactatatgagaaagcgttccttgcaatggcaagtttgcctttagtacattgtactaaattaaagaggaaatcaaggttggcctccgaacaaagcatatgtattcgggcgatcacatatttgccttatcgatgaactattaagttttcactttacatgtggtactcatcactctccacacgtctgtctgatttactcactatacttgtcaaccgaaattgtcaaagtgaacgaaac

SEQ ID NO: 383018 - DNA, 5684 bp, Cannabis indica
ttatcccttttcttttgggttaatattatttttaaccctttgttttataaacgttatcaatcggacaaactgttttgttaaatgatgaattagactttgtatattctgaaatggtacaaaatagtgtcatgaccttaatttttagccattttttttaatataactgtcatccgtgtttccggatagatgatatatgcattttccaaagcccaagatcagttaaagtaagcccattccgaacctggatgtaattccagcttaacagacacgacaaggtcggaccgcttcaatccaggaaatgttgtttggcttagaaggcgaaaggtccatcaagatctatccagataccctcatgggataatccagatacaatcaattgagaagacatttggaagcttccggatatggcaccctccagacacagggccccaccatgtcatggatttatcccatatgtcagaccgagggagtgcacataccaccaaaaggcaaccttatttttgttcaatgccatattctctgacattcttagtaccaacacagcaatgcacgacatgtggcatcataatcgatccccacttgtatggacgaccattttctcgtgaatgggcatcacccaattggtccaaattaaatatatacatatatatattatattaaaccccatcagtgagtctagttgacacctctaagccctaccgggtccgagttcactcacatgatctcttcatgcaaagggatcgattgagaaatcattttatagctactaagagctgaaaattagggttcttcaactagggaaaaatacttgtaataaagatactttgaaacttttctagctcaataatattgactcataaggcttattaacgccttaaccacataaaaatcacagtttcttcttctttaatttatttctttttcaagtcaattattttacaatcaatttttaaaaatctcggtaaataataaccaacttaaagacaatttttagcataaatagaggtaaaaaaatataagcagtcttgtcgtaacacatctagatctcagattattaatattttgttttattttgataaaaaaatcaactaagaatagtattttctactattttaaaaaatatagggggtctaatttattatttagtaaaacaaaagatcgaattaataatttttgtaaaatattgaatttaaaataatatttatttaattatttattttttgtgaaagccattaacaaccgattttgggatacgtactttaaatatatatagcctaattaacatgcctataagagaaagcgaaaggagcttggaaatggaggatcaaaagggaggatctaattaagaagttatcaaagagaaatcgaatatataaaaatacatatatattatatatataattatataattggtttggcttacgtacgtacatgtacgcagtgtcaaactattattattttggaccatgaaaattgcatctggaataccaacatggtctaaacttttttgtatgattctcttcaagaaatggacttctttcgatgttcttaaagtggagtcaataggctttggattattcttaggtcaaacacgaaataaggaagcacttataattatactcaacccattcataaacgagtacaacttgtatatatttatcattacttaaaaataaaataaaacccctttccattcataacatattattttgtgtcttaattaatttgttgcatttttttttcaaaaggttattcaaatggatttatgtaatcaaatacaattagggaatatgacagcatatagcatataattaaatgagattaacgaaattaatgatatcttaaaagaattgtactcatcaagtcaagcatttacacaaattgtaattacagaatagcaatatagaaaatttcatcatgtactgttgatatagtctccagtttattatatatagttagtagcatagaaaatattacaacttttatatatacttaattataatttagtctctatagtttatagtttacatatggatcacaaaatcttcgtactgagcttcaaatcccctcacatggatctttatattattatgacaaaccatgccaattaagatgagtgctagctacaaaacacgaccattattggtatgtcagttgttaaatcgaactccattaattaatatatgaatatatggaccaacaagttggttttattatgcaaatgcgatgattaatttagtggaaaagactgtttatatattgattaattaagtccataaatcgatagacctcggtatagaacttttgggacccatatatatcatgcatattgggcaacaattcacacttaagatattatttggttcttattgatccactatatataatacactactaattattactagtaacacaatatatatttatttaaaattgtattaaaattactattacctaattattaatttaattaataataataaaattaaatttaatatggttttaatttttattttctaaacaaaggaaaatattttattcaatcagtacaaaatcggactgttaaatcaaagcagcccccaaaaaacacaactcacagttaacttttttagcaggattaggaagagaaaaatttctgactctaaatttcccctaaatcctagaacaaagcaaggctaatttgtctatgatatttctaagcttcataagcttcttaaaataccagctgtaatcatttttcagaagaactaaccatatatcttgatctttgaggtagatagaattaatctattttactcaaagattgtcttgcttggtcgaaatgacccaaagaaacttagccaacatagcaatattattcaacttcttactttctctaaagccaatgccaccaatcctagccctaggaataggtgggctaggtctgtgcctagggcccacctagtccaggagcctaaaagaatattctccccttttaaaatttaaaattacacatattttttttaatgattttgaaaaaagccccatatttttttttctaaataaggctctaaaaataaatttattttctatggtccactaaatttcaggaccgaccgtgaatgccaccatactttttgggaagtcaaaatttctcccaagaagcaaggtgaaccttgctacaagtatcatttgtgtcccaaagaaagtccctgcaatatttatcgatgacagccacaattttttgaggtaaaataaagatacccatacccattcaaaagtttatgatttccaataaaatagtataaatgagaagagctctccctagcaaaaaaaaaaaaaaagtttctgctagcccaattatgaagatttttatgaattttatcaagaaggactccacaattagaggcctttcatttggtaggtcttaggtgaacccctagatatttaaagggaaatgtaccttcttccatctgaacaatactcatgagcttccctttacaagtctcattgacaccacaaaaatagatgtgagattttgatttattagcagcaaggaccagtagcttcacaaaaatttttgaaagctgattgaataagctgaaccgatttttcatttcccttgcgaaaaatcactaaatcatcttaaacaaaaaattagtgagtttcaaggtcttacatattgggtgaaagccaaaacctttggtctaagaagcttggtgcagaagtctagtcaagtaatccataatcaacacaaataaaagtggagacactgaaactccttggaagacttttctctcccttaaaggagtcttgtaaacgaccattaatcataagagtataagaagtttctctcaaacaaactagcaccaaattgatgaaacaagataaaaagcagaggccctttaggagataaaaaataaattgccagtctactatgtcgtatgctttattgaagtcaatcttcattatgcacctagccgagatatttttttcgagtgtaacctttaagtaaatattgaaaaattaagaatagtatgagccaacaatctattcttgatgaaagcaccttggttgctatgaatcaagataggtaagacttcagacagttttgaacaaattatttttaaaatgcatttataaagcatattgcaacaagcaatcggtcgataattagcaacaaaatttagattgtcacatttgggaataagaaaaatggtcattttatcagctttagaaaatggacggataagattaacatgctgctataaattcaatttagcaccaaattcaagtatggggagatcgataccttgagtagcaatacttttttttttcccatgaaattacgaaagtggttgagaaaatgatccacgactttattatagtcatctacaacctgatttccattaagtacaaaagagattataggattttctctttttccttttcttcaaagtggcatggaaaatttgtgagctttattggtttgttacaggtagcttgagaatctctgtttggcaaggtaaacctcttatgcttagtttcttagcttggacaagtcattacaagggtcattcgcaagatctctctgagcaatagcaaaactttccttggcagcatagtactttgcagaaatatcacccatttccttcctgttaagtcttttcaatatatgttttagtctgaaaagtttgttgaatatcccccacgagccacagacctttttgattaactggtttagacaagtttttgaaaactagctctttgtattggttgtgcaacatctagtgattgaagaaacgaaaagactttgtaccaaatttgccaatatcatgttgcttgataaggtagaagttatgatcatagcatcccaattaaaaattactttaattgagaaaattatccatccaaatcttattagtaaataccctatcaagtttggagtaaatgcagtttcccttctcatgtttattagtccatgtgaacttagaatccaagtatctgcactcatccactcatccacttgaggctagccaatttggagcatcaacaatcttgctagcagtgatttgtctaccccacatctaccttggtagtgaaacatgatattgaagtcctcaagaattaatcaagggaggttcaagtgaccaagactagcgagatcattccagtgtgatgattattaataaaacatgtgaagaataatataaaatgaatataaaaaataaaaatattaataataagaatttaattaattaatgtgttgtttaattaattgaaataattttcaataaattatgatataattaataattttgtcaaaaatgtctatttcaattttcgctcaaggtttttttaagcttcgcctaagatcttgctgaagcttgagattaccctgtatacaaactctctataactatgataaaagcctttaagaatacaaagccgctagagagttggggaaattgtataagcgggcctgtttagcaagtacaacttgattataaaggtgaagaccacgtatgaaactcatacctccttcatttttatggttacaaagatagggacacgattttgtcccgtgatgtactttcacggaatgtatttcgtggtacattagatgggtctcagggtacattagatgagtgtcagggtacattactattttttaaccctaagtacccctagatcaatctcagttg

SEQ ID NO: 383019 - DNA, 3959 bp, Cannabis indica
aatttttgttgtcacaataatatcatagaagcttaatataatagttttagtcaaaaattaatataagttatactcatattttgagcagtaatatgacgttgacacgtgtaacatagttagaatacaaaccaactcaaattatacatcaaataaatacatgcaaatgactcgcctcgagaaatagagttgatagaaatactcaaactcgccatcatgtaggcaatgtcgaggcacgagtcatacctaccgactaatgagaccagtgagatgaataagtcaatctcgagataaacagaatatattatagaattatttggaattggtagacaatgagttttgtagctcgtttacccacatacctgtgagtatgtcaaaagagtaaagacaactactttaacatgattcatctcgcatttgtcacaatgtaataagaatctcgcatatacctcactcaatattaatggaagaatacgcgatgtattgcaaccataaactttgacattattccacggagatgtttaagaaaagtgttagtttgaatggcgagaacaacaaagcacagtcaacataaccgtctatacataaggacaaagagtagtaatgcagttatttataattatatcatgtacataaatatgaaacttgggcaatgctcacgtttcatgaacggtcacaaatgattagatcttaagggaatatttatcatcttagactcctataaataaggataaaacccagagaacaagggaccaccaacctttaggaaaatagagaatattgtatttattgttcatttatgaaaaacaataattgtattttgtatacaatttatcaatccaaaataaaatatacacgtggagtggactatgaagatttaattttaaaactacgtgaaaattcttcttgtaatttattgctattattattatgtaattaattctaaagatcatttattacagaaaaggctaatttatttgttaacaaaaatttgcattaatagtttttttcattgagagccttgtaataaaaagaaactcagaaaaaacaccctctttgaaaacaagttcgaatcattcacttatggaagacgataccccgcgaaatgaagaggatcaaccaggagaggagcatcagacttcacacagggcaaataccgttgaaacccaacatcctggaaaggagcatcaagtgccatcatgcacatgtttgctacttcatttttctcctcattttcagagtcctgctcatcactattgagccaatcttccaacattgccctacctttgtatttgttcttctttcccattggacaatctattttcatgtgatcaggcttcttgcattcaaagcaaactggtgaatcatctttacttttcttttttttttgagcgcttcaagcctccattggacccttacacccacggactaatggctcttatacacgggttcgccactctggctgcttcctggatttcatgtctcagcatgctcaaggtcacaccatctcgacatcccttagttcatttcatgtctcagcatgctcaaggtcacaccatctcggcatgaaatgaaagatggtgtgaccttgagcatgctgacaattaaagatagtactttctcaaaccttctaatagtactttctctaaaaagatagtacaaaccatgtttgtgttctccctttatgataattaaagatcctttaaaaccttgagacaattctcataaattttgactgtacaacctttagcagcaagagaactagtagaaattaaatttctatttaggttaggatcataattgacatttgttaatgttctttgaatattttcatgcatcttcatgatgacagtaccaataccctttaccaaacaggccttgttgtctccaagaagtacatttccaccaatcttttattcaagagaaatgaataaagttttgttctgacacatatgaaaggtgcatccagagtccaagatccaattttttcttaattttgtgtctgcagtaataagcacatctacagaatcataaccatcaacagttacactagcttcaatcttgttacctttaaaattctcgtcttttctcttgtccctattattcttggtcctcaaagggtagcattcatccttgagatatccttccttcttgcagtaattctagaactttccagccttgaatttaaatttttattgactagaaccattgcccttgttgcagtgattcctttattaaagtccacttgtgttgttgctgttatgtcttttttttttttattagatctagcttgagtcattaagccttcaccatttgaaccattattgtcatcagacttcatctgaatcttcttggaattcagtgcagctttaacctcaaacattattaaagtctcctttccatacaacatagtgtcaacaaaatgctcataagacctcggcagtgaactcaataggacaattccttgatcctcatcttcaatctggacaccaacattgttgagttcaagaatggtcttgttaaactcatcaaggtgttttttgagttcaccagattcatccattctcaaggtgtacaaccttttctatagacacaacttgttagccaaagtatttttcaaatatattaagggcagtttgttccacaatccaattgcaatggtctcacaagaaacctcttgaataagttcttctctaagactcaagaggatggtgatgtgagccttcttctaaatttccttaacattcttcttatcctccttgatatcttcaagaccttctggttcagtggcttctgatatgccccggtaccacaacagagcacacattttgagccttcatagactgaagtcattctccctagtaaacttgtcaattttgaactttgttgaactcatcttgatcgagtcttgatcaccaaaacaccaaatcttgatccatgaatcccaatgctctaatgccacttttgatgttttaataacctcaaaaaaaaatcaagagcaaatatgacaattagtgcaataacatgaactaactaatcaagagaatgaaaaacataaaatacaaaacaaaaatcaaatcacaccaatttaacaagtttcgttcagttgcttggtttcacgggctgactatttggacactcccaagtaagcagattgtgcggcacttgctggcacaccgagctagcaagtcagcctaaatgcgcctgcaggaaaataagctcaatggttaggcacgatacatgtctcacacatgttaagtgaaaacaagaagcatgagcaagaaaacataaatcgtccccaagggccaatctcacacaacccacaagtaagcatatagataaatggcacgtaatggcccaacaaaggcaatagacaatcatcacataggcaacatagaagcatacagaagaagcttagataaacatcgttttattattatatggccttgatagggcaagggagtaaacagttgggcctctatcatgctggtgacaaggtgcttcataagtcaccaggtcacccccctaaagagcttaatggggttttaagagatttctaggaacatatattattatggctctctttacatatgtgaatggaattacaaaaagaaagctaaccaccaaaattctccccaccccaatgaggtgcttggtgtaagacttgactaatgatcgagcaccaatgcatgttcatgttacaaaatggccctttgtgggtatgccatgggacagcacgccacattctcccccatttaattgtttggtgtccttgacgaacctgctgcatggtcttcagtcttttgcaaaaattgctgcaagtcctccgccttctcccagctaatctcgtcatcagcgaggcccttccatttgaccaggtactcttttctcttctttctctttacacgaacagttctttcaacaaggatttcttctggttctctactgctgcgtcgttgaat

SEQ ID NO: 383020 - DNA, 1455 bp, Cannabis indica
gaaaaaaaaaaaaaaaaaaaaaaaaaccttaaacaaaaaaaaaaactttacaaaacttaaaagaaataaatatattatcttaaatattaaaatcaaagtttaactacgtactaaattattttaatttcttgtagcaactaaaacaaacaaatagaagcttaccaatgaacaaaataaaaagaaataaaaatacaaaagggataggaaaaaaaaaaataaaaaaaaaaaaaaaaaaaaaaaaaaataaaaaagaacacaatctaagaaaaactaaactagaaagttaaattttaggaaacaaaattccaatctcttagccaatagtgaatagggtcaatttgaacttaaccaaatcccataatccaataaagaagagagaaaaaaaaaaacacataaaccatagtaacaatcaaaaatctaattataattttttttaaaaaaaaaacagaacttacttgtaaaatcttgttgctcaatcactatgataagagaacatggatggagttcttttttttttctagtatagaatttgggaagaagaattagatgagaaaggctagatttatctataatacttcacaaaatttaaaaaggttgtgttaaagttaaatatatgtatggaagtaagagatttgtatcttaatttcccttataaagtttcattctaattattagtatgtaatttattgatacttttattttctatctgtatttgttgatttggccaaatcccacagatttcattcttttcttcttcttctatatatgtttataagttataataataaacttctttaattttgaaatataaacatagattataatagatacacaaaaattttatacataatttataatttgagatgcagtttttttgaaaaaaaattatataaaataatgttgtaaattatataggacagggtgcaaatttataatgaatatacctgtaaattaaattgtgcaaatcatgtaatttattttccaaaatactgaaaacccagttctcatcattctatataaggtgtgaataataaatttttgctaatttattctataaaaactagttattaatattaattacacctaattattacacacaaatttatgatggtgcataattttccacattctttcttgatattttcttattttataaatattttttatgtgaataaatctagatctttttatattctgcattcacacacacatcaataggtcacacatcaaattttgattctattctttgtttttcactaatgtagtaaaaaaaaatatcaaataatgattcccatgatttttgttattagcagtaatataaaaatattcattactttatttaaagtcaaattaattagataaatataataaacatactaattacactctattttaaaatacaaaaaatacatttagatataagataaaataattagtaattataaaaaaaaaaaa

SEQ ID NO: 383021 - DNA, 1805 bp, Cannabis indica
attcttagttaattttgtaaaatattaaataggtaaaaattaaagacactataatattagtggtacatagttgtatatcctacctcccaagtgagctgggaattgggatatttttcgaattcctggtcacttgtgaaaatgcagtagaaaattttaaagagcacgattagtaaaatatattttttgagaaattcctctacttttatttaatttgtatttagcccagaggcgtacatgaaaagggaaaactaagaaatacatttaaaggaaaagatagttaaatagacaccccatgtttactgatagtatcgatgcaggtagtccgcattccaagattgtggaatttctaatccgtccaatattttcaagtagtatgttctattagccactttgtgttggtttttgtaggatctttcccagttgggtcctagaacccccactctcagctcaggagaggccgggaacactcttctctaggtggatagccacgtcagaggacagccacatcaccctcaatgggctactaagaggcacctcttggaattcctagctctctggttgtgccccaatgttcatccggaaggttttgcctattccgtcttctacaaggcaaggagccttcccaatttgggtaagtctcttccttggaggtgaggcatctggcttcaaataggcttgagctaatctcctgtctagaccgggccttcttacgtggaagagctaatctctcatcattatgagcctgatttttacaataaagttgcttgtattcctcaacaagaagatggtattgagactatgatatatgctcttgaaaaaattagacctggacaatagtcagtttttccttaatcaacatgctattggttgcaattaggcctacaaaattaaatacaatgctaatgcattaattgaaaggtaaaaagctaacttagttgctaaggaattgactacacaaaaacgtttgctcccgttagaaagttataactcacagtgaaacttgttttagcttttgcaacaatttatggttggcatttgcatcaacatgatgtaaataatgcttttcttgaatggaattacatgaagaggtgtttatgactatacctcaaaggtatagtcctatggggaaattaccttgcaatgttggttgtaagcttaaaaagtccttgtatgacttaaaatgagcatcatgttaatagtttgagaagttttcaaatgctcttgaggaagaagatttcatgcattctgcaacagactatttttttttatcaaacattttaggtcatatttcatatcattgcttatgtatgttaatgatgtgattctagttagcaacaatttgaatgaacttgaattatttaaagttagattagatagtgagtctaaactaaaagatttgggaaagttaaaatatattttttttggcttaaaagtcacaagaactgagcagggtattttaatttctcaaagactctacgctcttcaagtgcttaaaagacttgggctatttgggttgcaatcccataagtactcctatggaagcaaacctaaagcttagtcaacatgcaaaagatgataatttttttgatggaactttgtacaggaaaattgttggaaaatgtcagtatcatactattactagaccttacttaccttattcagtgaacaaactaagtcaatatatggaaacatctagagttacatgttggaattttattttacaaggatcttagatctactcacaagtatgctgtttaaacaccctaaatatgaactttctaaaatgataaattaaacacatataa

SEQ ID NO: 383022 - DNA, 1076 bp, Cannabis indica
aaaatttgttttttaatattaccttttaacttctccatatggttcttttatattttagtgatttgtttaatacgagaatttttatagtgataaactaagaaaaaggttctaagttcagttagattaaaatgaaaaattaaaggcatcatgaacaattttataaatgcaaaataaaatatagatggaacatatatataataaaaagattgaaatattttcaatcattaatttggataatcttaatttgctaacattagacttccaaaagaaaatgaatatgaattagaagagtactcggtcttgggcttccaagctttcattaattttttttagataagagttattaatagtttttgtcgaaatattttagtaattaatttaaaaaattaaatccggtaagtaaactgtgaccataattagaatattgtaaattaattatatgttataaatcaaatcataaatttattaccttatataaaataaaatatattctaacaagttgaagacctaacttttatattttcttaaaaataattagagtataatgtacctatactaaccgtacaagacaagataataagagaataatcaattgaaataaagaaataaaaagttgtaattagaaaatgatttaagtttagagttagcatatgatgagtttaggcattattgagtgttggaacaaaacatgtggcttttaagcatattcggagttgtaaagcacaaaattatatgaatattcttattcttttatgtgatccgactgcacctctaatttttgagtcattccaacttcttttctcattttatattgaccataatacccccaatccttcttatccttttcacaaacaaaataaacttttgaattatgagattcatttaggatatttaaaatgggattatttacacaaaaacataaaaacaacataaaaattacaaaaatacggtttcacggaattttaaatttttttatgatttttttgattttatttacagaaaatacggttttttaatattgtaatcttgttaatttgttgttaattttttgttatctgtatgttaattttttgttg

SEQ ID NO: 383023 - DNA, 3508 bp, Cannabis indica
ccggaaaagctttctaggtttggattcttggtccacagtactgataaccagggacggtgatccgaattgcaagtgtggcatgaatgaacaaccgccttcggaaaaaggcccagcgactgagcgttgggtaaagccttgtcgagggccggatttgacatgagcctcaccatcacgatggttatcccaggtgagaaaatcacctttaacaggtaaatcaattaatcccgaactattgaccaaatcagaaatgacaggcaaaaaatagatctctcccccttgatcccatcctttcagagctcttcaatatatagttaacgtccctaaggatcaaccaaggtcccccaaacttgagaccaagatccatcagattcctccagaacaatttcttctcattcaagtaaggcaggccgtaaacacacgacaaaagccagggatgatgcgcagggtttgagtacacaaaacgagagatgttgttcttagaaatgcagacagtttcaaattcaaaacccgccttccaagccaataagaggccacctgcaccaccaatcgcaagaacagtaatattaaagtaaaagtgcaagttttttagagaacgtaccaagtgagcggggtcgcttttcagttcagaaatgaataagaagtcaggcgagcacgatcgaattagggctttaatctccagaactgtagaggtctgcccaaccctctacagttccaagaaatgcctctcatggctcctatggaggaggtggacagccctcctccacaggggaaaaactgttgtaaggagagcccactgccgagcccacatcatcaataataccaagatccttctcagggatagcaatatccgtcaatctagcccttgccttccaagccatgagtctcaaggattgaccggcagagattggtttgtctacctgatgggagtgaccagcagagacggccattggagaactcccatcacccaaagacgactcctcagaatcacgaggcaattttctagatccatccggctcattgcctctgggaccaacaccacgtggaaaatccctaaccacacacttaactcttcctaaattccatttgggcacagtctttaatgagtgagactcaacatctagtctttgcttcttcaccggagtggttctctcattagtttccaaagttggttgaaccccaatgtcacaaagacccgctttacttttaattgggccatgagaagcaaacaccgccagtttcatggagatagccttcttgagcttgaaagaattttgtaagagctcttttttcatcaaggtgctcagagtagtcctgtcccaaaactgaggtactagagacgtttttatcctctctttccttggcaataatagccacaggcgtaattagcaaatcacttttacgaactggcccaacaccaataggccccggcctaccaaccttcctttcaatggtcttaacaccactcccgcaacctatatcataaagcctagaaaataatttgccattagaattaatattggtattaactcccagcccataacttggaccaagtggcccattatttgccaacataggaggcccacaagacttattgaaggaatttaaatggaccgacccctctttcttacatgccacgtggtcaacagtaggggtcaaccgattgaccctattcttttgacacctcaacctatcctcaatattaacctcgtaatcccaaccaaattcaaaatgggctcttttaaaggaaaagtttcaaaaggctttccaatattcagcttaggtgaaagggaatggacacccgaatgaggaacagtcacaatctcatcgccagtcgccttcggacgccacgccgattgtaccagaccttctctctatcccctcaacgaccggtgacacatagatctcgaggctttagcacgggttaacggacccgctcccatggtcagaggaattacacctttcttcagaagtggaatcgcgatttcgcctagcgcacaaccatcgcgccacctccgagctcacgtccaacggaaccaccacttataaccatatccctggtactcttctccttaatcctctcacaagctacaccagtacgattaacagagaagcaaaaatcatatttagagaggggggtgagccatggtccgaaaagtgggaaaggaactcccttctcatttagaaccgttacaggagaaagcagcatccaatctctacgttggtgacctagcaatccacatttgaagcaaaaaacttctagcttctcatattttaattgaatgcacttattgtctccatttatgctcttgaagaagcaatcgcaacaaagaggtctgttgacgtccacttctaccaaaacccgaatccacttattccaggtaactggtttggattcctcaagttcaatcgtcaccactttacccgccaatgcccccagcatgttggcattagttctcgagtagtagtcatggggcagaagatgaatttggatccaaaatcggatcgagttgaacgaaagtgcacaggcaccaaaaccagaggaccacgacaggagtgccaacatatcacctttgacacaccacgggccttgctcaaggatccttttgcaaaccgcaccagtgtcgaagatgaactgaaagatgttggcaccagcaagaacaccatcagtagtctccacacaaacccgagtattccataagctggagcaagcaattttaacatccttagcaggaaaagttcttgatgaaataattttgccataaaggcaaagcttggagaggatttttgtagttactacactaggtaccagagcaatggacacctcatttaaagaaaggcatctcccattaataccactagaagactcaccaacctcgtccattgacataaatacaaccaagaaacaggacaaaacaataaacaataaccactgaagacacacccacagggaccacacactagcctacccacccacaaagcaataaacactgaaatccaaaaagcaaaaacaaagaataaccacccaacacaaagacacaagaacctcacagaagacaaaaaatgagtgcagtaaagataagaaaaaaagaggacccaagatcccagaacacccacccacaactaaccagcaaaaggcaaatagaaaaagagatacaaaggtcaaaaggaagaagaaaccagcaagggggtcaactacagcaagaaaagaagaagaaaggggacgaccagagagaatagtagaagactcattctctctcttccttctccacacgattttccgttagtgctgattacttagaaaaaaaaaatcaaaatatcaaaaaatatcaatgtaacaaaaatacgaataaacaattcttaatactgtattatattagaattatttttgagtacatataatatttatacatgtgctataatttgaaatgaaattattaattctacataattaaagttataaaatatatgtatatatttttttaagatgtaattattcttatatagaggt

SEQ ID NO: 383024 - DNA, 2191 bp, Cannabis indica
aaataaaatttttattggatttatttaaatataacgtataaattaaattttgatataaaattataatgtaaccttttggaaagcctaaaaaggattaatctaatttagtcttttctctcaaacactctaaaattattcttgctcatgtgttgagaatctaataatagctttatatacattttattctactagcccacactagtcaatgtgtgtggtgaaagatctggaagattaaggtgtgagtttgatgtcgccgttccaaggatacaacatacgaaaagactcaaggataccctaataggcttcgagaggtaatttatcttttcatctattttactcttagatttaatatatatatacatatagtgattctgaggatgtggcacaatgataatcataaacttttatttcgctgcatacttgatttggtaccactaaaaccaatagatagctccctgtagtctgggaatgatcacttgtccctgaactactctttgtcccgaaaagatgattgggacccttacccactcatgaaggtgactgacttgatcaaactctccatttcatctctcaagtagtcgcattcgttagtggtgtgtcccacattgccatggtattcaccccttttactctgatcttgcctaatttttacccccttgaatattgaaggtggcttcatgtaataaacagtattgcatgtggatctgtagatattctcatgagtatttacgagattggtgtactccgtatattggggctcataccatttcttttctttctttggaggctcattatagatttgagtcttgcttcttctcttgctccaaaattgacttactcccgattccaaaacttccatttgttaacttgcttgcatttctctaggagtgaaactgcatctggtttgtgccacttcatatttgagaaaagcggtctatgaaggcgcctaccctgaggttgtaggtccatagaccgtaggcattgtatattgagttttgggaggaattataactagattcagaagttgagtgacatatcccgaagtaccaacactccctaatggtgtcagagctactcaaaatactttagtgtaagcatctttcaagttgataaatccttgggccctcaacaagaagttggatagggtgtcgatcctttttctttttgtatatctccccaacgaagggatccaggtgataaccttgcctgtagggccactaatttttggtcgtcattgacctttgtccttgctgcctccatcatccgatgaatgtaggctttaggctttcattcaattattgcttgacgttggccaaggagctaacttcgatgtcaaaatcttaagcatccacaaactgcttcttaaacatggactgtaggtcacgccagttccacactgatctggagggtaacctcttccactaatcttcaatagatttggctaaagtgaaggagaaacacaaacacttcatgacatcactaacatgtgccacttgcattagcttgttatactaggatagatgaaccctagggtccgtcctaccctcgtacatgtccataagaggcatctggaagcgttccaatataggtgtttccagaatcctcctaacacacggctccaggtcttcatcttccgagttagacacgactccactttttttgcagactagttgctctatgatcttggttaaggctgctatttgatcttccagccttttggcattatcatccgagagctcgcgcccacgagttcagtcattaatgttatttctaagatctcctccttaaggccttgctctttctcatcttactttctcccgcttaacatttaaacagtccctgaggtccgtcgttgacatgttgtcatcggggtctaagtctttccacgttaacactttggctaacaaaaatgttgggttaatttttcctttgtcgaatggtaggtctcggtgcctgagcatgtggcttatcatcctacacgacctttctctacggatcgattgggcgacctaaccctagagtttagttaaccctttctttccagaagagtcgatcagtcacgtttctattgtccctgggagcttcatcttgttggaattattttaccaggatctagatttactaccaagtatgtttgattaacatcctaatatgaattctaaaacaataaaaataaacacataagagttta

SEQ ID NO: 383025 - DNA, 2202 bp, Cannabis indica
aaaacaaacaaacagtaacaaaaaaaaaattaagggtgtctcccaacagctttgccacatagaagaacattagaaggaatatcatattcattggcaagactatgaactgagttccaaaccctcatatatagttgttgtcccaaatactgtctttcccaaattgcagacctcagattccacatgccttggttgtctagtgacactaatattgaagtccatgactttggatacaccttcacaaaaccaaaacatatcacaattagaaaaatctcgattaaaaagagaaatggtattttataaaagagaagtatgagagttgatgtaagttacttgagcagtatgtcttgtaagagcatccacaaggttgtaggtgtttctctttgcttcagtccattgtccagagccataactgtttgttgtcaaagagaaagaattatgatcaataccaactattcttataagaattgaagctaaaacacaaatgggatttgcatttgattgattgattgattgcttccttacttacccaacaacccagaaatcataaccatcaagatgccaagactgcatagtgttctcattgttctggaaaacaatttcaatgaaatcatgtagcgaaagcggtacgacagatgaagctactgttgcaggaccctcggaggggagtatttggatcgaatcaacactaaagactcctggaatgttgaagtgatcagcaagctttagaggggtgtcagggttgacataagacaccctattgactgcaaatctttgctttccattaaccaaaggagctgagttttccaatacaattgtctttgttattggtactcttccataatggtatgatccctgaggatttggccttgcagcatttgctgtcaaattccaccttcaagaaacagatcaactattagattacattacatgataaacaataagctagcccaacaagagagcaatgtgtggactcatttggattgtgtgttattgatatgtgtatacctataggttctggcttgcaacatagaccagtgaatttggtaagtaggaccagcaggcaagggtccagaaactggggtatgcgagtttgagtaatgcagcactgaagaggatgtaagaacagtcttggtaaaccttgtggaagcaacaatgtagtaatcctttggagcctggtttaaggttactaagactgctactgattggccaacatgtacatcaagagagtcgtattcattctgcatagtatgcgatccttcaacttcaattagcttcatcttatgtccttgaattctaaagttgaatgaggtagacaatcccacatttgagaccctgaacttgtatgtttttcctgaaaaaagaaccaaaggaaaacaatggtgaatactaattcttctttcttatctaattcttttgagcaacaaatgaaacttgtaatattacgtacatatataaatatatatacatatataaatataccttgatcaccagtgaaggtagttgtaggctgaccatttatgaggataccatcaggaaagggaagagtttttcctgagtccaaagatgcttgtaatgcctgcatataatatcaattacaacacaatgatgtattgtttgtgaacacagaacttaaaaatgcaatctttttttaagtgatgatgagtctagacaattgaaattcctaccttgtggttagtcttgtaccaatcaccaataagcaaagtgaaatcaccatctgggtaaggataagggattggaatcctaggtctttggtatatgttcaaagctccaaaccctccagcagctttgtgaaattgaagtgatgggaaatatgtgaaggaacctatttgatctttagattgaaacttataggtaaagtttgtgtttggtggaatggggcagttggttccaaaaaccccatcttgccatgagttcttcctctgtttaacaccattccttaaaaccataacaaatcaaatatgaatactacattagacatcaaagcttcagcataatcatcagctacacaccaaacatcttatgaggcaaaccatagcagcatttgagtgtaaaaatccataatcccaaaaaacaatggcagtaaaaaggactaaaatcatttgcagatctaatgtgggacaattacaagagagagagagagagagagagagagagaagagagagagagagtagagactcaca

SEQ ID NO: 383026 - DNA, 1944 bp, Cannabis indica
ttagacaggaccctccccgttatctattgaaaatcctcacttgttgcataggaataccttgattacaaaattgcccaaaaacaaattaggccaaaaacaacaaaactactgctaatacatcaatgattttcattctctacataaatctaaaaatgacaagacctcaaaaaatctggtcttaaatacccaggtagctgcccagaacttgactttctcccacacatccgcttctgaacttgtattaccttcaaaaattctagcgtttctttctaaccacacaacccaaattattgataagatcttcgttctccataactttgttctacgtttactgctaattaatttgccaattggcatttgtggtaccgagcttggcataacccacttcaactcaaattcctttgtcaacttggtccataatcgtctaacaaaattacattccaagaacagatgcaccattcgggggacatacacaggttgggctttacaacagacgcaccatccagggtacatacataggtaaggctttctcttttgcatcttatcatagacgttcactttgtctaaagacacaagccagcataacattttaacttttgaaagtgcacaacttgtccataagattctcgtctagcacaaaccagctgacccaaatttgaagtaaactagttaaaggctgattttcaagagaaaacccctgaaagatctggcttccaaatacgactatcatacgaaatatttaccactctaacatgtttcaccttttgcaataacaaaataagacttggacccttacgctccagtagattccttctgaacttgacgtcccagctctctacccagccacctggcaacccttcatcaataatcagtttctttatagacagtttctttatagacgcattcctacctgtagatttattgctaagtcaaggaaagcctttatcagagaagaatctccaagccatacatcttcccaaaattgaaacctgtctcctctttcaattttgatgtgtacagtccaagatattcatcatacatatatgaaatatccctccatggacctttaagagacaatcgacatccttttatgccacagcgaatttggttctagaggaaatatccacaatcatttcattagcatacttttgtttctcatttccaacctcccaatgcccaagccactctcatcccgaggtctacggacctcctcccaagccaccaagtgatctccacccgcaaaatccgcaccctcccagaaaaatctctcatcaatttctccatagcattggtgactacctttggagctttgaacatggaaaagtaataaatggaaaaggatgaggattgagtgaatgattgtggagagatttgaaggagccacgtgtgcaatctcatttattgccaagtaataaatggaaaaggatgaggactgatacttctaggtagggacactagaagtatcagtcctcatccttttccatttgattgttactgaaaatcgacttactccacaacttaatattttcttttaccatcttaaatttactcataaacttggtccccgaccatcctgaatccactgcatctttccaccatacctcaaaaaaattggggaaagagttgtgatccaaccattggttacgaaaccggaacagagcagggcccatttagggggttaggaattaaggactattgggttgtgattagagactagtctcaccaacattttttgtatgagagaatatgatattccatttattactgattaagaactgatccagtatgctacagatgggtaccgatctttaattcgaccaagtgaaccttctgttgttgagttttggatccattagcctcaactcccgaactaaatcatcaaacattttcatacttttagtacaagaattaccatttaatttttcttcaactcttcttaccaca

SEQ ID NO: 383027 - DNA, 2453 bp, Cannabis indica
aggtggaattcgcatagtagccccgtacgtatcgagatcaacaagtgaagatggatttgtagagcttgatagcttaggtggatcaacaaatccaccacggtcaattactttcctcccaatcatgcgaattggtgttgttcttcgccgtgatgggtattctggtatatccacaccagcttggatgcatagctccacaatggctggaatcctgtcaaactgaaatcgattttcatgcttaatgcgccgaccaaaagggtcgtagagatgatatgactctatgggaataagaatgtcattgacggatcccttgatccatgagtggaagcttcggcgttttgcactggttggaccaaggcagttctggatgtggtgaccactctcagcgacatgaacctcggagcactcactgcaaataactaaagcaattagatactctattatataaataagctttaatctaaaagttatatggggtgatactgaaggatgattacctgcaagcatacacaggaattacatgccaaagttgtgcaacacctttaattaaaagcttccaggcatctagtaatgcataagcatcaggtataagatcaggaacaagcagtccattctttggaggttcgaggggattctcaattcccttatctgctagctttttgttttgcctagcagcttgcttgatcttctttaaaggaatagggtatggtttcttctttttcttggttagtatttcaggaagatctacattttggggatgtgactcttgtcttctgaaaggagatttcggtgttgggttgtaactcgcacatattctagttgtcaatttggttgttctacgtttatgaagctgatgttctacctcaaactgcaaatagaaacgtatgtataaggttgaagaacaaatgatttttgacgttgacaaagaagaacatggaactcaaatttttagtcgctataaattccggtgttaaattggctcgtatagcacaagcttctggaaaaattttagtctctgtgaaatgatatttgaaaacaaataaacagatgatatagctagtttgattaatttctattagcaatgctagaaaaggaaaaaggaacacatataaacatataattttcacttatcctatagctgaaaacaacaatctttgggatgaagatagtcccagaagaatcaaatctttaaccttatggtgattatgaactataggcctgagatctgacccctgtagtaactacctctcatggctaagaaaataaaagagaagatatgtgagagtatataaaaccttgaatccgagtctatatggccttaaggctgataaatgaggcctggtgaactcagttataatcgggaaaatgcctgccaaatgaataaattgtgatgtgagggaagcatattaccaaaaacaatctgtacataaccattctgaaacacccaaaacagaaaaaataagtcaccattttgagatgaatcccgtaaagcagaggatactgctggaggcttctggaacatttattcaccactatctctctcgtttactgtcccttgtatgaaattcaggaaaagaagaagaaataaagacaacatatagcataattcttcataaagtataatacttgaataagaagattaaaacattgacaaagaatataaaggaaaaaaaaaaatcacaacatatctgtttaaccaggaatgaaggttcctaccctagcaaacactgaagacagtaactaacttctataaaagcccagaaagaaaaaccaactttcactttcaccccactgagtcatttcatcatacatattacaagcagaatggaaaagtcaccaacaaaatcaatccagtaaaataatttaatttatgtatacgctcacaaaataaaatctcaaatacccagattaaaaaatacaaataaaatgaatggaatggaacggaatatacatacgaaatgataaggttcagttcaacctcaaaccaaagagttagaaacttgaaactccatagagcatatagcaggagctgcgtacctgtgtggcgttactgataatgaattgaagttgtggtagagacgaagtagaagcaactctttcttcagactccggtcaagtcaggtgctcggttgaacactgtcacactgggggttcaaaataacagaagagaagagagaagtattttcaaattaaattactttttataattttgatttaattcctaaaaagattttttgaaacaaaagatgggatgggaagcttgaattgaatttgaatgtgtggctggctggtcgtcttctccaaactgccgcaccgtttatcagccagaagagaagagcggtgagtgagttcacttccaaaattgcaatgggccaaaactcttttaacccaagtagagcctaacatttacgggtaagttgaaaaatgtctttttattcatcaattaatcaaattta

SEQ ID NO: 383028 - DNA, 1455 bp, Cannabis indica
ttatttttttattaattttgtacatgtaacattaatctatcatgcaagttgttgatatttatatgatacttttggatttttgaaactctaaatgtacgtttaaagctgtttgagtttcctatatgttttgacttttagatttaaaaaccccttttagaagaagctatgaaagctgaagtagaagcctactgaaacttaacctctaaactaattatgtgaaactaaattttaatttagtgtatacattacaagggctagtggtattggaagtagtactaaaaacaagatcgaacttggaaatactgttacccattagtcagaaataataatgaaaccaggtgtatcttttgtggtggtattattagattttaagtgtcatatttttcattttgatccaaataggaatgcaaaaaagtttccgaatgtattacctgaagtgaaagcatagatgttgcatagtactcaaaagaaaagctaaacaaaagaaaacaatgttaatggaaaatatttgtaatcagttgcatcgccatttgtttagaaatgaatttctttatgttgacgatggaaaaatttgaagcctcattacgtactcaatatttgaaccaccagtaagcaattctgtaaacataaatccaattcgtccactcctttaatgagctgtgatccagcgtgactaggcttctcgccgcccctctttgcgctgatctcaatcttgcatgtgctctaccaccaacgacatctgaaccaaactgttgtggactaaaaacatcaaatgcacattattgttgatgaagagtggcttggagggagttgcttttccacgaatgaaaaacaagttctccaccaccagcaatgcggccacaacttcaccttcttcactgaggatggcatccgtttccttgcggaaatggtcaatggcaagaaatcgtcgatttggcgcgtccaatttgaaggaaccgcgagtcttctttgctcctgattctcagtgatgcgatttctctgaaggatccatgggacaagtcaagactgaagaatggaacgagcgcgatctacatggatcgaaactgatgggagctttgttgccattcaacacgttgtcgagaggacatttgcgaattcttgttgcacaacaggatgatcgtagagttgaacaccatcagaagtgagttgcgcatgagcaaattgacccaatctttctttcgtaaacgtgagataatgttcaatcagagaagtgaatgataggaatttcctatcatttaagtataaatattggcaaaagaagggaaaatagagccacacagtaggaaaatggaaagtaatagctatatattgatagtggaaaagcaaatgaacaagttgttgggtaatcaagagagcgagcactcggtgtgcagaaagtcatccaattcaattacaaccgaccgatctaatcccaactgatccaatagaatcgga

SEQ ID NO: 383029 - DNA, 1707 bp, Cannabis indica
gaatgttttgcttgacaaaaagtctagtctttaaaatggagatgtttctcaacaatagttatatattttgctctagttaacttaattaattaatgtgtttaataaaataagaaagcatatcattagcttgaacattttgtacaattattaagttgggtaaagttttaatttagctttcaaagttatgaaaccaagtaattaataaaaatctcccatatggcaatcaatatgcaaaacatcattgtctcttgttatataattgttgtagggaagaattaagatttataaatgtcaactacattatattatatatagacacgtcacacatatatatatacacatatatattctcacctgatttttgggtgtgtaataatgatatgatgttgtgtgagtcaaatatattgtatgtataggtagggagatcatatcagtaacaaatataaatgtgttatatatatcactatattatgattcaaaattagccaactcatcacattatacttataaagcattgcaacgtgtacttattttgcatcatcaaactatattttctctctcctgacttttattcattcatttaaatttatatatatataaatgtgtaaggtagctacattaagttatgccagttgtatgtacaagtcttcttcatatatatatatgactttaattatatatatgtagctaagtattaatgttcaaaattgacaattaatgagttgtactaataataagctcatcaagtttatatatatatatatatgatgatcatggcgataatgatgatgatattagagagagttgagttgactataataatatatttgttgaattttgatgtatgtctatatattctttacaaaaaaaaaactaattatatatgattgatgaaatggatttcgatttattaggtttggggttgaaaaacttactgacatatatagtttcaattccaacaaagatatttatgtgaacctccaagtttttaaccaaaaagccttaattataagttttggcaaatagtatataaatttaatatgtatttttaacttgtataaatatttaatatttataaaattatatttacgatcattatattttatttttgtctttaataaaacccatataaaatttaaattctatagcattggattcaaatagaaacataaattacttttaaatgttcttttaatatatttaaagcacactctgtactaataaaattaaaaaaaaaacaattttataaatattcagtatttatattattaaaaataaattttaaatttgtccgcttacaatcttaaaattttaaagaataattagcattttactcctaaactttcgacactacctgattttggcccctaaaatatactgtttgataaaaattctttctaaaatataatagttacaaaattatgtcccttctgttcggttccgtttattttaccgttaagattaacatttttatcccctgaactttgactaatacaaaattttgcccattttttctaaaaaaattaatttttaaaattataatattttattttttaaagcaattatagtattctattaattctgaaaaaaagaataaaaattattaaaaaacatgagaaaaatattaaattaaataaaaaaatattaattttattttaaaaaaattaatttattcctaaaaaactattttcaaactttatttaattt

SEQ ID NO: 383030 - DNA, 1890 bp, Cannabis indica
ccaatctacctacatatgtatatatagcatatatgtggaaattataaatgaatatatattggtgtacaaaaatgtacaaaagaatgatttatatataacatacacagggtaaaaaaatataatagcataatataccattataatatgcatgctaaataatttttctttttaattaatatcctgtttgaatgaggccaccttttattttcttttacaaattattcgaaagggcaggctagctgttatacggactgattccctctctttccagcggagaaagtttcattgcatttttatggatcccgttaaaaaacacacaacaatatatatatatgtatgtcacataaatattattacacttttaataaactcagactaatatatgaataatttgtaggtgtgaaatctgtagaggtgaacagaaaacaaagcaaagtaagtgttaatgggtatgtggagccaataaaagtgctgaaaaggataaagagaacgggaaaggcagcagaattttggccttacattccacagcatctagtccattacccttacatatcaggcgtctatgacaaaagggctcccgccggccacgtcagaaattccgtccaagcttttccggcatctaatgcggccgaggacaatatggtctcccttttcagcgatgacaatgttaatgcttgttccataatgtgaagttcatcaatatcctttttatatatatatatatatgttatgttcacaaattatattttgttatttatgcatgtggaatatgagtattaaggtagattttccctcaattcattagggtatccctccattggatcccaaataccatttttattgtgatgaccagagatgacatcgatcgatgattatatattatattgtatagtcagtcagttatataaatatatatgtatcatgtccttgttttatttctgaacacgatcacttcgatgcatgcatcgaattttaacattaattaatttttaattgtttacgtgttaattaaaaattaattgtagattatatacatcgttttgcattttgaagctagcagggaaagaactcaacaagaatatatatatatatatatatatatatatatataaatgggtcggtgaaaaagtagtccaactggagacgatatttatatatttattatatgtataatatgatctttaaaatcagacccaagaacgaatgagattcttgtaacacacaataaacggatgaaattatatataacaaaaattcttaattaaatggcgttggacttaattaataaatttctactattacaaaaataaatataattactagacgtagttaaatatatctacacttttgcttgcatcagtaaatatatatatatatatatatatatatacgaaaaaaaaaattgggtaaagtcagaatatgaagaaaagagataattgaataagctcagctcaatgatttagtcttagaggctggccatattatatttataatgaattgattggttacaaagaaatgacgttgagagcaaatatatataacaaaactatgcaactaattaagtggtgcgggaaaaaaagtaagttattatatttcttaagtggtgttttttaaagcttaaaagtcttgtctattgacatgttaaaaagttgagtcttgttttctgggaagtctgtttggttgtgagattctgttttgtattatggcgtcagggagtcgatcggatgtggctttggaagatcaatatgatcagttgaatttagaagaagatgaggaggggattctgataacaggggatgatgaggaagaggagatactctttgatgatagatggtgcttggtgggtaagtttttaacgggacgaacaatggactttgatgctatgagaca

SEQ ID NO: 383031 - DNA, 2952 bp, Cannabis indica
gctgcctcaaggttttctttgtcaaactggcagcacaataactaagatacgcctctttggtatcaccgaggtaatcaaagattccttttgggttagccttttgcaattcatagaaaagttctagggcagcagagtccaaactctcgacctccttcagaagctcttcctccctcatctaattggatttgacatccttttcaaatttcgtcttatccgtggttaaggttgcaagaagagtctggagactctccttgtcatcctccaggctattgacctctttggacagatctcgacatctgcctgaagatgggcggtagatggcatctcctgaatctctttcttcagctcctcgattcgattattggtagctagatgttggttattcacctcacccagctctgcccttacgaccacgaccttcttctttactgcatccacctccttctatagattggtggaggtggtgatagttttcagggtagtagacttggctcgggagtaggtgtaggccatctacaaattgagctccataggaaaaggataaaacttccacggttaaaaggacaaaataaaaaccaaagtactggggtcgctccttcaggagcccgcccatcagaagatccatggacatcttgtccccaccgaatagttggtcatttacctcaggaagtatctaatcctggtagtgttgaagcatctccttgcccttcttatttgtaacgtttcgcacgataagagtgtttgagggcctaggcagaccagacctatctgtgctacctcccttggcaccttttgacttggaggtcttctcgggtggtggatccaccttggacaccacctcctcagagatgtcaataggagactcgactgagttcctcttcttcagcggtatctcatcagcctttgatcgtttgggcagaggggtccggccggagctgtcacctgacctcttcttcaaagcctggaacaccttctgagacatagctgcatatgaacaaacgagaaggttaaaaacaagtatgacataagacaaagtagaaaaaaaactaaatataagttaaaataccctacacatatgcaggagcattctcccgaacaagtaaagatggaggctcatcatctaaggaatcttttggctcctactctgtcaggacgacttttccctttcctactgctggggaagattgctaagcaggtcttttaggctcttccctaattctaatcgactgctcagcaggtacctggcttcttggagaggccttcttcctcatttttctcaaagtctcctattcgggtgcagtctcttgttcgtgtccaacctctcttaccttcttcacagccttcggtataaaattaggcggaaaaaaattgtacttgatgaaattggcctcagaagtcaagagagagatgtttcgtgcaacaaaacgcagttcagaatcttttgtgccctcttcctgagctctagtgtgaacggagggcggcagtaggactgcacctgttagaagctgctgtgaacggtgcccattcatttgacaaagtagtattcatcttgaaagccccctatcttggtcaactcggtggtcgtggtgcctgttagccatttctttttgatctaggaaaaatagaagtatcctgacttgttctgtttgggacttgactttagatcaaagagccaattggtgtcatgcggggactgcttgccccatccttgtgtagaatatagaacacatagggcggaaaaatacttgaaccgttgggggagaactgggtcgggcttatatggcaatagcccgcaatcctcttcaattattggagctagggcaacatcgtaccctgcttggtatggactcccgactaggtatagtaaccttctcttgggctagtcgccacctgattgggggagggagagaagcattcgaaactccctaggtaaccatggcaaggaaaattcttcatctttgccctggtcaccacggatgatggagagacccactgatcagctagtgcactttgtctactcaagggaatagcctcagtgtactctttagtaatgtagtcttcaccggccttcagaatctccctagcctcagacacaggttttgctttttcattgagaccatcgaatgatagcacctaagctatttcctcgtccacatctccttcagcctcacgaggagtagcaggacggacctcgccctcgtcctccatcgcttgcacttcaatgtcccagctgtgtcctcctcttgagtactcagtggggcctatttagcctgaggtagggtggtgagacgggcaatgtgtggctgggacaatgaagatttctgcaaagtttgcttggttcaagccatcattctatgcctggacgaaactttgtttgtgtgcctcaggatagtcacgacaaacgtggcaacaagtttacctgcaccagcaggggttgggcggcccttgggcaaagtattagcgatgtctgaacagactatgtatgtcaagtcagatgaaagatagtgtctccaccccttcttgagttcccaattgaagcgaccgtaacattgaccttagatctgcgtgggagaaaaattgtgttgcaccttaggttctggggaaagtgttcgctcactacttacatcccagtcctcaaagctagagttagaaaggttgtcacttgacgacgatggattggcacaaaggcaaggatgatcctcgtacaacagttgaagtagatcatggtcgatatggtgtttgcctcaaaaaaacttaccggggttcttctacaaaaggtaggagagaagaaaatgagaattggtctgaccaacgaataaaaaataggttcattatattgactacgtccgattgagggaacaaaaatagaaatttcactcagaaatggaatttttatcccaaaagttcaaaactttgaattagagtctgattctcactaaacccaaaatggat

SEQ ID NO: 383032 - DNA, 791 bp, Cannabis indica
catgaaggaagttttaataggtcgataaatgtatttgtaaaacaaacttaaagtaagaaaaatcatgattgtgataagttttaaaaatagttaacgacatttttatggatgtgaaagcaaatacaatttattctttctttatcaaagctaaacattatcgaaacacaacatttggaaatttatatacattaaattgtttttgctttgttgaattttcaaactatttatatactattttagagattgaaagggagggaaaaattaaagtaaatcattcaatgtcccagtactattaatattatataaaaaaacaattattatttttcacttttctcttgatttataataataataaatggctgcatgcattatgaatgagctttattcattttttaatacatatatactaaacattaattttcaccaatttgccattattttactccatggtccctaataaagctttacagctaaaattgtgaaaggagagttaagttttacaattcattgcttttgttgtttgatgtttgaaagtacaattaatgcaccctaaccagtaatcaagagttgctttgggctattttgtttgttcaattaaaggtggaattaaagcctagtcaaatgtttaattgtttataaatgcaccatatatataaggtaatactatggtaggatctagcaaaaattctctatcggtaggcagggccgaccctgagcacagggaagctaggcctgtgcctagggcccacctagctcaggggcccaaaaaaatttatccccttttaaaatta

SEQ ID NO: 383033 - DNA, 1593 bp, Cannabis indica
aacgtaagttgtagttcattcccctatacaagactactgaactgcctgatctccatataaccaaacctccagttttagtctgacaatgaacaatggatagcctacataagttactatagactccatttttgtaaaatgcaaaactccattggattcgtaatttgaagtacaaaatgattactatgactttctaagtaacataagaatcaatctacaagaaatatatgccaaaagtaccaaaaggaactaacctctaaaattttatgtgtccttctcatgttactggaaagaggctcttcaaacttcaacttcaccacttcatctaacttccacttttcatgaatggcgtccaccaaagcttgtgttatacctgcagctcccacctttgtcctctccagcattctcaaagaaacgtttctgagcctcttaagttcgtgttcgggaagcattttctccgccattaccgtgctactccttctcctattcaccttgtctccttccctcagttccaataccgaatcatcagaatcataatcagagtcaatcaaattcacattctctccattcccatgaagagttttatcaacatccattgaaaccgtcttttcctcctttgaaattccatcacttgttgcttgaaattctctctgaattatgctactgggtctttcaacaccattattgccgtattgaaattctctttcaaatatgccactgggtttcttaacatcatcatctttaagttcattgaacccttcaccattttccgggatttcagtctcaggcttagcctcgcgtttaaagggtttctttccatgatcccagggagccgaaataacactactcggccgagcaaaatttactgagtcactcaacgatggttgattttccggctcaatttcataggcatcatcagtaaactgctcactcacattctccttatcctcttccttagcttcttcatcttctttttccttctgttcttgccaaggaaatttctgtctcagagacccaggtttcgcagaccatttatactgaattttctctaaaaagcttggcctgggcttcctctttttcctttgcttcgcggtctcaaacgctacttcaactcgttcgggttgttgcaaggtatcaacttggacagcccgctgagcacaacaagttctgaactttaaagctctgtaagcaatggaggtgtgagtttgggaatggagaagtagaagatgcagtgactgagttttaatgaaattgcatgataataatgatgaggacgacgaggaagaaaaagaagttgatggattcagtgaaaacggcgagagcgccatggcaatggtgatagatacctcctttgcctcccttaaagctaacaatcttattgggtcaagcccaataacaaagtcaggcccatattatttgttgtttttagtagatataaaagtttacaatttggaagagaggaaattacacttagtatgggattttaaaagttcttatgataaatatggcacatttaagtttggccaatttatatggtatttttttatttttaggtttttttatggtatttgatatgccatatatatgtaattaggt

SEQ ID NO: 383034 - DNA, 2212 bp, Cannabis indica
ttttcttcttgcgcttccgaattatgaacccatttctgtgtttctgtaaaggaatttcctttaacgaattttgaggcagattttgtcaattgtttttttctttttctttcgatagcccacttggtacttttcgggtaaataaatgatcttcgattaaggtttttttttccttcctatttttagttgttaattacaccccggatcagattaggatgatggaagaatcaattcaaattcgaagagcagccgaaccattggagcttcttaaattggtaagcttttgtccaggattttggggaaatgattgggatagatctgtattttattgagctttttggaatatgtgtactttgagacgttgttgctatttttagttttatctattgactaacacgttgtaatgggcaaaaggtgaagaaacttgaaaaggagctttccagtgaagtgatgattagtgaactcccccaacatttgaagcagagtatagctgacgaggttgttcagagattgaaaacattgggtgccagagcaaatattagtgagcagagaggtaagtgtttttaattttattactttctgtgtaatttttataaatgactttcatatgtctgtttattttcttggtgggtattgtagtgattcctagttttgagtagagttgctaatttttcctgggcaattgttgaatgtagctaactaaatatatggaaggcaagccttttgacaaaggtgtggtgccaaacatagattgtaacaattcctgagtgcagcagaaatttgctatagctagtattattcaactctaccttttataaaattggtagctttaaatttgtgttttgggcttttattgtactttagcaggtgagtaactttgtgaaagtaggtaaatactatagacttaagactctttttccttggtggagttaatatgggcaatcttatttccaatttgatgaaattttagacactttaaaaggattagtaaaactatttattaattttaaactaatacatgatgagatagtttttttcttcttgaaaatatttaggcaacatctacttcagtatagcggctgttggcttgcatcatcttgtcaagtttggctgtctgtgtctaattatctgatatcattgttattttgtttactggactcagtacaaacactacagtggttttctctatcacagttacacaacacaagtgtatcgttgctaccattcattttgttgaggccacttcaaaagtcacttgtgtagcagttctaatctccttgatatttgcttcaccactgttattttgagttgtcataagtaatgctatgaccagtggttctggcactaacacaagatatctagtcttacatcattgcaataattcctgaattcccatcgtattcactggtttcttgggtaccatcaaagttcctttcattttgatacacttgactttaatgtgtttgatggtacctgtttctaaaagttggactagcttctaaattatcttggtggctgggggtatttaaatattattaaattaatgggtgaatattctttgtatagaactttggttgtgattagatagttaatattatcaagtgaggtaggtcaaattttaattttaaagaaatgctgtagtgaaaagcttggctgaatttccaataaatgggaaaagatacaatgtaaaaaatgaaattacttgggacaagttacaggaagaactacatatatatgcaccgagtcaaatactattgttacttcttgtaaaaaatgaaaaaaaaaataattgaaatttcttggcatacaaatggttcattcttctatatttcttttgaatattatgaacaaaataatagacattttgggcgatgtgtacgaagatactaagaattatatgattgtacaaatgactctctgctagcttgccatcgttaaattggccaatatgaagcaattatgatgaagttttcaccgaaatccaattgactgtttttgtttctgctaataatttagcttacgagtataacaagaacaatgtaatataccaaataacagaattctagtttttttttcacttgcagaatttttgtatcttgcttgctcactgctgtttttcttgttaattacagaagcagttgaaagatggagaatggaaaaactgaaccaaactaagcagttgacccctgagagagataatgcggtgtcaactatt

SEQ ID NO: 383035 - DNA, 4334 bp, Cannabis indica
aaaaaaaattattttagttaccaaaataaatagtagtgtagattccccaattaataatatatgcaaattaataggaggtagtgatctgaggtagccattggccaacagaaaacactatatggaccgaccacgtgcgttgaggttaagctttagagctgtttatgatatttgtttgataataaattttgagggaggaaaagaaaaagtggggtgggtgatatgtacagattaaggtgttaccagcaagcaaagagtactattgggttatgttgatgtatgcatgtgcagtgttgtacccaaatttggtgtgcatgtgtagtgtcgtacccaaatttcactttcattgccttttttgaggacttgcaccttaattatggatctgtttgcccaaactcatgcctttttcaactatggcactgttaagtatcatctcttctctttgtgctttaccttctaataatgttttttgtttactgaacttatgggaggtccaaccacatgtggtcaccaaagttctccttctgttttatgaagtttcactttttcttgagtgagtaaaaacaaaagtacatctcttcaccaacctttaacttccatgacaatttttgtaaaatatatgagtaataattgtgatggaattattacattatacatgttttttacatacaataataataattaatcttaatcatataatttaaagtgatgtggactccatttaaaatctaaggctaaaataaaatgtgtatcactattataaaaagttatgaataatttgagtgagattagcatttctcaaaatatatttattaacgtaggaaaaaagtgtgtcccattttagaaactttttctctcttctcatgcgagattaagcatgtcaaggaacgaaactcgtttgaaccagactaatgagcttcactatcaaaggttatccctctggctatgatatggggaagggaagtgagacctaccgattgatttgatattagatgagcagacgtactatgattgtttaggagacatgctctcatgttttttctttaacataaccaatttaaagctaatttctagcatgaacagatgcaaaacatataattaatatagttataacacctctagttcaaaatattattgagttttattttgggaaaattaagctcaagatactcttttagaaaatacaggttcgatttattatttaccaaaataaagggtctaataatagataacttttataaaatataaagtccaaaatagtatttaccctaaaaaaattatacttgctctttattttttctttttaagtaaatttaaaattatgtcaaatgtatttatgatacaaaattataattttttatgtttttctatagaaatccaaaatatctagactctggttgcaaatttaatgcttaagcgatttgagtaattagaaaagtaataaatattagataagacttaattttatttgtgtttggtgttaacatatagaataaatactgaagaacatatttgaggcaacaaaattagaattatagcacttttagttttgaacactcggagcactaggtgccccaagcacccagtgtccaagttgacatattgttgacctgggacacttccaactacaatattgaagaactatccagagtattttctttgtgttcatcaaaaacaaacacatgctttttgggggagaaactcatcgacttggcggccaaaacggggactcagtgcccaagttgacactttgtcaacttgggccacttatatcaacagttcagatgaagtcttccgggcatattctttgttttcaacaaaaattaagatttgagtacttttgataaacaaccagagtcgtctaggggtcagaattgggacccaacacccaaattgacactttgtcaacctaggccatctccaaggagtttttccgagaagtctttcgtgaatattctccgttttcatcaaagatttagatacaagtatttttgggaatcaaatggagtcatctggtggctagaaactggacccagtgcccaggttgacccctggcactaagcttagcacccaggttgacattttgtcaacgtgggctgtttccaatcactttcctgaaaaagtgttccagtccaggtactttttccatcattagaaataacgaagatacaagtgatcttgtggagctaacgagatttttagggagcctgaacagggccctatcccccaggttgcccccatgcctaagttgacatgcaacttggttcgcatgtttttgctcctcaaacacaaattctactctgggcattcttcataagatggtcaaaaatgaggtgggagaccacgtttgcaatcttgaatgttatagaagtatcaaaaagaaccatgggaagcacccagtgcccaagttgacacctggcctggtgcgcttggttccaattatcagaatctgattctatttcgagcattcaactatttttttgtagtaaacgagagctacaatttgtgacaggtcaaattcacacttttatatttcacccattcaacagggagtttcgagtctttccaatttcacaaaacaatgacatctccgagaattggtgaacaacttcaccagaacattgaatctgactaagtggtgtcaacacatcacttaggcatcaaaaaataaaagtttgagacgttttggcactcacctagcgagttgacatcagaatgtcaacctgggcattgggtgtcaacctgggcgctgggtattaacctgggcgttgagttgtcaacctagccgcaggcgcagggtgctgaacaaccttcagtaaaatagccataactcactcaattttgatccgattgacacgattcaactttagtttcgaaactatttcaaagatctatcaagtcatgtcttatacccacattgcaattctgaagattttggatccaaaattcgtcctcaacaaagttgtaatttttctagataactcgaaaatgatctaacgaacgagattcaaagtcttaaaattaacgatttttaccaagaatcaattttcactatcaggtcatcataaatcatcattaatggccaagatcagcgcaaaataatttttcatatttttcatatttttcatattttttgtatttttaatttttattttaatagaatctcattccctataaaaggagagctcttctagctcatttttcacattcttcgaagtcccttaaggtcagagcttctctctctcctttctctctctagaatttcgagccccacgcttagccaattctttgtaattctcacaaggagtgaactattataaatttattgtgtctctcttatatatccttaactctcaatacattctctccaatctaacaagagagtatggctagatatctatgtccagatttattcgtcaataaaaacaaaaacaaaaaagataagacaaaaagatgaaattgagatgaagccaaaatgggcaattcaaataccgctaagcatttccaatatctcttttaaatagatattttttaaaaaaaaaattaaagaataaatgagcaaatactccttccaacaaattatgtatgttcattctctattttaaggtatttttatattaatcaaaatatattatttaaatgatatagaaaagatataaagaaaagataaagaagctaattgatggtgtgatgtaaaaatttgatgtaaaatagaaaaaatagcattgatatattttagaatttaaaagataaagtagaaaaattattggaagtgtttttatatatatactactaggctttgaattcttttttactttgaaaaaaaaaatctatattattaaaattttcttcaattttaaaaaaattaataatattattggtaaaatctacaagtattttttcaccactttttttcccttaatgatattttaacacatgttttacttgctgccaaataatcaaaaacaaaacatgttttactattttattgatattgttactgataggattaggagtgttcataaaatattaaatttaaaataattaatttaatctttacttttgtgaattaaattgaattgaatttgagttataatacaaattagattagattcaaaatataaaatttacatttagtacgaattaaatatattatgagtaaaataatgcgaattgaatcgaatgaataatcctagatagaatgaatggaagaagcctttaatgtctcattattagcagtggcagacccagaatttaatttgagggtgggcgtaaatttttttcatgtataaaaatattccaaaaaaataagtaaaaatataaagaaaaacacaatt

SEQ ID NO: 383036 - DNA, 2417 bp, Cannabis indica
tagggcatacaccattgaatcccaaactttctcagcaatcaagcctacaggctgttcctaaaagaacacttcaggaacaaatgggaagaagtttatcgccattctttcagcaacatacacaccaacccaaagatagtaactggtagggccttctttgtaataactcatggactttaaccttatccatcactagtaatcaactgaaaacttataacttggaaggtacacaacttttctacactgttttggtccatttttcttcaccagttacaaggttagaaactaaacaactaaaagcaaacctacaattgaaagttccaatcgtgtgttttttccaaactctagaatcttgaagaaatccataaattggactaagcaatggagagaatctgcaaaatgaactagtgctagcagtggtatagcctcgaaggagctagcctccacgtaagtatgagtcttcttgcacaagcactatgataagcctcctcttacttttgtttacactaggaagaggtataggcagcctaagggtggggcagcagtagagtacaactccactgggtgattttctgttatgtgggaattgtttgggtgtgggtgaggtgtatgttaagcctctgggagtctagttataaataagtgttattttcctttgctgttttgtgtgaagtttgtaagaattgaaaggagagaccaggctctcggaccctggagattttatcaatacaagagcaattttcatcttcttcattctcattctgttattttctttggtttatattaatttgataggaaaatcctatcaaattggtatcagagtcgtaacaattcatggggccaaagaaaaatgctatggtggagattatagaagaaaaggtgggcgaagaggtatctgaaatacaaggagaggttcagaaggtaactcacgggctatcgaaaatgcaggaagagtttcagggggctgttgcacaaatcgtagccaaacagttggagccggtggtaaatcaaatctcacaactctcccaattactcctaccaccagggaagacgccgccgacagctgcggccaccagtgcagatcgattccgtcgagctacagaaggaaacgggtcatcggtaggtgaacccagctcggtaggatttcagacgactccccagccacctgctgcaccaccgacggggatatctcctccgaatttcgcaccagcagtgacaccgatccaactcggatcgttttctccaggacaaccgcacgtgcaggacttcagaccaccgggaatggagatacccctattcaacggcgataatcccgatggttggatctatcgcatcgagcgatacttcctcctctcgaggatgacggaatccatgatgttagatacggcgatagtgggtctcgacggcgacgccctcttgtggttccagtgggaaaatcagaggcgaccgatcacctcttgggcgatgctcaaacatctcgttctcctccgatttcgggcggtgccggtgggatcaatttcggaggaatttttatcggtgattcagtccggtactgtgaaagagtatcgagtgcgttgggaggtgctagcttctcgggtcgttgatgtacccgaccatatcttggaagggaattttgttaaaggccttaaggaggaaattaaggctgtgttgcacattttacagtccaaaggtttagcccaaatcatggagacagcccagcgtattgaagaaggccactacttattgggcccgacccaaaagcccaacccacctaaacaccacttaagccccatatctcccatcagaccaagttacaacccattcactaccagaccccattactcgactacaccagctaaaacccacagcttcaacccaacttccatagcttcaactacttccaaagcaggcagcagccggtcatcctcaatgaattcgtacaaacgcctcacggaggctgagtaccaggataaacggtctcgcggactctgttttaaatgtgacaagatgtttcatcccggctatgaatgcgagcacaagcttttgcagattatactcactgccgacgaagaggaccatgacctttccgacgaaaatccgcctctctccccagactcaggtgaaaccgtggccaccgaagaaaccttggcaactctctctcttaattctctaatcggtatatccacagcccacactatgaagcttgcaggccatattggaaaacaaccagtcacggtgttaatcgatagcggagccactcacaattttgtgtccatggaagtggtggcagcggttggattgcccattacagcaaccacttgctacaggatattgctgggaacatgtgggaaagtccgaacagaggcatttgtgcaaaaagtggaattggatttgggtgttgtgcgtgtcatcactgactt

SEQ ID NO: 383037 - DNA, 1925 bp, Cannabis indica
aaaaaaaaaaaaaacttgatcaaactataattaggcattgcttgtaatcatattacactttataaatgtctgtgtcttccaataaaaagaaaattttacattaaaacttttataataatatgtgcacacataaatttaagatatacttatatgacaatatattttgaataattgaataagggaaactaatcttaaataatattactaattaaagttatttatcacattaatttgtgtgttttacacatatcattactaagcaagagtaacctctaattatttgacagctaactaaactaggtaaaaattcaatcaaacgttaatatggaaacagttccttcatttttgtgttggtgtttcattgttgttatatttttatttttatttatgggtttggactctggagagcatacattttcacttcaaaaatagataaatcttaattatgaaaaagataatacttatctaattaaaacgagaaatcatcaactgttaatgattcccaaaccaacaaaatcttgattactagcttggcctcccaactaacttaaaagaaaagggtgtgatttgatatggcattattatatgtccaaatacaagtgatcaccacaatgagtgggactggtgtagccaggcacacaacgcacacaatcacattgggacatttgggtatgtgggcaagtaactaaattgggtaacaattaaactctcaatcttgtttgacctataagaccaatttcaatggtgaaagctaaattagtgttaaactaacataaaaaaatgtacaattttaatactaattttttatattaagaaatattaattatttaactattatttaattattaaaactaaaaataaaaattaaaaagaaattttagtgtggtctataatatcttcctaataattttagtgagaaataacactaaatttgagtttagtttttggtattatagtgaagatggcctatctatgtccatgctcttctcttctaattatgatgtttcttctgacactcctacttgtttttgggttatttttacaaatttcccaccctatcttttttaataacagatctcaaaagggggcattggctgaccaccctagtttttgggggtcctattattgtcctagaaaagcaagaataactcatttgatatatcatgtggtgccatgtgatttggcaacaaaagggtatggaaattgaaaaggatctcaatgagtttattgtttatatctattatattaccctttggtcaaaaccaaataagggtcaatcagattaccctttgtgatattttcacaagaaaagtaaagagtggttgcccacttagatttttttggtaacctaaggatctgttttttctattcttgtggaaaataaagttcaggtctctatgtttttaattttttgcagctaattgaggagatcaaatagcaaaacctttgacagacagacagagagacagagagttctgattgtgaagggtcaaattggatttttttttttaataattatttggaatatatatttgattttggggccaaaagaaagacatttgtatatgaagtggacagtgtgtgaacccattccttatttgcttgagatttgggttcagaattgagacggtgtggtttgacttttgtctttgcttttgtgaataatgggaagaagattggaatatgtgtcattcctgtgggctcaaatggcaaaaccattttttttatgtgaaaaaaaaaagcaaaaatcaattttctattttagtcttttaacactggctagctagttttaatatatactaggtgaatgtacgtgtcgagtcacgtattgttagtttcatttaagattttggtctttttaagattttgaatgtatttatttttaaagattgcaaatttttatttgaaaaaattaaatatttata

SEQ ID NO: 383038 - DNA, 1508 bp, Cannabis indica
gtgcaactcttgagacaatgtgaaatcctgaaaagcagagttgaagaacaagcaaagccaaaagaagcttgacattatcagataattcaatcttttttcccattctcctaaccagtctattcttaccacctttcttgtttggatgatttgaactaatgaaattatcacgaactcgcattgtttttatagtactggatggaggaggaataatttttaaaaaatattacttttaagtatcagtgcatgactttttcaaaaaaaaaaaaaaaaaagaaaaaaagaaatttaaaaagtatcagtgcatgagatcggcaaacgaccaaaaacaacatcaacaattttatatgtgtaacattcatttataatattatcatatgccattattgcgtaaggttcttatgcatggaagatttgtgtttcgcaagtacataggtttctgattcagtccatgttgacctgagggtagactttaatttaatttgggagacaaattttggttaaagcatgttatcctgaaagagtggccaaccttgattgattttcattgactatatgacacaattttgtaggtatgcctaatataatccatgcaattaatatatttataaaaacaaggtttgcctttttttttttaaaaaatgttcattgatgccaaacataataatggaaacgacaaaattatcactaagattaggtggttttattgaaaattatgaatgaggaggctcttgtgaattagttagatgtacaaggagataactgctaaaggaatcgaagagattggcatgtggtattaatgatttggaaatcattgcaaaaaataaaaataataaaaaaaagatgtggaaaatattttttttatttagtatgatcataaataggaattagagggaagcacatggtaggtatactagttgtcaagcttttgccctcaagttggaatagttctccttttgcatttgcatgtgtttgatggaataaaacttcaattaaatttttgtttaaagggaaaaagttcaattatttttttcctttctctttttcataagttaatcgtaatacattatatgatcgtttccccctttgtaaacaatacaagaacaaagtatactaaataatttttcattgacaaatcttacgtgagtacttataaaaggggcaaataatttgttttttcttaaggaattccttcaaatattataaggcatatagccaatgaaatatttcacacatagataatcactactcaagacaactagaaagatgtggccaccaaatacaagataactcgagagagataattagttgagcaagagtactgctttattagccaaaaggggcaaataactttttcttcttgaataggcttttactcttgaattatattgtatttttattttctaagtaatgtcaacttttgaaacttataagtataagataatcattacttttgtttataatattgctgtaagtataagataagttttgacttacttttatcatttgga

SEQ ID NO: 383039 - DNA, 2874 bp, Cannabis indica
tttttgagattgaaggggagatatatatggtggtggtaaatgtagagcctcattaaattaaaataatatttatttaataataaaaataagaattgttttttttttaaattttattaaatttttaataaatatcttttttttattaattttgaaaaaaaaaataaagaattaaagtttgcatttatgggttaaaattttagattaattgtcaacatttaatgttgggttaggattatttattgagagaagttggaggagaattcaagaaaaggaggcacctaaagttatggccacattaaatgttttattttatttttattttttgaaataatactaaatacaattattcactcacttattttttggccctactagttatatactatttatatgttcatccttgtgtttttgttatttacacttttggtttattatttataaaaaaaattatttatgactatgtatataaaattatagcaaatatctccaatgagttttttattttttaagtctatataatttatagtgttgatttatggttcaaataataaaaattgacaaaataatacttaattttgaaaccataaattatttttaaaatttaataagaagtttgagttgtaattttctacatcaatatgagaattccccattcttaataattagttaataatgtcctctattaatttatttgaattttaaagcaaataatttattatcatacttaataacataaatttctttaaataaaatttaatagcgcgcatagcatgtatcacaagttatattttattttctagaaaggccactagttaatatatatattaaaattaattaatattaattattttcctcaaaagaaatattaacattattaattgtttttctcactagtacatatggttattttcacacgtgggaactaatgaaaatgtcagcttaattttggttgataatattggtaggctggtatttaatggataatttaatgttttgtctattataaaataaagactattcatattgctatatgtataatgctattattgtcattaatactataatttgactaaaatatttgcatttgagagtttgaatatggttgaatttttttaaaaaaaaataaataaaaagattacattaattattttaataaacaaacctaattggttggtgtggctattaaaagtgttactaataacacatttatacaatcaatcattaatatctaaatatacttaacataattttgtttgtttgtatttttattcatttatattgctgaaaaaaaactataatatttctttttatgatcaacataaattaattttaaataaatgttattttttaaaaaggaaatttataaataaatattaaaggtaaaagagtttaatttttttttagccatttctctcaatacgtttagtgatttttattatcaaagtggtaaaaatctagtatattattttatttcattatttgtatacaatttagtttatttacaatgatatatatttacatatcttgaaattaaaaatatgaataatgtttgctaattttagtaataattttaggttatgcatgcttattgattctattttttaagaagttatgtgatattataactttcatcatattcatatgtacaattataaaattaagaactttattaagaaagggtgaggtgaaataaaaaaaggaaaaaacaaatgtatactaggtgattctacaatacattcctcatttattgaggcactcctatctatttcggtattttagagaaattttaagttaatttttttcatagttgtctatgttgtagttatttaagacatcatgtaaatattttgtgagatataaaaaaaatttaacatagcgaaaatagggttccaacagtcggttatacgagactcttttattttatacgcgtgtaaaataaattgttagaatcatatttttgacgtgttaaatttgtctaaattctcaaaatttttacagaatgtcttaaataactacaacgtaaatgaccataaaaaaaattagactaaaaaatttacacaaatactaaaatagataaagatgtatcgatacatttttttttaaagggcaatttaaaaaaatttctcctattatatataactaaaatccccgaaatgaaactacaattatataaccatggttctctgcaataataaataaaaatttaaattggtattgatttccaacactatattctatatttctatatatgtatacatactatgtatttaaatttgtaagtatatattaatgtacatacgtatagatattaataatatctaaatgtcacgaaaatgttaataataaatgaagaagatagagatgaatatgaatacaattatatcaaaatatttggttattaattcatatagtactgttaaatccatatggcattattaatattagagagggaaaaaaaacattgaagaatattcaaaaaattagcctgaacatttatacatggatctgtatattacaaattatacttattaagcatttattaattggatttctaacataaatattattacaaatttacaatatatagctagaaaatatatacatgtatatagcatgtatagtggcaatatcaaagtttcacaattaatgtactttaaattatatcagacaccatttcataaataatatatggtacaattaaatataattaatttataaccaatcactagtggcataattagtacccttatgtagtatatattatatagagtattattattgggtaccagtatgcttaatattttttataagtagtgtttcatgaatggttagtgatattttttagaagttattttttaaaagggttatttgcgg

SEQ ID NO: 383040 - DNA, 1013 bp, Cannabis indica
tgtttccaatttatattaaggggagatattaattgatttgtaatttaatgttgaatatgtaatctagtattttgcttttcaaaataggcaatttttcaaatttttaagtaacgtctcatttccaaattctaaaccacagcgtttcacatgttacattctttgctacattccaccacctttcacaacaaaaataaggaaatattacctgaaatttcacttaatcaatccttttacaaaattaatatatttaaggcttatttatatgtattatatttatatatgttaatatatctcatgacaaatggataatcaaaaagagagactgatccaacacattcaatatatatatagtaaaagttcattaattttatatattaaatccaagtagtgactatatatagactatagttattacgaggacatgaccccatccaatccatatatccatatatagattgaaaatcgcccaaaatattacaaagatgattacatatataatccaacacctaaatatgttctctttatcagattttaaaataaaattatacaatcacaagttcataacaactcatctatatatggatttacaccattttaggaaatggaagctcaatttaagtgagattcagttttcttgaaattatgtgcataaataattatataactcaattaattaattataattttactaaataccataaataaaaatcagtcctacattaaaacctaaagatgtacattttctttattgaaatacggctttaccggattcggccataatggaatagatattctcatctaaatggagaatagacagggaacgagaattattttttgtcttcaaatattaaagtaaaggagaacagaatattctctactccaataaggatccgtttaatattttatttatcgttttgatagtattttatattttatttatatgctatttttgtaatttttttttttaaaaaataaattattgaattatagttagtatattaaataataaataa

SEQ ID NO: 383041 - DNA, 838 bp, Cannabis indica
aaaaaaacaacatatactccgtcaatttacacatgtaaatatatattttatcaaaagatatttaaaatattaatggccaatcaagtttagattaagatgatttcattgtaataagagagaagagagagagaacaaacatactcatatatatatagatactccattggattctgatccaaattaatgatatcattgacctaaagtcatactatttgacccaacataaatatttatatatatatattttttttttttgaaaaagacctaaggtaaatgaaattattattaatgtataatatttttcagttcccaagcgccctaatttcatgctgattgacctaataaaaagcatcttttagaagagagaggtatatagacatatcaaaaatttgcctagattttagttctttcttctcataaattctcaccacaagtattaagtattaacgccattgtctcctccttctttcccccttttaactaacatacagaattattaagtttaagtactactatctaatatctttttggtgttatattattatttatacaaataaatagtaggtcttataaaatttaattttagaaaaataacttttcaagaatatcactaatcaattataaaatatatcacttatagaaagtattaggcaccactatagtgtctaataataatactcaactaacatatatcaaatacaaatatttttgttgtaaaaaaaaaattacaatgtaccctctactaaaagaggtatatgctgatgcatttttatctgcttcaatatttgtgaaaaaaattaagtttaatttttttatggtcgtctacgttgtaattatt

SEQ ID NO: 383042 - DNA, 3436 bp, Cannabis indica
gaaaagggtggaaggaggttaattagattggttgattacccatatccaaaagaaatatgttatctcaaatgcattctggagaaacaaaagtaaacaatgaatcagttctaaactcaaaggttatcttgtttggaaagtgtaataaatatgattaaattgaataagtttttagtacctgaaataagacaaaatggatgagatgaagaatcaatcgaggccaactaaaccaaaaatgtctatctgagacttgcactagaggtatcccttgtactacagcatgtctttcttggatttctagtgccatatttgttataattccttgaagctttgttccaactgctaaggtcaccttcaaccaataaacctcaccttcacaaaccatttcatattttgttttctcatcaactcaaaaaccatgttcattgttttgtcatgtaattaatgtttaacacaagagacttgttttttttttctttcagcagagacttcttaccactaaaggcaccatggacaaccaaaacatagcctgccatcctgaaagagatgaaaaaagaaatttaaaaaaaggatggataataatattaaaaaaatgaaaaaaaatcgtaataatatatttaccatgtacattgagaagtagaaagaacaccaatgaagaccataatactggactgcaacattatgattgttcatgtaagttgatgacattcaattccaaaggctacaaaattcttaaccaaaacaagtttgagaaaaagctcacgttattcccacaaccaccttaaagtcatcttctaatgatcttttgatgtacttttggaaattaaacttgcttccaggagctaaatgaacctgtaatcaaagagcagaaatactcatcattcctatttgatgataaaaataattaatttgatataagtttggagaaactaacagtgacaaatccatgtctcatggtcaagtaatcggccttacgaacagacctaatgaattgtcgaagaaaacacacctgccaaaatttaaacgtttgaagaagaaaattaaacaaggtgatggaattaatcagtgagtgagacaaaactgtcatgagatttcttacaagatagaaggtgaaaggatttttagtccaggatcttgtgtgatccttcacgaaagatgtctcatgagtaagcctgaatctcataggatctgtataatgacaaaacaaaaataaacaagaaccaaaaagaaggagaaatagggattgatattcagtgtctatcaaaaacaaaagataaataatggattcaatataaaataccattcatgtattcttgatgatgatcagtctcttgttcccattctttccaacctcgaatctgtatgaaagaaacaaaagagttgatcttcagcttcaagtggaagaagagaatgatcaatttatatggtgagtaaataacatgtattcacctttaatcttccaagtgccattgttatggcactgtaaataacatgaaatactgctaaaaagaatatgaagatgtgtaactgatgtaaggcattgagagatatgagtggcacatacccctattatcaattaaaatacgaaaaatcaggattagtcacacattcaagtccttaatttacctgatcatctactacattcatattccaaacaataacatacttacttaccggtttgcaaccggggcctacgctaccagaagctaaatatctacgttcaaaccacaaaagctttcgatggtgttcatgttcgccgcctttggtctctggctcatgccccacttcatagctattatcatttgagctcaaaggacagggcaacataatcacagaactatgcgtcggaacacaaatccttgctatgtagttttgaccaaaagtcataatcagagaaatgaatcctagaaccatcaactctgcaagattaaggatttaaacatagctttagttagcagtgaatagtgatcaatctccaaaaacccaaatgtttatgttatgttcatatataggatcaaaatggtatttttattgttaccccctttcactttctgaagagcttcaaacaaagcgttcttttttctttcttgaaaccactgcaaagtacacaacattaatctcattggatagaatgcaaagtgaagatttaataagcataaatttaaattataagtttgtaacataacaatcccattctaggtgcatttagctaaaccgaaattagtgtatgtataagtaaacatgtatgaaaccgagttgtatagatagtagcaataaagaaatctaaagaaatttgtcagtccccttttggttgtaattggcattaatagaaattaaaaaaaataataagaaaaaacaatcccattgcatgcatgaatcaacataagcatgaaataatattgcttacttctccaaccatatgaagaactttctccaagagaatagaaatgacaatgatgacagcacaaacagaggccacagcccaggttggtgtctgatcaagctcccttggggcactagatccttctccaccccccatactttccaatccaaagtttgtgtcgtgtaccaagttattaaaccacaacaaaaatcatcaactttacctcaatccttgatggaacaactacttgttaatgtatagaaagaagaagaagaagaaaagggttaggtgggattttgtgtgtgtttctttagctggtaatggtaaggaatgttgggaagaatgttcaacaagtggggattggtgttggagatgatgataccccatgtttgaggtcccaacgctcaactcgttaaccacagtattaccatggattattgcctaaataagtctgaggtccaaattatgtaatcccaaaaatagctaacttctttttttttttgataatttttaattattatttagaagaaaataggaaaagggctcccgccttatgtaacggcagaaaggcctgagtcaagaaataaaaaatagtaaattgtaatttacatttaattatttaaattgtcacttgtctctcatatttattattcactaataagttgtgagtatgagtgataaggagatctctttgaactcttcttctagtttgatgacaagtgttacattgttgaaactagacaactaaattgcggttggtattgtaatttttcttattctctaattgctaaacatttatattgaaagagtggtatactatataataatagcattgctattagttacagtggtacctagcactttctcgatatgttgcgttgcgattagttagcgatattccttaaaagctattatattaaattatatgagactagatacttagttagaccaataacgatattgacacataagagggtgctaggcaccactagtgccttttagcatttctcatataataatagcttttttttttcttctgaaaatcatgtatttttt

SEQ ID NO: 383043 - DNA, 1061 bp, Cannabis indica
aaaaaaaaaaaattgctatttgagagatataaaggacttgaataggccacatcacgtaccatttaaattaattataaagtaccgtttcaaagaaaaccctaattaattagtaaacatgagaaataaaaacatgtgaaactgtgaagcattgtctattaacttctagattaaagatacattgggatcaaaaagatccagatgaacacacaaaccagcgaaagtaaaggaacacaatacatatgaacatcttatatcatcctaccactttcaagataaggaaaactacaagaacaagacagctaatttaagaactggtaaatttggtaacagccttagttccttctgaaacagcgtgtttggccaactcgccggggagcacaagcctcacggcagtctggatctcccgagatgtgatcgtcggcttcttgttgtacctagcgagttttgaggcctcttgggcaagcttctcgaagatatcattgatgaaggagttcatgatgcccatcgccttgcttgagataccgatatctgggtgaacctgtttcagaactttgaagatgtaaatcttgtaggtctctacatttttcttcgttctcttcttcttcttgtcaccggcagcggcgccctccttggggagtttcttcccagcctttggcttcttctcggctggagccttctcggcgacggtggacttcttctcctccgctggcttcttctcagcggcgggcttcttctctgcctttggcgccatcgaaatctagggtttgcaaaagacgaaattaggagtttcgaatttgcagatgagcgagagtaaacaagaaaggtttaaaattatgttatggaaaagaggtgggatttaacttatataaaagccagagacccattcttattggctgaaatgttttcataaggatcgatgtgttggaactgtttctgccgtgagattagtaatcagatgtagtggatgtagacggttcagatgcgtttcaatatatgcaggggcatcaactttatatatttcagattaagaaaaaatggcattttacaaaaaaactggattt

SEQ ID NO: 383044 - DNA, 2640 bp, Cannabis indica
agagagagagagagttcagttgtaataccttgagcaacatcccatatggtaaatgatgagctctcaaatgacccagatgcgagatatgttgactataaattaaggaaaaattagagataatgcaatactatacccattgaagagctaatccttgaaaaactatttacatatatatgatgagtaatcaattgtctcaaaagaaagaaaacaaacgagaaaaaatgggattgtttctctttgcatgttaagttccttaaggaagggttagcttcactgtaataaaagatgaactttgccgaaaaagattaacgaagagaagatcaatcgctactaagctttaattgtatcatgtataatattaaaaaacatgaagccttataaagttggtctggatatcttccatctggactccatgacagcgcacttatttgctcatcattctgacttttaagaaaatctgccagtatatatcttattccagaacctctggataaggttcccaagaatgaagcagcgccagaccttacagatgctgcatttccaggataagaggcaacccatatacaaatcccacccctgaaatacagtttaattggatggaaaaaataaataaaaaaaatcagttgtccgcagtgttttacattagaaagtacccttcaacatgaacaaataaatttaagagacgaatggcaaaaataaaatgtatgatacttgcttgcaagctacagctagtgctctcccgccattaggcctccactcaagtaatttaacatcccgttgagaatcattgctcaaaatgcatggttccttcccttctgtaacaatacaaatgaaaaaaagcatacaaataaattcaatatatagcttttaaattaaaggtctaattacaaatgaaaactcaacatagaagaaaacataaatgtgccaacaaaataatggaaaagccattttctggtttaaaaacttacctgaatcttcataatcacgaactataacttgatttgacccagatataaaggcaataatatgcttatgttggtgccaacttactccctgaagatcaacttttggtaataagctcacctgtgaaatttgtcatatgagatgaaaacacaaaattagtgaaccttcaactactttttattggcaaggcttggtgattcttgattttcttgactatctcaatgtttttaacactgtcattataagaaacaaaggtaagcctagacccactaataagttctcaaacatcttcaatcaaaactataaaacaaatgaataaaacacaagagagaagtgagctgacgtcattaggatgaaaaaggcgtttgagggagtcattcactatctcctgcaatgttgctacaataccctttctttccactgtgccaagtggctctgcatcaagctccggactcggcggtcgtaccggctggtccaactgaaacaccaccggactgaacaccgtcccctgcatacaacaacaacaacatcatcattaatctaaaaacctcaaatatttttgacaaaaccaaacacaggagaatcaggaggtctaaccagaagttttccgtaagtttccttggctcgatcgtcagaaagattctcagcagtgactgtgatggagggtaaaccacatgaaattttttagcaaacaacaactgaaaaaaaaacacagacaaagacaaagaaggaagaggagcaaaggacatactgaggtctcgattgatttcgcaaatggtgagtgaacctggattcggaaaagatggcattgttgtttagtataaaaagagattgtaggctgtagggatttttctccttttgatcaaaagaattggtttattgggtttagtacggagcatctccaataaaataagtagaaatttaaaaaaattataagagtgtattttttatgacataaataaataataatggttttttttatttttatactttaaaatattttttttttacatttttacggaattctacataaaaatttctatacaactaatagagcaatctaaatcgtaaccaaaaattgtatagcaacccacataaaaactaccagagaaaccacttcagaaacccaaaccataaattttaaaaaaaaaaaataataataataatatatgaggtaattcctctaaataatattatgggattatagatattaaggcaaatttacacggtatactaacttttgccatttttttacaaaaatactgtcaggcggtattttttacttttttactgtgtttttttataagtttcatactacaatatactgtgttaagttttcactggtattttttagttgttctactgttgttttgagttgttctgttttgtgttttattggtgttttataaaaacacagtatttttgaaaatttttccctgtgacagtatttttataaaagttaatccaaattccagtatttttgtaaatctccattttttttatttttttttacatttatatgggcttttttatggcatattttttttaaatctcatatttgtaatataataataataagtttcgcctagaaaagtcaccggtgccacaagaatggtgactacgtggagtccgacttgggagctatctgttcgggaagatagatgatcaaggctcaaa

SEQ ID NO: 383045 - DNA, 2081 bp, Cannabis indica
gtctgtggtggccttatcggatgttcctttacacaccaactgtttcaagtttaggtttgaatgtgctgatgatcgaagctgggctctggagaatggaccctggtgcatacatggatattccttcatacttcaggcttggactcctagcactgcagaccctgtatcttttgaacgatgcaaggtgtgggtgcaaattcataacctcccacatgaatatttctcgatatctcatggtaatctcttgggtggccttgttggtaaggtattgttagttgacttggaggaggacaaacctgcaacttggaaccattatctcaaagttcaggttgatattgatgttgctaagcatctggtttcggggtgctactttgatttgagctcaaaggttaagcgttggctccagtttaaatttggaaaaattgggatattttgctacaactgtgggtgtttgggtcaccaaaggcgtggatgctcattgtcttctccggtcgctggtgaatagtgacggcaccctgtttcctctctacggaccgtggttgtctactgcattgtcctatcaagatgtattatcttgtgctcactctgttcttcgactggtttcctcggtcgcttctccgcctgtggccatgctccagtctccattgacggcgaggaatgtgtctggtggtatctcgaagctccctgtttccaaataaggacatggccacggatcgaggagggtgaagatggtgacttcttgagagccagctggtcgaggctcttctcagcgtgctgcctggattctgaagcccaaggctgcaaactgtgaattgaccattactcctctgggtaatgaggttactgctgacattacggagaagggaaagctttctgatatttttcctattttagaggataacccaagtgaccgttcctcgtgtggaccaacaggtttgaaagttggatgtgtgataggtcttgatttgggctgtggttaaggattacatgggtcggtaaacatttctagtgggccaaatggtgtttgtaaagttcaaaatggacctgggaacttgtctcttgtggagaatttattattgagggtggttcggctatggatcgggttattaaagggccaaatattggtgggcctttggttgctagtgatcaggcggctggtgggccgtgtgcttcttttaatgatatgggcctgaatgataagtcaatttttggacagaaggccctatgttctagcaatgaagataaggccttgtctaatttttttcaagcccaagaatcttttttacaagaactaaagcaatttgggaaaatggacttgtatgagattagagctttgggaggtgacattgatgttaaatccacttgtgagacgaatgttagaaccactccgtgcaagaaaactcttcgaagcttcttcatctttatgttccagacctcgtaagattgttcagagacactcaggtgttatctgtgatttaccgtgggacactagggatcagaaataggatagagcgcccaaggttgcatttgaagaaccttctgaagatcattcagaatccttgagtcgctctgatggaattttgaaaaactcgcttattggcagttttgtgattgaagaatctggatctagcttgtatgttcactctcatacccctatggaggagaatgtcatatctcttccacaggagccatgagaggtgtagcttagaactgtagagggttaggacagacctctacagttcgtgaattgaagtccctggttacggcgtgctcctcgaattttattttcttgtctgagatcaaagtggatgctacttctttgatttacatgcttctctttttccttctcccgctttgtgccggaaggaggtctggtctactcctcctacggattggattaaattgaattctaatgttaaagtggggctagaaagcatgtgtattgctgttgttgcaagaaaccatcttcgtagggtggtctgggttcaaacgtctcgattggatttcactgatgcgttatgcagagaggcggcgacctactgcttggctttatcggttgcaatggatatgtgttataagtttgt

SEQ ID NO: 383046 - DNA, 3579 bp, Cannabis indica
gcccaatatgttcattgggcggtttgaatttttcggaaagttattcaggttatattttttatcggtttattcggtttagtttgggcagtttattcgggttggggggtttgtaaatttttttgagcaaccctacgtgggggtgacctaaggaataatatgtgtgacaaactaagggggtgtgacctcctgaaaagtgacgccaagaggatggaagaaaaaattgttgccctgatgaagttggtaaaaaaccaaagtagggcattgtcgcattccaaggatgaagacccaaaaccctgcgtaaaaaggatcacagaaatccctcttcccaaaaacttcaagatgccacgcatcaagttgtacaaaggaagaactgatccgcgaacgcacttagctaaatattaacaagacgatgcaatttcctcgagttagtgacgatgttaaatgtttgtgtttctccctgactttgaccaagtctgccgaagattgatggaaacgactggccttaggatcgattgacagttggaaggatctataatctgccttccagggcaattcatcgctgcccgtgagaaagacctggaggttgggtctttgacaaatgtcaaacaacaacacaatgagagcttaaaagctttcatttagaggatgtcgggggcagtcgccaaaccaatgtcagcgatgatctgaaactaatggctctccagtcaggattggctatgggttccttattgtgggggagatgcaaagaaaaagcgctgaaacactaagtgagtttatgtccaaagcacaaggcataattaaccttaaagatgcctacatccaagcattagaagtccttctagcaccaatgggtatgaaagccgctccaagttttgcctctcagactgtcgccccatccttatcgcttcccggatctcaattttccccaactgtttacggacttactacatttggccttatcgcaacgcatacccatttctctgggtataggacagcacagactgggtgcagtgtggtttctagatagtctaaatttgaggtcccggactctagcgcagggcagtcatggagaaagaggggaggaaagagccacagtcggaatgattcagtgaagaaaccaaggaagacccaaagtacatcgagtataggagtctaatagacactcgggaaaatgtctacaaagcaacatgcaacatgatccattactggaaacccccgtgtatgtcaaatggcaaaaggaacaagcaagattaaagcaagcaatgtgaatatcacacggaaaagggtcacactacaaatatgtgtgagtacttgaaaggcgagatcaagatgttggtccgagtcgggcatttgggacaatgggtctgtattccaatcatttatcccagatagggggtattcaagggaaacattatgcttcatggatagcagggcgttgtaaatcccccacaggggcttgcatgccttcaagctccaagaacgtctttatatgctcttgtagtccagccagctcgagctggggtggcattgctagctctcgaaccaagaaccccatatcctctcagaattgttccaccacctgtggacgagcacgtggccacaatatccggtggaccccatcccgccagaagtacccataatgtataaaaaacatacataaaggaagtggaagacggggaagtctatgcaatggtacaatctcccacagagtgttcgagaatgatgaatctctcgataaccttcaccaaagaagacactaagaatgtacgcttcccccacaacgatcctttggtaatcaatgcacagattgacaacagtacttccgttaatatcttgtttaagtttgtgttccaagcaaatagagtcacttaagcagatctaactccatgccctgtccaattacaaggctttaatggcgacactttgatgcccatgtgaaaaatcaatctaccaatcaccctcaagggtgaaaacaagacaagtgcatataaacactcaaccttcgttgtagttgactgtcccacagcttacaacgccatattgggccgaccgactctggtggacttttgtgtcgtgacctccatccgatacctatgtctgacggtcccatgtgatgatgcatgcatcgtacattaaagtaaactagcagagcgtaagaaattgctataatgtttcaacccgagtcgtgtacatggttaaggaagaagcgctcggggaacttgggttggaggacctgatggatacggaggctataccaaaggcatatgaagatgagttagattcaagaatcaaacttgagcaaaatttagaactaatgggggagattgaggaagtgagcatctgcaaggaagaccccactaaaacaatttgtgtgggaaagcaccttcctccaaccatgaaagaaaacgtaattaacacggtgaaggaaaatcaagacgtactggcctggagtcattctaacatgactagaattgatcgaaataccatttgccatgctttgaacatcgacaaagatgcaactctattccgtcaaaaaagaaggcctctagatcctatgagggctaatgtagtaaaaacagaagttgacaagttgactgccaatgacttcctctagaagtcattatctccagcctggcttgcaaacccagttctagtcccaaagcccaacggtacgttgagaatgtgtatagacttcacagacctaaataaggcctacccaaaatattatttcccaccaccacgaattgatcagacggtagttgccacatcaagatttaaattgcttacttccatggatgcatactttgggtataaccaaattaaaatgcacatttctgacgagaccacaccaacttttagactaacaaaggcatttattactacaagatgatgccatttgcactcaaaaatgcgagagcgacgtaccaaagaatggtgaactggatgttcaaggacaagttgggctgaaacatagaagtatatgtggatgacatgctggtaaagtccaaatattttaatgggcatgactgagacctggaagaagtcttttcggtcataaggaagtatgggatgaagttgaatcccaaaaagtgaacctttagggtctcttctagaaagttcttgggatatatcgtaagttctcgggggaatcgaggcatatccagagaaaatgaaggccttcatcgatatgccctctccctagaagcataaagatgtccagagtgttacagggcttgttgctgctcttagtcagttcatttcaaaatctaccaacaaacgtatcccattttttaatgtgttgcgaggcaaaaaaaaaattcgtgtggactaaagagtgcgtagtcactttttagaagttaaaggaccatctcacaaagtctcctatcttatctaaacctgtggaaggagaagattttttctgtccttggcagtgtcagatcatgctgttagtgccgcacttgtgcgagaggaagacaaggtccagtattggtgtattacgtgagcaaaagattactaagcgcacagttaaaataccctatgattgaaaagctaactgttgctccagaattcgcccaaaat

SEQ ID NO: 383047 - DNA, 2880 bp, Cannabis indica
ttttttccctttttattaagtaggaatttagttttacttttgttgcatgttattggtaaccaatataatttgtagtcacaactcacaactcaaacaacccatgtgaaaggccacctactctttataacttcacctccgtctaacctataattaggaactcatccaataatatttttattatttatatattaacatagaactcattttccagagtcaaattaaaagaaaaaaaagcttcaattaaatgaagaacaagacaacatataaagtatgaaagagttgactatacttaaagaatgatggaacatctctctactgaacccttaaaataatttagtcaaattaattacatcaatgacactattatggatgatgaaatttaaatcattattagaattttattttacctttttgatatattccaagacatatgataacaagtttatgtctaactcttatgagtagtagttggctgcatgaaggaatatgggagccacaggttaattatgatggcaaacatttctttctctatcacaaaagcaaaacaatgtatatgtataatagctaaattaaataacatgatcaaatcatgctataatccataaacaaacaagaaagacaaataaaattaatgcacgatcaaataaatattcaaagggatgctttttgataaaaataggcagcatatatatacgtttatggatgaaaaaatcaatgtatatagatatctttttgttacttaaataattcatcacaccaatccaaattaactatatatcgctatatatactatatgtatatgtatattctatttccttctatatttgaccttgctcttttctctcacatggatgatgaattactcctttattaattaatacaaatattattacactacactaatctagatttcgaattagataaatggataaactatcattttgatgaccatttactatatatttgatttcgatgcaattaaactaattaattaactttatcctgattatcatgatggcatacatactatttacttaataatgaaatgatcaacgaaaacctacatacattttctttttgtctagttctcaatttgcgagccaatgaattttctcatcagcacatttctaactaattccttttttattattatcatgattaattactaccaatcatccatatgtcctaaacgtcattcatcaactaaaatactatatatcatttttcctactatgcctcatttgtatatattatatactttacatttatatatatgtttttacaaagtttcgataaggacgcataactgatctcaattcatatatatataaatatatagtatagtattatttaattttacagttactgatcccctacaaattattacagtagttgattggttaattgctgttatgggcgattccatctgactgtgactggtgtaataatataatattaattataaaacaaataatagaacacaataatataattaatacacatatatatggctgagtatgcatgtatatataatatatatatatatatatatacacacaaatgttagtgtgtatgaatgcattacgcttttaggcaatgagaagaaaaaatgtaggtcaaattttgcaactcagtttctcaatttatttgaaagcaagaccttacttgtataccaataataacaatatatataattactatatatattgttatatatatacgctatagtcttgctttatatatttattaatataaatataatttgtgagggagaagacatttatacgatgatataagagagatatatgtgtaaatatatgtgtagttgtagaatattttgaaaaaatatatgcttggtattcaaaaaaatatattaattatattacgatacttaagttgtagtttgtcacattcttgcattgtgtgcggtagtacttaccataagaatgagtatgtggtccttggtcaatatatagttaattaaatttggtttgaacaaagaataagttaaataattattattattattattattagtcagacatataatactgtcattatcgctgaattaatcaaaaattaatactcacctgagatatagatctagtcaggaaaaagccgctcaacagatcgcagaataagctagctagatatatatatatatttatatatatatatatttagatatatattaaattaattaagtatttaatttctagtttatttatgtatggagaacatgtaaagagcttattattaaaactaagctagctcgaagtctacgccgtgcgtagtgtgaatggtttttatggttgaatatataaaatatgaattatatgttatttataataattagttgaaatttattaactaataataaatgggataaactgcgttgcgcaacttaagatctcaactatctattttagaagtttcaacagtacaatcaagtatcaacctcttttaatgtcaactcctcagatggtcggctctattactacatcatattttataccattttgcaaaattacccctttattttagacatattttaaactgccctctttcaattaattactctcttaatttattatacaaaaacaaattataaaaaagcaattattttagtttactaaatagttatcattttaattaattgtagacatatatatgatatatatgcaaacatccttcaactttatatacaagaaattgggatattataaattggtacagtaataaaaaaaaaatgtttccatgagagaggcaaatctgataaattctttatatatacacagtctaggggtgttcattggatcacatccaatgaatttggacccatccgatccaatccaattatttattggatattggattttt

SEQ ID NO: 383048 - DNA, 1095 bp, Cannabis indica
taatattaagtatgattagtatcctttattatttctacaaaaaaaattaaaaatatatatatttgtgcaatatcttagttttttttttttgagttagatcttctatggggatttaatgttgttttttataggttttttatcattagcaaatgtatttttcttgttagtttgtctttgtaggttgttttggttatattttttttatatttttgagttcttccatggggatttaatgttattttttatggttttttgtagattgtttctcgattatttaatcagaatatggcttcgcttgtagctttagattggacttttacggttggtcttccgttatattttgttgagtcttattgtttagcaatcgtaaatgcgtttctaaacgctcttccttcatcaatgaacttgattctttgtttgaagatttagcaagtttgatgcccaattttcctgaagtattcctaatacattgttaaaagaagtaatcagttagaagctagttaacttgttgttagaattagttagctgttacagttagtgtcaagtcaagtttagctaactgtagttcgtttttaattctgttagagattgcatctgttaatcttgtatataagggctgtactcaattcattcaatgtaatgtctctttcattatctttgttatctctttttgttctttccttttctttcttcctctttttcttcctttctctctattaatcatgttatggaactttaacatatatgtacatcgtacgatcaatatgactgtacatgaattaactcagcatgctcttcaaatggaaagagaatttttatggtttgttgaaattttttcttttattgggatttattattacttattgtatgatattatgatttattttttattgaaaatattcattgttaaaataaactatttcaaataataaaatatattaaattttatttggtggagatatatctttatatattaaaagtgcctatctaacagcaattcttggtttaacagaatatacttaaaaataaaataatattctgttaaatttaacgattaggtttgatctcccattaacaaataaacccaataattaa

SEQ ID NO: 383049 - DNA, 861 bp, Cannabis indica
cttgaagaccctaatggcactcacggaagattagagaaggccagatgcagaggtagagtcacagccacaccatgagtctcctggagatgatttcactctcccaaatgattatatacctgatgatgtagcagatcttctccatacacttgagaatatgcacatcacgtccattagagatattcaagaccctaaggtccaagttttagacacaacttcaccaccaacggagaagagatcgaagaagaggctgaggtggtttgatgagtacactaaaatgaagaagaattcaaagccatcaattgcaaatttgaatgatgactcgtgtaatatcccaaaaaataaaatgataaataattagacatattttattaaatatgtaattattttgcaataaagtaagattatgatcttacttggatcaattagtgagaatctattaaatgattatataatgcataatttattaattacagagattatattgagatatgtgggtattgtggatatcatttttgaaataaaatattttcgggccaggcgaccgtgagaacttgacaatgtggtgagaaatgttacgacaattaaggatggactattttggaagtattcaggactagtttagaacttataatgtcggtttggcggtttagatggatttactaaaataccctagggttaattctaagtttaagggttttataagggcaaaatagtcattttcttttaaggatagaatttttaattattctacaaggttttggctgaagtattaggtaatataggtatatatttaattgttttaatgttagaaataagaatttatatcttttaatttaaaatatggctaatattaaaatatgt

SEQ ID NO: 383050 - DNA, 2289 bp, Cannabis indica
cctttcttcaaatcaatgacatgtagttgatccggcaacgagggcttgtcgtaaactttaaaagtaaccggcctaggtaaccacgggtcttcaagtacccgcaccgaatttccattcccaatcctccatcgatacccagcttgaataatctttttcccccacaccaaactcctccaaacaaaagacgcatagttcccacatttagcctccaacactcctacattcgggtaataactagccttcaagactttgccacacaaggaattcggatatcgaatacatctccaaatgctttgcgagcaaagcttgattaaacaaacccaaatcccgaaacccaagaccaccttgctccttatgttgacacaaaacagaccacttacaccaatgaatcttggcctctttttccgttgatccccaccaaaaccgggctgccatactatgaatactattaattgtcttctttggtaagcgaaaaaaactcatagtatacgtaggtatagcttgaacaatcgccttaattaacacctctttcccagcagccgaaaaaaacgaccctttccaccctttcaagttattccaaaccttattcttgatgaactcaaaatgttgtttcttcgttcgcccaacaaaggacggaagccccaagtactttccatagttatcaacaactttcacccccataaaagtagccagctgcgtccgaatcgaaggaggaacagagcgcccaaaacacatctcagatttgtgataattaacaagctgaccagaagcaatagaatatttttccaacaactctttgaaacacctacattcagcttcggtcgcatcaagaaacacaaggctatcatccgcaaagaaaagatgcgacaccgttactctctgtctgccaaacacaatcccatgtaatctgccttgttgttcagcatgttgaataagacatgaaaaagcttcagcacaaagaaaaaacaaaaaaggtgaaagtggatcaccttgtcgcaaacctcgttgtggaagtatgcgaccttgaatttccccattgatgataaaggagaactgaacagaagtgaggcaattcatgattttctccacccatagccgattataccccaacctcatcatcatagcttccaaaaaccgccattctacccggtcatacgccttcgccatatccaatttcaacgacccttcaagaaagcactttgtgagtccgaaaccacactaccaagagaaagccgcatcctgtttgccaaacacttcgacacaattttgtaaatcacattacaaagactaatcggccgaaactgttccactctttgaggtttatcaacttttggtattaatgccaccaccgtatcattaagacactccaaatcagcccctttattcaatacatttaagcacacagcaacaacatcaagtttcagttcgtcaaacttaccttaaaagtgacaattttggtagctgctcaataatagttattttttccatcattttatgtattaattaatattttgatggaatatttgaggctgctaatttcttcagtcattaataattttattagaaggcggctaactttataatatttttacttaatttttaattttaggtaaacgtggaagaactatatatataatgtaatcgtgtcagtcatgtgttaccgtacgtgaacctatatttggtcaaaattattatatcacaaataaccatttaattttagcctcgtttatgtattttgttttcacaattccttttaaaaatatataaacttaaatcaataaataattaagtaattgataaaataattatcattaatacttaatcttttttattcaaattaaaatcaataaataaataatattacaatgtaatatatatatttataagctatatatatttagataaagtatttattatatatattctcaattttatttatctaagtttacattaattttaaataaattttaagctcctatcattttaattttaaacaaatatatatatacatatatttatatatgttcagaggaaaatggtctttaaaaaattagtttgacttattaaaatatatgtttaggaattaggatactatattttatagggtgggcatttgatctaagctaatattttttcctcatccgattgaatctaattagttattagttttggaaaattacatatcgatccgatctaattcaattaggtctcacaatccaaccagttgagttacaagaaagatgaaaaacagagagagaagcaagaagagaaaaggaattctttattcaa

SEQ ID NO: 383051 - DNA, 1221 bp, Cannabis indica
tttcattacttattactaaacatgaaaaatcatcataccaaacgccccattatagtgcatagtgattatgaagatcaagatttgttgattcttcatattgttggactaggaggactaggaaaaaccatacttgctcaattgggaaatttgaaccaaaattgtgggtttgtgtgtctgatgtatttgaattgaaatagattgccaagaaaatcataaatcccaagaaaacttagacttgaacacgttgaagaatcacctcatagaaaaattatacaggaaaaggtttttacttgtgctagatgacatttggaatgaagatagggaaaagtttgaagttttactgaggagcttgggtgcaaagggtagcagagtattagtaaccatccgtagggaattggttgccagaataactaagactactgaaccatatgagttaaaaagtttggatgaagatcaatctcggtctttattcagaaaaatagcatttgaagggaaagagccagataagtctagaattttatcaatgaaaatggaggttgtagaaaagtgttggagtcttggagagttcctcttgtgatcaggacaattggaagactatttcaatcaaagatgtcattacaccctgaagaagatgtagaaaacgtatgttattcattcatgatcagattatgcatctagtaaggggtttgttctttgaaccaccttccaaagtatcgggaataataaagaaaagttaaaaatgcatgatgccatgcatggccttgcaatttcagtagcagggactacctggagttgtgatagatggttcaaaggaaaaaattatgtgatgataaaatttgtcaagtgacaagtatctttaacttatagttctatcgagtcattcaaaataccaatgtactcaattaaacaaaataagaatgtaagaacatttttatcatccaatgaaataaaatatggtcataatcaatcgaccttgtttggctttgcttctataagctccctttagcttttagaattaaaaaagtcattcttagggtgtttggataaaaaatgaaaactctttttttttttaattttaaaagtcatttagaagaagctaggatttgtagcttctccaaaaaggacttttgagtagctaattttaaagggtgactattcaatggttacatttttattgtaaccatatagttacatttttctttaacctgtaatagcaggtta

SEQ ID NO: 383052 - DNA, 1167 bp, Cannabis indica
acttgggtagataaaccagaagcggttaaaaagaccttcctagaatattatacacaattattgggctcaatattagctaatagaagagctggtatttctggtattgtttgcgagggaccaattatagtagataacaaagattcttttcttagacaatcgtacacagaggaagttagagctgcactgttctcaattcctgactttaaggcgacggggtcagatggttttagtagttttttttaaaaaaaaatcttggaacttgacaggcgaagatttcacattgcggttctttatgtgcttaatactagaaagttgctttaggaggtaaatactacaaccttaactcttattcctaaggctattaattaagtacccaagtagtgttagtgattttagacccattgtgtgttgcagtgtgatctaaaaaataataactaagttcatttgtgctcggttaagattgattcttcctaccttgattgcatctaatcaagggagttttgtgcatgatagtgtatattgctcaaaatattttaattttcaagatttggtcaagcattatggttggcataataattctccttcttgtagggtcaaaatggatttttaaaaaacttatgacactgtgaaatggagattcattggggagatgttagaggctttaaatattcctctttctttttgtagatttggtcatggactgtgtatctaggtcaaagttttccttattgattaatagtactctttatggctatttctcttctagaagaggtcttaggtaagggaccccatgtcacatttgctatttatacttggcatggaatacttttctaggttgatggctacagtctctttaagaaagaagttcaagaatcgtcctcactacgctcctttaaaattgaatcacttatggattgtctcttctatattttgcagaaagagatttgaagcctattggcagttgtataaatagccaatttgattggtttgtactttgatgcaataagaagtcagctttcttaccacaaaagaaaagcatggtctggatagatgttgcgatatttagcacacgcaagtgtacgtatcgtttcaagtattagactcaccaggagtgaggtcgatcccacagggagtggagttaagtacgttaaaattaaacttttactt

SEQ ID NO: 383053 - DNA, 2079 bp, Cannabis indica
atcatcaaagtcttccttcatcacctactagttcagctgtgactgcaattagtgggagaagctctcttggtatgagtttgcaatataagggtgcttggtgtactcctcccagaatatttatggaccatcaggtactcccaactgtatgtgttatatggccatcaaatgtaggagtcattgtttttaatatagagcattgcactatattagcatttaaggtccaaatattgactttcataacctaactaccctaagttaggcatatggtaatggtatgtccacaaagtctgaagttcgagtgattcttgagaacctacatagcaattgctctctgctgcgttccttatattgttgggttaggtgggtagcctagtttaggaggaaaaaatatataattaactactatataaattttcttaattatttagataataatgctgcatgtgcatgcatgtagattcttggctaacataaattatgggtttctcatgatatcctaactctaaacagtgttgaattgaaataggcttcatctagtcttgtaaaaaagagtttcaatttgttgcttctgatttctgtttggtaggatgaaataataccacatttggaaccagggcgtttgccctccacagtggacccagatgcattaccacagccagacaaggggaaaaggatcccacagcgtgtaccacgtattagtgcatggaagcttgcaaaactggactctaacgaggcaattaaagctgctgagaaagctagagcatcatcatctgtgcttcgaccagtcagctctcagctccatccatatcatgctgattatttatccaatagcagcttcagtggaaggagcagtcctgtcagtactgatcatggtttcaacagaaatgccaaagctgggacttccaagctatcccctactaggagtccatatcctccaagtcgtgctagtcgggaagatagtgaaacatgtcatcatagtgtcagtagtttaagcagccctcaggtttctaacttcgcccctgttcccttgcaagttgagaagtttccaaatagagatcatcaacacaaccccatttatcgttcattgacggatcaatccctgctgcatccagaaaaagaagaaagcaaaccgaatgaagctccttcgcaaatacctgcaaaaaagaacaactccagtgctgcaggaaatgtgcgatcctcgtcgtcatcgtcatcggttgtttgggatcaagaggcaggacgttttgtctcctcttccagggaagcaggttctactcaagtgtctggggcagaaatactttacacaggacaatccattttctttggtggacccattgtgaatgaacaacaacaacaacaaaccaacagaggaacaagaagtagcagcagcaatgcggtggatagaggcagctctaattatcagtggggaagatcacagggcggtggccagcttccggtgttcgtcccaagtgattatcaacagaaccagttcccatctagattgccttgattactaaaacaactgatctctctttttctttttttctttcctttttttcacgtagatattagtattgagagttagcaagagttaatcgttctctaacttgtagtgatggtcttttcgaactgttgggttgtaaatactattttagctgactttataaggattccattcaattttctgggaactgttgaggtttgttaatctgaaatcaattattaattcaagttatcaaataccattttaattacaaaatacgaagtcaataaataactaatataatattatttgaatttgggcatattgttataaactgtttttagaacatggcaaacctaatctatacttacattccgaaggcagaagcaccacctcccaacgctaccatcttgacgctgccacctctctcttcatttcttttgtatgtttcaatgttaaatttataaacttagagcttctccaatgagtacactaaatttggtgtcgcactattactaaatttagtgtcaaaaattatttctactccaactacaacactaaaaattacactaaaaaatattacttattattatatt

SEQ ID NO: 383054 - DNA, 2206 bp, Cannabis indica
aaaaaaagaaaaataaattacataaccaaaaactgaagatgaagggatcatttttgaaggagttaaagacgatgaagagatcatttttgtataataaatccgaaaactgaggtaaatgtagtattacttcattaaagttgatgaagagatcatttttgaaggattttcgttaatctatgcatattcatctttcattcattttgtttagtggaacaattaattagattaacattgaaatgctcagtaaaagacatatgaatacctatttactgaataaaatattgggaagagacaaaactcatgagatcattattcattattttcaattaaccacctaattattactaaaaacattgggatgggggaattaaaaaaaataaataataatattacatgttacagctttaaaataaacatatgaagtttttttaaaaaaaatggtgaaatgatagtttcaacatctcattatcatacaaaattcttccttacatttaaatttaactaacaacaacaacactgaaagtcaaaacgtaaataaataaacaacatgaaatatggtataaaaagaaataattaaagtgtataatacaataatttaattattgtttttcaaactgtaagtatatataataatggtttaattaatttacaaaaggaagaaacaatgttttttttattttttttctatgttttggggtaaatagcgacgtaccactatctctaataaatagtgtaaaatttgtgttaaatttagattaaaaagagaattaatattatttttgacctaaattttataagtaaaaagtgtaaaagtgacttctcgaataaagacttggagcattacgaacctttcttttgcgggaaggcaggcagtccatgtgaattcaattttgattactgtgcatttttattgaagccaaattatggttttacttaagtaggtagttaatgacattgaagcaatttgcaaagcatacttatggaaagagcagcatgcactcaatatggagctggtttaatagcttgggatatgtttgtcaaacaaagtcaagaggtggtcttggcctgaagaggatagcagaatagaacaaaacagttatatgttcaagtaagtatgggcgattgctaataaagaagaaaatttgtgagttaagtggatacacagtttatatatcataaatgaagattggtagggctacaaagcaggtggtagttgttaaagatcaaatcaaagctctactggatgctcaacaattttttttggatacaagttgtttgttccttctcagcaaagggtccactagagccaagaagtttagggacgtttaacatacatacccaaacgtagctttatcatgtggctagcagttcaaaagtaggccgagaataagagaaaaattgtttaagcttaagagcattaatgatcctgactgtttgttctgcaatgtacataaagaatatagtgagcatctatttttacatgctcattttttttatcaatgcttataggaaataaaagtttggcttcaatgaaaagcttgttctgcatctattactagacttacaaggtggattgaaagagctaagaccaacaagtttaaaaagcaagtattgtctgctgctttgactagtttagtttatcagatttggaagactagaaatgacaagctttgaaattcaaaagctggagatgtaaatagagtaacttgtatagttaaagaatcggtgaaacaaagaattaacagtgactcataatgattcttatcttcgcaaatgttgatatcttgtatagaatacttgaggtcttttggttaaagatgctcttcagcatctccaatagagatgaaaataagtgatacaaatgtaaaatatgtcacaaaacaaaaagtgatcaaaatttggatcacaacataacatgatctaaaatttgcatcataataaatgctatgttttatatttatcattatggcatttttaatattttattattaattttagttaacaagctcctttacattaaatgacttgcattatcattattactattaaattttatatttatctttgcattattagtattagtttatagtctttctaatgaattattaagtaggcattaaatgacatattaaattttatgtaaagattttataattatgcattgaagtacaattgtaaaagttgatgtaaaaatatcataaaacta

SEQ ID NO: 383055 - DNA, 2646 bp, Cannabis indica
aggaattgattcaggggccttattgcacaaaggacatgtgagatcgacatgcacatgtctattagagaactgtaactttattggtagagtaccagaaatcacacgccatactagatgttgaaccttagctggaacatgagtaattataaaacattacataattcagaaatcaattttgttatgttaacttgtgtttgtatatgaaattataaaactttgttaggattgctaacttaaaaatctaaggcgaaaaacagctcaaacaacccaattgcacaaactcagaatagtgaatgaaattgaaaaggcaagaaagctagaagaaagcattaagcattttgtacgttatcagcttcagctccaaaacacgattgattaaatttgaaacaaaattgctattaagtaatacactatatagtttgtgcaagttgatgaaacacatcagtgcaaattacacctaaatgggttaaatttgatcaaagccttttttgcttgcatgctcgtatcactattcaataaaataaaaattgttccgagatgtctaaatcgagcatcatcatccataagatctgcaaggccagtaagtgaagataactcaaaattaagtttgaactaaaattcaaatacaactcaatattctcgagattatattttgacaaagattcagaacgaaattattttaaaagtttctgctataaacagatgtacctacctgaagaagtttcataactcatcgtgtccaagatgtgccttggtagctgctttttcagcttcttctaaaacaaaggttttaagcgattcaacgttcctgggacctgatcattaagcatggaggaaaaaattaaatcatatatttctatctcactttctaaaacatttagcgaaatacaatgcttagttttttttttaaaatatagaaccaaatacttacagattataaagtaagcatgctggcacaactacattatcagattcaatattttcgcattatcatcatttatcaataacaatctcctattatcaatgttacaatcttgtcattgtcaccactactaattctgtgcatgaactccataaaaaggtaatttatcatgcctatgttatcggaacgactccactctcccagagaataagagaaaattctctagtctaaatgactaactatgtgcgatactaagctgagatgtctataccagaataaatctattgtttcaccaaatcagaaatggaaaggagaagttgctttgccgtatgtttcaatatggagatataagcactgcatttcattaatagacagatttcaataacagaaacataaaaatgacttcatgtctatggttgttttacatggttccttttcgatatagcttaaaaggccatttcttataaatgtcccttacttaagagtacaacaaactagacttctatcttaacagtctaatcatgacaggagtggttgataatgtgatcctctaagatagggctttaatacaaaactatccaataaatcaaaccaaaaacagatacttaatgatagtgataaaacttcctatgtacaataataaaaagttctattagagtcctaactgaataagtcttccctcaactcaactgcttaaacaacatatatattcgctaaatgttcaaaatcgaataagggttttcaaatattgccttttattaagcattgaagtttcacataaagccagaagcacaaagaacaagcaatatgcaaacacactaaagcgagaacacgacatctatctagctacctacttaagttataaaagaatgctcctaagccctgtacacaaaaagagaattaaacataaaacatcaataagatccttatcccaaatctttatagtcttaccttgatattttgcagcttcttctccatcataaaatagtttaaacgtgggataagaatgaatatcagcttccgtgcacactgatttacttgtagcacaatcaacttccccaacttcaatttcatcctcactttccattaactttccaaggtcttcccacaaggaccctagattcttactgttatcattttaattcaataccaataccaataaccatctatcagtacaaattaataaaaaaagtgttataatgtattgataggaacttaaaaacccatctgggtgggtcaaagaggagtgaaacttaccaatgtttacaccatggaacacagaatttaacaaaccaagctgtatctttctccttcacctaaattatacaatgaaacaagaactaatctttaatacaagaataaatgcagaacaaagagtaataacccagtacaatcagaatcagattaaatcctatagacctctacagacaatacacaatcacacaaaacaatcagaaacaaatacaatataaagatttattcaagcagtaatagaagaagaataaaataatttgattggaaataattgaaaagctatggatctaagaattaaattaggttattggttaccttgtcagagaaggtgtcgggtgttagggttataacttcagctttggtgtgatgtgataaggtcaggagaagaagaagtgaggccgtaacgagaaaaggagagaaggatttcatggctggaggaagaagatgaagagggtttgaactgaagctct

SEQ ID NO: 383056 - DNA, 1805 bp, Cannabis indica
tttttttttttttgaaaatcataacaatagattaaacaagcattacaataacaaagttagtaaaacttcttatagaaaacaagcaattattaatcaaacagaaccattacaaacaaaacactaaggaatacaaattctagctttaatgctagattttatcaacttattagtacttatcagaagctaaagatttcacctcataaatacaaagttctacattagttaaaaatgagaaacataatcagtatataaagataaatactatttctattagtaagaaactttttaagaaggtgctcaaaaataaaactgtaaaagtttagagtggagatgaatggtctctgatatcccaacaatgagtttacgctaataccaactaacagaaacattaattagttataaacctaacaaaatttacaatattcataacattcaaataaaaaatatttaaacaatttatatgaaaaaaattaagaacatcatttattattactaataaaaaaaactactccaaactaatcattataataaaaatcataataaaaagtaaaaaattaagaagaaaaaaagaaactataataatgaacaattgatgctgccatcttcttctttttctctctcactaaaaaatattgtctaaaagtccttaaaaactaaccccaaaagttctatttataccccataaaaatcctttgatttaaacaaagataaaagtttcaaattttgaaattgatctctcgccgtggcgagagccttctacttaaaaattgttatcgtgtgattagttagtatattagccataattccttcaatacaacttgaaatttgacgattcaagatgttttgaaaaactgagaatgagatctacaactttcatgtttagctccaagttcagttatgctttcaaaattgtcgaaatttacaattaaattctaccttataaaaccaagctctacaaaattgatattttttttaccaaagtatgctaaaacaattctaagatactctaagcacataattagctttccaaaattctaacaaattaaaatcacactaataaaacattcaaagaattaatttaaaaatatttacacataaaattagtcatatttataaaatatggagttatcactgataaaggcatcaatgaaacaattaaacgaatttaaactccttctacaaaacataattaaatcatctccaacacacaaacttactaacttaaggcatttagaaagaaagtgatacctgaaatttaaaagcttagaataataaatgagaaaacgagttaagtactccgtaaccagaacacgaataataaaagagatattgtgtctgcctatatgagaatttggactcccttgaatttttcgtgaactattccatttaaaactaatgaatatatacattgtactcctatcacaaattatgacccatttaataaaagtgggaaaagagtaggctgccaataaagaatatagagtttagtaaatatagtaaataaaaaagtaatatttattgtgagctaaatttgatacaatattatattttatactaaatttagcacaatttttagaatataattggaataataatttttctgttaaaatataataatacactacttttttaacactccattaaaaatattctaaaactgtggatttattcttcacaaaagcccttttattgttgttcaccaagtagggtaaaacaaccacaactagtcttttacataggattttagaaatgtatttgtaaatagataacaaataattacctttaaaaaattaattttttaaaaa

SEQ ID NO: 383057 - DNA, 1912 bp, Cannabis indica
tcgatcagcaaatacggtggctcgtgacttagctcgagcttctgtatccttccctgattgtaatttcagtttggattctgttccaactgttttgttacctattttggtgactgatatggttatctaataaaagttgaattaccattaaaaaaaaaaaaagtatatataaaaagtgagtagttaactccttgactaattttatttatgtacaaagtaaacttattgataaatagtagctagtcacaattacaaataagatacaacgatggcagtgactttgaatgtagtagtaagtacaagtgaaagtgagatacagttatgataacaattttaaatttagtgatgattacaagtaaaatacggtgacaactttaaatgtactggtaaatacaagtgaaatacagtgatcacaataattataaaatcatatcatgatttttcaatcattaaaattatttttgctatcatatgtgaagatattaatttattaacctaagtctgaaagttaaaaaattaaaatactattaaaaaaattatataaaatattaaaatttaaaatttgttataattttataatttaattatcactaaataatacaatcgcacgcgaagcgcagtttgttttttaatttttaaaaaattggcagaatattttgtttacaatgagctattatttgtaatctgtaaatttttccacatcacttacaatatataaaagaaaacctaaaaaacctaatattttagaatcatgagaatatatgaaatccactcctttaattagaagtaaattagttattttgaaatatcagtgactactaaccgttttatttttttatatataattttctataacatgttgccaacgagctatttaaaaaaatatatatatatatattttaataacgatggcactcgtttgacaaggtgtgtgggaatcacaataatttgtctcaaaaggcatttgttggtgtgatggtgatggttgtaatatcgcaattatgagaaaatcttggttgcctaatgtggagaatccttttgtggtgtcttctcattcgagtttgctccatgctaaggttaatactttaatgagaattgatggtaatgcttgggactttgatctgattaatgatttattttccaattgccttgtctgccgttgttattagatctttttctgcccggatttgaactgctagggtactggggtttaggacggacgttccagctgaaggagcttgcggttggcccggtctaggctcgacatctgcccgttaaatggcttcttcaagcttgatgaaaccatctgctcgatcaaggaaatcactcatagagtctacaggaccactcttcttggtgtctttccacagctctccaagaattcgatgcccccagtatagcagctaacttcccttcttcggttaaccgtgctactttttcccttcttcgggacatgtgattggggattggacggctgaccgttcagagtttgggcagtatgcgcagcaagaatttcttccgagctgcccagtgggatgctggacgcaatctgttggttagcaacttggtaggccagccatattagtacggtagcctgtctggttcggtcgtcaatggctgcatgttgagcctttaatgtttccgtctctctatccctccattcggcgaactggcgcctctgctcttcgaacgcaaggttcactgcagcacggagctcttcctgatcatgatgcaaggtattagtatgaccttgcatgagcccaagagcattacgaaggttctggatctcagtgtcatctccaatggttgtctggacatttgttgctgaagggattccagtgctgggagtacccagttcggctgctgaactggtgtttccagtctcttgcacaccaggtgtaaagcccgcttagtt

SEQ ID NO: 383058 - DNA, 1900 bp, Cannabis indica
ttttttttttttttttgctgtttctctatgatttggtttctaagaaacaagtgtccttcccagacttgtatatcgcttactaaacgctaaagcccagatgagagtttaaaacggatctgtttaaaaggaatgaaatgatacaaacgattacgattaataaagaaacaaaagaaaaagcagtattccctgttgagaattatttacaaagtggtggacccttaactatattcaccttgatgtaaattagataattatgttaataatattagtatgaaaagagtgatgacatgtattaatagaaatgaatagaagattgggcaaaataaaaaagttacattgtaagtaaagaagtcaatagtgcatattagtagtgtataaatgaaagagtaaactgtaaaacaaaatatctgtaaaagtgtccattaaaacaaagtcagtggggtatagatagatgaactatgtcccccagtgtacgccaatctttataaagtatgagataacaattgcaatataaccgggccaaagtataaatctaatgtaaaaggaaaagttaagaattaaaatgcaaactcatttcaaactcccaaagatatcagttatccccaattttcctatattcttcttgaaactctgctttggataatagcttccatatggtcttcccaatgagaatgcggacgtacaaaaataagatttcaagttttgtgtacaagtatatgagttttctttttttttgaaaaagagaaagaggccaaagtctaagcttgacccctcccccgacatatatagaaagcctcacttgtggcggaggaataccatgattacaagtgttctatcacaaacatataaaacatttaaaacaaattatgtactgttataccacattacacaacagtctccagtcgctactcaaatctaagaacgaaaactgctcaaaacttttagttttataaacccaaacagctgtccaaaatctgactttttcccacaagtcttcaactggagttttctaaccaatagttaataacttcctatcactaatctgccttcaaaaattcatagattttaattagggtccactaaagtctctagcttccttcatacgatcaaagcatataattccttgggagtgtgaatatacttaaattacttaatgttggactttctatgagctagttgttgcaaccaacattcactatttcaaggagatttgataaccattgtcatacaacttcagagtcaaagcacacgagtgtgtatgtcaactaacaagaagatcatacacaaaactatctctcgagtttttcgtattccaatcactcgtaagtgacaccctagtttcattattatattactactctcctacaagctggcaatgacccacttcccaaatttgcctacaatggcttcaatagtagaggatgttgaatccaccaccaaatgaggaagaattgtagacatcaagagtttcaaccaaaagaaaaagttcacaatattttaaaaaaaaatggtctcgtcctaagattcatctttaagagtaaagataataaatttataccgcgggaatgggtaaccaccaggacccgcccctaatgggttgggaattccccgtcgtggtagttaatagggtggtggtgggagacaatttcaatacccgtagcggggagggggtgggaatgggacggggataatactatccgcaccatatgcgaccccgatatactatatacagttttctttttattttcaatgtatatatagtgtatatatatatatatatatcaataataatcaaacttaatttgattatcaaccataattaaaattatatatcatatgcttaaatcatgaagatctaatgacgatagtaactgatgatcattgtggattataagtttta

SEQ ID NO: 383059 - DNA, 2047 bp, Cannabis indica
aaatggttatattacctggtccccgctgtgcgcatttgctatgttctcatcaagaagagtcaataaggatctattaagtgcattctgctcgaccatctccagtaactgaattattttaagaaccaaagtaataaggaaatcttcttaagcaaataaagcaagaacaagaaagtaatcaaatttcatggaacagaagtgaaaacaaggagagcatacagttgcttttacatcccttgatgtcaaaatttttgttaggtttttccctagcttttacaatgtcagtttgcattttatcatagcctctgacacaaaaatagtattagctcatcagcaaaaatatacaagaatccaatcctaaaatgatttaagtttgttacttttaacaaacctgttccttcctgcagagctttctgcaaagcttccagctcgattaatctatcttccatagcctgccaagcccatgaacatattatcatactacaaaatgaaattaacccatatttatatggggtgtataacaatatataaatacatatatataaatatatacctcagttttaggaactgcaaaccgaagttgacccaactctagttgtacatgtgaaaaaaattccttcgtcaatctgcagccatcgaattttagttggttcaacacagatttttgaaccacataacaatccatatcataattcatcgaaggaagtgaaataggtgtaaaagctactatgaaatttgtactccttttttctgaaaaattgaaaagcactgaccttggcctcaaccttgcgatctcgaattcgatgtcttgtgcttcagtatcaagaaagtactcaataagcccagcggcagaatcaggggccacacgagactgaaaaaaaagaaagagaaaacgatattcattcaaatttcaaaaccacaaacacacaaatgaaaagtaaactagaaaggggaaaaaaaaaagtattgaattacttgacggagagctgcacggcgatttttctcttcaagaacttgttgttcaaaagcttcccgagcttcggcatccttctcaagccgtctcttgaactccaccctagcgaggtggcccgtttgtggaggccctaaaatgccctctgggtccttcaattccaataaaaaaagttcaaattgacaaagtagaggaaattagagaagggtggtggaagaaaagcaacaaaaaggaaagtacctacccatgcaacgcaggaaattctggtgggtctgaagcgagtaggattgagagatgtagtacggaggaatgggatagaagtggcgaggccgattgaatttgagagagcggccatggcttgagtgagttgaagctatcatcactgtgtgctcggcgattttatctttccgttatccatttgagtggcaataatggtaaatagatggtttgttcgtggcgggaagaaaacgactgtccgtacgtggggagtccaaagcccaagcccacgtttctgaacatggactcagcccttttttctttgcatggggtgggatttatttagaggaaattacggatgttaaagctttttatcataaatatggtagatttaagttcgaccaatttatataatattttttattttatagtttttttatggtatttaatatgccacatacatgtaattaggtttttaaaatccatatttaatgtttttatttgtttaagaagttttatttgtcattgatatcggaaaagtcactgtagtttgttgtcggtaccggaagagtcaccggagtagcggccggtaccgaaaaagtcaatggagtagcagccggtgctggaaaattcgtcggaattgctgtcggcaccgaaaaatttgtccaattgacattgtcgcgcggaaaaatcactgaacaaaatcaccaagaaagaattcttggtgatttttctgttgacagtgtcgattctgacgacttttctgacgctagcagctacttctgcgactttttcggcaccgacaacaaactttggaaaaatcatcagaattggcatagtcgtcgaaaaaattaccaagaaact

SEQ ID NO: 383060 - DNA, 1535 bp, Cannabis indica
tttttctagacttttaattttttcttgattttgttttgaaaatagatatcaactgtgatataattttcttttttttttatggagatttatcatgttttgtgattgttttttatttgagctgtgttatttgtgtttatttttgtaagaacttttactgttaatgatgatggcattgaagactagttaggaaatgcaaacaaaggatttgattgtaatgtttagctccatgagctaggtcttgattcattctttaaatacagtacaaaggatgattctagaaaagttacacctcaccaagattgtaacaagaaataaaatattttatgaaagaaaataatagaaatatattaaaaatcagtgtgtaatcattggcaaatgatgagatgtcagaattcattggtgtaggcccacagtaacagatgacagggagctagtgcataaatctcttaacacctcctctcaaactaggtgggattacacctagtttgtccactaagaagttgaatcttgaaccaattaagctctttgtgagacagtcagctgtttggtcatagaaggaacatatcaaccttctaactttttgtttagaacattgtctcaaacgaaatggatgtctaactctatgtgtttagtgtgagcatgataaaatagatttgatgctaaagcactagcccccatgttttcacgccaagtgattggagtattagacactgggaattttatttcttggagaagggattgaagccatgctatttttgctgtgaattgggccagagccctatattctgactctgtactcgatcgtgatatgactgctaatttattagaggaccatgatacaagagtgcctccaagataaacacaatatcctgttatagaccttcgatcatcagggcaacttgcccaatctgcatctgaaaaatctatcaagtttaatctgtcacaaactttgatgtgcaagccatgaaaaattgttcccttcaagtatctgagaattctttttgcagcacacaagtggctagttgtaggtgtcttgagaaattggttcagtttgttgacagaataactcagatcaattctagtgtttgcaaatactgtagtgctcctataaggctcttgtgctcggttggatttttaagcaattcaccatctgagatagaaaaactttttcccatagtcatgggagttgagcaaagcttcaggtgcaacatgttgtttttctccaatagctcatgaatatatttcgattggctgagataaatgccagtctcgtcacggtatacttcaatcccaagaaaatagtttagttccccaagatctttcaaagcaaaacaatgattaagtttggtagcaaactgtttaagtttcatcgagttatttcctgtaatgaggatattgtcgacataaatccatacaagcatgatatcagttgtagttgagtgccaaaacaaggaggaatcatgtaatattccgatatatcaaatggtaaatattaatgtttataattatattatgggttaattagataataattg

SEQ ID NO: 383061 - DNA, 2894 bp, Cannabis indica
ggtaagtaatatagacagcaccacagagaagtaaggggtgagttggcaagttagttgtgtgagttttgattgtgtgtatgcttttgagggtacactcggttgtaggaattgtttgtatgtgagaggtgtgaagaatttgacttgtttgtaacctttgttcggagagatccaggctctcgaattcctgggtaacgaatagaaggctattcagccatttttcatcaattctgctctattttcttcttctttctgcttgttgttgctactggtttgacaggaattcctatcaaattggtatcagagcattgatctcatggggccgaaaaaagacatgggtggtgaagccatggatgaacgcttggaagctctgcaatcagaggtacagaaggagattgcagaggtgaggtcgcagttggggaaagaagtgtcggagacaagatcggaagttcagtgccttccggagatcatgatggctcagttgacccgattctttgttgctgggaaaattccggcagagaccaccacgaccagcaacgaatttcgtcatcccgtaacgcacggactgggatcgtcttcctcggcgccggtagaaccagaggtgcatttcccatagtcgccaccacctcggaataacttcccaccacatccaccgccacatcccaacccatttcaaccaacgccgcaccaaggggggagtatcgaccaccgagaatggagattcccgtgttttcaggagacaacccagaaggttgggtatatcgggctgagagatactttttgatttgtcaattgacggagctgatgatgttaaaacaatcattgttgggttggacggggatgccttaacttggtttcagtgggagaatcagcgcagaccaatcaactcgtgggcgacattgaagcaactcttgcttcaccgattttgggtagttccgatagggtcttcgtcggaggagtttctctctatcacacaaacttcaacggttcgggattaccgtctgaagtgggaagctctggcatcgagagttcccggagtacttgaacacatattggaaggcagttttgtgaagggactcaaggatcatattaagggatctcttcacatactccaaccaatgggattagctcagatcatggacgctgcccagagaattgaggatgggaaccaattattctctatgggaccacccacaaaacacagcaaaccgcaattgagcccaataacaccatttcgacaaaatccgatttccttccaaaaccgtgccatatctgctgctcctgcaccaacaaccccgcatggcatcccaagtaatactaatgaaagagccccaaccatgtgacgaatgtccgaatcagaataccaagagagaagagcgaagggaatatgtttttgatgcgataagaaataccataggggtcatgtgtgcgaccagaaaatgctgcaagtgatgttgttcgctgatgaagacgaacctcatcccgctgtggagtcaccaccaccgtccccagcagcagatgaaccagccgaggtaagaggagaccctagccactttgtccttgaactcattagtgggaacttcctcagctcacacaatgatgttagccggaaaaatcaaccaccaacctgttatggtactcatcgatagcggtgccactcacaatttcatttccttagaagtcgtgacagccaccaagttacccatcactcaaaccaatggctatgggatcttgttgggtacgggtgatagagttaaagctgagggagtttgtgccctagtgaaattggagttaggcgcactacgggtggtgacggactttcttcccttggagttgggaggagctgatgtgattttgggggttaaatggcttgaaactttgggcaacatgcaagtgaattggtgctccatggttatgaagtttgaacgggatgggacttgggtgacactacagggagatccaagcctttacaagtctcccatatcactgaaagccatgatccacacggtggaacaaaccggttatggtttttgggttcatttagggtctttgcacactacgagtggcgattcggagccctttataccggctgtggtggaagaagtgctagagaaatacaccgaggtgtttaacatgctattgggattacctccggagcgtgccaaggcacaccgaattatcctcaaagaaggagtggggccaatttcggtacgaccctatcgttatgctcaaattcaaaaggatgagatcgagaagatggtgcgagaaatgctcaagaagggaatatgtgcccctagcacaagtctgttttcgagcccggtgttgttggtaaagaagaaagatggaagttggcatttctgtgtggataatcgagcattaaatcgtgaaacagttgcagacaagtttcccatacccgtcattgatgagctccttgatgaattgcatggagccaagtttttctcgaagctagacttgaaatccgattatcaccaaatccggatggctgcacaagatatggagaagactgtgtttcgcacacatgagggtcactatgagttcttagtcatgcctttcggtttcacaaatgcgcctgcaacgttctaaggcctcatgaattctatctttggggatcttctccgacatacggtgttggttttctttgatgacattttggtttacagcccatccttggagacccatgtggaacatttagaggaagtattgcaaaggctgcaacaacatcagttgtatgcaaatacaaagaagtgttcatttgggaaaaatcaggtggaatacttgggacacattatttcagcacaaggtgtcttcgccgatcccactaaggtggctgccatgacaagatggctgtgtaacgccctaatgctaaggcacgctac

SEQ ID NO: 383062 - DNA, 1060 bp, Cannabis indica
gtaaatagaattgaaattacgcgctttacctcttttccgattttcccactgatagtcccactttttattgaaccaatcaactcagacaactcttggggagtaattttaatctcattaattgtcaatttctcatttttcatgtaagcagcaatatcacccataatccagttggcagcaagtttcacatcagaaccctttgcaattgtagcatcaaaaaaatctgcaacctaaacacataatcaacacttatagccctttatcaaaataaattactacaatgtacaactgaattggtgatatagagctttgaacagaaacaatgccatcaaattcttttggaggactcacatttatgtcatttgcaaggaaagaacatcttgcatgcttagacccatctgttcatacctccgacgtttcatttctggaagttcaggcaaagaagtgtgaatactatcaacaaattcttgggtgagactaactcctggaagatctggttctgggaaatatcgataatcagcaagtccttcctttttcctcattgtaacggttttctgaaatacaaaagaaaggttacaggagtgcatacatcaaaacgaaataaaccatgaaagcttcataatttaataaaaaaaagtactggtagaagtagcaagaattagcaatgacctgaccaccttcttcccagagacgagtttcctgtacaatttcatcaccccgcccttgactgagaagaagtgcctgccttgcaatttcaaaatcaattgccctgcccattgaagagaaggagttcaagttttttatctcaacctgccaatacaaaatgtaatcaggtattcaaatccaaaaaatgtacaacgaaaactcatcataaaattccacataaacctcagagcttcgatgtgacaatctacagaagactaatccaaatttatcacataagcagtctatgtcatacatttctttttcaaatttgcacaacatattctcatgaaaaaaaaaatgattaccacaactcataataagataacaagcaattaaaaaacaggcgttcacaggaatc

SEQ ID NO: 383063 - DNA, 4059 bp, Cannabis indica
aaaaaaaaaactaaaaaacaagtgaaagcaactaaaaaaataaatggaacagctagaccaaaataaaaaataacatgatatctacaaagcaacaaaaaaataacaaaacatcaaccacattggaatatgcaaatcaatattcactcctcacttgtacaatgaagtttttttactaagttttgacagcttaattctctttttgtattattacattatttttcctgaatgaattgcggcaaaactcccaaaagtgatacctagcatacaaatgttgggaatattgtacaatatcgaaacccgtggtggctgtttcatatatatatttcactctttctgattattaagactgaaatattgagatataattcatttatgtagaaattaattaatagtattttttaccattcaacatcttttttagggtttttgtaaatatttcatatcgtgtactagggttttttgttcctaaatccttacctgttggaggttgacattttttctctagccaagcgaccatttcccttgacttaggtgtagcttggtcgagatctatggttttgctactgtgattgggtttttctactgcaattaagtttttacgattattcttatgtctataatatttgatgggataaaaataactcaacgaattcataaatgcatatataagaaaattctacaatagaaaaacgtcatttgtccccataggatagtgacattttattagccattgattatgttgaccggagtttatggagagccgaatcgtgggcgacgtcaacaaacatggaatctattaagaattcttgcaactgaatctaacttaccttggtgcataattggtgatttggacaatgttctttctcaagaagataagagaggaggccatccttatcctaggtagttgcttgatggattttagagttgtattaacgactgtggtttgttggatttggatctctcgggttatccatttacttgggagagaggtagaggtacaaacaattgggttgaagctcatttagaccgtgcgctgtcgacagaggtttggtcttaatttttcctaaatgcctgtcttcttaatcttgaaacctctccatctaaccattgccctttatttttggaacccgtggtggctgtttcttttgctccgactaatcgtttttgctttgaaaatgtgtggttaaaagaacctcttgtgttttaaaatcgtggaagattgctggtttttagactcgtctatggcagtagttgagaaaactagcttgtatgcttctaatctatctcaatggggtaaagaaattataggtaatttttggaagtgtatcaagcattgtaaaacggagctaaaatagttgaagaataagagagatgtaattttagttcagctttacagcgatgtgaagaaaattttttttgacatttttgaccaacgtgagatattcaagaagcaaaaggcaaaacaattgtggctcaaagaaggggaccaaaatagtaagtattttcataaggctgcaagctttcgaaagagaacaaaaacatcattaagctaagaaactcccagggtgtttgggtggacttggatcatggcttggcagaggtaatggttgattatttctctattttattttctttgtcggttgcatcttgcaatgaagttatggattgtgtagatcaatctgtcccagaattgatgaattttgagcttgctaagccagtttcagaggaagaagtgcgtaaggcgatcttccaaatgcatccagacaaaagcccaggtccggatggtatgacacttgcattctttcaaaagtgttggcccgttgtgaagaatgatgttatttctatggtttagcacttttttgataatagtataatagatgatagttttggtgttgctaatgtcgttttaatcccaaaaaagaagagccctgactcaacaaaggatttgaggccgatcgcgctttgtaatgtgctttataaggtgatcactaaggttatggccaacctgatggagctgtttatggatgttattattattgaatctcaaagtgctttcatttcgggtaggttgattttagacaccgtgttggtctcctttgaagttctccactatttgaaacagaaaaggcttggcaaagctatatttatggcgttaaagttagacatgagcaaagcatatgaccgtattgaatgatctttcttagaagctattcttcgacagttgggattcatggaaatatgggttaacattatcatgagttgtgtttcctaagctagatatatgattgtccatggtagtcatgttttgggcctttcagcaattctcgtaagtatgaaaataatggttggattcatggttgcaaagtggccaacggggcacctcgtgtttctcatatgctctttgcggacgacagttatctctattgtaaggccacagttgaagagacagttagaattcaagagcttcttcgaaaatttgagatggctttggggcaacaagtaaactttactaagtcctcgatttttttcagtaccaatacggagtcactagttcatagtcgtctttgttccctcctaaggatgaatgtcgcgtctgaggatagtttttacttggggcggcctagcactatgaattgtaataaaagagcggtgttgggttacctcaagactaaagtttgtaagtgccttcaaagttgggaaagtaagtttctttcgcgtgctggaaaggagattctggtgaaatttgtggtccaagcgtggcttagctatgcaatgagtgtgtttcttctacctttggagataagtagagatattgagaagctaatgaaaaaattatggtggtaatctaagggagatcgtaaggggattcattggatgtcttggagcaaattgagtaatcacaaaaagggtggcagcatgggatttcgcaatctacacgacttcaacattgctattctggggaaacagggatggagactcttaacaaagccagattccttagtgttaaaacttttcaaagcaatatactatccaaatggtacttttttattagccaaagattggttccaatctgagtttcatttggcgtattattcttgaatctcaggacctggtgagaagtggagctcgttggtgtgttggcaatggcatttttattccagtattaagggagtcgtggcttcctaatgatggaaaccctttaatcgattcaacccatcatgctttagtcaatgcatctgtttcgaacatgttatcaatggatggttcgtgttgggacagggagctagaagctgacttgttcactgcaagagatcaacatctaatactcaacattccctttcaaatttcatctactacggaccacttgttctggtacaaagaaaattttggtttatactcagtgaagagtgcttattcgttgttccaaaaacataaaggtagatggtttgatgatgaggtttctactttttggaacaaactttggagcctgcaattacctcctaaagtttttaatctggtttggcatgctggttcaaattgcatgcccatgttaactcaattgcgatctaagcgtgttgatgtctaggttctttgccctgtttgttgtgagcatgaggagaccatcttacactgcttggttacttgtagagtatcaaacaatgctggaatcgagttgggattggcacaattgttgcagtaggtgcttctttttttgactggtgcaatgcaacgtttcaaagttcgaaaactgacctgaaatgttccttggcaacaatctgttaggcaatttaggacgcaaggaacgatcttgtttggaatgggaatgaggtagaagctgagggcattgttgtatttgtaagaacttatcttgatcattgaaagaagactcgaaaatctgatatggatgcatcacaagctaaatttcagttgggtgataggaaagagcattgcactttaccagaagcaaacaatatcaagattaatgtggatgcgactgtgacagtcagtagtcccgtgatccgtaaggggaaatacaaggtaagttgtgtaatcccacac

SEQ ID NO: 383064 - DNA, 6425 bp, Cannabis indica
ttagtgttgtttgtttacaacagacaggtatgcatatacatgtatatatattaatctagtatgtataatattataaacatatgattatatgtatgactattgtttcaaataatttttgtgaagcaacttgcttatgaatatgctagaagaggagcttttttagcttgaagaagttacaacaacaggtcgtaaattaggatccccaagtgttatttctattgttacagatgtttctaagatccaagattgtaagagatttatagatgaagtagttcatcacttcggccgatgtaattaatcatttttttttctagctaattagaatttttgtcatctaaattttaacatataccaaattttataatctgaatttttatagctgttaaaaattcttcctgaactattgagattgttagatttaaggatttttgtctaatttcatttaagtttcctcaagagaaatcctaaaacaattattgagtctgcatacaaatttatggctatattaaactaatagaaaacagttcccataactcgtatggtttaaaaaaagacaaataatgtattagtcgtatctaatatttttctacgtgtcaatatagttatttgttcaattaagtatcgggtatcatataatttaatataataactgttaagaaatatcgttaaccaataataacgcgacatgtttaaaaggtattagataccactagtatctaataacaatgctctttacaaaattagccactttaattagatagcatatttggacaaatcatcaaatcattctttttggtgttactgctatatatacacaactatatgagaatgagacggtaaaagtctaatatctttctacaagctaatatcacaattagtataattaagtacttgctcttataccgtttaaatataataattttaaagaagcgtcgctaatctaatcaatcacaaaacaacacatctagaaaacgttagataccactagtaccaaatactgtcgtcaaccatcagttgctctcttttgagtggttcgtttgtatgctgttttttatttgtgtttgcccgatttggcctgattttgtttgtgtaatccttcactatagcccgtgttgatccgttagtgctttggttatggcttcaagcagccatgttgaagaaattgaagaacgatggaagaatatacagcttgcagaagaggaggacgatgaagttttttacggagataatattgaagaggatgttgctgaggaatcaatagataccagatggtgtttagtagggaggttactcactgggaaagtctctgattttcgtgtttttcaaaacgttatggcggatttgtggaaaccagggagaggaatgtacaaaaaacaacttgatcaaaactgattcctatttcagttttatcacgaggtggacattcatcgagttatcacgggtagtccatggacttacgatcgcaaacaaattgtcattgctcggttaaaggatggcgacaaccccagaactctcagtctaaatacaatcgatttatgggtgcaagttcacgatctgcaatccggtttcttcactatgaaagttgtacgtgatgtcgggaactatgtagggacattcatcgaatctgatcccaataactttgttggcgtttggcgggaatacctttaggtacgggtgaccttatcgttggacaagccattgaagagaagaatgaagttccgaaaacgcgatggcgaaagtttttatgctgtgttcaaatacgagtatgtaccagttttttgctttatctgtggccacatgggacttcagaaagatactgcccacggttgttcgatactccggccagttctctcgtgaaaccatacggcatcggcatgaaggctacaccacgacggcatcagcaggttgcttcatctcctttcctccgttcaggcagagccaccactgatttcgtcccagaagtcaatccctcaaatcgtggagatgattttgccaccaaatcagcaacgactcccaaatcaaatccagcatttaatcttgcaaaatcacatccaaaacaaaagggaattgtgatttatgacaatcaagaagaggatgaagaattgataaatgctgaacttaaaaggaaacgttttgctattgacaaaagcaatcctgttatattgggtcaaaacttgatacgtggacatggaattgagatttcatcaagtggcagtgaagataatatgggcccaattgatgttaatgagaatattgagtcaaaaaatgtgaatgtggtgggtcttggttcccaagcccaccaagaattatgagttgtatcagttggaattgccgcgggcttgggaacccacgggcctgtcaattcctaaaagacattgttgttcaaaagaaacccaatttcatttttttgtgtgaaactttttgtaaaaaggaagtggtagaaagaataaaagcccaattaagttttgaaggttgtttttgtgttgaggcccaaggtcataaagctggcattgctttactttggaaagtccaagaggaggttcggcttctccagtacggtcacaacttcattgatgctgaaattattcagcaacattcaactccatggcgtcttactggtatctacggtgagccaaataggagcttgcggttcaacacatggaagcttattcatgatcttactactctctctcaacttccatggtgcttaattggagaccttaacaatattggaagccaatccgaaaagaaaggaggccgaccctatccggccgccctcatttttgggttccaagaagtcttacagagctgtgatttgatcgatcttgaactccagggacatccttttacttgggaacgtagcaaaggtacttctaatagtgttgaaattagtcttgataaagctcttgtttctcatgtttggcttcaatcttttccacaagctacgctcactaatggggatttttcatcttcggatcacacccccatctttcttgaaccaaaccaccttggctgccaactaaaaaatatttttttcggtatgaaaattgttggagccgagagcctctttgctctcagcttgttgaagattgcttgaaaaataatgctatgctcactcttgctgaaagaatcaaagcctgcagcgttgctttggattcatggggccgcactcttaccggtaatttcaagaagcgcctctctaaaagtaagtagaaattatctcttttgaaaggtagtactgatgctactgatgtgcaaaactttattactgagcagactaactattttgaaattctagcacaacaagagctttattggaagcaaaagtctaagcaacattggttacatggaggagataaaaatagcaaatattttcatgcctatgctagcaaccggaaacgtaataatcaaatccattctttgcaagatagtcgtggtgttatgaaggactgggattctgggctagaaactgtaatttcagattacttttctgaactctatacggccaatgctactcaacatttttttggttgttaatggtgttaacagttcggttgatatggcccagaataatgatcttttacagcccatccaagacgaggaggtcaagcaagcattgtttcaaatgcatcctgacaaagcgccaggtcctgatggcatgggtccgggtttctatcaaactcattgggctatagttggtaaggatgttattaagtttgttaatgactttttcatctcaggcaactttccctctgggatcaatgaaactaatcttgttttaatcccgaagaagaagaatttctcttctatgtctgatcttcgccctattgcgttatgtaatgttctttacaaagtggcggctaaggttcttgctaataggatgcgacatattattgataaggtaatctccgatacacaaagtgctttcattcctgggcgtcttatttctgacaatgtcatggtggcttttgaaattatgcattacttgaaaagaaaaatgagaaagggaaaaaaggctacatggctcttaaactagacatgagcaaagcctatgatcgtgctgaatggggttatcttcatgctataatggctagaatgggctttgctgatagatggataaatctgatcatgcaatgtgtgtcttcagtcagatataccattgtccacagcggtcgcactattagacctattgctcctacccgtggaattcgtcaaggggaccctctctccacctatctctttatcatttgtgcagaagggttctcctctctgattcaacaatccgaaactaatggcagtctgcgtggtattcgtgttgctcatcgtgctcctcccattactcacatgctttttgctgacgatagttatttgttttgccaagctacaaatgaggcagccaacactcttctccatctactccacttctttgagattgcttctggtcagaaaatcaatgcatcaaagtctaacatcttcttcagtccaaatacaagctcctctgttcgtgatagtatctgtagcattctgggcatggttgaagcttctgaaggtagccattatttaggccttttcaatatcattggccgaaataaaaatgctattatggggttcctcaaaaataaggttatcaatcggctgaacacttggcacgacaagtttctttctagagcgggcaaggaaattcttctcaaaacggtaattcaatctctccctacttatgccatgagcgtgtttctaattcctagtggtactattgatgagattgaaaaacttatggctcggttctggtggaaaacaagctcaagcaaatggaatggaattatatggatgtcatgggagagaatggctactcacaaacacaatgggggaatgggctttcgacatttaagtgacttcaaccttgctatgcttgctaaacaagggtggagactcttatgtaacccaaactctcttgctagccgggtttataaagcaaaatatttccctaattccgacttcctacgagcggatcttggatccaaccccagctttatttggcgcagtatctggagcgcccaaaagctcatcaaattaggagctcgacgcactatccgaactggtatacacactagcatccttgaccatccatggctccccgacaaggacaatctgtatgtcacaacaaccaattctgggctctcaaaccagtcagtttctgctcttttatcgattgattcctgcagctgggatcatgatcttgtcactgatatgtttaaccatcgagatgctccattgatcctcggtcccccgctgagttctagtaatcttgacgatgactgttggtattggacaggcgaatcaaatgggagttttagtgttagcagtgcgtactctcttttgcagcaaagtaagcaccctcggccagcggctaacaactttggattttggaaagagttgtggcagctgaaaatacctccaaaggttaagaatatgttgtggcgtgccatcacaaactgcctccccacatgcctaaaccttgtcatcaaacatgtgaatgtctctgtcctttgtcccatgtgtgatggccaacccgaaaacacttctcatgctttgattgagtgcccactagctgctgcatgctagcagcatattggagttccactaccgacatccccaggtactttcacatcatggcttgaacttacattttcttctaacacagccgaaaacatgtgtagtattgctatgatatgttgggctctgtggaaagcaagaaattaaaaagtatggaagcaccaaacatcctctttgaatgaagttatggtatctgcaactacttctcttgatcattggagaaaagctcaagacactacttctctatcatctatatttctcaacaacatgggtgatagaaatgagctttgggtcaaaccggcgttggaaacaatcaagattaatgttgatgccgcttcttttgagcaggaaaattcctatggtttcgggttggtggttcgtgatcaccttggttcccctcttcacattcaagcagaataccatggagggtactttccctcggaagtgacagaagctatgggaatcaaggaagcccttagttggatcaaggcaaatcatcggagcagagttttgattgagagtgacagcatgcttgccgtccaggccattcattctacccagttaatgacgtccgtgcttggtttagttgttaatgattgtagaaatattttatcctctctttctgatgtttctttacgttttgttagacgatcagcgaattgtgcggcccactttgttgctaggcatgcacgatcgtcaattggtcgtagcattttgggatctattatacctcctgatctacatactattttgtactcagaatactaattaaataaagttgcaatttcatgtcaaaaaaaaaaaataaaaaa

SEQ ID NO: 383065 - DNA, 1377 bp, Cannabis indica
ttatgatgtcaaacatgcaccaagacttgcaaaatcttgagctagactagggctcatgatttttatttctagacaaaagaatacaaagacatagttgttacaacagaaactaactgtaactaactctcttgaccaaagctaaagtaattgaaaacagaacatcactaacataaaataagctaacaaatatttactctgtattatcccccgtcaaacgaaatggtgtagagtacacttggagtttggatttgagatagagaaatgtgtcttagttaatgcctttgttataatatcagacacttgatctatagaaggtacatatcgaacttcaatttgtttggccagaatttgattcctaacaaagtgaagatttatttcaatgtgtttgaatcttgcggagaacactggattagcagtaagactagtagctccttgattatctatccagattataaaagcacaaggtagctgaatttggagttcagaaagaatagaagtgatccacttgatttctgtagcatagttggaaaagcacgaaattcactttcaatacttgttgatcaatgatcatctagaaaactagcccaatctacatcagaataggcttgaagacacaatctgatggcaggttcaatgagaattcctttactgatagagccctttaggtatcgaaataacctttacttgctttccagtgagcaatggtgggagaatgtataaattgacttaacttgttgactataaagattatagcagcccttgttaaagttaaatgtcgaagggcaccacgtgtgcttctgtataagatggtcaaaaaatagttcaccatttgtaagagacaaatgatgtaagagacaaatgataagtagagcttgttaggaaggactaggcttagcgccttccatgctatcagtatattttttgaggaatgtgttatccaaagcttatttctaaggatagatgtgttctcgagaatccatcatcaaaataaacaaatgcctctgcaaccattatataattagtatccttaaagtatttattatagattcttcaattgtcaaaatctcatttatgtttgtatgaatactttttctttgttgatgtcttcttttatataagaatttgtttttaaattaataattttatatatatagttgtttgtttatttatttattttctaaaaaaatttattttttttattaatctctttatatctcttttatattaaatgttgctatttaataaaaattattagtttaacgagttttttttgttaaaattaacagttaaaactaacactgttaaatcaatgaatcaattatatatttttttttgtaaaaaaaaaaagaagttttatatttaaatttaatttattta

SEQ ID NO: 383066 - DNA, 3837 bp, Cannabis indica
atatagaccaaaaatatgattttccatctttataaaccttcaaagtcacatttattaatctacttttaactattacatcttctagttaatttgttttattttaaatttgtgcaatctacattttggtttatttaactttctttaatatatgtgtattattgttcaaatttgttttattaaactatatttttgtgagatagtggaaaattagagagtctaaaggttgtttgaggccattgtttggcccctatggttcgttttcagttttctatggttaggttggtcaatttttgtctttaatttaattaattttatacgatgagtatgattaattttaattttgtaacactaatatagtctaaaaaatatatcagatataatggatacactttcagcaatggagataagcacatataaattttaatatttacattataaaattatgtatgtcgatatttatgaaaagtttcatttacttattaaatatttgataataatttttttttctttttaattttgtatgtgttctattagtttagcgattttatttgttgatattaaagttttgttgtataaattttttggagctatctttgcatgccttaagataaacaataaaaaattgtataatggagacactttcagcaatggagatgagcacatataaatcttaatatttacatcataaaattatgtatatcgatatttataaaaaatttcattaatttacttattaaatatttgataattaatcatattttctttgtatgtgttatattagtttagagattttatttgttgagattatctttgcatgccttaagataaacaataaaaaattgtatataaaagaaaattctcaactatttgcataaaaataatgtagttaatagtgttattttaatctttaattattaattttaccctagaaaaaaaaaggtcaaatttaatctttttaaagtaataattggaaatttatctttacctaaaaaaattggcttgatatgatatagtttgattaattaattaggaagatgattccttaacctcaaagaaataaagaatgaattatatagtgattaaggttaatacacattggattcataatttaacttgaggggcgtaatttgaagtatacacaaagaatatattcttaatttataaaattaataataaagataatctccatattattattattattattattattattattatagccttaaaaaaatactaattattttttttaacaaataaaagcaatctttaaagttatatatgactatagagaatatgcatgtccttttaatcaaattaatcacatgtgatattctcaaatgttggtgatgcttaaatctatattcaagtaatcagatttgatattaattaataatttaatacctaattatatatttggaggtataaatttggggtggttggaaagatggagctatataataaatatgaaggtaaacattatttattttaattttattttattaaaaaaaaaaaaaggaaattaaaaaaaaaaaaaaaaataatatatccaaaaaattttcggtactaggatctgggatgagcattccaacttgaaacaaatatagatgtgaaactactaaattatatctattactaaataaaaaaactcatttagtaagtcatgttgtactatattatatagtgttagactgtattgtattatattaatattacttaatgtagtattatgtttgatattgtcttgtattaataatttgtgtaaaattatactatatttactataaactcgactctaactctgacctttatccgggtctagggtacgaggtctggataaggggataggtcgggatcggagtctagggtttggggtctggtgttggatttggatccatagtggggccaggattcgtgtcagggttaaggactaggtcttgggtgcgggcctgagtctgggtcgagttcggggtccagagtggagtccaggtccggggccagttcaggttcaaagctagggctcgggtttggggtttggaattggagctgagtttgggtcgatgtcaccaatcccagacccattataaatattataatacaagctaatacagatattttgttatgtattaaataatataatacacattatattaaaatttattgtcgtaataattaatacaatatgataccacttttatataacctaccaaataaatccatatagtgtaattttttgctagctatattgtttattattaaatgtttataaaatttatttaattaatatgaattttactattttttttttttaattttcataatcttttgaaataaatcgtttttaaggtttagtttattttcttaacaataatttttctattatttactcaaaaaatatagtctcacttaaaattataagtggcttatatttattatatattattgtgtgtaacaagtgtgtaatttgagtgtgtatttttttaaaattaaaaaaaatatatataaagaaattaaaaaaaaatatatataaagaaatgtgattgaatagttgtaaaagtttggtggataacatttctaattatgttacatgtatcattagacatgatctaatagaaaatagaaacattaattttcaataaaatgaaaagttgggagaaatttttatcatcgtgaatgaatcatttagaagcacaatttgataataataataataataataataataataataataataataataataataatagtttttgaaggcaaaaatattatatgagaagattacaacttaggaaatgaagatttttgtaattatagtttaggatctctttctacttgggctatatagaacattatttgttgattttttttaaataaataaaaaaaacgttcatacattaaacgaaactaaacctcacgatcattacaaaagagttttataaatataaaaaaaacatctaaacaaccataccagttgtggaaaaagttcactttgctacattatatgccaaaaaaattaaatgtcttgataatactaaaaaattaacaactattaaaaaaaagcagttcttttacaatgaaaatactactgaaaaataagaatagaacagcaaatagcgaaaagaaagaagaaacggaacgcccttgttgacgatcctttactccgacagcatctagggtccatctagactccaatccattgagagagttgataaccatcctagagccgctctctacaattacaaatttgcaccccttagtcaccgccatatccaaagccaaatagcaagcaggagttttgtttaatgcccaaaatgtgacttccacagcgatggttgtagtatcgatcgggcggtcgattccacagggaggtgattatgaacaaaaatgttagtagaaaagtgaaaacaaaaggttattaaagagtgacaatagtaaccaatgattttgtgatttttgttttgataataaacattaaaagaaagtaaatattaaaagaaagtaaataaaggtgtagtcaatagtaaaagaaagagactttaagaatcatccatatgtttgtttagctatcttgtaccctttaaaggtcattatattttttttgagtatacaagttcttgcaaataaaaagaaatgacttaatcttaagtagaacctagaaatgacattatacatcaagcaataatgcaataaaagattaaacataaaactaaatatcaatattatttttactaaatagtaacacatagagagagcatgactaataatgcaataaaagattatacataaaactaaacatcaatattatttttactaaatagaaacacatagaaa

SEQ ID NO: 383067 - DNA, 2845 bp, Cannabis indica
gaaagtccttctgaagataaaagaaataggtatggggagagcaggtcaccttggcggattcctctggtgggttgaacaaatctcagtgcatgttgattaatggaaaaggagaatgatgttgtagagacacaacccataataaggtttatgaatcgagttggaaaggcaaatttttccatgactttttgaataaaaatccattctgctctgttaaaagcctttaccatatcaagcttaagggccattgaacctactcgatttgtcttacgatgagtaagggagtggataacctcctaaccaataatgatgttatttgatatgagatggttgggcgaggaagtgctttgggtgggtgatattatacgacataggatgggctttagccaattaaccataactctcgagatgactttgtagtgagtagaataaagacttatagggcagtagttagtgacttgctaggggtgggcccgattgggaataagaatgataacaatggtatttattgtggcaataccattattcccattcaaaaaactctttggttctcgaatgatatcatcacccacaatatttcaattttcttgtaaagaaaactccattaaactatcaattataggtgctttatcactggctaattgaaaggcaactatctttatctctctcgtagtatatgaagcttggaggctaccaactttggcctatgtaatacgctttgtgattcccgctaaaactttatcaataatatgttttcaagattttgactcgtaaacaaataggaaaaatattgttcaataatagttaggattaaagctgtatcagtagcaagagttctatcagagagcaagagagagcaaatttggttagtagcttggcgggaggaggctaatcgatggaaataacgagtattcttgtccccaagcttgagccaattgatacgggaatgttgctaccaatactcttcctctttgtataagggtctagtaactaactttcaagagaccaacataaagccagctaagagtttgggggttgagaaatattttgcacactattaagttgagactgaatgttctaaattttatgagagagagggaccaagggaagttatttcattgcatgagatgtgtggtacattgctggagtttggcactaatattggaaattgggtcaagcgcaccggtggatgtaccagaggtcgaagcttgacaaagacaattgtcaaagctcgttttggatattcatatcttatcaaagaggaagtaagggtttgggcgcgagtgactgtacctgtaatggagagtcaagacaagagtgtgatggtcagaactatagaaatctccatgaaggagacgagtttaagggaagaaggagttccatgaagtattatagatggcacaatcaaagtgttattgagtgtgagtttattgcctttgtttattagtccgagtataagggcttcaaatggcgaggagaggatgaagggtaaaattatctaaaaatttttggaagtgagctgatgggctgggagacatgtctccactaatattgtcggacaaagttagataatcgttgaaatcatccataataagctggggagaaagatgaatagtggaccctacctagtctgtgtaaaagttgccaggattgaggtttattgattggattgggagctccataaaagctagtaaaaataaatccagtaaagttaaggaattttacataacaatataagtgccttataatataagaaagtagctttacatcaacatcatgagtccagagcaacaaagaaacacccgcctcatcagtgtgctcctcgtaatgagcttgagctaagttctgagtatgcttgagaattttcctaaactcaatttcattgatacaatttggttgttttggcttaaacatgtgaatggtgggtgtagttaaagtaagtgaagatgatgaaccaatggtgaattggagaagttgggttgatgcaagatccgcaaggataattgagaaagcttgagagatagggacagtgtacctgttcgtgctagtagtagcaataaggtttgtaggttgtgaagatattgaggtgggtagggggtgtaaagagttgttcagtggtagtaatgataggatgggcaattagggtatggatgatagtcattaggttaggcaatggagtgtgcgtatggggagattgagcatcaatgataacaatatttctagttgatggccaaacagatgtaggaggagtgacatgtgtgccctcctgacaatgtgtttaaggagtagtgtgggatgaactagctatataaaagccaaaaggcatggtacgaggttggccaagatgttgaatgccatagtcagagggtggttcattgtatgggccttatgagattattagcgggtggttcaacctaaggggtgattaggagctaaagatttggggctagtattgtgagatcaaagtcgggtgcgggtactagcaatatagaaagggttaaaggtaatacggatcttggcacccggggagtggtcatatcagagcataggcagagtcgaggagaagttgcatttagtaaggaaatcagagcaatagttcactatatggctaacgtagccgcaataatgactgaaatcataaagattttcaaagaagaaatcaagccaaactggagttgccattccttggaaatggaagccagtgcctcaaggcaacaatagagtgacatcaattttaatgtggacacgcaatgtaacgtcccaactagggctgtacatcaaaccgctcaaaccgcccgcaccgcaaaaaaaatacggtttgaaattcttcgcggtgcggttgcggttt

SEQ ID NO: 383068 - DNA, 3661 bp, Cannabis indica
aaattcaccggcggcattaaaatgtcgtcgtccgccgttttctccttcagtataatcgccatcttcgcctctgcaactaatctagtattatctaacggtttgacgaatttcggacgaaaaccaacaaaaaattcaggaaaagccgaaaccaaaaagaaaaaatcaaaagaatgaaattccaaaacaaaaagggatttcggtgtgtcacaaaataaaagctggtaatgaatttgtgtatatatcaatggcgaaagaatcagaggcgctcatggtttgtttttccaagaatggttttttgggggactttgagggattttggggattgaaaagattttgattcaatttgttttggcgttctgagaaactttgtttcggtatttatatatgtaattttaacatgagcggtgtgcttattcttgctttttttattattaaatattttaaatagatataattggattttccatatttaaataattttattgttattaaaatttcctaaatttgtagggttttcttttcattgaaactaattttgtcattttatagggaaaacatataatattttaaaaaagaaagagtgaaagtgattgaggtgtgtggtgttttctaactggatttggattaactttgttgaatgagtctttagattcaaatttcaattttagtggactagtccagtgcccgctggtgcccctcctttttagaatcttattcctttatttttaatttaatttgcaattttttttatttttattattgaaatattattcttatggcttttttttttcttaaaaaaaaagaaatattatcttttttttttaaaaaaaaataagaaatattatcttattgctggtaaagaaactaacaaccaaattttatggtgggattgatacttttaattaccactaataaaagattttaattttgaaagttattatcattttgattttgaatttttaccaataatatcccaccagcattccgtttccattatcttcgtataaaccacattctaatagtttacaaattttgttcaaaataaataaataaataaaagtaagtaagaaatagtttacaaatttgtatacctatctaatttttaaggaaatgcaatgtatgaaattgtatttgttttttttaatgaaaaattcatctttattaaccattaaattccgttatcaacatagctaacaaattagttggaacagacttcaaactgaaacaacgatcagagtataaaatagcggctctagcaaagctataaacagccctatttgctgatcatttaacaaaataaacagaaacattagacaattcacttaataaagctttacagtcattaacaatacttccaaacaaagaaatcatattattagcaccccgtaaagcttgaatcaccatgagacaatcggactccacatgcactcctatccaccctttctctttgatccaacttagggcctccttaacccctaaagcctcagcaacaaaaggttgaatgacaccccgtttgagcaaagagccaccctctaagagaagacctttatcatccctggcaaccataccaattccaaaactacgactttcttcaaaaattgatgcatccacattgaccttgattctattaaccggtggaactgtccaacactcagcaccgtcaccagtctgtaaaccagaccccgacgactctaacccagagttctgagcatttctccattgatcaaggtaaccttttgcgtaagcaacaatattgtcagccgaaaaattcttacccttccaaaccagatcattccgtgctccccaaatcgcccaacaaagagtgaccaataaacattctgctcaacatctaacaccttaaagcaatccatacaccaattgagaaaagatgtacctattgtgtgaatcgttccaatacccactctgttccataccagctagaccatttgacaggtaactaaacaatgcacaatagtctcatctgttcctagacaaagtggacaaagagaggagacatccacatgctttgttctcaactgtgtcaatgtttgaagacatgccataccagccctccagagtaaattcttaacttttggaggaacttttaaactccaaagtttcttccaaaacaaagaaacttctgaatcatcccactccccacgctgttgtggaagaagattttaggcacttttgacactatacatactcgagacctcacaagaccaaacaaggtgatcaattgtttgagtaagatcggtcggaatgctgagtatcaaatcacgatcacgctcctcgaataagtcattgagaatttccacatcccaaccggatccatcacaactcatcaagctactgaccgtggccgtttgaagggccggatgtgaagaattcacaaaagggtgaaccagatcgggaagccatggttgagataatacatttataagactcacatccccaacacaccatcgaaccccctttttaacaaggtgttgagcttccaaaatacatctccaaataaaactaggattgttacctagcgaggcatccagaaaagaaccatgggggcaggggcggacccacattgtagcgagggggggcagtcgcccccttgaaaaaaaaatcgcggaaaaaatgtatatgtattttaattagttacaatatatatttgtattaaaaaatgacaattatagacataaaagtaagcttggtgtaatggttaaggtagatgcacatatgttagagggtaagggttcaaatcccactaactacactttatatttttctttttcaatttatttatacccccctcactttaaattctgggtccgccactgcatgggggtagtatcttgctttaaagacacggccagtaagagaattaccccgagttaagagcctccaaccttgtttacccaaaagagctaagttgaaatccctcaagtttcgaaaacccatacctccactacgcttggaacgaaaatctatcccaagacatccaatgaatgcctttacttgttttgttagaggattgccaccagaaacttgtcatcaactgctcaatgtcacgagagatctcaaaaggaagtaaaaacacactcatgacatagctaggaagagattgagccaccgacttaataagaatttccttacccgctcttgaaattatatttattaaaaaatattgttattgggtattagtggtgcactttctagatgtaccatcttgcaattaattaaccatactccagttagaagggtgctaagcaccaataataccctttagtatttctctttattaaattgtgtttggctagacgtaaaataaatataaattattaaaaataaagagaatcttaatcttaaaatttaataggagtaagaaaatcaacatataattattgatgttgtttacaaaaataaccagccatgaatagatattgatacaactaatataagccagagcttttttttttaaaaaaaaaaaattaaaactagtaacttcattaaaaatattaagtacaaattacaaagtacataaaatacattaatttggaagacaactatttcaaacaacctcttgaatctgttagagattttataacaatggaagataatcaagatattacaaactctattgcaatataatacaaggaccaacaaa

SEQ ID NO: 383069 - DNA, 2495 bp, Cannabis indica
accacatggattatatgatgtgtaataattatttgagagatatattagtggaaattaactgtcttttttatctaaacactaatggtgtaatgtcaagttgttttattaatttatccgataagaataattactagtttcaacaccaagatcgttattattaattaaccaatgtttccattaattatgtacatgctcctccaatatttaaacagtttaaagtatggccaaattaatttatatatgtatgatagaatttactatatatatcaaataataatcataggagggacacatctcacttttgtccaaataatctgactgttcatccaatcattttaattagtgaaacacaaccaatgcacctatacgtagatagttcgtacgattattcaattattttcagtaagagataatgggtagtagctttatggtccataaatatatgataagaaaagaaaaatatttaaaaaaagagtgggtatatagattgattaaacaaactaccaattaactatatatatatagctccttgttgtttaataattaatgaaaagccatttaaggggttttctcttcaacctcttcttcccttttcttttcttttttttctcattatttgtttggggaacataataataaattaaacattcgtccaatccaaaaagtatatatgggtgcctgaggaagtgggaggccaaccaaaacaatggacttattggattatatatgattttccacataagaccatcatctatatatatatataatatatatatacacatatataaatatatatgtcttgtattgaagctaagtactactagtagtgctcaaaggagaccaactcaaaagccattataggtcaaaaaaagtaaaagcattgctattgctatggtgatcacgtctagcaccattatatatgatatataaggttatcatgttttataattggttaataattttctataatttttattaaagtaatataagtgaaattcgatattaaattacactaatagtgatattatacatcataagtgtgctaggcaccatgaatgcagtttagtatatttctatctttcttagcatatatttatatgcgtgtgtttgtgcgccgatatatatataaatataaataaagacccaccataagaatctccatactatgcagcagtgctccaatatgtatattataggaagaatatgaatatggaaaacatgtaccaacaagttaatgatcagattgacaaattaataaaagttgtagcatatattaatttctggagaatatgccgcttcaagattcttactcatatatacttattattctagaatttgaatataattaattaaagcatgaaatatatattatatggtagaagtttcttcgattgtctcgtgtgcattatatagaatattggtggtatgacaagagataacgcactgggataaacctttattagtttggtaagaaacatatggtagacaaattttaatatttctcgagcaatgctttggatcaagtttaagtaattaatttccagttgtctcattaagctttcaaggtattaagagttagtttcactttattaaatcaacgttggtattagaaattttaccagtacaaaatgaaaagtgcgcgtaaatgtattgataaaagttagattttagtcacttcaaatgtgcgctggtaaaattttgaccattttgccagtgcagtttgcgaatgctttggtaaaagttacttttaccagcgcagtagtagtgaaaaagtgatattttttgtagtaactcctcccattgctaattagttttgagatggaacctcattcatcttgtccctaaattctaacatggtatcagagccacttgtgatccgtagtgagcccaaagtgccaccagtccaaaaagccatttgtgatctattgtgagccaaagtgttgtcggtccaaacagatactttcgctgtctcccgttaacctccatttgggacctttcggccaagccaatttctagtgttgggacatttgacctgtttcaaaaattcataaatttcccgacgtgtacacccataattttcccaaatttttggctttgtgggattcttttaaatgtcacattcggtcctgtggtctcttaaaagtcgttcgttatacccacactttctaggcccaaatgtgaggagagtgtattaagagttagtcccacattactaatgtgtggaaataaattgtgatatataagatgaatgggctactcatcccattgccaattagttttgagatggaacctcattcatcttatccccaaattctaacattattaagagtcactacaaaaaatgtcacttttaccagcacagttcgctattgcgctggtaaaagtaacttttacttgtgcattttgtaaactgcgctggcaaaaaggtcaaagttttaccaacgtacatttacagtgactaaagtctaacccttaccagtgcatttacgcgctgg

SEQ ID NO: 383070 - DNA, 3084 bp, Cannabis indica
atatatatatatttatattggatggaaattggatttagacttttcgtaataatgtatatgtaaatattaatttatagagtcggcctgagatttgcaccgtccttgagagtcctttgtttagtatatcatgattatatttatatatggtttttattatagagatatgttctctgggttggagaggaagaaactttattaattaatcacaaaaacaaaaatgagcaatattacttgttaattaattgtccattttacttatttataagataaatggaatcaagtcaagccctggtgttggctggcatgaaaattatatatataaatagtagttcgcacgtgcagtcgcatacatacatacatatatatgggtcactcatataaatatttgtatatgtgtgcatgggcggactcaaactgagggaaggtgaaaaaaaataaataaataataagacttgaacccttaccaatatttgtatttttgttttcaatatttacagttaatttttctttacaaagaaaaaaaatggttcaagaatttgaactcttgctaatatagatttgtattggtgaaagtattcacatttcaagctaaatattttatattatttatttattttaaattatactttatactataaaaatataaatttaaattttaacatattataaattttttagaaaaaaagaataagcctttccttcttttaaaaaataaaaatacatctctctcaaattaaattctggggctaccacactaatagtttcttatatatacttttgctcttagctagggtagcttagctaaggtggatgctaattacatcaactaattattaatttttattaaatatagactaataataataataataatctcatctttctcaccctatttcgtaccttcctggcttttatttacataatgtatatttatttacgcgtacgtagtcaagtgtcaaggcacctttcttttgtggtgtagtggacctatagtagtgtaaattaatggtagctaggtaggcctttacatttatttactgttgtagtagtaaaaaagtttttattggcctccattcttacttttgagtcaaatattctattcttaccctgccgtttattgtgagagattataatgtttggttcttgaaagttaattttttgtggcggactatctttggaagggaaactctcataaattgtgatagcgatgatttaattaagacaagaagatatataagtctttagaattgttaaagcattgaaagaatagagaaagaatcagcaacaagtaattttttttttcatataaaaaacacttttcttttcaatcttttggcttatagtggagccagtttctttgttctttcctatatatattttaactagttaattctttcctatattcatttatattggcttagagttagctacctaagtaacaatatatatgaattagaaaagtattcgttttctcaaagtacgtaattatatgagccaatattttgactgcttagcgcgctagagtacgttaaaccattaattataaagaagaagaaaagaaattaaaaataaaaggggcacaactacaatgttgccacgttctattcttgtttataatcaaaacaataggttaattaattgattttataaagtccaattttctttcttcatattataataaatatattaattagtctccttcctatatatgattatatagcgatacgtggtctaattaaattcattcgataccccttccagtctataaaatatttatctatgtaaaaaggtcggtaacagctgcagcacctttatattaataatatacatatgtttctctttagctaattataattataaaatcaataattattcattttgatagggtctcaacacattttgatctatgctatattatttaatattaaaatagataaagcttaatatttgattgtattaatcaatatgttaaaatatcgatgataggcgctataatatgaattgaaaatttgatacttaattgtttcaacttattttatactgttaaaacactataagtattgctttaataacttctttttccttttttatttttgttaataaacttagaacctcctctttatatatgataaagattatactacattatgtatatcagcatattgtcaagcacacatgtgatttcacatcttttattttaaactaaaatatgtggctaatactaaactgaccaatatataatatcatactataagcagtatattggatggatatatgattaatttcatgtaacacagcaccattttatttaattaaataatgtcaaccatagatcaaactgaaatttaatatatatattgaacgtgtgaaccctaaacatagaattgatacgagttaacaatagagaatttattggtataactaactacggctaataactgattttattcagtgtaatgtcataatgttctagtaccctaatactccaaaatgttaaaagacatatataaaagaaaattattaaaagaataattagaatttttgtccaactatgtattaattatgtattattatgcttccatttttttagcttgtttaaaaaatcattaattaagtattatcatttggtgccccactatatgtgatatttattatttagtttttaaaaaatcatgcaattttttaaatagtaattagttaaaataatagtctgcaattcaattgaagcatctccctattaaaaataagatcgattagaattagaaaaacaaatctaatcgactatttgatttttagatcatttgacaaaaataaatatataaatggatagaactttactagaggttccaattataggaaagcaaaacgtaacaagctcatgttcttaaatttttgaatgattaaccgatctaatttggcattaaaaatatgttagtgattgatgtgggaagaaagattgcagcaacacagataactttaagaatacatatgtttagtttcctccaccgctcaaaaaatacaaaagtaaaagttgatacaacaggttcgttcaaccccttaagtactcaactattgtgcaaggta

SEQ ID NO: 383071 - DNA, 1569 bp, Cannabis indica
acttaaaagagaaaatcttataccaaacaaggaaatcctatgaaaatattacaccataccaaacagttaaacataaacattcacctagaactaatacttgtgtattaagttatatgaggaaaaacatatttgacccgatacgattcatgaacttgacagaggatctagatggcggggagtacttattcgcatttcgaatgctgatggtacttttcaggagagagttttcctttgtggatgcattgtatctttgggaggtaagaaattaagggatgcttttcatattgttttctgtatgtgttatgaaatgttagatcaatttcattcataatcttagttagtttatgagattgtaatatagatagattggtttcagctgatgtgggccatggaatacaatccaaacatcttcacattacatgagagtgcagcaatttctgagtcagataacagtagtgcagcaaccgaagtagacgataaagttctaaagcaatgtggaaagtttgagaggaaaaatgttgagactaaaagttcagatccacatagtgttcttgctgtttttttagttgcaagtgttcttgagactaaaaacaagaagcttttaaaggaggcaaagggtttggatgatgttgttcaggtttaaaattctcttcttttttcccactttgattcatatcgcgcttgcttgtgcatcttttcttaaaacttgttaactttgtgttcagatcttaggtgacataaccggaaatcttgacgcgaaaaaggcgtgcaacgaggcattgaagattcataagaagtacctaaaaaaggttggcattttgatttcatataatttctcaatatgaacaataaaataacatatttgaatgattttcattttatgtttatttttttggctgcagactcagaagacatagtcatttgaagatatcaatctattttccaaacctttgcattcaaatggttggtgaattcatctgtgtgattgcttcaataaactgaagtatgaattttgtatttttttttttaattcgaaaaggaaaaaagaaagaaagaaaaacaatcaatcttgctatgtcatatttgtgcaaataaattatttgttttgtatagatacttttgattaagattaatttgtttgcataattccaagctagatctattggaaaataatcttaagggagtgtgtgttcggaaaaccgccctgtaatagatttcgatataattcaaattaattaattgggtataattacattgtgtacttactaaaaagaagtgctctttgagcttaatttatgtaaatattctttgttatttcttaatctttgtcatgaatattatttcacataaaatgaggctttttagataaataactttatttgatttagttttaagttcaaatttgttttatttgtattttgtttagttgcttaaaacaaaaattactctaacaaaaaacattatgacacctttacataagaagttcttcatttattaaaactgtcaaggagaattcaaactcaaccacctctttgtcaaaaaaaaaatacaagtgtagtaacactaaat

SEQ ID NO: 383072 - DNA, 2962 bp, Cannabis indica
gttcagctgaaaatctttgatctctctgaaaatcaactgtatggaaaaatcccagaaaccatcgggggaatgaaaaatattgagcaaattgagctttatagcaatagattaaccggcgagttgcctgtaagtttggggagcttgagttatttgagtaatttagatgtatctcagaactctctcacagggaaattaccgaaggaggtcgcagcactgggtttggtatcattaaatcttaacgacaatttcttccaaggggaagttcctgaaagtttagcctctaataaatatcttcagcagttaaagatctttaacaatagtttctccggtaaccttccagaaaatcttggccgcaactctgacttgcaagaaatcgatttctccacgaacaagttcaccggtgagttgcctaagcacctctgttatagtaaaaagctttggagccttgtcgctttcagcaacaaattctcgggaaattttccaactactctaagcgaatgtactactttaacttacctgaggattgaagacaatgagttttccggtgaatttcctgcccgagtatggggtcttcccaaactttacttcctcaaactcaatcacaatagatttgagggctctgtttcctcttccatatctggcgccaataatctcaccacactgttgcttaccggcaacaaattttctggccagttaccggcggctatatgtaaactaagtcagctcgtgagtttatcagtggataacaatcagttctccggtgatttacctctctgtattacggagcttagaaagttgcagaaacttgtaatggcggaaaacatgctcaccgggaaaatacccagttcagtacattcgtggaccgagttggttgagctgaatctatctaaaaaccaaatttccggcgaaatcccgccggagataggtattttaccggttctgaactatctcgacctttctgataacctcctcagtggtgagattccaacggagttgaccaagctgagactcaatgagttcagcctttcgaacaataagcttcatggaaaagtcccttcgggtttgactcaaccccaatacattgcgggtctaaccggaaacccggatctctgtagcccgaatttcacacctttcccaccatgctccagacccaaacccgctaccctatacgtggtcataatactctccatctgtgccgctcttttaatcgggtcactgctctggtacgttaggaaaaaatctgatctattcggacccaaaccgaaaaggctctgcaaactcaccacatttcaacggatgggactgaacgaagaggaagtgattgtgccactgactgaagacaagttgattggatcgggtggttcgggtcgggtatacaaagtgaagctaaaaacgggtgaaaccgtggctgtaaagaaactctggaatggggagaaaaaagaggatacggataaaatatttgaatccgaaatagagactttgggtcggatcaggcatggcaacatcgtaaaattactgtttagttgtagcggtgaggataacagaattttggggtacgagtacatggagaatggaagtttgggtgacgtgttacacgaagagaagtgcgcaagtttattggattggccacaacggctcacgatagcacagggagcggcacaaggcttagcttatcttcatcacgactgcgatccggctattgtacaccgggatgtgaagagtaacaacatattgttggacggggagttcaggccccgtgtggccgatttcggattggcgaagtctcttcagcgccacgtggcgggcgaggaagcctatggtgccatgtcacgtgttgctgggtcctacggctacattgcgcctggtaattttgttttgtcgttttctagatcacgcttttttttttttatttctttcatttaaaaatagtataattatcgtcaaaaacggtttatttattttaattttacagtgtggaaagaatcgatatcactgtaataagagtttgttcgttaagattatgctagctaaaaataccataacttaaaagtatatattacaggattaggatatgcaccagtacacattaatttctttattgtttagatgtcaatttcataattactttagtagagtgacacatacaagatttatatctattgctatacaataattaacacaatgaatacacaaggtctatctatgtgggtctacctaaattgaatagtagcacaccacataagttaaaatgaagtgtttggtcaatgtagatctctcaacattttatgaccatataatattacaagtttacatatttaatgataaatatatacatttgtgcagagtatgcttacactttgaaagtgaacgagaagagtgatgtgtatagttttggagttgtgctattggaactaatcacagggaagagacccaacgattcttcttttggtgataacaaggacatagtgaagtgggtaaccgatgtcactttatctttgtcatcatcaccacaagaagatccaacaaaaagaagccatgatgattcaggcagtagtactaatccttggaaatttcttgatcaacttgttgacccaaggatggatttaaccactagtgattatgaggagatagagaaggttttggatgtggctcttatgtgtacctctaggattccccttagtagaccttctatgagaaaggtggtggaattgctcaaactcaaggaccagaaattggctcgctccaaaaccatcaactagttaattacttaattagtacagtttggtgaaagaaataggcaaaacaagttttcctttttaccatgttgtaattattcggattagctagtcattcagtttttgtttgattttagaagaactgcacaaagttcagtcggaaattagacaaactttggtgttttctctttttccattattattactataaattatgttttcagggt

SEQ ID NO: 383073 - DNA, 2100 bp, Cannabis indica
tctatagatattaagggtttttgtgctattacaggatagaaatttgctagtgggatcaactaaagagaggctagacattaaagtggcactatcaaattcatttggtttcggtggtcataactcctcaatcttgtttgctcctttcgaatgaaacagacccaagtgggctactactaccttgatgtaatcacgcacaaggtatgatcctaaacctgtctcctattcttttctgaagagactggatgtgtatattgatgagctacatgttcaatgatttagtgttggactttcaaaatcgtcaaaaaaggaagaaccatgaagattcatgatgaatatcatagattcataacataggaaagcatgagcttattttacgtagggaaagcttgtacctgaaactacattatgtcttgggttgtgaagtggatattaataatgggatggctatgtcttgcagttaccgatagaacgcatttgtatctgatcttctctttggttggaatgggtgcatactactactactactactaccatgctaaccaaatttggttccacagccacaaggaatagaagtatcaaagacaaaccatgctgaatggaaatgagagatacacagctcacaatattttacccattggaacattgttgtctaaaaaattttctctttcctattttcataaagtagagcccatacaaggcttgtgatctaatcgatgttagctatgtgtttggactaaagctaatatacaatactggttttttccttggttttttgcttccttatacaggtagatggccgatcagactaaagacagttattttgagaaaagtaggaaaaaattatatgacatcccaaaatgcactaaacaaaaccatttctttcctgtttttttatccttggaagatgaaaccatctgatttacatttattttatggtacatttatgttcttgtatttggcaaaattcaacaaaaaatcaaaagcagaacactattgaatgaaagcatcacatttctaattgaaaagccaaccagctcaaataaaacatcatggaaagataactgagttgaaggaatactttcttttctctacaagttttcatgtgaacatatctcaaaacacaacacattcctcggacaacattataattacaatgtgtactccaaacaagtaaagaaaaaaaaaattactttcaaaaaaatacaagtaaaaaattaattaataaccacacattcgatgcagttgtcaaaaatttgagtacccatttgtactccagtaactattggtaaactgaaaagggaaaaagaaaattacaatcttaacagctctatttaataaggcatttgattcaagacaatatgatttaacaatggtgcctcacttgcttttcttcttaccacttttcttatggctcttcttaaacttcaagcctccagaggacagcaagctagaggcacttttcccttcaagcctctttgtcatcttcaccacactagccattcctttctttgcagatgcccgatgttctggtctgcggctcatcatcttgcgatcaagtggccaatatgcatatggttcaagtttgtctttcttctgcaaatctccaccagccttcttgttagcatactcgttccctgtgtaagcccatccagagtctgatgtcttctgccgcttctgagttttctttgtgcttgcagaccgtctactacctgcttcactcttcctatccgattcaggttcaaaggatttttccattttctggtttccttcttcttgaattatcatgcgtccatcagcgtcaaattctggctcattgtccgatacattttttcgtttcaggttttctgttgatcgaagagctgatcttgttctttgtcgatcaagcaagtcaagtggctcgtcatcttctatttgaccaaccaaatgccctggcaagttcttattccctctagctctagacctgaaaaataagtaattaataagtattaggtctcaaggaaagatcagatagtcaaaaagtgattacaagatgagaggatgcaactatatggaatcctatcatttggatagtaatctaaaaaccaactacacaaatatttt

SEQ ID NO: 383074 - DNA, 1251 bp, Cannabis indica
tcacgagaggcaatctcctctgaagctcttcaacaacaggtacaacattttcatcagacggatctcgaagcaaaacctatcccatcataaaataacaatcatcatctgcaagaaaaaggaccatattcacacttaattgcatctaagtctagcctaactttctttctacaattcaaagggaaaaaaaacagaagaagaaaaagaagaagaagagagtttcagttacatgatattgtatattaatagtagaaagaatataaagatcgtataaaaacaaaagaaaataaatgaaaactaataattaataagctaaattttctacttaaatcagccataagaagtaccaacctcctcagcagtgattattgctttgatatgctgaaaaacgcagatcagagaaacacccaaaatcaatatacttccaatcaaaacgaactgaaattgaataaaactacaaaaaagcgaatacatagaaataaagcacctccaagttaagaacaatggccttctcacggccaagaatggttgatgggtaagagagcaaagggtcaagtatacgaagatcacgagcgtgaatctgaactcggtgcataatggcgtacttgtcgacatcgagaacagtggactcgccgctgcaatccaccaaagcccagctccgagacgactgcgggttcttcttcttcactacaaccaaggcctgcgggtccgccggaaccacgtacccgtccccacgagccatctctaaccatatcacccaagaaaaatcccaattcccaaacctaaattcacatcaaatccctaaaagatgaaaatctattctttgattccaattatcatatactctgccaccacatccgtatcaaaacaataattgattgattcaatataacatatttgcttaataattgagatcaattaaaaattaaaaaattgttttacttttaaagtgaattcaactatattcgaatcggccggtttagatttgagtttcaaagctggcgaggccgattagggaatgggattagggctttggatttggggtctgaattgaaatcgataggggggaagggaaagacctgtgctagtgatgtttagtattgtatggttttgacgaatggggtactgccacgtcacaaaagagaagcaggttcgttttttccggtgatttgtacggatgacgtcatcattcacgtggaattttctatatatttcttctgattttttttccccaaacaaactaaccaattgtct

SEQ ID NO: 383075 - DNA, 3894 bp, Cannabis indica
attaccattgatataaataaggcacgtgatcagtatttttatatatagcctaattccccgacattcattgtttcttttcctctttttgcaaatgaagatgaattttgaatgcaaacaataattgctggagtcgttcctagtaattatattaagtatagatcatcaaacaaattttttaaatctgttaatacttgtaggaataagaaaaagaaaaaagaaaattgggatgatcctacactgagactgtatgtagtaagtactctactcataaaagaatgttagacatttatatgtataaactgaaatatatgtgtgtatataaaatacgaaataaataaatatatacactatatgttcccaattaacagtgttcctatagaattgatgtctattctgaagagcgattgctcaagttaataaagaacactttttattacaaaaaaaaaaaacttaaaaattgtttttttctcccgtaaagggttcattatgtggagtggacaatagttgcttcaactttcaattcacatcatgaagatactgaagagctgaccatagaaggcagagaagagggggtcgggttctgcttcgacaacagcgagttgtagtggaagaacaagatattttctactattttaatgcttatcattcaattttatggtgcaaacttttgttgaatttaaagtcattggaagagcatagttgcacccaacttgggatcggaattgtaatcaatctaatacaagcatcaacagaaggaaaaaaaaatggtagcagttttggtggtcaaatcaaattcaaatatattttttcctacttttttagacactaaaatttttaatactagcatgctcaacatcatgaacatgtagcttataacaaactccaagacacagccagagagcatagagattaatgatcttccgcttcttagaattagacgacttcatttttgctgctaaccaatctcaacaacaaaaccgtactataaaacttccattatagaagtgaagctcatagttcacacaaacttcatccaacaataaaagagataaaaatttcatgcctaaacgtagtacaattctccataaacttccatcaaaatagtaagcattaagattctctaactaaacaatctatctgaacagaaaaaaaatctaatgtttacattaaccatcttcaccattaagagagaggaagctccaaaatggagttgtgctaaggagctcttgctgtttcacgagccatagaaagctttgcaagaagaccacttaactgaagatatgaaccaactccatcgcagattctcatatgagcgaacccgctttcctgaaagcgcagatgagttaaggaaatgaaagagataatgacaaaactaaactctggaagaacattatgaatatgaaaaacttgagagcagcagaaggaccttcatgaattccaattttaaatactcagccatatcatagttcttaatgatacgaaaaatcgtagtgataatgtcagtgggagaataacccagatcatataactgcttgagaccaaagcaggcatcatcaaatttcccttcaagaacattacgcacaatattcttcacatgcaatggatgtggctggtcacaaacctgaaaaggccagcaaaaaactcactgagatttctgaaatacacagaaaatatacaaattcaaaggtcattttcgaggcatgaccttgaaaacattttcttggttgacaaaccggaaaccgctgtgtgttgcttgcaagttattcagtgcctgcctcatgtcaccatcagcagtgaaaataatggcttcaagaccttccggaacataaggaaccttcacttgttaaattttatcggtcaaatcatacacttccatcgaattgtaacaaacaaaatgagcagaattacataaaaacaaaatctgatttggggggaaataagcaactaaataacccaacaagtacaacagttgtttcatctcatttagtgaagatacagaatgaaaccacagcaaaagcatttttcttctgtctggctgataagtgttagtatagaaaatctaaatgtaaaataatttggatagggtatcaccttttctgcttcaacaaccaccatcagacgaccaagtatctgttgatcagataatcttgaaaaccgaacaagggcacatctactctgaatcggctcaataattttggaagaagtattgcacgcaagagcaaatcgggtggagttagaataaatttccattgtccgcctcaaagcttgttgtgctccagatgtcatgctggttttaggaataagcgcaattacttattaactttaagtttgagaaaagataaaatatacaaaataaaaaagaaaaacaagcatgaaatttgaccaccaaattcacaaaccattataatcagtccttacctgtcagcttcatccaatataactaccttgtgccgcccaggaggaagtgttacttttttctgtgcaaacattttaattttgttcctcacaacatctatgcctctaaaaaagaataaaacaattcagttaatgtggtatgcttttaagaattatgtgtggctaccaaaagtaacttcattgcgttatgccctcacctatcatctgaagcatttagctctagtacgccctctctataatttggtcccaacagttcatgtgctagagcaagtatactagtggttttaccagttccaggaggaccctgatgaaaatatcaaacagtaatctcaacagcagcaaaaatatttttatgtagaaacaagcatacaaaatttcttatgaaatgttaaacccaatttttccttagccttaatccagttagatactaaaacttggatttatacatatatttgtatgtgtgtgaattgataggcctactacatgcccagaaaagaataaatagatcaaaattcacattacaaataaatatacaaacatatacttacacaatacacacaaactctctcctagtcaacatgaattaacataaaaagctttatcttaaaaaaataaaaataaaagaatcacacttacaacattccctaaatcaatccaaatttgagaatgaaaatccctaacaccgtgaaaacaaacaaatgtataagtctcctcccatttttctacagaacccaaattgaccccaaatgtttaaagctaaatcttcactgacttgggtctactgacactagaagaaaaatcaacattcaaaacaatttaatattttattccgattatagtaaaataacattatacatgtaatcattaagagattccccaaaccccatcatccaaaaatcaaaactggtattcaggcaagtggttttgacggtggaggaaagtgatgagattacttactgataatatgatgttgggcatatttccatcgcgagcaatgacctgaagcctagagacagcatcttcattgccgacaatgtccacaaccttgttgggtctgtatttctctacccatggaatatcgtagttgctcaatgaagaagacgaagaagaagccattgatgtttcctagatttagggtttcaggtaggtacatcagttggttttgtcgatttttactacatattttttaatcaatgtaaagaacgggtgcaaaagtctaagagcatctcaacctatacaccaaatttggtgtgacacgatcaccaaatttagtgtcaaaaactctttccactccatctacaatactaagagcatctccaaggagttcatcaaatttagtatcacactatcatcaaatttgatgttaaaaactatcttcactctaaccacaacactaaaaattacactaaaaaattattccttattattatattaattttttaataaaataaaaaaaataatattatattaattaactaa

SEQ ID NO: 383076 - DNA, 2314 bp, Cannabis indica
tttaatattaattatactaaattactaataccaatataataccaaagggaagaaagttgtaagctctaagctagcatttctgtttttctaatagtattcttatattattttgacacaactttgaatgattttagtttgttgtcgaacccttcaatcttttactcacaaggcactataaatggcatggcccccaccattcattactatgtgtttgtctcaatacaattccgtgagttactaaaacagagtttaaacgtatatctactctagtctcttcttcttcttaatgctctgtccaaaataacttaacaaacaaaatatccttaactaattataaaacgttatttatagaaagtataaaatagcacgtacaatatcaaaaacagttaaacaacgtgtctgatgaagattgattctaaaacgttccatttttttccctttttatcttctcaaaatcagtccaagaaggctgcttcgtttcaaagtacacaacaaacaacacaataccattcaatggttttcttattattataatagtttaaagctatatacaatacaggtaacattaattatcttagaccaaatatgtaagtttcaactttgaaaagaaatatacaattttcaacgatcatatttatatatataatatgaatttggtgatgaccaagtttaagactaagactatggcttcacaaactacattaatactcttactattcatgttcttgttcttgttcttggcaccattcaaatccaaagcccaaacttctactcttccacaagatgaaggtaattaaaataataaaggggttcatattctttaatttctttcttattttctgatttcttttatagaaagttacaatttttattttaattatgtttttgcagtggaagctattaaagaaatagctacacaactcaacaaaacagattggaatttcaatgatccttgtagtaacaaatcaactaataacatcccacgtacagatcagtacaccaatgtcattacttgcaattgttccatttctcctaataataatttatgccatatccaaaccatgtaataaaaaactcatctttatatttaagtacatgtattttcattgtcattagtgaaaattattagattttgttttgacttggaaaaatttgtttttgtctatatatgcagtgcttttacaggacaagatcttgatggggagcttccgaaatcgatatggaaactacctcatcttaaggaagtgtatgtaaaaatcaaatagaatgatttttttatcatttcgatggaatgactattctaatatattgagttttcaatatgctaattgtgtgttttttttcttcaactttgtagtaaattagaccgaaacttcctcagcggttcaataccgcgagaatgggcttcaacaaaattggaaagtctgtaagtttctatttttaataatactcatttggtaagctgtattagattatattatattgtattaaattgagttatatatcatatatttatataatataatgttaaattttaatttgtactaaaatattatatatttaaattctcataaaaatcaatacaacatataattttaaataaaaatataaaagataaatttcccttaatttaatattatataatacaatacaatgcggtgtaccaaacgaaacttaaaagatgagatgaatgaatgaatgtggtgatgcattgcagggtgattagtgtgaacaatttatcaggaacaatcccttcattcttatcaaacatgaccactctcaaacgtttgtatgttctttctttctttcttaattaaactcctttgatagttgtttgttttgtttatcataataaactcttaattaactaattaagaacatcattaggtccatggagagcaacatgttttctggaactattccaactgagcttgggaaattagtcaacttggaatatttgtgagtatccttattcttttcaaactaactaattaattaattatatcttaattaaaatatttgtgtggtttcaggaatcttaatgcaaacaatctcactggacaattccctttggctctcactaatctcaccaacttaaaagaactgtaagtgttaagatattgttccttaaaatccaaaaaccgttaattcagttaggttcttcaacctaacttgctgacagttataactaacttggctctcactaatctcacaagagcaggcccggtcctaggcataagcaagctaggctctcactaatctccttttaaaaatacatatatttttttcactgattttgaaaatactatatttt

SEQ ID NO: 383077 - DNA, 3732 bp, Cannabis indica
caattttaaatccattgcatatatctaaaagaaatcttttattatcatttttttttacctaattcacataaagtattttttttaacattacaattcaaatttgaacccattgctcatattttaaaaatatctttctattgttagtttatttaactaattcatgtatgtaatatatatatttctattattgttttcttttgaaacaataaataaaaaatgagtttatacttcttaaagtaatcactattgtgatatcattactcattatagtaactaaaaaaatatttttgtataataattgttttagaaaaataataaaaaaaagagtgtatgatatttcttaaaaaattaaaagtattgggattaagctaaaattataagttttgaccttgcttttagccaacaacaatgaatcaactaaagcaattagaaataataaataataataattgagcaataagagcacaaatttcttatagaggttcggccccgtgctactggcaatagcctactctccttttacttatattaactcgtgagtaatgaagcaagaatttctggaacttcctcgaaagattttagagagattttagcagtataagtgctctattgaattaatgaattaaaatccctgaatagtaaaatgactctactgtttataataaggaaagattacatccatttagtttcccaaaactgttaagaaataaaatgggaaacttattactttcctaaattatgtcatttacgtataggaattccataaaaatagggatttaatttatatataaaagagaaaagtgtttttaaagcttccactgttgcgtttaccgttggcggcatatgcgaaatgcccctgagatcgactctggtcggatggtaccatttaccttgcatgaaacttttgtcttatttattaaatacattgcatctcatgaataatttactttgaatggcatatcaaggatagtccgcccaagtctgaaaaagatccacgtgtcaacaaaagaagtgtcgcattatcatgtgtgaatcttaggataacgttttccccccaagtccatatgagtactttttagttggtatgtggacttgcctgacccacgtgctaggtaaatagggtgacacattcttggcatgcaaagtgggtgaacagaaacatccttttaaatctttgagctgttatttcgtatcttgatgcattaaatactctctattttgagaatcacgctcttggggctgacggttgtactacccaagagtactgattatactttttttgtgagaaaaattccaaattttgaaatgtaaaattacaaaaaatgccctttcaataacctataaaaggttttttagaatttatttgtactcttttaatcatttcaaaactcaaaacatcataataaaatttcatttctctctcaaatcttcaaaacttcaccagagcttcaagggattttcaagtgactaccatcctttgtatcacttgtctagtcgacaactctccaataatgagtaagttcttgagcttttatgtaatttctttttaatttattgcattttcttgtagaattgcttctattaaaatctggatttattagcttaaatgttcttcatttatgagatttagaatttataatttcattctgaatgtatgtgcatagactataattgttagattcccataaattcccatgttttcttaagaaatttcgttaaatatactctgtgcgatacttcgtatgaattctaggtttgtcccattttcttaagcacctttgaattgggattcttgtcaataggatgaagtttactttttttgatctcaaattttgttcggccagaatgttgaagttatttttctttcaaattttacgccgttgctcagtccttacctccctttccctctattgtagatgaaccaggatgacttttgggaaggtaagaatcgagtggacgatgacctacttaaattactccacgaggaccgacctatctttcgcgcagcttcgtcttcgtcgagtaagagtttgatgtctagttttgacgagtgggaagtgacaagtgaggagttagaccctgcaaaacctactacacaacacaattattacccagatcgtattgggggtgataacttcagacaattcattgggaactgaatcaagggtatagacaatattttcctacttcttggacatacagggtccgagcaggtttctggatactttacctaagggtgatctagaaccttcaaagaggcctagtgtagaggctaaaatagtagtcaatgttgcccatcatccttcatttaggcacctacctaggaataagaaagtggtgcagactaaacagacttataagaaagtttcgtctgaaggccctcgtcttgccagactaatggtgttattccatgattcgtacgtcaagggataagatgaggaacacattgtgcatgttggtgatgtcgaagtgcaaaaggttgaggattagggtgatgttcgctttgatcaagctaatgaagcggcggttgccctgccctcaatgtctatatgccttttaacagatatggggtatataatgaggctaggcaacctgtgactacgcgaggggaaattctttaagggaatatgaagaagcccaccctttcgtgcaccaagatccacccgaggagatgtgggtctctacgccatccatcctcacatataaaatgctagtgaacttgaataagaaatgtctcctcggggaagacgttgtggctttcttaccattcgatgacaaacttgctaacaatcctagtgagggcttctatgcctggtccggtctacatgctcagcagagggctttactaccacttcacccttacttccaaaggcaagaaaatttctatagtattttcccaactcagttcacgccaaaggttattaagtattcagtagcgttgttcatgctatacatacaactaagatagggaaaaccttaacctcacaacacaaactagctctttgacttgaaatctagctcggggaaaaatcgctcgagttacttctatttttctcaacttgactgctcatggttggctgacaccaatgtcaagggagtaaaaaatattggaaactacgtctaggactactatattgtccatggaatgaaggtcaagcacttgtcattctaaatggccaaagtttatgatcggcaccctaactcttaggttgagggatagggcccaatcaaatttaccaattcctcgtgaggcatgagaccttttttagttggccgcccaatagaattttatcaagtatggactatacttgcctggtcagttttagatgaagagttaaatgttaaggtacccattcctacatttgtggcacatacttatgaatcaaagaagaataaattgaaagccaataggaataaggctccgattgaggttcatattagaattagggaagttgttaaggagcctggacgtcttgtcgttaagcctggttcaaggaaagggaaagtcattgttgaggaaatacatgactcttaagatgaggatgtcccatccattcttctttgagaaggggctcctctagcaatcgagggtagaaactattattattaatgttgggaatattttaccaggatctagatttaataacaagtatgttgaattatcatcctaaatatgaattctctaaataatgaaataaacgcataagggtttaagaaaatcttacattgatt

SEQ ID NO: 383078 - DNA, 2485 bp, Cannabis indica
attaaacaatagtcataaatgctcattacgaagataagacaaaactaaatatatatgaattagtcaaataaagatctttatagattagatacgtaaatatattttgttgaaataaattatggatatgagggatgtttcttgtctgcctactttgcttagaattttcatctttcaatcaaaataataacaattagaataggttggatgaaaatagaaaagtctttattgataaataatatatttctatagccgtctgtttcttctttctctcctttctcctctctttcaaaaaataaatgattttgtatactgcattctattagtcttcttctaaataaatgtacggcttttaattttatattatcctatatgagctatttagtgcatgactttaacgcaccgacatatagttgatatacttttttaggtttaccatgagtattatattagtttattagaaagatggaaggaaaaatcaacacttttgaattattgaaggctgcacgtccgaacggagttggtttgaatcaagtgaattattgtatgtgaagatttttcattgctagatgcaatgatcgaatgttgaaaggaactagggcataatatgggttgttgtgatcccccataaacaaataaaatatttgaccgtatttatttttgaggaattacctcatatacttttttttttttattttcaaatttacgatttgggcttctaaagtggtttttttggtaattttaatgtagattgctatacgattttttgtagcgatttaagttacagcgctagttgcaataggagtttctatgtagaattccgtaaaaatacaaaaagaaactgttttaaagtgtaaaaataaaaaaatccctttatttttttctacttgctatgagcatttaatttttcataaataaaaaagaagaaattagctatcaagcttgaacccccataataacgttttggtaaaggaataaatattatatttggtatgattctataaaaaaataaaaaaaaaataaactaaaatccagtaaatattcaacaacacatcgagctatcatgctcatttttccatcgttgtctttccttctcatttcagttcttttactttttgggtacgtagcaggatgtacataaattttcacgttttgcacagttgggtataatgtgaatgttcatttggctagaagccaaaatagatgactaatgtcatcctgtttatttatctgactataaatattatttttatatttgaattaatttatttatgttgggttaggattctcaacctgcaatacacacaaaattagtagcaatctaattcgaaaataacacaaaccaaaaggtagaacacaaacaagaagaagatttaggttcagtatttagtaataatgtgctatagaaaagattggagaattagagtactgaacggaaggagatattatattctgctacaattaatatgatgtttattaaatattatatgtgtttatttatagttttaggtttattcaaatttaggttgttagattatagatttataatcaacatgcgtgttagtaaattaagattctcttaaaataagttctcaaaaatgtttcatgtcaaagtcatcctatcagcatgtcatctacataaatcaaaagatatatgtagcttttttcttcgggcaccttgtagtaaagacaactatcaaatttaaatttgtgaataaattcatcaaatttgaagtaccattgtcttagacactattttagaccataaagagacttcttgagtgaacacacttgttcttcttcaccacgctgaacaaaaccttcacgttaatacatgaatatatcttcatctaagttgtcatgtaaaaaagttatatttatgctaacccaaattttgcacgtaagccaaagatagagtactttacaaggacatgcaaggtctctatacaggtagaatacacccttgccagtagcatgacagggcctctatacaaggtacgacaaaaccatcaagtagcaactgaaaggagtgaagcgagctctcaagaggatgtaacatccctggccggccaagagaagcctataggctagccaagatctgtgcacaagattagcagccaaaaagtgactttcagaccaagagagctttcgttcgaccaagagagctttcgttcgaccaagagagcttccattcgaccaagagaacctgacctctacaaggaaatagtgtacaaagctatcctcaacttgcaaaaggctagcctctacatctaaaggctggcctccacctgcaggatcatagtagacatatgacctgccaggtcctggcaggagcatgacctaccaggccttgggcacccagacttccccaattcataaatggcagccatttttcctgaaaaatcgagtttttgcaaatatcaaaaaatattacagaaatataataaatataaaactgtaaacgtctgcagcagcagaatgtaattct

SEQ ID NO: 383079 - DNA, 2788 bp, Cannabis indica
tgatggtgatgcagagttattagacaatgcactttatgatgttgatgatttgttgagagaaatgttggctgtggttttgagaagacgccatatgtcttcaaccaaaaacatactactcactactctcgactcatcatcctcaatctcaactctactctccaaaattgacaagatcatgagtaagaaaattgtcaaactagacagacaatcatcattctcacttcatgaacttgcatcaagagatgttgaagacgttgtaccgaggccgagggaagctcactcttcttctttttcatctggatttgacgaaggaggagttgttgggaggaaagaggaacaagaagaagtgaaagagttgctgttgcagaaagatcttgaagagaatgtattagtaattcccattatcggtaggggaggagtagggaaaacaacactggctaaatctgtttacaatgatgagatggttgcaaaccattttcatctaagaatttgggttatgatggtggtgatgcctttgatcagatatcagttatgaagaaaatcgttcgatctttaacaactaacaataataatgatgatgatgatcgagatttgtatgtgttagaggaattgaaaactcttatagttaaagaaattagacacaggcgatttttactggttcttgatgatgtgaaggaagtggatgaagagagatggaaggtggtacttgagatattactaaagggtggaaatgggagcagagttattgttacaactcgtcatataagggttgcacagattactggtagtaatatgaagaaacaagaatatgaattggatgtgttgaatcgaaaagattctctgaaactattgctgcatttagcaaacaattctgagtttgatgaaattggagaaaagattgttgaaaagtgtggtggaatcccttctgtgattagagcagtaggaggaatattgtcttccaaacatacacgaatagagtgggaagaatttgatcgggagctaagtcgaaacgttttaaattcttcattagaactggaaaatagaagtgaatctgaagttgttgtagtgctttctttgagttatgatcatttaccatctgttttgaaagattgttttgctttctgtgcaatttttcctagagattatgaaattgatgtagacacactcgtatctatgtggatgtctttggggtttatacaatcagatgaagatgtggaggaattgggttatggatatttgagggatttaattcgaagatcgcttttacaagaaactaagaaagatgagtatggtaagattaagaaatgcaaggtgcctaattcaatgcatgaagttgtgaggaaagttactcagaaaacttatgctactctaagtttgaaggaggatcaatgtggtcgtagacatgtatcgtttgattttcatttggattcatcatggcatgtttcaatcccatcatctgagttaggaaagattaggagtttgattttgcctaggcaatatgtaagggcaattgaaggaagatcaagtcaatcaatttgtgatgtgattcggaaattgaagtggattcgaatgttggatttgcataattctggcatcaagaaattaacaagttctattggtgagttgaagcttttgagttatttggatctttctcacaatgtcaatatcaagaaattgccaaattctatttgtgggctatattttctagagactctgaaactcaaccgttgcagtaatcttcggaagctgcctaaaggcattatggtgttgttcaatcttagacatcttgaaaacaagtcatgttatcgtttgactcagatgccaagaggactaagtgaactatcaaatcttcgaacattatcagaattcgggctgagtaaggagcctactgattttccctcaaagccaaagggcaagctcgacgaactaagtagtctaaactacctgaaaggcgagctcaaaataaaaaatttgacaaatccaaaagatgataagacagcagcagcaaacttgaaagagaaaaaagatcttttatctttgattttgatttgggatattgatgcttgtgctaatgaagctgattatgaagaggcactagaagatcttgagccacatccaagcctgaaagagctgtgtatatctacttatggtggtagcaagttttcgagctggcttccattgcttaagaatcttgtgaaattatcattatcgagatgcaacagatgccatcgcctaccgcggctggataagttgattaatcttcaagtattggtactagatgagttaatagagcttgaatatgttgtggaaaaggcatcaaagaaccgatggagaacaaggttttcatcattgaaagagctgagacttagtaatttgccaaagctaaaggggtggtggaaagatgcttcaaaaaatgctacatttagttgtgtttctaaattggtggttgaggattgcccctttctcgcttccatgcctttgtttccatggctagaagaactactagtgctcaaaaacacaagttgggagccattcaaacagactatggcattggctgcaacaccaacactaaaagcatcatcatcatcatcatcaccaagtttgtacttcttttcctctcaaatcatttcttatgtgctaagtaatcattaaattgttaattccaaactgaggatcttgattgtgtcatttcacaggttctcctctctccaaattgagagaactacatatcatggatatgtccaattgtgatccaaatatgtggcagtcccttcacagcctccgttct

SEQ ID NO: 383080 - DNA, 1294 bp, Cannabis indica
ttcttttttgtttttttttttttttggctagggctatattgactaaggaagtgtgtgtatatatttgaatagggaaatgatttgtggtatggaccagacagagtgaagtacttgggacccttttcagctcaaactccatcttacttgacaggagaattccctggtgattatggttgggacactgctggtttgtctgccgatcctgaggcctttgccaagaacagggctcttgaggtacttgtttatttaatatctacaaatcttctttctcttaacaatgtatttttcaaccactcaatctaaattgtccattaaaaaatacaacaaaataaaactatttaggtgatccacggtagatgggcaatgcttggagctttggggtgcataaccccagaagtattggagaaatgggtgaaagtggactttaaggagccagtttggttcaaggctggagcccaaatcttctcagaaggtggcttagattacttgggcaaccccaacttggtccatgcccaaagtatcctagcagtgctgggattccaagtgatcctaatgggcctcgttgaagggttccgtattaatgggcttgatggagttggagagggcaatgacttgtacccaggtggacaatactttgacccattgggcctagctgatgacccagttacctttgctgagctcaaggttaaggagatcaagaatggtagacttgctatgttctccatgtttgggttctttgttcaagctattgttactggaaagggaccacttgagaacttacttgaccaccttgacaacccagttgctaacaatgcttgggtctatgctacaaagtttgttcctgggtcgtagagtagtaattttcttctttaaaatgttttaataatattttgatgttatgacaagtgagatgaagtgaaatgaattgtagtattattgtaaagaaaatattctatgtagattaatattactatttgccgtgttcttggtctataattgtttgtagttttatcagtttgttcatgatatgatatccaacgtaacttggaaattatttttagttgtgtttttgttgattttctaatttctctttgttcttaggtaaataacgtagaagtctaagtaattaatattttttggaagtttggttaaaatatatcaacccttcaacaaaattttgaaaaatttaaaataatttacaatatagaaagcaagtgttcaaatagtctatttcacacgcatatgaaataaaatagtcacgtgtgtaatacattgtttgaaccttattttcgac

SEQ ID NO: 383081 - DNA, 2324 bp, Cannabis indica
atgtttttgtccaaacaaaataatttagaatcaggccctacttttgtctaatttaagacactaatagattttgtcgataaaattagataaaaattacacttttactaatttatttttttttttttttttttttgaaggaacacttttactaatattaaatacttatatcattaaaaaaattattaatttatagcaggttcataattttaaatttataaccatatacactaaggattaaatataacatcactcttgaatttataaataaatacaaggtgttccttgctcacatgggattccatgtgtctcatactactcgggtcaaagcataaattatattaatactaaatctttaattcttatttatttcataattgatagagtttttatgtaaattcaaaattaacaaaataagtctgtgattattccatttttttaatggtaatatcaaacttagtcttagctactaaaaaaaaatagtgaataagttaaaataatagactccatctatgatataaaatagaagatttagtaaagataagagctcatattatgagttaaaacaaatgaaatttttcttgtttggcttttcctatttttttttatagatcttattttgacattgacttgtgtgtttcttttataatatttttaaaataacattttttttttcttcctagtttcccgttattgactagaaccattagttaaaaatgttgatatagtcttgaagtagattaagcctgtgccagttcttttatgtatgccattctcttcatgtcttcagccaccaacaaattattgtccaaattattaaagttagtcttatattattttgtagaaataaattaccatatataaaatgaatgaattacaactctttttattgctaattggttttgagatggaacctcattcatcttattccaaattctaacatagtattagagctacttgtgattcattgtgagttcaaatgctaccgtaccggtccaaaaaaccgtttgtgatctgttgtgagctaaagtgttgtcggtctaaaaaaatacttctgctgtctcctctttaacttctatttgggacctttcggctaatgtgtgccaatttttagtatttggtctttgacatgtttcaaaaattcgtaaatattccgatttgtacactcataaatttcctaatatttggccttgtaggattctttcaaatatcacgttcggtcttgtggccttttaaaggtcgttcgttatacccacactttctaagcccaaacgtgaggagagtgtattagagttagttccacattgttaatgtgcggaaataaattatcatatataagacaaatgaactactcattctattaccaattaattttgagatgaaaccgtattcatcttattttaaattccaatacaaactaattgtgctctggtcatgagagtacgctctatctcatcacaagtcatttgtttttggtgaatgatgctttgatacaaaaatataaaaggtgatcgtccatttgtgctaatttaacttctggttgacaagttaataaattgttgatggttggtaattttttttccttcatattcaaatattttataatttgaatataagatttcaactgtgtattatttattaccacttataccttctatttatttattttattaatagtgaattaagtgtcaaacttttctaaaatagaaagttttacacaattggtaaattttaatgaaaaaaaatatatttatctttctactatatttcttattgtattctaattctaaattaattttctaaatgacttgaaaaaaatcgaaatcagattttcattttatatgaaaggaaagttacattttctactcacaattttgtaagtacaataggagaaattcttgggttgaatgaagatttttttcaagaaagttttttgtgagttgttgtcttgttcagattgtgtatgatttgtctaaaatgcgtatatttattataaatacacgttttagtagctacgtttactatatcttttatctctttaaatttaattcttttttgtgagaaaaagtgactttattgtgtagaggagagtgagttcgactctacctctgtgtatacgtctttattattattaagctttcaggagaaagttcttcaagcttgcgggagaaagtgtttcaagtcttacctcgaaaaggaagaaagtactcttcaagtaaatcgaagggagttcgaacacttgaagtttcagcaagattcttttaagaatgtagaatacatcaagcttgcaacatataataaaagagagtctatttatgcataagtca

SEQ ID NO: 383082 - DNA, 3577 bp, Cannabis indica
ttaggttgtttactattagtaagtaatttaacgtaaaaataaagtaaaaaaaaactagttttagaagtaataaaaataagtaaaaactttacttttttttttaatagtaaagaaattttaaagttttaattattactaaattactaaaataaatattaaataaataaataaatctaatctacattactaaaataaatttctaatctaaagtcctcaccagatttcaaaccttcaaagtctcccgcgtctctctctctctctcttgctttctctctcttgaagttacaggttttgctttcatttttccttctctcataaattaccaggtgttgatgcttttaacgttgatgatctcatttccctgttcatgttcttgcgttttttctttttcttttttccctatttaattattttattcaatttcttgcattttgaagaataaaatataaacaaattttgcttaacagtaattttggtgaaaatcttggtttagaaaatttccaacctttatttatttttcaacaaaaagaataaaaaatatgataaatatcaatgaaaaaccccagtacaataagacaaattgtaaaaaaaaaaatgaaattttggtgggaaattgtgtagtttcatctgttgttcttgatggttcaactttaaaatttgcttttattatttgacatgttttttattattaattttgaattgggattttcatatgtttagaggaaaaaccatggaggatgtttttagtgaattagattctgtcaaagatgagttaaagaaacttaaggctgaatacaaaattaagacagagctctctgagtgcttgaagaaagtccataatgagcaattactcaaatttgaagaagctaaaaagttgattgaaaaacagtctcaagaactgaaggacaagtatgaagaagttgctgaagctagagaactttctgagaagcttgaatcttgtttgcaagaaaaggatttgtcattaaggcatttgggttctctgaatgagaaagccaaatatgattttgagcagaagttgagaactttagaaggggaaaatagagatttggtatcttgtttagatgaaatgactgcgagaaacagagaattcgagaaggatgtgtatgccagtaggaacaagcttgaggcctttaaaaagcttttgttggataaggagaagaagtgtattgaagctcagcaaatggctaaagagtgtaaagaatcgaaagacagagatgagatgctagttaaactggcggatgaaaatgagtgtgtttgggatcagttgaagtggaagaaggagcaacttaatcatcttgaagaagctcataaaagagttcgacatgagtttgagatgagcaaagagaattggaagagggaagaaatggcattgattgaagaaatttcgaagttgcagacaaagtttaattgccaaactataatgttggaatgtctacaaacacggttggagatgtgcaaccatgctttagctcgagaagaaagcaagaggaaatccctggaggttcgggtttctgattatgaattgcgttttgagaatgcctttgtccaggttcaagaagaaaatttagagatacaaagaatgactgcccaaagaaatgaagagattgcaatgttaagaaccacactggcagcaaaggagacatttgcgaaggaagtggaatttaagactgtgcaccttgagcgagagaatgaggaactgacagaatcactaaaagaacttcaggaggctcaaatcagaaatgctgggaacactacttttgcaaaaatgcataacaagcttagacacttggaacaggtacacgccatctgttctgaaaaattgaaagcaaaagaggttgaatggctttccgagatggaaaagattaaaggaaatgtgattagttgtaaatctgaattgaagtataaggatgaacaaataaagaagcttcagatggagctggaaagttgttgttctacaactcagttgttaaatgaagagattccaataatattagcatttttcaaatcagaaatttcagaggcatactccaaaatatatgatatgaaagatgaaatgaagctgtttaacaaagagaaggctcggttggatatgagttgcagtgctctagatgctgttcatccgaaattcgaggaagaacagaagaatgtagaaggcttagcagagagagtggattcactggaacatattgaacaaccaccatttcttaaagatgaagagcttgaaagacataaaaagtttgttgaggaatgttctgtgtcccaacttcacttgaaaaatcaccgtattcagatggaaagttgtctcaacaatgatccacaaaatctttgtgaggcactgacaatggaaaatgctcagccaaatgcagacattgatgaagtaactcagtcagacgcttttggagaagaagaagaagaagtctatagacaaatgatgaattgccttcttgtacaagatgaaatgacagacatgtataagagagagagcgagaggcttacccgagtattccaagagaaagacatgaaacttaaagatctccaacagcaggttgaattactggaaaccaaattagcagctgaagcagaaaaaatggcagcctgcttacaagataacgagaatcaagcccaagttgcaaaagaagaaagtattggcagagaaaatctgctaaagcaagagttcagaagagaattagaagctgcaaccactgcacggttagatgcagagagagtgcttttcaaggttaccaatgagaaagacgatgccataaaaaacctcaagttattggaagcatcactggaacaagacttcacaaatttagctgcttcctttttttcagatgttgtagaaaatcaggtaaagattgatgtgcttattgaggcattagagaaggggaatgtcacagatattagtactgaagacaaggacaaagaaagtttgatggataaacagaggagtttggagcagttatgcaagcagcttgagtttgataaagaagttctccttcaagacatcttgaagttatcaactgaaaaggaaaacttaatggtttatgctcaaaaaatttgtgacagtgttggtcagctttccaatgaggatgtagaaatgatgaaagtcttggggaacatgttgccaatgtcaaacgaagagattccaacagaaatgtattcgattgtgcctgatgaaagttgcgaaattaccggagagaatgctacaacaaagaaacttgaattaagtagcaatgaaagatcaccactgaaggaggtcaaccagagacaaatataagaaagaagaatgaatcctaagcaaccttgtagtatgttggacagttatacctgctagtgttttgaaaaagatgtgtcataatttcacctttatggattctttatattcttatataataatggatactcctcaaggttctgagtacaccttttgggttggtctatttgcatcaacaaactctgagactgagctgcttgcttggctaaatggaagtttcattattttgtaaatctctgttgtattcattgtttatttaatactaggtgattgttacgt

SEQ ID NO: 383083 - DNA, 1529 bp, Cannabis indica
atctaattaactaattagtatttccatttagtttggatggataattagattttatataataatatgtataaactgtatgtatatatgaaaattaatattaaaattttcatatatacatatatatttagttaggtcgtccaatacatacttgaccaaaaaatatttgatggatcccatctaatccaaaatatactaaatttaaaatattatattaaattaataaatatatatgaaatatatccaatagataaaaccgatccagttggatcgattggattactgaaattaattatatcagatcagatgctaaaatttaacatctaatatatatttggataagatttaaataggtctaaaaatattgaatgtgttccaatgaacaccaacattgtaagtataaatgacgtgctttgcattgctcgttaattgggttctaaagcgaatgagatataagggagtacattgttccaaatgaaaagaaaaagaatttcaactgtaaaagtgatatttacaataaaattatgaactatcatacaaaatatttgaactaatttttttcttttttgtcaggaccactttacataatcagaaaaagaaagcaccgaaacaaaacaagaggatgcatctctttcatctaataaaacttattatgtatcttaaaagtattcttagccaatttatgagccacaacaataaaattaacacctaacatgagagagatgccctaaaaaaattagataataagtttaatatctaaaaatgaaacaccttgagtccatcttaatcctaccaataaattaagattttagacttgaaaaagaaacctacaccaaaaaaaccaccaaagagataaatttggtaatttcttttttctttgagagaaaatagaaatattcattaataggaaaataatacaaactcaattacatgaaaatataattcaaagagtaaaaatatagcttcaatacactttttgtttggcatacgttataattttaggatcgattgtaacttggtatcgagttatgatttaactatattctttttttgaataatgatttaactatattttatacaaatcttatgatcattttagaatatttcaactttattttttctaaattatctctactcatagcttttgatcatatattagttgtgcatacattgattagataaaaaaatttccttattaaaaggttctatgtttattattcaaaataataaaggcaagtaattgatagaaaaatgctaggcaccatttaaatttaaatgtgttatattataatttgtataattaaatattagatctcacatacagatttatgtggtgggatttgacaggccaagctatggagaaagtgacccagatcctaaccgcacagtaaagagtttggctttagatgtagaaaatcttgttgatccgttgggacttggatccaaattttatgtgatgggattttccaatgggtggtcaggccatatggggttgcctcaagtatatttccaataggtacggcagtgccagt

SEQ ID NO: 383084 - DNA, 2097 bp, Cannabis indica
ttatacattttctctaaatttgtaaaattaaaagtaatttttgatagccaaaattaattagtgttacaaaatctttaattgagctgataaagtaaattcaaaggataaaaatgtaacacaagtacaaacaagtgcacaagtttatcaaccctataattcaaaacaaaataagtttaattaataaataatatgagatctcattatcatatagtttatcaatggataactttctataactcatgacttcacgtgaagcacttaattataataataaataaactgattttatttactaaattcccacttatttattaatttttaatgctggcttttattaatataaaattgattaaaattatattatatgatttaataaagtataatagagggtctacaagagccaaaataagaattttaatttttaattattttaaagaaaaaaaaaacccaaaagttgtggtggtggatgtacaactagaaaggatgttagagctaattttggtctaaagaatgatggaactttaattcaaattactacttctctaatgaggatctccacctcacttatagcctttaagttaaagcaatgccttattcaaaagaagtgtaccacaaggtatgatttgtatttttaatctatatataattattattaatatttttctgatatgatgaccccacttgtagatccaccagcatcatcatcatggtccacaatgataaaataatatatattgtaaaaagataaatatatcataaaactaataagttaaagccaaacatgcccttaattaatatatggtattcctttgttgcatttgtaagtagaagtgagcaaagagaataaatagataaatgaataaagttagaaaagatagttcttttgatcacaatttcatgtctcgtaaaagatcatatagaaaaatacaagctgattttttaattatttattactcttttcatattgaacattgtggtcataattattctatatcacttttttcctttttgaatcatgataattatcatccttaactattcacatatatataaatttagagttgcatatatttattatatacatattaatatgtacacactacatacattttaggccaagtatattcctagcagcataatcattcagagtgaaactataatggtagtattatattggtcctttatgtttgaatttccacttaatttcattgaatttgattgtttagctttaatttatgcattattcatcctgtaatgatttaaacactctgttagaagatatgtttaatttacttcctaattttcgtaagatattactaatttatgtttgtggtacaaccagataataaattagtttaaaaattcttttatccatcgtaattgaaaaaatatatatctataaatataaatccaattgacacaatgttaaattagctagagtcaacactttacactacaacgtgggttcattaatgtataattgcacaaaaggcttgtgatattaatattattattgtgtttttgataagagacaatagctatattataagatagaaaataattattaaaaaattatacaaaattcgatatttaataaaatactctcaataccttctttaaactgcacaatatttataccttttcaacttctaaattaattccactaccactactgtttactgtcccattttaatttgcacaatacactcttatttaaaatttgtttaattccaactattttctttaactatattccagttgacctcatcaataaaataataagaacttaaaattatatttaaagatattgatagaaaaatgtttaaaatataaatttcacaacctttgatctccaaaaggattattgtttttttatccaaaaaaaaaatctctttacaatgagttcaagggccttatttatagtgagctattgacactttacaacttgactggatctcaaaaccacaaagtgttaagtcattttcacatctaataacatcgtatatctcaggtggcctaatgtgtctaacatctttttttttttttgaagaaaaagcgtttattgattaaaataagagttagacctcatggtcatta

SEQ ID NO: 383085 - DNA, 890 bp, Cannabis indica
tatatatatatatataaatgaatgtctttttacaagggacaaggacaatcttgcttgatgttttagaattgacactagaatctgtagagtgtgtaatcagcagttagagagcaaccatcatctgttttttgagtgtattatatatattctcaagaaaaagtctagatctcagttgagaaagaaacttcatatatacaatgcaagaaaatgtaaaaagacagataaaataatcacaatacctgacttacaacttttatgctcaccctttgatcatcatcacagttttcttcttcttggtccatgcattttcttttctggccaagtacgctcattttgatttttgaagagaagatgagagtgtaaaaagtgggtttcaaaataaatatgggtcttaagttttaatggcttagtttagaaagtcttgtggggatctcctgcaaaggagatactgcagcagtaatagaccaataggctttagtttcttcttttgtgaacagaagtcgcagtactataataatgggcactgctactttatttattttaaggcatttctctgctcccacaaggtatctctcacatgttttttcttccatttaaggaaaagataagcttgtatcccttatttagagtcagattaggcaaatgagataaagggtacttaatacaatgaattttattttttttgaactaagcgtatatatattacaatccataacttgggattcgaacccagaacctccaacacacacgcactctcttatggccacttgagctagcatcaagtggttacttaatacaatgaatcaaatcataaaaagatgaattatcttgagaatttttttatttatttattatttttttttggaggttattgttaggctaaaattagt

SEQ ID NO: 383086 - DNA, 3496 bp, Cannabis indica
gattatttcacaaatacataaaaataataaaaaattactaaaaatacggttgtacgcggaattttaaatattgtttataattttatttatatacggtctttttatgttgtactcttgttaatttgtttttgattttttcttatatatatatgctactttttgttgttgttttgattttgtttgtatgttattattaatttttctgttacagaagttttcttattattttcgtgttgtttttatagaaaaatcgtaaaaaatgtaaaaaaaaaatattaaacgtaaaactgtaaaaattaaaaaaaaaaaaaaaataagtactgtcatttttttaggggttcaaccatagaatttccatatatattatgtgtatttgcgtatatattggtagcctaactagtgaaagtaagtataatacgcctgccaatgtacgaacaatattggattaatgtatatatataacaaatcaaaaagttggaagaagaagatagaaatggaattggaaccagaataaacttgaatgaaaggactaggaaaagaataagaatgaccatatatatatatatatatatatatagcttatattattgtatacataactatatatatattagtttttaaagaaaaggttcctgggatgtaaatattactatccctctctgcacacgtattcttcttctctcttatgctttatatgggattcgtttgcttagttttctcctccattaattcctcctttataattaaccactttactaattacaaagtgatcgtattactatagatagagaaatagcaagagagacatggatactccacatatgaatgttctttcactttttttgcttctcattgtttcttttggtacgtatgtatttcttttaatccaaatttgacaattagttgttattataaacttaataattattaaatctttttgttatttgacaggagccaacctatccgaatcagctagaatgtttaccataataaacaactgcaaagagacaatctggccaggagtgactcccggcgagaactttaacggtggaggattcgcattgaaaccagggcaatccattgtcttcacagctcccgtggcctggtctggccgaatttggggccgcactggctgcaaattcgaccaaagcggtgtaggaaagtgcgagacaggcgcttgcggcgatgcccttaagtgtggatcttcgggaaagacaccggccacacttgctgaatttaccttagcatctcctgatttttatgatgtgagtcttgttgacggtttcaacttgcccatagtcgtcacaccactccacgggcaaggaaattgcagcgtggcgggatgtgatggcgacctccggaccagttgccctaacgagctggcggtcaagagcaatgggaaaacgattgcctgccggagcgcgtgtgacgtgttcgataccgatgagtattgctgccgagggctttatgggaaccctgttgtgtgccaacctaccttctattccaagaaattcaaaaatgcatgccctaatgcttacagttatgcttatgatgatcccaccagtatatttacatgcaccggaaccgattatgtggttgcattttgcaccaagaggttggtaaaatatatttatagtaatttattattacgagtatttggtatgaagaattgtatctcattatggaaaaatacgatattgcagtttcttaaaactattaatattgcaatataaaaaaaaaagtttttttacacccaaaaaaatttataattacactctaaaattaaaaataataataagaataaggtttacagtaaaaaaattaaactccaaatcattttttaatatctttaaaagataatttcgtacgtgattttgtgttaattttaatatttatttttattattttttttaaatcatgggtattttttctaataaattttttgtcataatatttaaaatataattatttttatttaataataatttgtaagaacttgaattagaaaaaaaaaatagtataaattaaagataaatattttatataaaataaaaattattaaaatgaattacctttataatttttttttaaagcactcttataaatttttacgtaaataaaactgtttttttttataaaatgattaaatttcatacgtgtagttcatgtttagggtttcttattattaatgacaacatgtagttcatgaataatatttatattaataataagatatgttaaattttatgatgatggagagtaattatatgtatagcaataatagtccaaatatatatatacgataattttgttacccctttcaggaagcaacaagtatgcacatatcataacaacaaattggtctgtaatgggtcacaaggcttaaagtcattcattggaagatggctcactctcatgcttccccttatactcattactaaactattatgtacttaattaaagaaaaatcattcttttaaaaaattaataattgtgtggaatttattatttacttttgtattttattagctaaatgaccatatatgaaataattattgtgaaccatcttgattgcttcaactaatgtttgtccaattatatatatcaaatatatgtcgaatttgtttattattatccatcattttcatagatataattcacacattataatttaattaatagttattaaaaaaattattcaccatttacaagacatgtagctcttttctcatactactagcgtctaatagttagcattgatttttttaataaaagcagcacaactatttttttttcttttagtagaaatgctaaaaggtatcagtggtgcttattattttcttacgtgtcattatcgctattggtccaattaagtatatggtcccatataatttaatgtaataacttttggggagtatcgctaaccaatcacaagacgacatgtctaaagatgcactactacaaaaatggattttcctgacgtttttaaacaatcgtttaaagtatttctatcggtttctataaccatcgcctatacaatctcgtaaaacgggcagaataggcgacggtaatgtaggttttctgacggtttaaaaccgtcgcctataactgggtataggcgacagtttataacaatgccttatactataggcgacagttttagtatagggaacggtgtaaaaccgtcgcctataccctgttataggcgacgattttaaaccgccgagaatgtaaaaaaaagagaaaaaaaatacagattttctgccattaatgacaaaaaaatactgtattttctttcatttttttccttgctttagttttataactaattaattttgttacaataacaactaactttaaaacacattaaatttatacaataacaaaataaatatatataataaataaaaaagtaatataaataaataaatatatttataccgagctcggagagagagaaagagagagagggagacagacgggaggtggtggtggt

SEQ ID NO: 383087 - DNA, 1391 bp, Cannabis indica
ttttttttttatttagaaaaaagaacgagtggattcaaaccataatctgtcaatataaaattaagggattatttcacaaatacacaaaaataacaaaaagattacaaaaatacaattttacgaaattttaaaccattctttacaatttttttgattttatttacagaaaatacgctctttttatgttgtactcttgttaatttattgttgattttttgttatctgtatgttattttttgttgttattttgatattattttcatgttatttttaagtagttttcttgttgttttcgtgttgtttctataaaaaaaccataaaaatgtaaaaaaaaaatctataagcgtaaaaatataattttttttacaaataatagtaccttatggttcttaactaactgtgctacctaactattgtaagcgtacattagcaacaattttatatagcatattttgaaatttcagggtaggctttagccctccctggtctcaacataagtccgcatgtgcctcgagatgcaagttgtttggccttctatcttttgagttcactgatttaaataaaatttattctttgaacttttagggggccagatgctttggcccatcatttttttagaagaataaaaaaaaaagaatttacaacaaaagcctaacttttaagaatgtaggggaattctatttctatcatatgagaaagtaactaccccattagtatttgctttaaaatggaatatgagaaacataaagaggtaccaaaactaattaagctttaacgattttaaaaggggaaccatcagaatctacttacaaaatagtggaagttttacacatacagacaggagttctaaacttttgactaatttgcaattgcaactacttttctcagtttggatcaaatggtccagctgtagaaaaggatatgaatagtttggattaaggtaagtgaaattttaaacttggaataatcatgcaaaatagcaaataaaataatatactagtagctatgttttgacttaataccaattttaaatgtagattcgaatttatcaatattttcaataatcaatacacaattgagaaggtgttcttttttactgttttgttgacctaatgatctggtatcgaatcaaaacacatatgcctacaatagtataatcctgataaaataaccagtacccatgttcctgttcctccacgtagttggagtaaacagtaaactacaagtttcatgcatgtgctaaattgctaatcattgaaatacacatatatgatatatttatatatatatatatgaaaaatgctaaagggcaccagtagtgcctaacacgctcttatgtgtcaatatcgctattagtccaactaagtatcgagtcccatatagtttaatat

SEQ ID NO: 383088 - DNA, 2610 bp, Cannabis indica
atatatatatatatatatagatatataaattacatagatgtagatttttttcaggtaagaaaaggaagaagaagaagaagaaaacggagtgttgggttggagcttgggttttgattgactgaaacaatgtcgggaggaagctcgaagtccaccatttacataggtcactattccctttacctttatttactcatattccttactctcttcgttttccactaaatgtaattatagaattttcattaatttgtcagccgcagggaagattttttttaagaagtgatagtttgggggaagacgaacaattggtgttaaattagttctaagattgaacttttatttcaaagtttgggggaagaataacaattggggttaaattagctctaagattgaacttttatttcaaagtttgggggaagaagaacaattgctgttaaattagctctaagattgaacttttatttcaaattttttacttttttttttttgaattttcctaggtaaggaaacagtttctagtttttccttaaaatttactctctttagaagaaaaaatagtaattagtatgaattcaattgaaaaggcaacagaaatacgtgtactctactctattttcattgcatttatatagaagccgaacgctgagaaaggctgaaaaagcataataaagtttaattgctagtttctcaagtataatatttttaatagtgactgtgattttgttttctttaatttgtgctctaactttgttatgtgctgatgtatggctaataggcaatttggatgagcgggttagtgagagagtgttgtatgatattctgattcaagcagggcgagtacttgatttgtacattcctcgtgacaaagaaactgataagcctaaaggttttgcctttgctgaatatgaaaccgaggaaattgcggattatgctgtgaggcttttcactggtctggtcactctctacaaccgcactctcaagtttgcagtatgttcctttttattgtactccccatggtcatgctctgtgtaatgtatgatgaaatatttatataattttggatttcatatgaacataattattaggttatgtttagggttagtgtttactttatgttgatttcttagggctgtttttggtaggcttagaattgcttctgtgtgaagagtgagttagtgattaccttcttcttgcttagaataaggtacaattttttgagactttatgttagctgaagatttttgttgttaactacatttcttttctatgaacagatctctggtcaagacaaaccgtcacttaatacaaaccctggaactactcatgcatcaaatgttcctcataaactgagattacagcctataccgatgaatgatatggaacgaatatcaaacagatcatcttcttaccctgtaaatttctctcaaggtgattgacctatgtaatatttttatatatgaaacaattattgagtcaaaattctatccgtagacaaattgcgacttaaattttatttgaaagatgctaaataatacctttctttctgtatcaatgcctccttctccaggtttaaataatggaaacaattttgaccatagtcgtcgaatttttggggctgatttggatagcattaaccgttctaggttacgtcgctttgacacaagtaatcctgtttcctatcctccctactaaagttgccataacactgttgaaggtcaaaatctcatttggtaactctctgtttttcaaattaaatggtattttaggcagatattgaagatagtctgtaaggtttaccgctggagtcaatgagctaaattaggtactcttaagttagatgacatagtattttgtgcgagagtgtggtgtaatatttaggtttgatgaacgagtggcaattttttttcctggctttcttttttatatatattaatactagtatttaatgctgtactttaaatttcagaattaaatttggtgtgaatttatactagtttgttcttgcgctcttagactatctccaatggagattggaaatgtaaataagttatggaaagttgaaatattgttcacttagcaaaaagtacatggaaagctaaaattttactatgtactaaattcgcattactttttggcacaccattagggcatatttattatcaaatgagttatattttagctttacttcacttatttgaatttcaattgagatgctctaaggtcctgaattactcttttaacataatgtcatataaaaccaactgtcactgtctttgagctaatttcactccacttttgttcttcaactctgggcacggaataagagtgtgcatcaatctattgaaaaatcacttgaaacacaagcactacgtacaccagcaaagcaaaaagcgtgcaatacgtaacaacaagagtaaatattacaagttgctacaccatttttccaaaggatgggatgatttattggagagactaatttacaaagcctcgttgatacacgggaaagtaaataagagtaaacgggaatgcatttgtagtttgctcaccctaatttgaaatttaggggtgttcaataaaatttaggagttttttcataaatgtacaataaaa

SEQ ID NO: 383089 - DNA, 3917 bp, Cannabis indica
cacacaaaaaaatcacattgggtttcttttagaaaacgatttccttaaggaattgaatagccctcgggttcccaagccctcggcaattccagcttagtaaactcataatggtaggcgggccccaatttgagaacccgccaaaaggacgttttttggaaaaatgccattattggtaattgaactttcctccaaggcctccccacctggcccattgttatccatttggttaatacctttcccactaccctcttttacaagaatatcattttttcttacatccccacttagaaatgggcctctgaatccttcctcactaactcgaattgggcccccatcttcaccatttaaataattcaatcccctcccttcatttacgcgcctcctctttaaatcagcaataagaagaccatcttgttgaatatctacattatttccctcctccaaatcaacatttatgataccatgattttctccatgattattgctcccagccgatttcaaaccaaccccccttaacatcccagaattatctccattaaccacgccctctaccattattgcgtccctagaatcacggccaggatcgaccacccctgtcctctggtttcctgatgaaacttggccggcaccagcttccacagtttgtcccatattgtcccttaaccaccgagctccgatctgtcgagattgtcgtctatcaggcactttcatgaacagaccataaggttttgcaatagctccgatctgtcgagattggttagtggtattccataaaagttattactataaagtatatgagacctaatacttaattgtaccaatagtgatcatgttggagagtgctagacactattagtgtcttttagcatttcttaatatatataggctatttaggatttttaccctgaactatgatttatgtatcattgtgccccttaaacttttcaaccctctaaaaatagtgcctaaactattcacaatattgtaaattggtccttctatcaagttttgtcacacgtaaaaaataaaataatgatatgactgcttagccagttgccatgctagtgccatgtcaacgccacatatgtaaagataatttaattttttttaatttagttttatgtaattttcttaatcattaattaatttagtttaatatttttcaaaagtatatcattttattttttaattttaaacatggtgctgacgtattattttatttaccacatttgacaaaacttcatagaaggattaatttatgacactatgaatagttcaaggaccatttgtaacgggctaaaaagttaagagagcacaataatgcataggtcatcgttcaggtgatgaaaattctaaatagccacatatatatgtgcgtagatattatatataaaatatttattcacttttaggcaagtaaggcttgcagcttctcactagaccaggctctttagttttcaattattcaaagctagatactttccaaacaataatttttgaatgctcaacttggttctaatcccaattttatttggaaaagtatttgggagtcccaatatttagtgcgaaaaggaattaaatggtgtgttagtgatggctatggcatttcagtggttggtaaccatggctttccgatgaagagaatcctttgattatttctaatcatccaagtctttctaattccttggtttgttatttaatgaatttaggggagaatagttgggatgaggacattttaaatgacctaattttagagcgagatcaaagtttgataagaagtatccctttacaaattgctttgactagggatcactatgtttggtcaaacgaaaactcgtttgtatactgagttatgagtgcttatgcattgctatagaaaggtactgggcaatggttattcttctttttggcatactctatggagtttaaaactaccatcaaagatcataaatttgctttggcgtgcttgaacaaaatttttaccaacggagttacaatgacaaatcaccaagcatgttgatgttagttgtacttgcccattatgtcgtaaggaagataaatccattctacacatcttggtcgcttgctgtgtgattaaaaagtattaggatcttgttgaaattggtattgcagtattgttgggtagtacttcttccaccggtgcgctgtcgtgttcgcagagggactactggtctaaattgtaaggtggcagcaatgtgttgggaaatttagggagcaagacatgacttggtatgaaaaaggaaagcggtgaaggatgaggacattactgtattttcaaactactatcttgatcaatggacacgtgctcaaaattcgaaaagggattcgtcatggtccatctttcagacgggtgatgttgatgagcattggcctttgcctcaagaaaattaaatcaaaatcaatattgctgtaactttgtttgataatggtaggagttatggtttaggtattgtttcacgcaatgcctcaggtctactcatagaaggttgtactaagctctctcttggtttagtggaatcagttttagcaaaagctattggagtctgggagactgtttgttggataaaagatcaaaaccggtaccatgtgtatgtcgcaactaattatatgtgtggtgcaagcttttcaaagttcattgaatatgattttcctatttggacttgtcattaagaattttaagaatttacttgtagatttatataatgtttatattttttttttgttaagaaatccaactaatgtagtggcccataccttcactaaggctattattttatatcctgattgtcgtttcaatttggagtttgtttcaagtgatttgttaccttgtttagtagcagaagttgatggttaaataaatattaagttttcattaaaaaatacatataaaatatttattgggaattatattaatgtttctctaaacattaaatcttcgataacttcaatttattaaaagagaaataaataaaaattgttcgtacttgcatataacattcttatttattctattttgtaatttttttttaaaagaaatcatttttatattataataatggcatttaattttttttatttacttctgtaagtaccatatttcttgtgtggaaattatgtgctagtattatttattgacttgtcagatgaatcaaggatttatagatttatttcattactttgcctgatcaacatttggggattaaaaatttatctgcgagtttttataagttggaattcattttattttggttgttagggagtcggtctatatatatttgattctaataattttttaactaactctcatctttgatagaatcttctagtggattcttaatctgttagggaaagttctccttctactttcttttttgaaggtttttcatggtgattacagcttcagggatgaagatacattaaggtctggttagtctgaagagattttagattcaatgctgaatggatttcggcaagagtgaagcaaggggatcttggctttatacatctaaggggactcaaattaagatcttaattttgtgatctagatcttacggtaaattttttgtaagaatcattgtttgtatgctttaagttccgatgagtttagaactggtttttgtaacttgaatttgattcttagtgaaggttacttacattggttctgtagaacccaaacactagtcgactatagatcttaaaagaaaatttctaaatgagtctcatacgactccttactcagttcacccaggaacaacgaagatgtcccaagatcttaaggctatattttggtggcttggaatgagaaatgatatagctgaatatgtttcgaagtgtttaatttgtcagcaagtgaatgctgaacaccaaaggcctgcaggtttgctgcagccactgaa

SEQ ID NO: 383090 - DNA, 1156 bp, Cannabis indica
aagaaatataaagaaactcaaatgtacatgtcgggtgctgtactatacatttatattatatatctatatataattcttttcttttggtcaggttctctttatatataatttgatcgatttgcctagctagaaaaacctaacaaattaaagtgcaaacgatcatatatatatagtttatcgatcgactgatctgtctcttttttcaatttatataaaagcagggacggacccatttatagttatgtgaggctatagcattaaaaaaatattacattttaaaaaatgaaatatatatttttaatttaataattataaactaaaatagtacaaaagcactttagaattttgataattgttatgtgataaaatttatccagaataggatttttcgttcttaaatttatagttacatgtacaataggttgtatttttggtactacgattgattttgtctctatgacatggttttgagaatagtcttgtctctgtgatatggttttgagtattttaatcttgttcccgtgatatggttttgagtatattagtcttgtctgtgtgacatgcatggtttaatttagttttattcattgttggttcttcttgttcttgttctcaaaaaccaacatggtattagagctttgatcgtccccatcatagagtattcatccaatcaacaattgaggttcgtcgattcccccaagtttgtctcaacaaatcaatctacctaacactaatcttgtttctttctctcactcactttctagtcgtttggacgagttcaattgcctgccatggaagcaccaagttctacgcgcgatcaaagggagtcaactgtagaaactccttgatccaaaccactttgcctcattttctcacataagaagatcgacatgctaacaaagttagtctagagtttgaggattgggaacaacaagataacatcactacaaaaaataaatgttacttttagtgacaaccttttagtcacaccataaattttttatgactaaatatgactattagtcacaacaaaacgttacttatgactaaaatatagtatttagatataaattgttactaatttagctttagcgacaacaagtattgtgactaaaaatacatttagtcacaaaaaattgtgatttttataactaat

SEQ ID NO: 383091 - DNA, 2802 bp, Cannabis indica
ccaaactggccctatatatgtttgaaatactatatttataaaaaatatataaaaagtataataatatgtggataggttaaatatatatttatgtagtaattattttcaactatatttatctttggatctcattgattaaaaagtaaacttgcagccaatcaaataaataggtgttgttaaaattaaagtattattagtatttagtattttatttggtgttataatattattagtgtaataagtattgagtcaatattattaattaatagtgagatagtacctataaaaaaataatatcactaatactcaatgcttttaattttacgcttattttggttagatttataactatagggtaggggtagtaatatagtagtactagtactagcagagtaatattatagagtagtacaagtactagctagtagtatcactagaatcaagccaataattttatggaatattctttttttctaattccatatataataatgataaatatagtatttatcatttaactacgaatatatatgatctcatctgttgattattgtacttttgtcttgtgtcttgtgagtatttaattaaagaaagagatatatgaaagaaaagaaggtatgaatgtaggcttgaattggctacacatttattaatatcattacattacttggaaaagaaaaagagaggaaaataatgaaatgacacatatgtaatggaaatgtgtgagagctttcattttcttgttttatattttcagccaaaagttatgaatgaattggaatttttgaatagttagttgtgttgtgatcatagatgacaagtggcaacaaacgacacttgtcgatattcataaacctccaaaatggatcaaataatgcaaatctgacatcttatcgtccgacacatatgacaacatctcaccaagtggaatgcccacaaatgagtaaataagccatctataagaacaaaagatgattctagtttggagtgaacatcatttggtggtatttgtgttgtttacaaaattttttaaaaactgattaggaaataaatgaagtttcaaaaaaatattgaagattaataagataaactttttttatgtggtaggaagttattaagatttagttcgcgagttaatcttattgaattatagaatattttacacaagagtgtccttacttaatatctaaccagtgtttatagctaaaaattataactttttgcataaagggttagtgtcctatttataggctagagttgggttttaggtgaacctgaacttgctagggacgagttcgcatattgaaataagtctatcgacggggtaaaatatattataatattaactttgggccgagtaggtgaggcctaatttgagggacaatcgtcgtatgtatgggactgtaccacgtgatggtgacaggcgggcgggcgctgtcgatcgtgcttagtcaatgtcagagtagtggacgtttgtcaaaaggtagtttgctattttgttgtgagcctttctaaggcctgacacaggagacaaacccccgattttgtgggatttggcatcaaaagtgcgtcacgtcggattagtcctgggtggtcgaagttttgctatatcccttcgagtactactctttcgggatacccctgcatgtatccgtttatccctcttcagatgcacggtaatctggttaagtgttaatcttctagattcatcttttcgactttacccgtaacgaaattttggttgaatccggatcccattccaattctattcttggaccaggtcattggcttatttgggctttgtgaatgtgcccgcaagcggatttagaatataggaccttacacatgtcacattcccgaaaatgcagataacatgtgtaaattactattgtttactgatttttttgaaaactaatcaaaattaaatatttagagttttgaataaataaatagtaagaaaaaaattacaagatattttatgtggttggagcgttcacgagttaatattattaaatattaaggtttgtttttttttttgtttagcgtaatgacaaaacctattcactaataacttaggagtcttgggttcgaatccatgccctctcacttttgccatccttgcctcaccactgaactagccttagtggcttattaagtttttagctttgtcacaatgtcctctcacaattttcacagagtttcttttctctcgaaattcaaatccctttgagggaggttgaaggccctatttataggaagccatgcatcttaggccgacttaatacaggcctgaaagggagcctaattatgattactctctaaaagagtggtttacaaagcactaatattgatgagaagttgtatccaacccgttgggccgacccaattagtgatccacgtagctaaccttatgtcatgtatgatgtgacgggtgcaataggtagccatcgattaggcgcatgagcaaggaatgtgtcagagtactgggtgtgcaaagcccaatgtttgtaccctgagcccaaaggtgtaagggtcgttggtacgaagtgttggattatgttttaccaagatctagatttactaccatgtatgttatttaacatcctaaatatgaatttttaaaacaatataatttaaacacatataaaatttgagaaaccttacagtggttgcagcggaattaaatgattccttccgctccgatctctaacccttgtatcctttctgtagcagagtatcaccaagatttgagcccgaaactgcttccttgtgtttggattcttcacagtcttacacactatg

SEQ ID NO: 383092 - DNA, 2023 bp, Cannabis indica
gtaattttcttttcatcccagctcactccacctcggacttggcagcgtctactctataaacatcagacagaagttggtgaaatttggttgtgtaatcaccaaattgagcaacagaagggggcttcagcctgaaaacgtatgagatggccttcggtttcaccattggcttcttagtagtgactttatcaggcagctttccaaagcttctttcatcaaaccgaaatgactctgaaaggaagaagaaacattctctgcccaacttttccacctgagacaaaaatcataacccccatcatgatttcataaacataatctcaacatttcattggataagagcaccttttgacagcataatctaactattttatggcattagtttacctgtagttgtgaaaatcttagattattcatggtgatgataactttcacttcgcttaaggcatcagctagtatacgaatggccatatattcgaaaaagctccgtaagattactctgtcttgttccatcatttcactagaactgccaaggtttggaaaccatagaacacactgaactttactccaagggatcgggttctctccttctttgcaaatgatggtttggaacgggtgaatcaaaccccagaaaatctttacttcttccaggtttggctcaaatatggaagcctgtgacaaagatgtggtggcaaatattttggatgggttgaagtggctagcaattttcgaagagaaaaacaaatcggtgtcatccaatagtagaatatatctatcagaagatgctgcaggaagcaatctaagaaggaatgttgctttggcgttaccatcttctggtaagcagagagttggactgtgtgacgatacttgctcacccctatcatggaaaaatgaacatgacgatccatttcgacatccctgtcaattaaatatgaatataaataaaagactaatgcttcagacacagtccagcattgataaatttaaggtttaaacttcacataatggagaagaaagttcaggaatcatatacaaatattgttgagcataatacaacctacatagggaaatgcatgaagacactcataagaacaattaaatgaagaaacatgacccaccacataagagctctaatacacgttgcaaactgagatacaatttgaatgtacacttacatgtgggtttaacgtaatgcagagactgactactattctgcataaagttctaggatgctgagaaagcagtccacatcacatggctgatgatattgcttgtagtcgatgaaaaataaaatattttataagagattagttttgagagttatacagaattagtggtcgtggacagagttggagggaggaagtagtttggaatttaagaaacacaaaacataactgctagcttatagatagggacgaatgtagcaattgtggagattggattgataaagaccaattcgactaagttatggtgatttgtggttgtagttgcagctatggcatgattacaaacatgagaaatggaaaggaagcaaaatttaaaaaatttagtagtattaagaagagattttcacacttagaagaaatatattggttttatttcatagtaaatatcttagaatttatgtttatagatatctacatatatagttaattgatttgcaaaataatattggatccgtgtgagtaaaatgacatgtacttttttaatgagcagaaatgaagacaacttaatattttatatgaagacaaaaatatcataaagttcattaagaatattgctaagggaccactctatcatgtcacctggagggaaaagaaaaatttgcatggaggtcttggtacttgctgtgaatgagaatatggccattgattgccccaatagccggctccactgacataggataaacccataggcagctcaccattgtaaagggagtcatgatttgtattctgataaccaacaatatcttctgtccactgaacttttatctattaaatacaaggcaataaaaaacaatcagttttca

SEQ ID NO: 383093 - DNA, 1990 bp, Cannabis indica
cacaggcaatgattccaaatccatagcagcccaaaaagcacataacccgtactatgaagccataagtgttgatgtttagggctaaaaggcagggcaccctgtagaaaacctacaggtttttcagagccattttttcaatatgctctcccctatttgccacagcccttttaaaattgttaaaaaataaaaagtacaaaaaaaacacaactacaataattatatgaaatgaattgcttgatgcctacttcctcagtcatcaaaacccaaactttgaatcaacttatttataaagtcccaatgggtgtactccatgctcagggaaatggttcaatatttcagtctaattcaacaagtgtaatgggctcgcccattagtctaaataaggtacatcggccctctgttatgaacaaaattatttgtaacaacctgaccagttaggtttcttggtaacaaaaatcattatgctattatagtcattgtgatttagtatctgaaatcaatttaaaattgttgaagacaaaaaataatgaccaaaaagaaatgtaatggcgattggaggcgggttcgtgaagaaaaaatttgggaagtgaaaagggaacattggagtataaaaggtttaaaaaccttaaatacaggcaatggttccgaatccaaagcagcccaaaaagcacataacccgtactatgaagccataattgttgatgttagggctgaaaggcagggcaccctgtagaaaacctacaggtttttcagagccatatttttcattatgctctcccctatttgccacgaccctttcatgatccgttataaaacttaagtagattagaaaagcaaccacaataaacagcaccacaataaacagcactatgaaatgaaatacctgatgcctggttcctcagctatcaaaaccttagctttgaatcagatatttatggctacacaaagcattatgcacaaactaaaatccattataaagatgaatatcatagttatttaaattgaatacaacatcatagatggtttaagataaataaaactgcaataatgaattagaactaaatgataaaatttgacactgaatatatgtattatgagtttgattttccatatatgatgatgccacaaacaaatgccacaagaacacctcaaatttaaatactagtcagaccaatttatatgaggacatatatttatgactaactcaatattatcatgaaaaaatattccgagcaatattagcagagcatatttacgacatatatttcaaggcactaagtagataacatttcatactgtattacaattactaatcaactccaaaggaaaaacattacatgatatattctttgtacgtttgtactaagcttcaagaaatacaaaatctgaatattatagatctgagagcaagattattaaaaaatgcataacacttcagttaacaacactgagctgagactgagagtagtggaagcagaaggaagcttcacctgtacagagagtagaaagcttgtgtctatattacatgtcaagtatgcagggcttgtcgccgtctcaggtcgtagacacgaagctcttcctcgtcgtcgtcgtcgtcgtcgtcgatgaatcaattctagaaatggggttttttcaatgagcaaagaacagagaagctatcacatttcgtgaatgaagaaaggaagaagatatataaggagaacagaacagagaagcaaccaagaaaaaaaaaagattaaaggaggcggctgtgtttagggtttgagtttttgtgtttgagagtacatttgatgtataacctcaataatgtttttgaggaatgtaacacctcagctggatgggagccattagattgatgagattttgtatccaatggtcaatttacatcttattattatattggagaattttatttaaaccttaaaaatttgtaaagaattttattttaataatttttattttatataaaatttatatatttaattatatt

SEQ ID NO: 383094 - DNA, 2540 bp, Cannabis indica
taatctatttagctggctgacattaactgaaacttattattgatgctaaacatatacaattaactcttaaaatattcttaaattttttttcttagagtacaatctatgcttatatttttttgccaagactcttgaatcacaccatattaacggcacattagcactacattaataaatagtttaaaaaataaacgaaatataataaaaagacatatttactatagttgctataattcaagggaggtttttacagtacaaaaaaagttaatagaatgtgattttacaaatttcttaattaaagggaaatatttaatattttaaatttaatgaacgcattcactacccaattatagaatttgtatttaaagtgcgtatcatggagcaataactagtagatattttaatactacaaaatagttcaatattagttattttttccacaaatgttgcaattttcaatgataacaggggtgagaatctctctttacaacattttttattaattatataaatcacaacattaaaagcaaattctatatgtttcataaaaaaaaaaaaaacaattgtatagacctaactaacttaacttttaggaacagtagaaccaatggcaccactagactcatctttaactgctgaagacacatccccttcttcaacttttctcaacttagtcccatcttctgactgtttcttctcaaattctttagcagtgtcataagaagcatgcaatccaaacaagaagtagtaaaccaaaatagccccagtccacaatccaaaccttttaaaggaagctctatcaatagacccaagaaggaacatatttatgccaatagaagctgagggcaaccaagggaccaatgggacaccccatattttgggtgttcgggcttgagggagtgaagcccaaaggccaaaagtacctaaaaaccaaatgggtaatgtaatcatatacccaatcttactatcactattggcccaatatacagatgtagctattgaagagcccaaaattatgaccaaacaaaacataagcttacttctattaacattactagtgacaccactcacatagtaccgtcttatgataagagccaaagccacaagactaaaaatgaaaagagtggagattgagagaagcttagaaaggatatcaaggtcagaaaaaagtgcaaagacagctgtagctaccaacatgacaatagttgcattgacaggtgtcccagtcttttcgttgacttgagccaaccatggtggcatcatatgggtcctagcaatgtgtgttaagtaacgagcttgaccaactgccccaactaacaacacactagtcattccctttaaggctccagcagcaaccacatacttggcccaacccattcctacagcctcaaacgcaaccgaaaagggtgcttccttatcaatttgatagtacggttgcataaggcacaaagtcaaagctaacaaacagtacaaaatagttgtaacaaccattgagccaactagcccaatggggatgtcacgaccagggtttttggtctcctcagccatggttgaaacagcatcgaatccaacgtaagcgaagaagagtacagccgaggcttgaaaaatacctctcggcccgtgaggcgcgaatggggtgtaattagaggtgttagcattggcaaggccggcaatgatgatgaaaatgatgactataatgtgaactattgaagcgacatagtttaggcgagaagaggccttggtactgagtactgcaatgacacaaatgatggcgagtactcctactgcgatggggtcgaggtgactgtactcttcggttagaccatgagctttgatacgaaagtcattagcttggtaattgcatagagtggcaaagtaggatgtccatgatcgggccacagctgcattgcctattatgtactcgaggaggatgttgcctgcagctatgaaggcaacgaagtctcctaactctactcttagataggcaaatgatccacctgatcaaatatcgatatagtaattaattagataattaaataagtttagttataattattattatttattaatatcgagtgcctatctcaagcacgggcagacatatatataaaggtgaggggtgcgatgccactgccatgctgaagttattgcagcagtcggctaggtttaaccgtgtcgtgtgttttttaatagagcattgttattaagcaccagtggtgcttagcaccttagttggctagggatacttcctaaaaactattatattaaattatatgggacccgatatttagttggaccaatagcgatattgacacataggaaggtgctaggcgccactgatgcccttcagcatttctctttttaatatatggtgtgagttacgtgttataggaattggctgtgttgtgttcgacattggtgggtggctggggtatggtattggtacaagctgttagaaatttgaataatttgtcatctattttttttatttaggggcctaaataaaaaaaatagaataattatatttttacgttttaatt

SEQ ID NO: 383095 - DNA, 3545 bp, Cannabis indica
aacttctgttttcgtcaatacactaggtatacaaccactgcctgaactctttaatacatgaacctcagatgcagtcttgcgtagcctgatacgaataatttttcctacaataaaatcaattgaacaggtagattgttattagtgtcacaaaaatttaataaaatcttgtcacacagatcagaaaaggaactcactttcactgtcgccatcattagacaatgactcgtgcaatcgcctcttcttggggttgctttgagtgctatcagacacaaagctaacacttccagaacaggtgggttgctcgtgttcttgagttaaatcactcgattctaatagatcagattcatccacaacagtctttctcttcttctgtagaggatatttctcctctgcagctgccttagaatggttaccaccatacaagtcattctttctcttcttctgttgaggatgcttctcctctacagctgccttagaaaggttcccgccatataagttattttccctcttcttctcttgagaatagttctcttccttccttttcacttttccatcagcgtcacttttttctgtctctgtacttctgatacgttctttccgtaactttttctgcaatttatgttctttcctcttcaactttgcttcctccttatcttttcggagctattgaagcaccagaacaacccataagacacgtgtagagtagaacaaagaatcatgcaaatccacaaatcccagtacaagaggatattcatcatccgaaattttatgtactaaaagggatacacgctatcgcagtttgcccaaatcaacacatgcaattctaattcacaccaaacatactatagcaatatccacaaatcccagtacaagaagatattcatcatccgaaattttatgtactaaaagggatacacgctataacagtttccccaaatcaacacatgcaattctaattcacatcaaacatactatagcaatatccattaaaagaaggaaactctcagcttagatttaaaacaaaaaagttatcatatatgttactaaactttattcagtgttatttaacatcatgacaattaacataaaacatcgacctaaaatctttggaatcgatgtttgacaatagactaatctcgtaattccatgaaatcgaaagaaaaaaatttaatttggggtcatttgacataacgcacgaaacaattcccatgacaaaaaaagaatgaagctcttaactttcatcagttaaaataaccaaggaacggaagataaatgaaaaaacatcttgcccttatgtgactacaaatcaatggtacagaaaataccaaataatgcaatgaaacaagatctggaaagggcctaactcaatacttcagacaaacaattcttttcttaagaagattaatcatccaacaattttaggtctttttaaactattggttatcagtttcagccaaaacccacataacattaaacgatatatttccaaaatccgggtcagatgaatcattgctaccaaaccttattaatactttacctaaaacccaaaagatagacaacaaactaaggtatattgacacccaaatgaactgttgggttaaaagagaggccttgtgattaatgataacttcgtagaaagtagttgaacataaagcaaaaaccagatttgctcaacaaaccttaatcaactcgtccaaggcctctcctttgttcgcatatgtaggtggaggaaagggaaaacaccgagacattcttctgtatagtacaagaacaaacgaatcaagattctgttccgatctaaacagggtgatgacgaaatgttagggtttcgacggcgaacacgctttacttttaacctaataatgtctttaggtctttatatatatatatatgtctagatcaccgacttctttttaactttaagtcggctattcttttctatataccgataatgcccttgctatagggccaactggcaattgcctcctagcaaaacgcgggaacataatacggaaacgacaagtcgtcattttgcttgcgtataaaacgctacgacgtttaaagattaccgaaacgccctcccatctttaccaaaacacgctcaacagctctcatgctctaaagtctaaataagtgtgtgtcgtgaccgtccgtccgacttagcgaaaagctcgcaataaagtaataggtaactactattttggatgtgtgttttgcaaaagttattgatttaattttatatttttgttaaatgataaaataaatcctgtattttttaaaataataaaaataagacgttgagtttaatttcttacaaccttttttaatataactaatttaaagacaattgctaatacgaacagatatataaaatgtaaacaattttgtcataacacttttagatcagttattattaaattgtattttgacaaaaaatcatttcagggtcttatttgtaccattttagaaaatacaggaactattttgtcatttaacaaaacagaaggtccaattggtaacttttgtaaaacacaaaatctaaaatagtatttatcctaaaataaagggatttttacaaaatatatatactatattttagttaaaagtttacaattttactgtcacatgaaattttttataaaaatattgtctttttataaaacaatcgtaaaacatcaaaacattactattaaaactgcagtggaacactaaaaaataatcgtgaaacaactgtaaaaacttaacatagtacacagtataacacttatacagtaattttaaaaaaattctaccccacaataaaaaatataaaagtaaaaattttaatatgtgctttaaaaaaacctaaaataaatcattttgtcctggtccataaaacaatatgagtcgtactgtgttgtgttaaatccatattttcgtgtcgtactttgagttttttataaatgggtcaacttatttttttatatgggctcgaattcaaactttatttttccactatgtttttacaattaatgaattaatcagtaaattatatttttttttatatagtttctattgttttatacaatttttcaacaatactttatacataattaattagaaggattagaatttgaatatttattattattattagtaaatacattttaaaatagttttttttttttgtatttttacagaaatctacataacaaccaacggagcaacttaaatcgcaactaaaattcacatggcaacccacatagaaactaccgaaacaacccaaatagtaaatttaaaaaaaaaaatatggtatgtaggttaattctcattactattattattattattatcattattattattattattattattattattattattattataaaagctaaaaaaggtatcctaagtaatttaaatcatcgagttcattgatattcttgatatagtaaatgctatcacacgtacaattatacttaattcaatggaattatttgatctcaatgggatcttacgtctttcactaaaagtttttatgaatttccaaaatgtgatga

SEQ ID NO: 383096 - DNA, 4598 bp, Cannabis indica
aaaaaaaggaattaaaactagtggtgcagaaaattctgttattacaacaaagacaaaatttatcaaacacttttaactctgatttttgttaatgtagaaaaacgtattaaaatgtaatgagctttttaacacttcactgttaaccttggaaagggagagagttgatttagtagagaggaaatggagtttgtggtcctcacacacacatacataattcttctcctcttctccttttccacaagggtctattattcctcgctacctatatatatttatgtgtagcttaaatatatttcttcattcctctaaaaaaaaaataattgtgtctttcttttctctttccttttctctctttctgtttataccttttctttttcttattcttaggtctgagaaaatggaacccaacagagctcaggggaagaggagccacaaatgcaagatagaggatgagatagaagaggaggaagacgaagacgaagacgaagacgacgacgtttcgggtttagggtttggaagtagcagtagtgaagatatcatgaggaagaaaagaccagcccagtatagtattaactcttcttcttcaacctcatcttgtggtgctgttgttaggagatcgggatccagtgcgggagggtccacgagacctccttcttgtcaagctgacaactgtaacgctgacttaactgaggccaaacactaccaccgtcggcacaagatctgtgagtttcacgccaaggcttccgttgtcagtgtcgccggcctccaacaacgcttttgccagcaatgtagtaggtaatttaatttattataataatacaaataaataaaatagaaaaaccctaatttctgttgaccttcgtttactcatttcccataattttaaggttgaaacttgaatacataaatgtttgttttgtgtttgaacattttcaaccatttttacatactattaatgaaaaaacaagggaccatatatatttttgttttgtcatacatatataatatacggctctctaactaaatataacatatactagtcaaattaagcgaatgaccttggttgttaaatcttctagtattaatattaaattaaaaagaaaaatcagcattcaaactgtcaattttttcccctttttccacaaaatggaaaccagactacatatgtatagttcctaatgcactctccaatccactgaaccctagtagtaaatagtggtttctactagtagtaatcatctaaaaggtgatgttataaatgttaagagtggccatgaacgccaattggattttgtaagaagagggtctaagattgtgtagtgagagtcttcataatcaatatgaagtcgtgaatcactgaaaagggattatttatagcctattaggaaagacactacaacaacaaccccacttgatcatatatagaagaaaagaaagatattggttatattattactattcatatgtttcctaatcatgcttgtataacagtgacaatataggcgcggcaacaaatcacatcaaaaaaaattaagtttccacatatgattattatacaaaaaaaaaattaattctttctttctttttcaattatggatatagattacgtcattatataacatacacttgatgacatctataagtagatgtataatagtgtatacttgatttcataaactttataaaagaagggtgaagtttatttggccttcttattatgaaagaacaaaatggggaaagatatataaagaaacacaagagatcaaggtctgcgaattttctctttttgatttgtgttgatatgatatacacaataacaggttccatgggctgtcagagtttgatgaaactaaaaggagttgtcgaaggcgcttggctggtcacaatgagaggcgtaggaaaagctcatctgaccttcatagagaagggtccaattgagaacaaaaccgattgatcataatatactatcatcattattattactatatatatgagagcagaaccaagataatggagtaattagctatctttcccatagttattgactctttcaaactactaaagtcgttcacttctgaccaatgatcgatataaaagatcgtatgtggtgatcctatccccattgattctatgctctctctcttctgtcaaccctttgccactagcgtattgtatgaaaatatatataatcttccaaggtacgtatagtactagtagtgctcattcgaggaaatgtttgtacttatttgatgattggaaactgtatcatcaaatcgagattagtactgttgttgtttatgccaaacttttgaagcatttgatctgtagtcattagtaatttctgccttgttgaattttcttatcacgatttgatcaaatcctcctactctcgtacgtatagagtagtttgttaacaaggatcatgtctcgtaacaaaaaactatcatggagttcttcaaacggtgactaatttcatttcaagatgatttctttttaaataaccttattatatgttcctgtcttttccccatattgcccttgattgtattgatgttgtatcttctttttcgtatgtatattcttgtgttacatttttagttaggtactataagaagagttagtacgtagctagttcctataacatgctaatacaagctaggttacattttcatagcatgctataacaagttgcccaacatgttattaaaaatatttatttttagaatttaattaattacaattaatcatatacattaaataaattatgttttagctaaatattttacaaaaattcattactaattataattataattattttttataagaaaacaaaatatattactaagtaaaataaaatcagcttaatatcacataacttgttaatatttttagttaattttcacaattttacaataataatctaatattaaaaattttaaaataatgtaattgttgataattaaaactcgtcaaattatgttaaggctggaaaattaaaaagattgaaataatgatgattaacaatggttaattatgagagttctgatgaaaataataatggtgaaagaatactcttatattgatctcaacaagtgagtgttattcaaatttttatgttgtacgcgtggcctttttgtagaacactatattgtaagaatttatactctaaaaatatgtaattaatggataatatattagaaaatatgtgaaatatgattataaaataaatgatatattaattataaaaatataattattaaatattttaaaaaaaaattattcatatggagaaagtataatcttctaaggatatacaagagagttaagattatacaatatgaataaaataagtcggtagtgtattaattatgttatgagaatctttaatatggaactgctaagtacggtttaccatacactatacttctagtgtgtgtgattttgatttggatcacatatgcagatggacatgtagtaaagatactatgtataattagattatgtatgacttgatcgatattgtttaccgagtgtttcagtaactaaataatattagagctcaagaaagtaatgaagatataaatagtaaattaataaacaagaagtttttacgtggttcaggtgttaattatccttactccacgagtccattttattagctaggctcttgggccggtgattgtgcatacaaatacaaaagagatggacttgactccatcgtaccgtattcctcttgaagaagaagaagaagcttagtaggaatattttggggttgaaagtgtggttacagtaatgggttttcaaagaataccacttcggttttgagatgaaaagccgaaggaaaagagaagaagtcaaggatatattagaatctgaatcccccgccatgtgtgccttcaagtgtatttataggtcgatcccttcgcatgggccatcttgggtggatcttcacaaggatgaacccccatcgttggattagtaggtggcatattttccatgtggcctttaccgatgtcatatgatactggctgtgctggcagtgctttggacgcgtgtcactctagggtcattctcattggattaccttggtccctagctattggatcgtattgcacagtacacaaggacacgcatgcgctgcatggtagcatggtgtgggggacaacttctgacatcgtaccaaaaagggctctgccattgggtcccatagcctgtcccgcctgggcggagtttccacgggtttaaggtgtatcccgggccaacattctttggttgaagatccatgcaccacaagaaaaacaagttttgtcggcgactaaactcgccggcatagctttgccggtgacctttttcaccgacaaagggtgtcggcagtgtctcgttggcatatcaaatttattcggtgacattagtatatgtaccgacaaaattctttacaccagcgaattaatttgtcggcgtaagttcaatgccagcaatagggtgccggctgaggtcccattgatgagattttgacaccaattcttaatttggtgcctactctttgcccgcgcataaactcgccggcaatagtatttaataataaaaaattaaat

SEQ ID NO: 383097 - DNA, 1164 bp, Cannabis indica
cattttattgtatcttcattttgcttaagcatttgggcccttcgtcaattgattagttgtgattggtgacttggttcatctattggcaagctctactccacgtggcattaatcttgcctatgtggacatgccacattatgtgggaaataattaggataacacaaatatacgaatatacatatatatagtcagggctgacgtaatatagttgtatggtgatggtggtggtcggggttaatcaagggaggccagggaaggtggcaacctatcagccagcggctgagaagccacgagatttgactagctggaagcaaagaactagccacacaggaatgggtcgtgtgagacccgattagagcctattggctcagggaccactggaggtccaccacctcccatcgaccatcgaccacatacctcaggaggtccaatcgaccaccatggagtggccacgggaccgatcaatccctgtcgtggccgttgaaggtacacggacccagttgggtccaatcggagaaaaaaattcaagaccataaattgctccccgcctaccgttcacattgactccaggatctagtggtcaggtcaacttactctcatgagccacggggagctccattccctacgctggccgtcgaacataacccaaacccaaaatcagggcttccttccttatgttcatgtgcatggccacatgcatggttccatgcaatccatgcaacatgtgaactttttcatgtggcccacttttgagtctcatggcttgaagctgcacccttcggggttcgtgtctcattgtgtcgaggttcaaaatattgtctcgatgaggttagggtttacaccttaaactccagtttccttatcaatggaggatatgtggaatttggaattacataatttgacaaaaccttacaaataacttttaatgtaaaattacaataaaattcatatatcacaattatggttttttctctaataaaaaatgtaaaattcctaactaaatttcaccatataattaacgattcacatccatgcatgaaaaatttaaacctatctgttatacccgaaattcggctggaggacacgtgtcaagataaagggaatgtgaatcgatgtaatagctttttatggaataactcattaattacgtaagtattagagtat

SEQ ID NO: 383098 - DNA, 7262 bp, Cannabis indica
ttatttatgttttgttattatccatctctttaaatctatatcttcattgataatgtcccaaactaccttcttcatttctggtactttgattattctctgaattggtgatttttcttttttctgactcattcatttttattgaaaatgatatgttcttgttaccttgtaccttccaacttttatgattttttgttttgtttttgtattgaaatggagaatggtgcaattaaaagggcttttttggtaatataatttatatatgggatccaatatgattttttctgatccaatatattttctttatgaaggttcttttagtttttgatcatccacattgatgataaaacggctgtttaaggcatggcaataggaaataaagacaggaaaaagaaggtttgtttttatatattccgatttttctctgtttttcattaatttcagatttattttcaaatggaaacttctgcaattttcttgcattaaatttgaaaaatgattatgtttcagagtttccttcagaagattttctccagggagagagatggaaggaaattgagtaaaagaagggatgattctgttggtaagtgatatcattatcaatgtcattatctctcattgtaagggagaattattcattaaaattattttcttgtccatgaaaatgcagaagaatcaaatgtgcaaaataatctgttttctcatttgtgtttgaagaaggttagctttttctttatggaaaatcaaaattcttgtcttctttggtcatagaaatgtaacattccaacattccattaactttcctagtaattatctcttataactttcatccctacctatagaacagttctttttagttattgggccccttatctttactggaagatatttgaatttactttattcaaaatatagataatgatagaggattatgaaaatgggataagcataattgcaatttgttttcaaattagaatatattcatctttgaagtgggaatggtacatctttgtctctctcttcttctgggtgatattccttttctttctttagcccttataaattatgtgctattggttataactggattacttgtgttttgaggcatacatttctgaggtacatattcagagttagtactagtattttatatagtgtaatttttcctactacaatcttatcatttttcatcaattatttttgcctgtttctacttgcagatcaatcagattctgagagtctttgccctagcagtagagggggatcaatgatatctcgtcaacatgttcaatcctacaagtacttgccaatttttatttgcttttttctattcaaatctcacttcataaaagactatatatacatataaggttatctaactgtttttgtatctctatgtttgtttttttgtgttttagagtttttgtagcaacatggaatgcaggaggaatatctcctcatagtggccttaatttggatgattttcttcaagttgataatctatcagacatttatgtcttggggtaattccctctttcttttcacagttctctaattttgatcaaagttaaataaaaataaaagaaattcatttgttcttttttaaaccatcagttttcaggaaattgttcctttgaatgctggaaatgttctagtgattgaagataacgaacctgctgcaaaatggttatctttagtcaatcagtctctgaacaaaccgtccaaagtcgctccaaggcgaatgaatacaggcagtggagcactgttctttgctaagccttctcttagaaagatcagtaaaaatttcaggacagaaagcaaaagaaaattgaagtcatgtaattgcacagctgaaatggaaaggaagcatagcatggatttctgttgtcccctccaacaaccgaatttaagtgaagtggacttctcttctgaggaggatgatgaagattctttgactaattccttttccaatcgaaaccacatgaagtacagccttgtagcaagtaagcaaatggtgggaatttttgttactatttggatgaggactgagcttgttcaatatgttagtcatttgagaatttgttgcattagtcgcgggatcatgggctgtctcggtaacaaggtagtgccaaagtttcataagcatattacttttgtatcactcaaaatgttgtctgagacttagatatgtgtttgtttggttgcagggttgtatatctgtgagctttcaatttcatcagacaagcttttgttttgtctgtagtcacttggcatctggagagaaagaaggggatgaacttagaagaaaccttgatgtcatagaaatacttaaaaacactcaatttcctaggatttgcagatctccatatagtagaatacctgagaaaattcttgatcatgagtgagtattctatattctagttgatttaaacacttgtaacagaatttttttatctgatatatctgttggaaaatgattgtagtcggatcatatggcttggcgacctgaattaccgtatttctttgagctactctgacaccaggaaacttctagaggccaaaaactgggatgccctctttgacaatgatcaggtatttaaccatgaatgactaaagaagtgttcatcttaataatgtctctagaaacttagttattgaattttttttggtgtattggttgagttgaatactacttcttgggtcactatggggcttgaatttctaaatagatttgtaacatgtattttgtttatatatagcttaatattgaaagagaagcagggagagtatttaagggatggaaagagggaaagatctactttgctcctacatacaagtactcttataattcagactcttatgctggagaagttcataaatcaaaaagcaaaaggagaactccagcttggtatgtctaggattagaggattcaattatatgtttttccgaaaatttaacaaccaagtttaattagttaagaaactgcaggtgtgatagagtattatggcatggaaatgggatccaacaactcttttactggcgtggggagtcccgattttctgatcaccgcccggttttggcagcatttttggtggatgttttgactaatgggattgggagtagttccaagaggggattatctagttccaatatgaaaattgagattgaagaactcttacctaccaagtagtaccgtcctctataataactgcaggtaagttcttgacttcttagcacaaaaaccgatataaccacttcactcataccaagtagttgattttcaaactaggccatgtgacagtgttacaaattctaaatagaaaaattcattgtcaataactattatgccttgtcttttttggccagaaaattttaatagaggtattcacattttgctatttgaaaccccattcccaccatagtctttagatctaggacacatactaacatattctgctataatttttatttgaattgaggtctaaagctttttgcattgttcccttgaacatttttcaggtactaaaagctgctaaccagtcattttgagtaaggtgatacccaagttttgctgattatgtaagaagtaaatcattttatgcatcataagctgtaaatagattcagggaagatttgacataattcttgtatcaaaaaattgttcacaagatgtaattttcgcagtgcgcgctgcagttcttgcttcataatggaatgttccaagagattagtgattctgacttaaaatgagtaaactttgtaactgagatctcagaattgaatttgcctagaatgtttgtcaactaagaaaatattgtagaacttttacatttgatctttctcttcactaagattaattagatcaaagaaattatggttagggtccaaaatctagttttcttttccttagttgatttagccttgtaacccctattgtaacccagcttgatcttttgatctgtttccagtaaaagtcaaagatgtggaaagggaagaagaaagaagtttgaaattttgttttttcttatatttttaatgatttgagtccacatatgatgttgttgttgattaattttcaaatcattattatattagctttaacagtgttcttattcaaacttcatgctgtagttttgcattggtaataccatcctttgttttcttatgttcagtgcctaaataaatattcaaggcccaagtacaccatcaactaattctgataatatttctttacttggtagacaagaatccaaagctaaccaaattatttctaaattataatcacgtgacttaatcacatgtaaacccaattctataagcattttattcttctttctccttctgggattttaggctttggaacttggaagctgagatagtcaaaagactcaaaagattgatcacatgacacagctgcatattatattaatttaatagtattagtaagcaactagtaagaagtttttaaaccaaagatactctcaatctctttctctcatatcctgatcttattgctgtataaaataagcccttctgctcatcattggaacaaaaccaaacataggaaaataacaaagacatcttcttgagtcaacaaaaaccatgaaattattgactgcagttgtttttgccataactttgatgctctcactttggctttgtattatggcacaagcaagagttaccccttcttcttcttattcttcactaaaacttaccttgaatttcaactcccaaagactaatggccacaaagtctaagcagccggctattgctgctagttttcgaacaattcctccaagtattccaaatcccactcaaaacaagtaagattttttcttttatataaagtattttttttctttccttccactatatttgggatattaactaacacggcatgattgtttgtcaggctgaagcctaggaaaatggggtgatttgacaagaactttcaagattttacgccctcaagtgaccagtagcaaagtgttagttgttagatccataatattcaatgtaattttgtttttttatatttttttgattgttaacagaagctttggaggtagattagtgatttttgtttctagaaagaaaaggtgatagaattgtgtaggaacaatacaatttttaattttaaagaaggttacatatatttagtggataaagcttttctgcacaaatgttttgtatgtacttttcttaggcttgatttcggttatggtaatggtccgtcctcagtgctaaaagtcgattattttaactgggccgggccagagcctccttctagggcctaagttaaaagggcccaaatgttaccattttttatgaaaaatgattcgtagaaattgagtaacgttcaattacagaaaccaatgtttgcgacatggttttatatatagctttgttatgttttgacttgcaatgctccaataccataaacaagtaaattttccttgatcagccatgaacacactaattaacaacgccgaccgcataggccaaatcaagccgagtacaaatcaaccatagccatacccatacgtaatgttgcctattctacatctattattgcagtatctttcttcatatgttgcaatgtttgaggaacaataagtttgaagtcgcacgggaagccaataggaatcacacgggcacttattctcacacacatagaagcgaggagacgaaaatcgaaaaaaaatgtatatgcattttagttagttacgacatatatttataataaaagattatatctataaccataatattagtttcagagtaataattaaattagattgtatatacgatagaggtcaagggttcaaatctattaagaaaatcattttttttaaggtttacatttgtccctgtcataccaaaaaaaaattacgctccccttactttaaatttgaggtccgtcattgttcttatttacttagagcactatgctctctaaacatactacttagctaaaatagggagtgagtattaaaaaaaaatgagttccaactccaaccatgaaaaaagataactctctataataattgatagggagattttaccttgctctctaaacatactccttagttaaaatagggaatgagacttgaaaaaaataagctccaactatacaaaatatggctctaagcatctctaatggtattctcaatttttttaaccaatatagctaaaaagctaaaatagaaagtcatttttattattgtttgactctataaatagtaaaaaagtaatagtgtattaaaatacattaaaaaatattagcaaaaaagtaaggagctccctacgtttagagcactctctatccattctgtattatagagagtcattttttgatgttttgagctcatttttttcaagcttcactccttattttagctaaagagtatgtttggagagaattgatagggaactacctacatttttattaagtttttttaatggtattttaatcaaaagtaacattactaatttttattattttatcaaaatttaatttatagttggcaaattcgaagtctaaaatattattaaaatgattaaatactaatcaagattgagagcatgattgaagcaataataataaaaatcattttattttaaacttttttttaactattttagctaagaaaaataaagagtattgcgttagtaaaaaatttgtaagatccatggagaaatgaatcaaaataatttttttattttgattatgttttatttgaattatttcataaatacacaaaaatacagttgtaaggaattttaaaattttttatgatttttacgattttatttatagaaaatgcggtctttgatgtatatttatgttatactcttgttaatttattgttgattttttttatttgtatgttattttttgtttggatattatttttatgttactttagtgtaattttcttattgtttttgtattttttatagaatactgtaaaaatatataaaaaaaatctttaaaatgtaaaaatataaaaaatttacaaaaaaaataagtgattatgtaattatctttttttttttttagttatttttactaggagttttatgttggtttttatttatatggttttactaattaattaataaggtgattcataggttttttttttttttcttgtcataaggtgattcatagttttaatacggtgaaaattgaatattttttgaccatttatttttaagggaattaccttatatactgttttttaacctttttttttttt

SEQ ID NO: 383099 - DNA, 1848 bp, Cannabis indica
aaaaaaaaacacaaggaaacagagacttaccaagtatagcatgagagatctcgagaagttcaaacttatgcctttcccagttacttaaatcttgaagaacctagcaagtaatcacataataaccattagtgagctccagaatagcactttagatactaaaaatgaaggttttaataatcatcagaatgtagaatggagttcctaatactaattaattactttgttgtgattagctctttcaaattacacaacttaagggcagctcaagcagagtgctatatacagttcccatacctttatagttttgcctggtgttatactattactgtcctcatttggttactataacctcactgctcacttctacagatccttgtttctttactgtatacattgtagatgttcttacattttctaaatatctctttaagaattgttctactcttaaggataaaaaaaaaagatttcaaaatcatagaaccaccttacctgtagtgtgagattgtccttagcaacacaataaatggatacgattagtgcgatagatgatgcaaccatgtaaaatctcaacagatttgcacgactacgccttcgtcctttgacacaagttttggaaaaaaaatattttagtaaaaacgatagttaaacatgtaacgataaattgaaaacgagaacaagataaattacaggaacaactgacaacctaaatccccaataaatagagaaatcaaacaaacagcagtagatgaaatagcgatcctattgggtcctccctcccaagatgtccgtagaacagcatacaacgctcctataatttggataatagcctgcagtagataatgaaaactatttgtagacatgaaaaaaaatataagttattcccagcgaaaaaaaaaaacaagatagccaattgatgcatttatccaaaatatgaaggagcaataagcattgacacagactgatgggttctgctttacagttcaaaatgtgtaaattataagtataaaaatgtcctgaggacgactgtgtataacggttaattcaatcaaccacttttttaattatataatttattttattttcagttgatagctaatctatattgtcagggaaaatagaattttaaatcgcaatattaattaatgatttaaatctatctaaaatttcttaaatgcttgctcgaacaactgagaaaaccagaatttacatagacaccccattcctcattaacaagacctgagttttaagcagaagaaaattgttccataaacttacagaaatgaatggtatataaaatctaatacacataccacgcagagtagaattaggcagctactcaatgaaatttcagtaatgaaaaaataagagccattagcagatattacaagcaagctattctgatatacctgaacaaaaattagcttagagaaacgtgactttccttcagctactctttgataacctgaaattcaaactcaaataaataataataataataataataataataaaagcttacattagaggcaaagtctggggcttctaagggtctaatgagatagaacaaaaaggattgaaaaatagtagatgaaactcacgagattcaacgaccatgcggtaggagaaatcggaaccatccgttccagtaggccttccaaatgttgattttctctgctgcatcttctcttattcttcttattgtttatggacaaaagggcttctgcttcaaaaccctgcacaagtaacagagcattcaaatcggtatgtgttagaatttggaataaggtgaatggagttccatctcaaaattaattggcaatgtggaactctctaacatccccctcaaga

SEQ ID NO: 383100 - DNA, 1986 bp, Cannabis indica
aaaaagagtcaattctctctatactttcattctgaattatcagaacgataattaactgacttgagcgtcgaagagttctttgcaggaaactccccgaagtctctgaagaatttagctggagaagatgattggaaaggggagattgagcggcaatcattgtagagagtcgtggaattgctatttttagtaactcgatggtaagcaaatttttagcatcaacaattattatttttaccttctagacaataaaaagtatatcatatgtgtcgaaaagaaaaagaacaagtcagaccatgattcgtaacaaaactacaatctcttacaatattatcaataccattggccatcaacagtactctacgaaactttcaacacacctatcattactaattgataataagattttgatgattacatttagtaaaaattaatgtgcagtccctttcacaatatatatcatcatgtgaattgtttaattttttactaaggactacgaagaaggtcagatatcaaatcatatgatatatatttttcattttctatgaataatcacaccgtaatataatgtgtgatctaacaaaatatatcattatcatgtgaatatgatgatataaatcaatatttttttattttttattttaacaaatataataatatatttttgataagaaaaagtttttttttaaaaaaaacacttttccgatgacattactcatggcaagaaaaatgctttgaacacgtgcaagaaaagatttttgttattgttaactgcatgtcaatgataataataataaaaataatttataatagatctaagatctattatatatattattttgcttaaatgtatggttcttttttgaaccaaaataatagtatataatatatgttggttaaccagctgctttaacaatagattttaatcaaaattttagtattttaccaagttttctaatataataatatatgttataaaagggccggtggctatagtagtgtagacttcttttgaactggcctctcttgcatataatataatataatactaataccaaatgtgttactgtgtaattaaattaataatactgaactttccaggctctagtaaagggatcgggtgtgaaaaggttaatctcacaagataatatattataaatttattatattgggaaataatcatgaaaggggttctaaaatatacaaatccaactgccaagaatatatttttaaacttaaggtgccaactactacaaaatgtgacatgctgttatcgatgcaatttaatattgaattacatacattttaatttaataaataatataaaaaataatataaaaaattggtaactactcttaacgcgccacatcgtgtgatgcataatagcaaagctcaattttaaagatccaatgcttcgtaactttttttttttttattcacatttgttttgataattaaaagagatacaggttaacaacaaccgctcatcatcttcgactttttctgcgtcatggtggaaattattttagtccctcaaattactataaaaagtcaaaatttttgcttggaaagttgttcatgaagctctcctagtcgctattaacttagtcaaacgcaaagttatcactgattctagctattctctttgtaaacaagcatgaaaatatattggtcatgccatgttcggctgcaaatatgcaagatctgtgtggcgctgctcatgactaactttaaattggaataattcctcctcaatgtttaaaggggattaccttgtgcacttatcaagcatatatgacagatttgagctagaacaaatcatttgcatcatgtggtcgatatggaatgaacgtaacagtgttgcctatgatggaaatgccaaaccaacatgtactcttgccactacaaaaaattgatacttttagtgacaattttttagttccaacataaattatttgtaactaaatgctacttttagtcacaacaaaa

SEQ ID NO: 383101 - DNA, 3788 bp, Cannabis indica
ctttaagctttataatatataaagatcaccactaaggaatgagaaaatgtttcttttttctagttttctgattgtgtatagtgtagtagatttatttccctatcagaaaatgggtagtaaattgaaagcaacatttatctgtttcacaaagcatgatcacacctacatatatatattttataaatatatatccctgcacaccaagttatatatatatatatatatatatttgcacttgcacatataaaagattgattgatattaatatataagcgttgggggccatttatatatagtgagcaaaaagttatcatttctatatattaatgtatttgcgcatatatatataaacaaaacacagttcagactttcaagcaaagtttatccatgaataaaatatgtatggcattggcattcactttgtttctatatatataatacaccataataatcttctgctcaagaagaaaaaatatatcatcaatcggtaagtatattaaaagtaaatcttgatcatcatcatcatgagtttgtccgtagtaagatcaagtgagagcctggtaaaaccacgggaaaagactccatgcaccacactggagttatcagccatggacaaagtccccgtcctaagatgcaacgctcgcacactccacgtttacaaaaagggtggcaagggtgctgcctccgccattagagaagcactttcaagagcacttgttccctactaccctcttgctggacgccttaaggagtactcaacaaatcccaacataggtctccaagtcgactgctgtggagaaggggtctggtttgtggacgcatctgctgattccaagcttgaacatttcaattatttcgatgaccttattgatgcttctaactactccgtctcatcatcacacgatcatcttctacccaaccacatccatggaagtcttttaggtgatcagccgctagtgcaaatacaggtaagtcaaatgtatatatagcattgctattagacactagtggtgcctagcaccttgacatgtcgcgttgcgattggttagtgatactgcctaaaagctattatattaaattatatgtgacgttgaaccaaacgatattaacagataggagtactctttagcatttctcatgtatataacataaataatagaactaggacttatttaaaggatattaacagataggagtactctttagcatttctctgtatataacataaataatagaactaggacttatttaaataaaatgttggaaattaatgagagtctaataatgctaccattgttacaaggtaacacggtttgcatgcgatggattcgtgatggggctcgtattcagtcacatcatatgcgacggcttaggcgctgcgcagtttctcaacgccgtgggagagttcgcccgaggatttgaccgcctcaccgttgaccccgtctggtgcagagacttctttctcactaataataccaccacctctacaccacaaccattgcccaccatcatgccattcgtaaactacaaactgaaggaagcccatgtagacatttccatggaacagatcgaaaagctgaagcaacatttccaacaatcaacaggcggggctcacaaatgctccaccttcgagatagttgcagccagtttttggagctgtcgaaccaaagcaataacaataacaaatagcaatagtaatgatgatgttgaggaggaaatggttaggcttgtgttcttcgccaactgtcgtcaactcatgcagcctccgttgccagaagggttctacggaaattgcttctttcctgtgactataaaagcttccaagaaatttgtggctaatgcttcggttgttgaggtggtgaaaatgatccaacaagggaaggctaaattaggtgaagagtttgacaattacagaaagagtaggaatgaaaatgatggaatggaagaggagagggaggacccgtttatgcagcctttgagttacaacacgttgtttgtatcagagtggggaagactaggattcaaccaagtggacatggggtggggacaaccgctgcacatagtgcccatccaagggtccgtaatcataccggctgggatcgtggggtggcagcctgctcctaaaaggggtatccgattgatgagttggtgcgtggaggagccccatcgccacctcttcctttctcacatcatgcggctctttacaatttaatagtactaccacccactaccactctagtcccactatagctcacttatttctctccgttcctctctctatatatattctcatgcaaaggttaagtgtattatctatccatgtgatcgatcataatatcatcatacgggtatgaatatgataaatgattatttaataccacttgattggaatttttatttttactttttattttttgaaaaaccacttatttggaatttggaaaaattacattcaaatgtttaaaatgttgtatagtttgaaaaataacgaagaactaaaatagaaaaaataatgaaagctactatatatcccttttaaaaatactttttaagaacatgcatcttgttattatctatattttgagaagagagacacttgcattcccaattcaaaactaatcatagaagacctaatcaaaagcactaacaagataccaggcccaacctatacataaggatgaaccttgcacctatccaaggtctacactataagaaatgtcacttttgttagtatatttttatgctgacaaaatttagtattgcgctgatataaaatagaatttacttctgatgtgttggcaaaagggaatggcaaattaacgttggtataagaacttttgccagcacaaaatgaaaagcgctgacaaaaatgacttttcccagcgcgtaaatgcactggtaaaagttagatttttagccactgtaaatgtgccgtggtaaaactttgacctttttgccagtgcagtttgcaaaatgcgcgggtaaaagtgacatttcttgtagtgccaagacgtttatttttgttgactggaactctctggatccggaagggcatcctacccgagtaagactcaactgctgagaccatctgaatgagcatctgcgatacaactagaagagcattcgaagagtcaccccagagattatacaggatgacgtggtggccctctaacaccaaatctcacggtatcaagggattgtccattgtgttagagcctaagaatacgcatacaaccaaaagaaatctcccttctatatgacgaccactactcagacactacagtatactagagcggtgcacacaaaccatctgtcaatattgcatggtcaccaaacatataaatcacctttgccccacgagctgggcctcggtttgtggacccaaagtcaacatattttatgtgtttaccccattagttgggtatattttcatacaaaccctagcaggtcacggatatacttgaacccagatcctagcctataattagtacattataccctcatcaaagggttagaaattcattgcagaaacattatagaaagaagctaaggttcttaagcttgtaaagaactcaattgtaatatatcaaggctacttagacaaatatgattgacttattaactagggttcattaacacccgaaccacataaaaacctccatctctattttctattactttatttaaatttctcaactcttattatattcgatttttaaaaatcttgttggaaattattttaccaggatctagatttactaacaggtatgttggattaacaacctaat

SEQ ID NO: 383102 - DNA, 1945 bp, Cannabis indica
aattattaagtttggttatatgttaggcgatttctttgacttgttaaaattctttcacattatataaatctacatatatatataaataaatgtgttatttaataaaaaattattaatttaagagtattttattttgttaaaattaactgagaagtatcaacaaaattatataattatttttttttataaattttaatttaattaattaatcattttattagttatattatttaaaatatttacttattttattatttaataaattaattagatataatttttataaattaatttaaaattaaattaaacttatatatatttaaaagatatattttaattgtattaaaattaattttattattattgttttatatatctaatagtaatacttagtatatataaatatatatattttaaattaaaaaagttgtcgtggtaattgtatatgagaaagagatatatggtgtttattccaatcaatgatcatcatctaaattatttgaattaaattatgtagaacaaaagaagtattattagtggataaagttgtagattaagaactttcaaatatatatctatttagtaattaattagggtttggggccccaacttgattttttttctttctctcacaaaaactaattataataaagatagttaggatagtctagctcaaaagtaaaagcactagctattagacaacaacaatatatatggatgtgattctttttgtcataatgccataattacattcaatgaaaaatatatatactatacatatttggataataatcatccttatcttaatgagaattagtacttaaaaatgtcaaagtgttaattatttttttttaacaacaaatttttattggaaaatatcagtgttgagtacataacccaaaagatggaaaaaatttcattcaaattagctcaccatccaccctgagtccatgcacagctaattcatgaacaatcttattagttgaccgacgaatatgaattaaagacgcctacaaagaaaattaaacagtaaactagaaatatcatactaaaaatgaaaccaaaaaaagaattaattagttgtttaaagatatataatatatttttaaatttataaaatatatatttttaaaaggaatctttttggtgggaggtgaacctgtattaaattcatatattttaatttaataattattatataatataattaactaccaactaagttcaaatgcctaatagcaatgttttttatcttataatataaactctatatataacaagctaaaataattaaattgcttatatacatgaatttatacaagaatatataatcttatggatgacctctaatctataaaccttaatttaatgagccaaacctaacctaagtgggcccatgtccccaacaaatgaggggaacatagggctccattcattttgaaaaatgccataaatcattgtcttattgtggttaaggacacttcttctctaacttccctttggaattatatacaaaaggttatgtttctattatatttttataacaaaaactaattaattaaggcctacaactctttgaaacacattattaatattattgcaaatatatatatatatataaatatataaatattccctttgactattccacatctaacactataccattttgtgccatatattgtcgaaaaatgacatccccacttaacttctcctttcggcgtttcaataaataataataataataataataataataataataatcataatcataataatatgagagtattattattgggcatcggtgatacttaattaggggtgtttatcggatcacatccaacatttttaggtctatccagatctgatccaatatttattgatctaatttgggtttatctaatattttagacctagtgttttttggatcggatcggatcca

SEQ ID NO: 383103 - DNA, 947 bp, Cannabis indica
tagacctttcaatgaagaaagcaagtggaaaaatgaagacagtggcgaaaagaaagcgataagctacaatgactttcaagctcattccatcgttggcagccaatttgtagagcacattaactccagcatacgcaatctgagcaaccatcatcaatagagctggcttcacctcatgcattccctcccatatcttcttcatctctctctcgatccctctctctttcactatagatcaaattatgaaacaagctagtgagagaatgagtgagtgagcaaagtatattatatgtatatttatatatatttatattgatttagcaataaacgtgacttattggaacccaactgtatagatctacgtatgcatgtatacattatatatgagtaattaatggattgtcatgaatttaaaattcgaaaatattcaagtacgtatatacaaaggtcacattatattttgacaggtggaagttttgagtttatagtagtagcaacacggaataaaatataattatacaagcagttacatcagtttattcaccaattaattaattttaaaaaatgtcaaattagctgaccatcagttgaaaatttaatgtaacttaaaatgttttagttgaattatatttattgtatacaaatgtttatttatgataaagtattgcaatgttgatttgtctcaactcatactatattatgatacgatgatgtgacaaagtggtagcagatatgctaatgactgtgtagcccacataataagaaactatgaattagacataatggaaacgattgtcgaccatttatagtaaagcaagcaatattggaagcaatattgtaactctttatatatgtatatcaaaatatggctttaacatcagtgggaatacatgggatctcattgaatcccatatatataatataaatttagggatatgattttgtttcgt

SEQ ID NO: 383104 - DNA, 1473 bp, Cannabis indica
taatttaaaattaaaaaaaaaattctgaatttctgagtgagtttaccaatccgacgtgtcaaaatatgtgtcggttcgtcacgtgccagatcctcttcttctgacaactcttcgaacctcaaaatcataactgcacctctcttcattggttatctgattctctacgtggagtggggaccacattgtccacgtcagctctaactcgctttgtatgtgagccacgtagccacgtggacgacgttgaagagtaactaaaaacaattctcttttttttttttaattttccggtaaatgtacgtatttgtccggtttacagatctgtcggcaattgacacgtgtcgtttcgatgagtacggtttagctcagttctctacaatgctaccggttattccggtgtgtgtccgtactggaatctaaatattaattttaattttatttttagacttttcccgctatttatttaccgggttataattttttattaaataacattaaaactattccatttcacatttcaatgcatctcccttattataattattttgtttttttaacttttgtcaaatgattttctttattattttttaaaaattattacttatttattgtgtcattatttggctaaccgtaacatatgaataatgagaattgggaattgattgaatggtatttatggaagtaaagtttatttatgttttgattaaatcatcatagttggctaggtgagtaatgatgatgaaagccattatataatatataatatatatatatatatatataaaccaaatttataatgtgactctgtttttacgaggaagatgatgagcatgaaatgtagaaaaaaccaatcaataaaagaggttaaaggcttcatagctttctcgtatgttatttttggtcggtacctttactaaaagtgtgaaaaaaagctattaatattgtagtatagtccaatttttttaaaaaaaataaaaattgatgtcaatggttttgattgtacgattaattttgtttttatgtggtctaagagattattgctaaacaaaatagtgagacgattttaataattaaaatttcattttaaattctatagttaattaatcatctttcaaactagtctaatctttcttataattaagctaaatagacatcaacaatgttttcatatatacccatctaataatggaaactatttattttttaaataatatataagcattgtcctttatatatctatgaataagaatagggaaatttgaatttccatgcttaaattacttaataatttttcccctaaatgcaaagttagtaaaattggtgatatatgacaacatttctaaatttcctaaactacccctctcatttgaaaccctctatcttcctctctcttcgtctctcttagcccaatcccagccgcaacataaactctcaaagcaaccagcaaccgaccgaggcaccccgtcccaccgtgct

SEQ ID NO: 383105 - DNA, 5101 bp, Cannabis indica
atatatcatatactgcaatatatacatgaaatttagtgtaaagatagtgttacattggaggagaggttggactgtatctgcatatttggtgttaccttgcagatgctctaatgcaccacttttgtatttttgatatatgaatagttataattttaattttttatatgatagtgtatattatagttaattaagatataaaatagagtttaaactatttatttcacacacttacaaaataaaaaagacatgcatacaacatattatttgaatcttattttcagtgcattaaattataataaatttatcaaatacaaaatgactcttttttttttaaaaaaaaaaaaagctaaagtaattatagagatgtaaataaattagggcttatggccattacaaataatgttatttggtattgagaaagtctcaattctaccagttacattttgattaaaaacccacttaccaaattgcgagcaacaaaattaaaagatttagaaactttcgaaaaattacattcctatacctatgttttcattaattccaaccaaacgtaaccttaagtgacatttggttggatgtaatgaaatggaaatggaatggaaaagaaataatttttattctgtttatttgtttggttgcattttatagcatgtttactaataaataatgagaattaatggtaagatagtcattctcttacatttgtttacctattttattataattaaaaaaaagaagaatttgattaaaaaagagatgaaagaaatagaatacttcccctataatttttttaaaaaaatgtcattaaagataatgacctttatgtattttttaatattaaatatataatgataattttttccatttaagatatgtatttacaaataactaccatatacactatagcttaatttaaaagagcaatttaattaatttaagcattacgattacattttctaataaaataaacaagataaattattattatttaatttttatacaattttaataaacaacatattataaatattgattctgatttgttatatttctctattaatttattctgattttgaatattatttaataaatgtatcattaaagtattggaatatagaaaaaaatttaataattttctttcaattttttatatgtattttaaattttattttattcatattcttactttcatttttattctttatatttttatttctccgaaccaaacgcgagttaattttaactatagtgtgacatgaagcatataaattcaaatttagcttttatattgtgattggttccaaccaaacggaaaggagtgtggcagtgtgtatgagctcaccatgtatatatataatataatattagcccacatttcattcacctgatctctttcatctctgtccaaaaccacagtagcatatatagagagaaagagagagaaagcgaaagaaaatgtccgacgaagagcaccacttcgaatccaaggccgacgccggagcttccaagacctatccacagcaagctggtaccattcgcaagaatggctacatcgtcatcaagaaccgtccctgcaaggtcttctttctttttcttcgttttctttcgattcagatcttgtgtagtatctgcttccgtttgtgattttagttagggttttagtactcgatcatgctgtatttgatcttgaattgttagtttgaaactataatttgattttctttttgatgattctttagttaagatctagggtttttgtgatcggttgcttgatttaattgaggggagaaagatagtttagctcgatcgaacgcttgcataattgtagctgaaccgaaatattagggctctattctcgtttctttaaatttaactaatatttgttgttttcttttctttcgaacaggttgttgaggtttcaacctccaaaactggcaagcatggacatgcgaagtgtcactttgtggggatcgatattttcaacggcaagaaactcgaagatattgttccatcttcccacaactgtgatgtgagtatcatctgatctatctttatacacagtctctacatacatcagaagtattgatgatcgttctgttctctgtttgtttttgtttgatttctgtaggttcctcatgttaaccgtactgattatcagctgattgacatttctgaagatggatttgtgagtaatttcttttcattcaaaacattatctgtgattagccttttctgtttctgtttcgttttcaaaactgaatatggtgctaaacctcctaaatcttatttcaagcaagtcgttagagaacttgaaaaatttacttcctagcatttttctctctagcactcttttatttgaccagatttaccaagtgtttataaatatgtactaatttattctgccctatctttcattccagtgtagtacttgagctagtttatggttatagagttgaacttgtgtattaccttctgttgtgtcaagaggggtaactagttcggtcattcttatttcttttgaataattaggtcttgctactatgactatgcaggtgagtcttttgactgaaaatggtaacaccaaggatgatttgaagctccctactgatgactccctgctgaaacaggtgagactaatggtttcaagatgattacacatttttctgatctgtagtgagactcttatgtttgctgctgatattcaactttgtaaaaattgtaactgtgcttctgtgtatccagattaaggaagggttcgaggaaggaaaagaccttgttgtgtctgttatgtcagctatgggagaggagcagattaatgctctgaaggatattggcccaaaatcttaaggaaggaaggagtcattgatgacccaaaatctcatgtttcatcagatcctccgttcattgttgcctgttaaacgtagtattacctcctagaccttcttaagtgtactttgattagtgtttcctaagaccttcttaagtgaaatttaatcagtgttcccaaagaccttcttaagtgaactattattagtgtcgtgagttgtattgttgaaaattgaaactcagggacatgagctctcatactctgttattccagacgtttcgttgaagcattatacttactatatgctgtgttttttatctttcaatattcacttagctatgtgtatatgtgtttccaatgatcttgcttgtttcaactttgggtcttgaattgaatttgtcattagttcggtttgttttcataaggtgggttttataggttttctaatcgagattagaaaagttaaactgaagaaatgatggtttgaaagaataatgtaagatttggaggaggattgttttgaactaaaaaacaattcgctcattacaagcactgcaatggataaaactaagttggtttaattgctattttatactcgttgaaattttaattgttccaatccaaattatttctattatatactcgtttatcttacctctttcattctcctatcgaacatctaaatgtttgacaatgttttagttcttttgattattattatttagtgtttcaattatctgagttctatttatacggctttgtggtcaagatctttccaagtattcttttttcctttttgagggaatttttgcaaagtattctgtgggggaaaagatttattccccaaaaggggtcggtggcagtctatgacgataatttggattcccgtaaatcaattgtgggactactagaagattgatctcatcactagtttctgtcttatctcttatgtctacatctcaccaaaccagaaaagataaaggggaatctgggactatggggactctagcttagcatctattctgtgacaaagtggttattggctggaggtgagaatgaattgagtctcaaagttcctagtaatttcaacttcattctgttgtagctctctcttgcagagtaatttactgttttattagttttgatctttttctggttcttgtagcttgttttaattcagttatttgtcgtctgttgttagcccttctccttgtttaggcaatggttggttattgtgcatctgaggaaaaagatgaagtacctgcactataacactagcctatgttttttcaacaatagaaagcaaaatagctgctggattacacaactacaaaatatcattttgcgtcggtttttgaaattgcaaaaatattttgcgttaataacaacgttgacgtagaatctaatgacgcgataactattggattttatgttactacacaactaaaaaaaaaaaaaacataatagatcctttcgtgttagtgtaattagtattgacgcgaaagttatgatttcagtttattgatactttgatatctgattgtttggaaaagaattatttgatgtgttttataacaatcattatcatcctcactcaactttaaatctagagaaaaaaagaacgcctaacttagcttcgatatgagaggacgactttcataatattagggagcgcaatgtgtttttacatggttttgcttataatatgagtaattagcgacaaaatcttccatttttttatattttgaaacatttaacgcttcattttttttttgaggtaaaacctactaattttcgatttcattataaatttaaggcgtttgttgtttgttcatttatgttatttactatcataaattgtccacacaagtatacgcataacacatttaccttgttcaaaagtaattaagtcatcatggcatggagtacaagcaattaagtacttgggggaacaaaggtaattaatgcatatacatttttcaccacacataaaaaatgacaataagctccatgcagtagttacaaattttgacacaaaggaagtggcatttactcttgtctgtctcaaaaccacaactagcttgaagagctcataaaattatatttatttactgtttgaatatttggatgatttcttaatgggtaatacccattcatgggtaataaaaaaattaatgagatgacaatttagtgacctgctatagcaggtcaccagcaagattttttttttgaaaaaaaaattatatttattttcttaattatgataattctaac

SEQ ID NO: 383106 - DNA, 2622 bp, Cannabis indica
ttgttgcgatgatgcttgtcctttctagaagcaaacttctggactctggcatcagtcttatccttttatacgatgttgcctctaaaattaatctagtcaccctaccttagagcatggttccttttctttttctgttgaggttagttgatagttttagacttcttttgtcgcttagttgtgggagccttcaatgaagtgtcacccattatccctttccctttatccttgtggagatttgaggttcctaggatccactcttctgggagcattagttgttggaggtgttttcacattacggattcttttgatcaaggttgtcatcaggacctctattcttgtcatctttccgagcagtatctcattgaactggtctcgctgagatagtttatttttagttatttggatgttttgggccatgataaccacgtgatttgtctcgtcaagttttgtcttttcctctaacaacactgttagtggccttgtcctatcgatcatcccctaatgcatattgaggatcatcctttgagttgtattattgatcatctttagcatcatcagaactattctcttctaattcataatcttaataagagcgtctaggtttgcatctttaccgacttgatctttgtgatgacgaatcacctcattctgatcttctttatcccctacattggcattaggatcagtaaaatgaagactagatttgttacgggtgagtaccatgattacttgacataatctctagatggtaccactgctttcttcagctctcaatgaaagtaccaaaatatttactaagatttttggaaaacaaattataaataattagaattgaagaaataaataattaaaagagaaagagtaagaacagcacaaatagtttttacgtggttggggtattaacgagccttagtctacgagttaatgctattatgtaactttaagctagaaaaaccttttgaaatacaatgagcataagttctcaaatttgcctgagcaaatattgcaagagaatgcaatccttaatctaaaggattcgttggatattcatagtatttagagaattacacatagtttttcttttccctctattggggagtttatactgaattatataacttgggttgtctcgtgaaatctagcccttgaaggagagaatatactgactaggtagattagatatggccgaattggtcaagattgtgttctataattgtaggcaattaatcgtgaattaattgcttggtatttgtttagaaagtttctcattttagcttgatacgatcttctatcaagatctaggaacaattattttcttatttgtgtgcaggaataaaaaggaaaagtggactatataatccgatcgtagagctaaggtacgttcctagaagatcctatataatttgggtttagcccaaattatcatttttgggattcactggtggccctttgatggtagcctgaattccacgtgtcccttgccggagacatggataacatatttattattgcaaaagtaattacactaaaatttgaatgcaatacttgaccacaatacattaagtactcacttttatttttacacacttaatgctcacacttaaatatttatacagtctttgtatatgagacacttggttttggaacactcacttaaacacacttgtgcacacaccatttgtgacgtcctaaggtcctatatatagaacatcaatgtcggtttgatcaaccgacttttactttgctagaaaactctagctattacttcaaatgggcttggcccaaaaactagatatagttagtgactattgtttgtaaaaaattttacaaacctattttctagtcatttcttgaagttttaccattttatgggataaatgttgttaaatttaaattactctagtgatggaagaggtagtagtgacttcaatacatgacacacaccatcatttttttaatgtaaaatttgagtaatataaatttgtgttatttttatgattatttaatgtaataaatcattattaagagcatcctcaacagatagataaaacacatttttagtaaaaaatttaagagtaatttatggtgtaaatatttaaatttattcttagttgcaaataaatatctaaatttagtttttgacacgaataatacttaagttatatttctgaaacttcagtagatacctggccgtcaactaccaagtcaatgtctacgtgtcatttttttattggtatatgtaaatgaatttttaaataaaatttaaaatttaataatttagaccaattagtgaatgtcgtgtggccattgacttgacacttaatgacagaaatataacttaggtattattactgccaaaaattaaacttaagtatttatctgtaactgggagttaaatttaaatatttacgctaaaaattactccaaatttaaaaaattagattaaaactttctcttttttacttcacttcattttgagctaaaactttagctacattttatttgactttttgactcttttataacaatctctcactacatatacttttgtataatataattatataatattttattataaatatgttatttaaataatatagataaaaaatatataaaaaa

SEQ ID NO: 383107 - DNA, 1289 bp, Cannabis indica
acttctacatctatttcttttctcttcttcttcttttctttatttttaagcattactcatcctttttaatgtacttgtacacaaaagttgattctaaatatagttttcattttaaagaggattaatgttggaagttatatacacacatactaacacaactttcaattatttaagatttgattgtcatagtctaattggtcttttgccaagcaatgaatctaaattccatttcatactaatggaaaatgaaaggggtcacggatatgataaaagatttagactttttatttttttgtgggtaaataatatatttatataatataataactatatataaactgagattaggatagagttactaaacaagttcatctaaagcttgttctaaagaaaagaaacttacttgtgtatgcaatgcatgtgtggattgggattggtggggccatttggtcacatgttccaataatgaataatgcaacttcagtcacaatccacagagccaatccaatgcatgtaaattgtaaagcaccaatgttccaaataagaaagaatactattactcatcaaaagccaaaaccattctattgaccttgccagaacctgtcccactccatatcagacaatatctcttcacttagtgtttattggactagcttctataatattaatattaatattaatttatatatttatatatatttatatatataacattgctattactataagacatcaatattattcttatagcaataaaaatagaaaaatttgacattatatgttttaaaaaaacataaagtattttttatatgtagcttaaaataatgtaaaaatttaacattctaaaaatctttaatcccaacaatactttccccatttcaaactcccactctccctctaactctctcgtttctctctctttctctaactccccaaacccactcccaatgaaatcccaccggacccatcaacgaaaccccaccgaacccatcaacaaaacccagcgagcccaacaaaaccaccacctccgacgaaacacgaagcccagaccagacgaaagagaaatcgcaaaaccccaccagacgaagacaatatcgtgaaaccagatcacatatcgtgaaaccccaccagacgaagacgatatcattaaaccccaaactcaaatccaaatcgtgaaactccaaaccaaacccacatccgaaatcgtaaaaaaaagtatttgtctatttttttttttttatttaagttggtttttttgtttgtttatgcttcattgtaaagaaatttat

SEQ ID NO: 383108 - DNA, 965 bp, Cannabis indica
aataaataaataaataaatcgataattggaatattcaccaacacttcatatacattttattttattgaagagtatagcagccagataatattaagttgtagcattcatactatactaaagaagttctataatacattttatatatataattaattaaacttaactacaatcaacatatatagattttataatgtacattggcagtacaagttggagtgcatttggtatctaccaattcaaaatatcaaattgatcaatagtttatggacattcagtatctcacaaatatataccacaccaaaaggccatcaatcttaacaataagcataaaataaataaattataaaattatttgctataggctaaaaataaaaatatatataaaattttagtattatttttgtttttactatagggacatgtatatttaattcaatctttactagatgacaacctaacattttgtttatagatttgggtaggtacaatagattaatttagatttatgttcaaaaaattgttgattattcaaaacaaaattgaaaaataaactatttaatttgattatataatttcatgtaagtaaaatggtaaaatttaaagccaaaatgatgccgcacacgcatataatatgtagcttcagttttaaccgataaataaatatataattaaaataaaaaaaaattacacaaacaccacttacatactttcaactcagaatttatgcttcttgggatcattgaaacttttgtgtgatacaaccttcaggtaactacgcagtaatccaatacaatcgaaatgaaatccaacgagaaagagaaccaatattaattccggcgactttacctgagaagacgattagaattaatcaaaacagggactttcgaattcatgaaaaaaaagaaaagcagaaaaactaactacaaaactaaaattcaactagaaattcagtttaattcgcataa

SEQ ID NO: 383109 - DNA, 1635 bp, Cannabis indica
aaaaaaaaaagaagaaaaagaaacgaatttgattaagtttcggtagtaactttttaattgattaatagtctaataatttacttagatactaaattgataactaacatatgaataatatacaaataacttattgtctctccatttgtacgtcccttctgatctgtttaatgaaattgttcactaacaaaaaaaaagacttattataatcgctagccctagtttatagttgattataatataattaacaacaccacataaataattaatgatacttgtcaaaattaagctagacaaacgaagataaaactatactatatatagtaatattttggatccattaattatattatttttacttgagagtaggatgagtagagagtagtatatatccatgtatatattttatgatcacatgggtattgggtataatatttaagcggaagagccgcaatagaaggccaattatttagcaatgtgtccattagcaaatagacaaagacgttgggataaataaagccaaacatgtgtacataagttattatgttaggtaatgtgtcgaagtttcttccatgtctttatacgacttgtcccctacctcacattatatgatcaatactatttatagggttcattttttttttttgagcaaaattccaaccccaagaagccataagagaaagccataattcccttccatagattatatataataggggtgtgaaatttgtgtgcatgctctcttattggaaaacaaaacaagtcacatgcatattgtagtaatatgtgtctatatctctatggttttcaacttttcattagggggctctcgatatatcgaaatccaaggattcatgttcatgatcatgaggtggtgatcatgtgtagtgtgtagtgtactaataactactaatataatgagaatcctaagtttttgatagatttatatatagcctttgggacgtggggaaacgagagagaaaaaaaaaataatggatttaattagaattttcctacttgtctagtacttcttgttaatttggacaaaaatattaaaaattaaatttatggggacaaagatattaataatgtgtttcattatttttagagcaatttcttttattagcggtaatattacttaagttataattttgaaacttctataatagtatccggttaaataaattgtcatgtagcaattattgattagtccaaaatcattaaatttttattatttttaaaaaaattacttcaaatatattaataagaaaatgatacgtgcattcaatgacttaatatttaacggttaggtacttgcggagttctagaaatataacttatagatattattactgttaaaaattaaacttatgtatttatttgcaactaaaaattaaatttaagtatttatgccataaattattttttcttttattattttttaaaaaggatattaacaaaagatactaaaaaattataaattctatagggttatagatgaaaatataaattttatgagaataaatatgaaaaatatgtaagaatatacaaaaataaaaagtataatttttattagggacaaaaatactaaaaactaattttatggggaaaattaaaattatttaaatatttttatat

SEQ ID NO: 383110 - DNA, 2689 bp, Cannabis indica
taatttctataatttaaaaaatgttgaactaagaggaagtaagaacttttgtctctccttctcaagaatgagattattcaaattgaaaacaacatttgtcttctctctaggagaaacctcaagaatgtctgccctgtttttaccactaaaatttatatctaataataaacttgaacagtcacaactactgaatgaagaagctgagactgtttcccctgactcaccaaccgtatcaacttcttcgtcttcatcattactactacttctaaccgtgacccaattctgttccaaactcaatgtagtataatcctctgttagcggtggagacgatgacagccgtctgatcctatcaaccggcgaatctcgaccgtttgatacactaccgaaattgctaaaactctccaattcatcttctaatgaattccatatttcgtgatcgagaatactagtaggagagatagattttgaattattcgattcgttgttttgcttcaactctccaatgaatggatgctttaaaagctgactcgccgtccacctctcatctggattccttcttaaacacttccccaagaaatcccttgcttcgtccgaaagaaaactcggaatctccggcgactcaccggaataagcaatcctataaagaatcgcaattgggtcactgctatcaggccacggcgagcctccgcttgccatctcgataatagtgcaacccagagaccaaatatcactagggagtccttggtgctcaccacgcgccgcctccggtgccataaacattggcgttccggctatcggtccggcggagttaacccttctagcgcagccaaaatcggctatttttggacccttttcgccgatcaagatgttccgacccttaatgtcacaatgcactatctcaacagaatgaagatactctaaccctcgaacgatttcccgcgtgtaatgtccgatcaacaattcgtcgagtctcccgtcgcggctagaaacgacgtcggttagagacccaccgggcacgtactcgaggaagagattgtatatgggtttgtcgttttctgttgtaatgtcttgaccaatgtagctcacaacatgaggactagtaatagaagaaagaaggctctgttcttgttgcaaagctttagaccgggacaactcggcggacttgacggcgaacacttgaccggaccgggcagaggtagcgacggagactgtggccgaagaacctcggccgatgacgtgtcccctgctccagtcatttgggtgagcctaagaagaaagagaaataataaagtttggaactttggaaaggctttacttggtccttttgagtaggttaaattggggtttatatatattggtgagtggtgtgagtatttagtataataagaattctaaaatggttagtttttattggttggttaggtgtctctccctacctctagggagagagagagaaagacagagagttgacgatagctttaacgtgagttatgaacgtgtcgaaatttgggtggagttgacggcaatttctgcctggtctgatcatgtcttggcatagtgtcacgtgggcacgtgttaaaggttgaggattttagggtgtgaacagaacaggtgatttatttgggatggtacaagtaataggggatacgatacggtagcttggatggatgatccaaacttgattctttgttttgtaattagtgtatgacaaggtgagagagtgagttttgctttaggtattgttaataataataataataataagtctttgaaaatgcttagacgggtggggttgagccaccaatatggttgaattttagcatcaactttcaacattttgtatgaagttgaattagtggatatgtgtcctaacattgtcaaaattgattcatttcttttttctggtatgagcaagaggaatgtggtcaggtttatgaatttggattattttgttacgtattattgtacatgttcctaatgtgaaattgtgaatgttaatatatgtgaatgtaaattgtgaatttgtcatagtgtatgaatatgtgaattgaaaactatataaaaaaaaaattagacttaattaatacaagaaatttgggttttttttttattattttcgtctatagtgataattaaaaaggtgtatttcactttttttaaaaagaaaattatttatagattgtcaaagtcaaaaccaacatagtttttttttcttcttctagttataatagttttttaaaactaggcgagtcaatttaccacaacgccacatgctctctttcatttacatataaatacttttttttgtcttgaaagatatatttgacttgtgttattcttaagccacgtttgctaataatttttcattgttagggccaattcacatacgttttaggaattatttcacaaacacaccaaataaataaaaaaattataaaaatatagtttcatgaaattttaattatttttacaattcttttattttatttataaaaaatatgaccttttaagttgtactcttttaaatttttattatttagatgttatttttatattattttatattatttttttttttataatttttgcgttatttttatgaaaattatcttttaaatataaaaatataatttttttttttaaaaataataatttatgtaattatcttttatgaccaattcagttatgg

SEQ ID NO: 383111 - DNA, 1305 bp, Cannabis indica
tttttatatataaaagtatatgtgtgcatgttggcatataagcatttaatttgtttgtaatgtttactcatcacatcatcataacttgatcactattattactacccactcactcactcactcacactcactagtcactactaacagaaaaagaatgaataccaattttcaagtcacctctctaatatctctaacaatgataataaaggaaggtataaacggtagctgggatttagtaaggccacgtcaagcatcttcctttacttacagcaattgcaacgaatgaataattacacacgccaagtatgattgtttatattataatagagatttggactggacccatataatgcaccaatgggcttaatcacaccatagtatttgataatttaaccattggttttgtttgcccttcacaatatttacatcataatatatatatgtttggatactttaccaatacacaccttaaaagttgtctactcagtgatgacccaaaatttttattttgtggtggcttattaattattaaaaaatatttatacttatattataatcactcttattatatttatttaattttgtaggggcttttctactattttagcttataattatcaaattaaataaattacatttaattttttaagaagataatattttgttagtggggaatatagtccccacatatatataagtgggtccgtcactgagtctactgatacatttttttatctaatttcgtatctaaaccaatttttttagtctaattcttttttataattatttatgttgtagttatttaagatattttataaaattttaagaaattttgagacggtttgaattctatttttcagcattttaaatttttttaatttttaaaaaattttagagaacgtcctaaataactacaaaaaattagactaaaaaattctcctaaataccaaaacagataaaaaaatttaagaaatgtattttaaaatttttctatatgtttttccatttttataaaataattaataataaaaataatatttttgtcaccaccatatgcatacaactaatataattatgggcaagtgacatctttatccaaatagaaatgattaaaacaagctccaccttggagatgtatcatgtaatgataacatattattgtcactagtttttttcttcataaacaaatctaaataatatattaatgcccagtctttttctcacctatgctatgttacactcttttttttttcttattttttcctttgctttttttcaaaaataattctccatacattcaaaaaa

SEQ ID NO: 383112 - DNA, 1444 bp, Cannabis indica
tttttttcttttcctaatatttttttttattattgttacaacaatatcacattatttcaaattcaaagatgattgcagccactagatcaaaattaaatgataaatcaattattaagagatcaatatgaagcacaaatggtttcgggtaaatggaaaaaaatacaacagggcgagatgacacaactgaggtactaatagccaacaaatttgctattctagacccagaatatgtggataacgaagggtcaaacttgaatgacacatgaagggagagagatccctcaagcccgaatggatagagtattagtttggaatgtttggggggattcatagctagcaaaaacatagcaaagtcaagcggttgatcaactcaaaaaatattagtttggttagtctccttgaaactaaaataaagaataaaaatatgggtacgttatacatgaacttactttcgggttggtgttttaccaataataatcattggttagataaatgaagaataattatggcttgaaatccttctatgttctccttggacataaggatttgtacaagtcaattgatacattgtattgctcaaaatcatcgaaattcaacaaagttccatattacttttgtttatggatttaatgaggaagcaagacgagagatattatggagaaacatattgaaaattgcagaagggattgacttgccatggatggtgattgggaattttaatgaaatcttgaacaatgatgaacgagtagagagaagggcccacaagagaccttccgagagttttcgagattgtattatgcagtgtggtttggaagacctgaagtactcatgatgcttcttcacctggaataacaagcagtagatagatgacaaagttttctctaaaataaatctcgcttttgtgaactcgaggtggtctaatatattctctaatttagaagttgtgttctttccggaaggtaattttgatcatagtcttatattaatatcattttacattgaaatcaccttgaagaagaaaccattcaggtattatgatatgtggagaatggtcccggactatgctgaaaaagttaaaaggaagttggtaatccccaatttgtggcacttgtatgtatcaattagttgagaaattaaaaaggttcaagctggtgttgaaatgtatcaacagagatgggttcaatgaagtccacattgcagaagaaaaagctcgattgaacatgctcaaaacccaagagaaattgcaatagaattcgatggatgctgaattactattgcaggaacaaaagacacgggaagagtatgtgcattactataaagcccatagtttatttcttgctcaaaaagcaaaaataaattgggtaaaaagtggtcatgagaatacaaccttttgtcgggaatattttactatgatctagatttactaataagtatgttgaattaa

SEQ ID NO: 383113 - DNA, 2905 bp, Cannabis indica
gaagtatatatattatattttgattgggtgttgtgagatatgtgcaaaggtgcttagtactttctttggtggtgtagttgattttctttaatagctcatggaaagttgaaaagggaaggacatatgaagcacatgggataaagatttttctttcaaacaaaccaacaaatatattcaattcttatgggaaaatgaaaatactatattcaataatttagatgtgagtgtgacccttttgtttttttatatatataatttattttaatctcaaaatagctttaatggtaagagaatggaaagtcctatataagactagatttgttcgagtatataaatataattaggtatggaaaaacaaataggaaagacatgatagatttcctagttccttaaactttttattaggtctacataattaaatgggattaaataacacatgtacgagtaaatgtaaactaactatatatatgatgtaagaaaaaaaatatattaaattattgatatattataaaaattaataaaaataagataacaatatttgttttaattattaattatttaaataaatagcaacaattaaaaaaaataattttagttaggctaattatagtttttggtttcgaactttaatatgtattaaatcgtgcttcttgaactactgagaattattagattcaagaacttccgtctaattttactaacagacgtttgatattgataaaaatttaaaaggtacaaatttgatatatatggaaatttgagggagaccatttgatacatatcaaaatttaagggcacaatttagtacataaacaattgatacgttaataaaattgaattgaattaaacaaatattatttaatctaacaatctgaatagttaaaaaaaaattaatggcctaaaaaatttaaatacacaattttgtacatatcaaaactaacaaataaaattttagtagttatttttttatggaataatttaaccatatataggattgtactttcttgtggcataatacctccaattcttactcaatatatgtctcgaacttaaaaaaataaaaaaagcattatgaaaatattagtttatatgttatataaaatacataaaataatgtatttttattcctatgaatgaataaattaaataagctaactaataaaacacttccaaataaagtggtaaagtaggttaaaatagtggtcaaattacttggacatggaaactatgatgcttttactaggaatataagaagataggtgcatgcatttgtccgtactataggtcaatgaggagactttgatttgatcttaaatgacatgaaaagccaagcttagtgtgttaaccatatatatttattacttagaaattatatttataatgtcacataatattatgatttatgactctaaaatagaataatatttgatgttccaacaactctctttacaaatagttaactatatattttttataatttaaacttaatatgaaattacacttatatatagtatttttatttaaaatatgacatccaccacaacaaaaattatttaatttacactgaaagttgaaaaaaaaatataactttaattttgattttaataaaatataatttttatctacaaactctatcttttactctaaacttaaagcgattttgttggctttaccttggacaaaagagctaattagaatgaggtgaataccttctccgaatgtctttttgttgtccatgccctagatcgaaaatcctatccgaattggagactacatgctttttcatggagattccttttatcaacggttcttttaattcttaaaattttttgtttggcaaaagaaaatattttttgttgatgaactagctcgtcttgctagaattgatagagtactttcgctatataatgttcttgaggagagattgattcttgtgaatcctatttcttttatactctattggtaatgtttggtaatacttttatttttaaattttttaaaaaaaattaaaattttgattctcaatcaaaaaattaaaacgtaaaaatattttatagaacatgattttagaaaatatttaaaaaaaagtgtaccaaacgcactctaaaatatttaataatttgtatttttaaaattatttatgtggtatcctataaaatattttgaaatggtatatatttatctatctctcttttttttttctttcttttttttgaaaagctctatctctaatttgatcaacataattattttttcctcaaaagtataatttcaatacacaaataaaatctatataaaaaaatacacaaataatacacaaaatactaaataataatctagtatattacattataattattgtttttttttcttttcgaaaagttcttgttttataaattaaaatcagtcaattacaacaacataaaaaattcgaagaaaactgtctctaacaaaatataatctctatccaatcttaaagtgaattttgtcaaacctagagttgttttatgttccctcataattgttgttttattaaatatgaatctcccaaatctaaatgttaactagaaattccaacggtattactattcctttaacaatccaaaaattgacaatatttaccacatttaagcatataatcatatgtataatattgtcaattatcatgaagtactataatttgtttatttctgttcatttatagaatcaatgtaagaatttctattttatcttagaacaatatgatcactcccatcaaatgatatttgctaaactattacatgatctaataacttaagagaagtgctaccatcaatctcctgttataatctcttagtcaacctctattctgaaaacacatgtcggaatatttttttcaactttttttttttcacgggggtgtttg

SEQ ID NO: 383114 - DNA, 2641 bp, Cannabis indica
ggcttaagcgcccataaccagtaagattatgggcttttttcgaactataaccaggtcatagcccaacggcccaagttcatggtgaccatggaaaacattgacccatgcaaaaactcacaaaacacaaaaaaaaaaaaaaataggagagaaaacaatgtaaaatatgttgctcaaaaagccagattgcaaaggctccattgcaacattatagtttctcggattaagtgttcccatttttcagacaatacaaaggtcgtgtaaaaaatatgggaaatagtatcacaacatcaatttgtttggcagaatgaggaaatagcatgataatgtcaattttttgtactgagtggttctaaatgtctaatgtcatggatgcccatacgtacttttattacagtggtaaaacacctatcatgagagagatacctgctttacaatttttggcgctcgttcataaatgttaaaaacaagttgaagaagatttggtttctgcatgtagagggaagccatgttactgttatgcaaaacagaaagagagaacacagatggtcaaaaagaaaatatactcaaaccttagagcataaagcaaagaagagagaaacgagtcgctgagcatccagaatagaaattgttgttgtgctatgtgctacacgctgaccctcccttgtggaatcaatctcagaatttccagaatctgaaatttgagaatcactaactgatgtatcttggcttccaacctagaaccccgaaaatcgattaagaaacaaataaaatattacatgcagtgcagtttattaccaagtagaagtttgaccggagcaaaatatgggaagctaaaatatggtgtttgaatttccagaaagtgactcgatgatattgtgccttcaatgccaaaccgatgtgcaaatttcatagcaataaaatatcataatacaaaaacagctggtgcaagataaacccaatggcccatgcatgcagcacgcatatacgacaatcacattttttttgtggtgaaatgcactagactgaacaaccatagatttcataacaataacagatcataatatagaaacagcatgatgcaagattaaacccaatggtccatgcacatgcagcaaacatatgtgacaatcacatttttctttcttgggtgaaatgcactagacttaaaatgcataccgtcgcaagagatatcaaaatcttctttcctattttgaattctaattgccacataaaaggtaagactcttatgaaaaataaactgaaaacagtaccatccctgtagctctatgtacagtggacccagattgcagatgctctaaatctgaagcatggttatccactgctgagtgcaacaggctagttgcaaactgctcaatattttccactacataactcaactgatagagtttgttggccacctatcccaaaaaccagaaaaactattaaataacaagagctgagattctttaagagtgaaaacaagatcgaaataaacttttatttatgaaagaaaaacccagccaaactgcttgaaaaagcaaccacagttagcaagacgtcataatcaatttccataccaggcgaatagcttttgcacgaatttcatcttgtaaatgaacagcacactacagaaagaaaacatcttaaagttaacgaatagaataatacaaaattgagaaaaacaaacaatagtttgaacattgatgtgggatgactcaaaacgtgaatattgaacaagaataacaaagtcacaggcatacagatcggatagatatcaagaaaagataaaagacgcctgcaggtagtaaagctcttgtcaacagagataacatgctcagtccatggtacctttaaagcaatatctaagcaagcttgcctatacagggggcgtcccaaaatcaaactccagacggcaccaaggccctgcgtaacacgttccacatcacgaatatcttttccatgttggtcagtaacatcagcgtagcagagatcacctagtagtttcaatgcagaatcaggcaaaactggaacttcaccgagtagtttgctaaaagatttgtctgaagctggaaatgaatcgagcaaagatgtggcctgcattaatagaaagaacaaagaggtaactctcctacatgaatttgaaaatgtgtatattttcataaatatatggtaaatctgagagacataagtaattatgaagtcgaaagagataaaagttcccaccactgccaagagaaatttttcatacacggcagcaggataagaggtgtttccaactgaatctagggttgtgagtgaatagagatgatacaagatgtgtaatacaagctcatgtccctgaaaccaattctcaagcattaaaatgaaaaacaacaaatacagaatggggtatagaacaaactgacaaaacatgaacaatatactctgaataaccaagaaacatataccttctgctcttggtagtccacgacaatatgtttttgcaccatcacaacaacatcatcatctgcatccatctgtgagaagcaaattaaacaaacatcacatgtgcactttccaaaacatcatagagagatggagtaattgtcgtaggtctattcatcacaaatcaatatactacgtaaatcatcaagacaataga

SEQ ID NO: 383115 - DNA, 3391 bp, Cannabis indica
caatccagactgaaaaccaaattctagattttataaagaaaaaactaaccaaaccgactgatgctcagccctagcctgtagaccacttagaaactctaagtattgaaacacagtgggtaaatgccattcctgatcattctgattcctggataggacccatctaccaatatctgagttgaggagaacttctgattcctggatacgccaaagttcctcgagcaccaccaacagaaatcacgctcatgttcagttcatggccttttgtcgtatgaggtattgacttagtgggatccctccccatagggaaaggaggagtcaagtacgccataatcactgttgattacttcaccaaatggatagaggcagagcccatgaacactggcacctccaagaaggccctagattttttatcaggaacattgtgggccgattcggacttccacacaaaattgtctctcataacaggaagcagtttgaaaatgaacacttcatcaacttctatgttcaacacgaaatcgtgaagagtttctgatttgtggcgagaccacaggcgaatggacatgttgaagatgtgaacaagatcgtgaagacaacgttgaagaaaaaactctaagcttgtaaagcccattggtcggaggagctttcgtgagtcctctgggcataaagaaccatagagagaacttcaacaaggcacacaccggtatttgatggcttatgggtatgaagcggtcataccagtggaaaccatgattccctctcacaaacaagacacttacgacccaactcaaaatcactctctactccaggaatcattagatttaattgaagagctttgagaacagtcataagttcaactcaagatgtaccaaggtaagattgctaggaactttaatgctaaagtcaagagtcatacatttggcgtaggagatcttgtcttgaggacagtattcccaactttggaagaaccaagagtgggggtctcaggacctaactgggaaggaccatactagattcaacacaaagtaggaaatggaacataccaactcaagagaatggacaaatcaaagatccctcttggaatgcagaccatttgcatcgttactaccaataggatgggggtatccaaatctttacattcttctaagttgtatctaattccttgtgaatcttctttcttgatgtatgcttgtgggcacaatgaaattaaaatagaagaaatttacacaaggattcacattattatctccttcacaagctatgttttaaataagtgaccaataatttggagacgtccaaacttcctagctcacttggggtgtaaaatacctagctatgtgccctcaaaaacatacaatgcccacttgtatttaaattttttaaattttcttaaaattattgagtggaaatattgcctaaatttcaacacatcttcaatctctttcctggaaggaagttttgcttgaagtttgttgcgtatttagcttggttttcatctttagttttgagtggaaatattgcctaaattttgatacatctttaacctccttcctagaaggaagtgtcgcttgaagtctattgcatattcaacttggtttccacaaaatcacaaccattatgttttcagcctttccttgagaagggaaacatggcctgaaatctattgcattgtcactttggtctctcgaccagattggtaggtttttttacaaggagtgaggaaaaagaaaattttcctgaagtccctcgcatttccagctgccttcttatcacaaattggagaaaaacctatcacactactaagccagcttcgttactttggattagggaaacaaaacctaagtgttaatacgtttccattcttgtttccccacaagaaactttgtctggagtctattacatgcttagcccctttccctcactaaatctaaataatagaaaaattactacaacattctacttaaggaaattaatcaggaaacacctaaaaaaggaatcgagctccgcaatccctatggaaatttgggaaataatctaatggtcctttcttgtaaaattaactcgctaaagttcacaagtgccatgaagggaactttgaaaatgttaacatctaagaagaggaatttgcaattggtatgcttctaagattcaacatcataggttgtaattcgtactagtgttggtaacattggattgtaatctaaagcatcataggttgtacaatatgcactcagtactgctaccgtactagtattggtagcatattaataatacaacaacatgcatataacataaatacacatacacatacacatacacatatacatatatatattctatgctatttttaccttgttttcgaattcaagtgtgtcagcaaacttgaatggaaaattacgcgctgaacgaaggtcacgtaaaatgaataagcaactttctaaaacctttctaggaatctaaacccataactaaaagtttctctattgataattagcataacaaagccctaaatatcgaggaaacacgagaaaattaaagaaatgggaaaactgcctaaaaaatggcaggctgattttgtgaaaacgatgagttgttggctggcctgggctggagttccgagaggctagccagccaagaaagcaccatacagggtctggccctcaggtcatcttctggctctaacttggttcttcttttggtttcaggtgcatttgaagtttagcctttcccatggtaagaccaagaggtgctcgagcgctcaccgagagaagcttaaggccataaggaccaagcttctggtagaaagggacacccttattcagacacacgctcttgtgcaacagaagcaagatttaataaactgtttggagcacttacttggcaataaaaaccaagaaaacatcgctctttctactaaggcctccaggttagaggtggatctcaggaagaaggatgaagcactaaagcttgctgacaaaaggactgaaacttgccctagatggctagcaagccattagtgaagattatgttagcttgtcctcgaagttcctgtatgaggtttaagctgtgcaaccccaatgttgacctctcttacatgggagcttcttttcttgaaagaacacttgcccaggggagagaattgtatgataacagaatgcaaacataccagacaatcgtctagcctgaggaatcgtcgttgagccactttgatgaggttatggccgacccacctatggaggatgtggtcagccaagctactaaccaggtggccaaccaacttgtagaggctatggtcggcccactctttggcaatccagaagctatagctgatgacttgactccacctgtgcctgcacatgattagacacattttattagtatcttgcatttatga

SEQ ID NO: 383116 - DNA, 2468 bp, Cannabis indica
atatttcaaaggctaaatatacttcaagatctgctcggttaaggctacatcaggctaaactaagctggaaagtccccatccgtatagacatctgcatagggacttggggaaaaaatttatcccgatttttgcccagttgacatggcatgtccatgtggacaagatcaattccacgtgggagtacaacttgtcaataagaaggccaagtcatcttctaaacacttcagctgacgagaggtccaagtacataggcgggatgaagaaatgatgaactagcctaccctaagggggttgcccggccctatggctagcatgggtcggccagcttccgaacattttagggtcggccagcttgcacctggtaggtgcatggccgaccagcatgtacctggcaggcctttggtgcgtagccttcatccggggacaacaagctaagttgcgatttgagcttcaacaacccacgataatagagggaaaatatcaattactcccttattcttgagggataattaactcatttaatgcttattatttaattatgtaaataaggctttattttccagtttttaagggatattagtggttaatcttcatgtaagctctactatataaaaagcaatagcctaaccctaattccctaagttcttaatctctaagctctaagtctgaaactcaaactctctcttctcttctctctcacatgccctaggcaatctctctcacttgagatttgccaatttgattctcacattgcaatcttaagagacgcacttcagatttcacaacccttgtgatctgaatggtattatctctggtattaatacaaccaaaaggagagtaagtcattaccgctaactcaaagggccaaacctctataaaaatcttgtgtctcgtttacttttatgttcttattgtgtaacacatagcaaacatcaataataaatacgattctgctgtcggttggcaaatttaaggtcaacagaatgtcttcatacgcggagtgatcaatttgatctgatcaaggaccttgaatagggggttcagattgagacagtgtcaacagaattgtgggatggtggtggagaagtagaggcatcgaccactgggtgatcaaaatcggtggcggtagctaatgtagttgcttgagttcacaccatcattgagttcttgatgaagtttcaatggagttcttgaagagtttctactgataccatattagttggaaaaatatagagaaactaaattttattattatcaattaagtttacaatggcaaggaactaatccttatatagagaaggattacattataattaactaacaaccttgtaacaaaataacatacaataacaaaaaataacggtctaatggaaacaaaactttgtgctaattcaataacacgtgtttggcaatctttaaattactgtaatggaattgaagttgctcgagttggtctaagtggtggacttatgttactttagaaaaatgatgtggatgttacctttctcaattacgactccaacttttttgattgctatttaaagtttgaagatgaaccaagcttccatattaaaagtttctatggtgctcccaacatcaataatagatcaacttcctcgacattacttaagcgcttagcagatgttggtcctctttctccatggcttgccattggagatttcaatgaaatcctgtccaactctaacaagtcgggaggtaatctttgaaacgaggcgcaaatgactgcatttagaaatattgttgatcaatgttgtcttcatattgccccttacaaagtagaccctttcacttagatcaagaaccgttcagccttggatactattaaggagtgtttggactggtgttttgttaacagtcactaggaaaacaacttcactactccaaccatgcatcatttggattattaccaatcagatcaccgtgcaattatggttgtctttaacacgcaatcaacaacattcactgaggaaaaatgaaggagcaggttctatttcgaaaagctgtggctattcgatcctgaaagccaagaaataattagatccaactggaatatatcgccttttctgatcctattactgctgtcatttgtagcattaacacatttgctgaatatctacaatcatggcatattcgaaaatatggaaaaatgaagaagaacatcaatgattgccaagacaaagtggccaatctgaataatattactgcctgcactagtagtgatttatatgaattgtagcaagctgaagcaattcttgaagacttgctagaacaagaagaagtctattggcagcagtgttctcgagttgattggatgacgaatgatcgtaacactaaattttttcatgccaaagcaccagcttgcagatccaacaacataatttgttggatattattttaccaggatctaaacgattataaattaagcacatataaagtataagaaacct

SEQ ID NO: 383117 - DNA, 1255 bp, Cannabis indica
aaaaaattttgaaaattttatagatggtctcaaataagtacaacgtcactaccacaaaaataaaaaatttcatcagtttagaaccgatggaaaaagatttttttccatcagttcacaaaaccgacgactatgtgggctccataaatttaggcaccttagccgtcgatttagttcgtatcaagcttttcccatcgattttgcaccgacacaaactaaaaaaaattgaaactctaaaccaaatctgagatatctactgccaccgcgaagcccaacctcgactgtccacctacgagatctcctcccacaaacccaaaacctcatctttgtcaaatccagaacactgtccatgttaaacaacgaaccctgtcctcgtccccgtccaaccacgaaccccatccatgttctcgtcaaccatgaacccgtccccatcgaacccacaaatacaaggagagagaaacacacacacaagcacatgcatacgcacacacacacacacacacggagaagagtgggaagctggtatatatttagggtttctcgcaagctttgaactgaaacttaagtatacatgtccgttttgaactgacggatgaagtctttgcaactttaaatcacacacatgaaaactttatcctttgattctcaactaacgactatgattttttttttctttttgcgatattgtagaatcgacgacatttatatttccgtcaggaattgggctccggggtaggactgacagaataaactctgtgtggtcttttttgatggttcacgacgttgaccatcgtgctgaccaacagaaaatgtagtagtgcatacacaattatgaagaataaaatattggactataaatctctcatggtttctaaaacatataattggtgtatcagtattgccattttgtgaggtgcactattgatatttccaatactttttaagtaaaaacatagataaaaactctaaggtggcatttaattgagaggaattaaaatataagaataggaatggaaataagaacagaaatagggaggaatgggataaaatttaaaattcttaaataaaattgataaaaaaattattaaattttttctcagcatgcaatggaatggtattttcttctattttaaaatggaatagtcattccactaaaatggtaaaaaggtcattccattagaataacatttcaatactttaatatgcaaccaaacaaaaaaatagaatgaagatggtttctttttcattttattacttc

SEQ ID NO: 383118 - DNA, 1105 bp, Cannabis indica
tataatttaatatatgttaaaatcatttgacaaaaattgtaattaactaaaaaatatataactatttaaatatcgaaatagtgcaacaattcatatttgtttttgtttttttggagtgcatcgaaatagcaccttatagtatatagattttttttgttttaagttattgttgaattttattagagagttgttcatattaggtgttataataagaaaaagaggaggtgacacgacgtcgttgtcgcatttggtgtatacctacattttgcagttgcggttctcatcttatctcttgtcttaatgagcataagacagtccataatgggccataaagcccataaccatcaccgtcgcccatggcccatggcctcattcattcccaataatgcccttgccttgccgtgacctctatgctctctatacaactatttttaattgtcaagtactcaaatattttatttattttttaatttaggatgatatcattgcagattattatactcaatatattattattcaaattattaaaatgtatgtttcaatctattgatgaagaatatttgtttaatcggttctcatatttgatcataatatggtctaatatgcttttcaaattataatattacaatcctacaaaagaaaagggaaatttagatggtatacttttgttatttttttataaaaaatactgtcagatggtattttttacattttcacggtgtatttttataaatttcatattgcaatatacattgttaagttttcactggtattttttagttgttctactgcggttttgagttgttctgttttgtgttttactagtgttttataaaaacacgatatttttaaaaactttctatgtgacaatatttttgtaaaaattaactcaaattccagtattttgtaagtttctcaacaaaaaattagagctttgactaggaaaataaaacgaacaaggaaaacgaaataatcatttctccacgtctaataatattattacattattataattttttaaaataaacgtagatttattaaggtaattagaaatttttaccttgtaacttgtacatgtactaaatacgtgcccctcgaacttttt

SEQ ID NO: 383119 - DNA, 1624 bp, Cannabis indica
ttttttgttctttttcatatatgtagagtatatttttgatcttatttaaaataagtttgactaaaatcaagccaaaatgacttcattttagaatttagtctgtagtgtttctcaagttagaattcatttgaccctattttattattattaactcatcaattataaggatttaattaatatataattaaatttaatgaagaggaggtggaagtgcaaaatttatcatgaaactcatcaacttcaaatcaaataatgatgccccacacggttgtcatttatttaacactgatgtaatgtttaaccctgagcctaatatctgtgtgtggtgtgggacagaacagaagaaacacttggatgggatgttggcaatctcacatatatattatataattttatttatttgatcacaaatgtgtcgacaaatcattttcatcattaccattacctcggccatctgcaaccactccattaaaattgatcaccaaactatcatatttctaattcaatacatgtcaattcccatgttaattaattcaattatatattaaatttccattttgtttaatttctttctctacctttttttattataaatgtttatatattattatggatgagtggatgactgtgcagctttctttttttgcattattgatcaagtatggttggcctattagtttcttcatcaaaatatgggagcttttaacgtgctgtattttctttcaaaactcagtagtaaaggactcttttttggtttgtattctgttacttatgaaagatatagataccatacacttctctatgaagggctgtcagttatgataatgatacactcttgtcttgtttcattttaaatgaaaatctttttgtttaatttattttttataattctccatgttgtagctatgtaagattatttgtaaattttttaaaaattctgaataattagagcaccaaaaataaagttcaaacagttacttatgtataaaaaaaaatcacacctacaacaaaaatatttaaatcttattttctacaatataaactatacagaattttcttaaaatttacatttagttctaaattattatatatgacgtaaatgatagaaaaacaaaacaaaacattattgaatgccagaacagataaatcgtgtaccaaaataccaattctaaagtgtgtactataatttttcaaaagtgtattacattaattaagtgtgatggaaaacaaaaacgcactttttcttttgggtgtgtgacattatgaattaatgaagaaaaaaaatctgattgattatttttaattttaatagtttaggattaattaaaacaaaattaatgctgtgctaaacaaaattaacatttctaataaattatgcttatatatactttcatagatgtttggaaattaccaacacaaagaagatttaaatttaagcaattagagcataaacaataatgtcaaaaccatcacaacatgacagaagcagaaccaaaaatagtcaaaaacaataataaaaaaaaagaagcaacaatggtcatacaaaatgagtaatgataaaacttaaacaaccccaaattgttatactagctcaatcaatattaaagctgttggaaattatttt

SEQ ID NO: 383120 - DNA, 1131 bp, Cannabis indica
gaaaacataatatgatcattccttcttctgatgttactattggtaccccatataacaacaataattattactattatttcctttaccaaagtgaaagagaaataccggtgttctctcaaaccctgcaaccgccaactcgagttggagactacttctgtgaagataatactatgggatgtcatatcatgtgaaacttatatgacatcctttggtgtttagatggttttttttcattttaatttagagaaaatttatttttagttcaattattgatttttattttagtttctctaacactcatagtggtgaagagaattgcatgaattgtttactctactaagtagaaaattattttacctcaattgatatttatgataactcttcccaacaagttcttttaattgttgaaagtattacataattaaaaataaataaataaaaatttcaaaattttatcatctcttacactcaaagtaattcaaacaaagagatatgaatctatttattgctctaatattaccgattaattaattctttatattcgaagtaaaatatataccctttctaagttttagaataattcatttttaggtccatataatctaaatctaggtacgttttttttttttgaaagaacaacgtgttcattaattaagaaagtcgatgggaatcacagggagattaccctcctcttgatacaaaatagctaaatcgctagcaactctagcattcttagcaacaccatgtattaaaactatgattgataaaaaaaaaccaaacaactggcagtgctttcaatacattaacaatagaaaagaaaatacttgataccttccagtcaggaggtcttgttcttgtagttaaaagacatactaaaatatatatagttacttttttggaagaagtaaaaatgctattttcaatgtgaagcaatactacaaattttataagggtcttcccattacttactagttactaaacttgtatagaaaaacactaaaagatatctgtttttacataatctaatttaataattattatagaatatcagtagctaacaatgttttaaaaaacgcaaatgagccttgaggcattttttttttttgtaaggcgaggcgtaagcctcaaaaa

SEQ ID NO: 383121 - DNA, 1531 bp, Cannabis indica
ttacaaaattctttttctttttcattggttgaattacctttccccataatatttatttctttcattatttattattttggtttattattctctcatttattgattgattacctcttataattaatgaacaaaataaatagaagagtctaatgttcaaattctattttgagagtgttatatttttttaaaatttaccaaatatctttaatatattctttaataattgcaatgtagatgatcatagaataaattaaactaaaaaattctctcagatgctgaaacaaattaagagtgcttctgtaaattttttttaagagtgcattgtggaagtataaaaaaaaattatactcatattttaaggatgtgtatttcttaagtattttttaagcaacatgtgttctaaagttactcacaccaaggcctatttgtaagcttggttgaaggctttgttgtatatgtttttgtaggagtatattatggaagtaatagtagaaaaacttttatgggtctcctttcttgtttgggtcaagagtttgactctcatcctgccccacattgtgagggattatatgttttgctattgaaggtggacttgttgtggtaggccagttttaggatagaaactcttatgaggtttaatagcgatgattcagttaagacaagaagagatataaagttcatatagctagcacgtggtctctaaaattattaaagcactgaaagattggagaaaaaatttgcaccatgtgatacctttatttaaaaaaatatttgttttttagttattatttataaaaaatgctaaggagtaccttaaacaagaagtactatatcattattgatgtaatttaatatcatatctttttgatttaataaataatatataaaatcgctatttattttctatgcctcgtattactatagtgtttgacaacttaagatacttaagaataatgctcatcatttattatcttagtttattattctctatttgatggattgattacctcttataataaatgaataaattattaaaaaaatacattttttattacaaaaattgtaatcatatattaaggatgtgacattactagctactatattagttgacattttatttttgattaatataccatgtgacacttatactcatatttttattctaaagaatttatactcatattttttaagtatgttgtatatcttaagttactcatatttcaaaagaatttatacttatattttaaatatagcaagtactgaaaatttattctcttagacattttgcttaaaggtgtcatacccattataaaaaagggtggatgttagcatacccacacccactctctttctaacattaatttttttttcacacaaaaataacaacttatacttaccactatcacaaaggataaaacacatccacttattgagcttccccaattaaggtccaacgattggattcaaattatttaaccttgtaatcacttgattagaagataaatatagtttaatttagtttcttaattaa

SEQ ID NO: 383122 - DNA, 3447 bp, Cannabis indica
taaaaatttcccgaactgtacccaaaaatactcccacctcctctttgctgatgacaatatcattttctataggtcccacattcaagcttataatgccatcaaagacactcttgcaacttatgagtcagtctcggggcaactcgtaaatttcaacaaatcctctgttttcttctccccaacactatatttaaacatacctgccactaacaatttggttaagtacctcgacttgccaatattctttggtagaagtaagaaacattcttttaactcaattaaggatagaatttgggcctatcttgataaacggaaaggcaaatttttttaagggggggtaaaggaatttttctgaaagttgtcattcaatccataccatcctatgctatgtcagttttcaagcttcccacttctttctacaattttgctgaaagacagatggccaatttcctgtggggatccaaagatggggaaagaaaaatctattagaaaaattagcaatctgtatgtggctctaagtttaatggaggtcttggcttccgatctctaagttccttcaattaagttatgctagccaaataggcatggcacatccaaataaaccccacatccatgttgaccaccttccttaaatccaaatacttccctcatccaaccttcctcgaggccaagatgggtcattccccattttatgtttggagtagtcttcagtggggaaaagcccacctcaaaaaatgacttagatggagaattgggaatggaagcacagttagaatttaccatgataactagatcccaaactgccacttcctatcccctgcccgggactctgaccaagcatgtgtttctagtcttatccttaattttggagattggaatgttaacagaattaaccacctcttttcaagggacatcgctcatgatattctttcccttaccaccccttaatactcagaagcttgaatccctattttgacaatatactagctcagggcactatattgttaattatggttatcacttagcacaaagaattcatagagctagcagaccagcaccctccaaccctgactcaaatgccgactggtggaagtttctctggaactttaatattccttccaaaatcaagcacttcactcgcagtctttgccacaacactctccccactactagaaacctgcactttaggaaaagtcatccctctcccttatgtccccattgcaacttggataatgaaacttctcagcatgctctgttagattgtaagggtgtcaagaaggcttggacatgtacgtctttcttatctccgattaaagcctcaaaaggaaaacatatctttgatactcttattaatgctaaatcccaatttacaaaagacgagtttgaattatttctctgtatattgtacaaaatttggagtaggaggaactctcttgtgtttagacatttgaaggaacgactctctattcaacaggaagctgcggcctacctccaatcctatcaacatgcacaaggagtgcaggctgttcccgcacaggttgtcacaccaaccaccacttggaccccccgaggcagaacaattcaaactcaatgtggatggagcgatttcaagaaaagaagaaaaaaaataggtgtaggagccctactccgtaacttgacaggccaaatcatagttgcatttgccaagagtacacaccgcatgatgcagccaaaaagtgcagaagtatgggcgttattgcaagcactacacttgtgtcaaagcaatcaaattttaattcacactgattgtctaaaccttgtccgcaatatcatttcatcaaacagtatcttatctaatcatggagttgtcattgatgctcttagagaagtgttaacttccttcccaattgtttccattttgcacatcaatcggcaaaggaaaaaaactacccataatcttggtcaaatgtctcttaggttagttagcgcttggttttggtctggaagtgacccctacccgtgttctttgtaattcatcaggtcactatccccttaaaaaaaaattattagagataagttctgggactttgtactgagtagacataaggctggacaaggcttatatttttcataatcttggtacaatatctaatacattcagacattatgaagcatgtgctgaaagcctttataactggttgcatcaaatatataaaaattatctaaactttcgggaaggacacatgttaccacataatttgtccatggatgatagtttagaatcctctatgtttggttggtaataatcatccagaatagagaggaacctgacgttcactcagtgttccttctaacctacgaatggagatacgactctgagatctagatgatcatccaggtcccagataggcattgtgaaacatagcccagtgcactcccgtaccaccgtgatcccggaagcgaaatgccacaaaggaaaatgactctatatcaaagtacttccggacgacttgttctaaattggaaacactttcaagtttaataaaaactaattcctaacagtaaataaatgtgtcatattaatctataatatttaaaaatttcatccatattcactttataaacatttttaataaaaagaaagaaaaatcatgggagagaaaaataataggaaaatttctaagcatattctttggaattaaaccatgatccactacccacacacacatacctttaagttattttaatatatatatataaacccttcacctcattatacatataattacatttgtatatccaaaccaaagtgaccacaacttttttaacaaaaagtttaagaaaaaaaatcatttaattgctcatgaacaaacaaacattttgtatgcactaaattatagttaatcaaaaccctttttgattcaataattaaagtagcacttcactatttcctcaatatataagaaattgattctttaagtattatttagggccctctttttaccttttcaagttttctttatcttattttgtggattccatgtagttacgttgacatcagagcagaaacaaataattcaataagataatgtcttgacatacataaatatatgtatatatatgtatagtgggtcgattatagttttgttctgaaattttcaaaacccccgttagcagtgaatctaagatttggagcatcataatctagaatataattttcttctttgaccaagatttgttataaaattaataattaacccaagatctatttgtatataacatagaacacaataataagatataataattagacatgtgtacctgattgatccatagcaattatctctatttgatccacagcagttactccactttgatagtgcaatactatcaactaagtcttcctccctagatctctaaatcagaagcagtttatttatctgattatcaaaaggtatacaattgtgatga

SEQ ID NO: 383123 - DNA, 786 bp, Cannabis indica
aaaaaaattgatctattatgtaaatttgtcttatcttaatgtgttttgtagtttattattagtaaatttttcaaaattttcatttcattttagataacattgcctcttttaaatttttaacatttataatattttggttggcttatgcgagctacccacatgatgaagctggttgggtgctctcgcatactctactcagatgttccaactcttattgactttgagcattataggtccctgtatggttcattatgagaaaaatctttcgtccaagtcacagaatctattccacgtgttatctaaatggatggcacatcaccctgtgtagaaatttagataacattttccccttaagtctgcgtaagagcttcttggtcgcacatggtaaatttagataactagattaaagttacggccatagaaattttgtgctcatatatttttctttgtagtaaattcacatgtgaagttctttatgctataccacaatgggtatgaacatactataataattatgattattgaagtaaatttagctttaaatcaatacgtattgatgccaataatggtttgtttttatataaaaaaaaagagataaaggtttttggcatctaattttattattcattaatagacagtaaaaactagaattagttaggggcgattaaatactaatttaacattgttatttttttatatatttagttttgttattgtttttaggcaaattagtaatttttttccctgaactttgacatgtactaaatcgtgccccctgaacttttt

SEQ ID NO: 383124 - DNA, 1606 bp, Cannabis indica
aatcttttaattaaaatactattaaaaaagtttaataaaaaagtaaaaagttctctattcattctctattagagagtcatttttgtatgattaaagcttatttttttaaaatctttccctattttagctaaggaatgtatttagagagcatgattgaagatgctttgagacccaatattaaattatactaaaatcatctccaatgacactttaaaaacctaaaactaatgtaatttttcaccaaaagcctctaacccaactctaaaagattttctattttggtgggagtctataatgggcactatagaccataacattttttactttttaataattatataataataatctattaatcactgaaataacatccttcttgtgttgatttaacacataaatttagatttttctattagaattgccctagtactatgatttcctcactttttcacaataaggaagtaaagaaaagggtgaagatctccatggccatgattcatattcagtaatattcaacataagattctgactgacattaaatgattttggacactgtctacacgaatggtaatagtaataatagtaataatagggagtagagtaagacatgtcttgacttgtatggacagtactttcataataaattaattaatgcctgagattgaatgagataagagcctgtaattgtcactgacacataccaatgcatgtatgtagtataagccatcatgaatgagttgagtgaaatgggctctagcccatagcccataatagtaataggccactccattccaataaaggttgagtgtgtgtgagtgtgtgtgcctttgtatatcatcatcataattgcttgctatggccattgctcataaatatatgaacatgaaatttcaataattaaaaagggtgacataattttttgcattttttaaactttaccccttaatagtatttagtattgagaaatattaaaaggcactactaacaccctcttatgtgtcaatatcgcttttagtccaattaagtatcgggtcctatttaatttaacttaagaatatagctttagagaatatcgctaaccaagcatgaaacaccacacatagaaggtgttgggtaaaattagtgcccaataataatgctccatttaaaaagttaaaggtactaaaaagtaccaaaatagtaaataaaaaagtaacatttattgtagtataaaatttagctcacgctatattttatgttatatttgacacaatttaaattacactatacaccaccattgaagcttaattttatgaacatagattaaaaaatacatctacactatctttgaagtattcaattgaagatgttcttataaaacctaattgttttgtagtggtcctaagtaaaagatataagttattttaagtacattagtgatattctatagactataataattattaaattaaattattacataaaatctgataattcaactaataactataagactttaagtggtattaagtatcattgcattttaagatactaggtgatcaattaaactagctattattgtacatgtgacaacacatatatatatatatatatacatatattatca

SEQ ID NO: 383125 - DNA, 1464 bp, Cannabis indica
gagaaatgatgtatagagcgatagattaatcactgacgtgtcaaaaagcaagaattatgtgtgcaatgtggtaaatatgtaataaatttaagcaaaagtgtataaaagttgttttgcccgtgtataagtatttatgtaataaagattgtattttgtgtttttgatgtaaaaatttcttcttttaatttgttttaaaaataattataaattaattgttacaatataataattatattataaattaattattaatgtaaatataattaaaaaaaaagtaaaatctttaaagtaaaatattattagtagatgtaatatttggtaaaaattattaaaattattgcataaattctgcactaaattaataatttttttttttttgttaaatgcactaaatttataattgaatatacacaaaaatagtgcaaccatgtgtaaaatctttataactggtcttatatatgaattaggctagcctattatttcttggtagccagtcagtgtttgaccagttagtattgatgtgtatatacactcacaaagatgattaataataacaaacaaatgaatgaatagaactaataattgcactacagctgcatagctatagaaagttaggaaccttctcaccctctttcctcattttgttttcctaaaataccaatatcataataataagcatattataaaccactattgacttgactttaaggtatatatccatttttataaaaaaaaattgtaactttcacttaaaaaaaccaaaaaaaaaaagttagaagtgtgaaatgttattattctacacaaactcttcagcctaggagtataccaaatagttacattaagaagatttgataaagaattacaaagatcaacttcattacatatgattttataaataagtaactttgagtttgattcaataattgaaatgggaaatttaattgccatacaccactttagagcaaccttgagaacaagtgcttcagcataagttgagtcaaaagcccttgagacaggaatagccaaaccaacaacaacattatcattctcatcatttactacaactcccaatcccaacttgttatttttagagttcatggctgcagttgtgcaaagcttgaatggcccatgtgctatgggagggatcaaggattcttaagcatcacacgactgttggcaagcaatagaaagaaccttcttctgagtaatcctataatcatctagataagaactagtccaaggaaaaatattagcatctatcaactaacttttcccaaagaacttattattccttttttcccaaatggcccacaataaacccaacaccaagactagatcatttttatttaaattctcaaaagcacaaagtataaaagtctttagggatattggcggctaaaccaactgaacgttatggttggtaacacttaactaaaaaaattgaatttttagcggctaaactac

SEQ ID NO: 383126 - DNA, 1604 bp, Cannabis indica
tgtccttggcaactcgaagaccagtgacaccaccgtagcagccaagaaagtagagcataacgcggccaacatcattctttaagccgagctggctggcaaggtagaggtcaccaccgggtaatcttatctcgcttgaggagacatagacaatgtgggtgatatcttgtgctggtcttccccattccttgatgcaggcgaggctggcttccatggccatctccaccactgctgggttggcaatctcaagcctttgtgctattgttggagagccctcagttgctaattcagggtacttttctaggatgtccttggacatcactgtgtaccttgtcttaacagttgtagttttgcctagcaaaagagaacaaaaatatgaaggtttagtctctatgtatgagtcactacttgctagcttcttactacttcaaataataataataaaaaaaaattacaaaacttacacagacgctcgagtttttccttaatggagatatcttggcatttagtgtcccgaatgtagccttccactaagcattcctgaggaataagttggctagggaaggccttgcccattgcaatgatagttgctttccctggtgtgggaatgcgcctagtccgttctggatattgcttagtagctccattgccttcaactcttgacatgttttggaggttttctctgtataattaaaaactattgcttttctttaaagctgaaggaaactcagtgtgatttttcatttacaattgttggaatataaatggggaagcttagctgattcttggagaagagttggtttgaaagaaagaccttcatgtaaagagagaatttgataatttatttgtgtttggtaacttttgggttgatggggttggacgtgtgactatctatcagactttcttagtttcttttggtaacccacataccacttaaacaatcccctaaaaggcccaagccgcaaagggaatcaggttctacattagaagaaacccataataagttcgaaactatcttgttcttgcaacttgttagctataaagaatcatatgaaacttaaagctctcaacgtggcattgttttccccatgccataaattaataataataaaatcttcattaaatttgtgattttagatgatgataccgtaaaaaggccagtgcattttgaaattgaaggggatgaaatactattatgcttcactctatagtaataataaattaattgagtgatctcatatgaaactggttcatccactatgacccatgacattatcactgccttcccaaattattatccttgtgtaatatgaaccttaattcaaacaaagtcggaatttcagattatgggtagtagtggccctaaagatggctttgaagcttggaagatagtgtcatgtttggtagaagggtttcagctggtggcctaaaattgagaggatttgagattaaggtggcgtttggttggaggtaatgaaatggaatggaatggaaaggaaacaatttttatttcattcttttgtttggttgtattttaaagtattggaatgtcatttcaatggaatgtcctttctactattttggtggaatgactattccattttgaa

SEQ ID NO: 383127 - DNA, 3499 bp, Cannabis indica
tatattttagttttgcatcatttgcttctccatttgagatgctctaagagaagctttatttattagaagagtggatagatatagggatgttaattattcgagtacacgctcttaatggggcagggcgtgagcgtatatgggtttaaatgctcatacccgagttagaattgagtagggacagggaatagacacctgccgtgaacacgccccaatatgatatatgtatatatttaagttttaaaatcatcactaatacaattataataacttcatgctttaggctttttattgattgcattaatgaaaattttcagtttttcatgaaaatatctgcggtgatgcatattaataattacacttaacgactttaaaaaatgacacttaaccacgtattttcaattactaatttcatttactatacacactattctacttatgtttgttgttttaatgagtttttataatatatatttttttaatctctttaagacattatttttttttcaaaaatatatatgtaaagggtatctaataattctcattccgttctcgctttaatttaaacgggtattgaaacgggtacgagatgggggagcaatccccgctcgtttacatccctagatggattttccttccttcaactaaacgatatgtcgttgtacaaacacgtagtgtaaacgaaggtatttgtggtaaacgacatgaaacttttaaaggcaaactgaacaaattgctgatgcttcgttaactcagttcagacttgttaggtaacgagagagtaaccaatttccggcgctgcaccgcaacaacaatggaagacgaagttgagcttcccaccaaccccaactctctaagcaaccacaccaacccttccaacgaagacaccgacgatgacccaccaacacttagctcccaagccatggctgctctaagagagttcttagctgagcaaagccagtctgtcgccgaacccaccaacgagaacgatggtcagggtggttcttcagtggctctagtctccgaggactggaggctcagccagttctggtacgagcctgacactgccgagaccctggctcgagaggttctcactctctgccaattgggttcgtctgactcggacttgggatcgcctcgaatcgcttgtattgcttgccccacgctctatgcttatctcaaagtaatgctttatttcccaagctattgcctttttttccttttgattttgggtctgctttttattttatattcttaacttaattgtaatgtgttcagaatattgattcgaatttgagagtgcaacttcttgaattcgacaagcgttttgagcaatatggtagtgattttacgttctatgattataaccaacctgaagaattgccattggagcttaagcatgcttttcatgtggttgttgcagaccctccttacctggtgagaaagtttatacacttcttgcttaggtttcaacttacagcatttaaattatgtggtttggaaatttgagaaagctttttttagaagggtcttatttgctttagttactatgatgaacacggattgatcttaacaacttcaagatgatctgttataaattgattaaattaatgggtttatggcttggttgcttacactttcattttggttttaaagcacttcaatttattttcttttggtttccaaaggtgaaagaatggtgaggctttccttgaataacattgttttgtataaaaatctttcattcactttgagaaaaataaaattaaagagttaccaagcaatttgattgtgactgcctcacaagattttgcagtttgtgcactatttcaatgctttgatatctttgtttaccttttatagcgttttgattaaatcttttaacttattagttagcaaagtatttaactatttataacgtttgaagaagttgatgggtattaagtaaatctcaatgttggtgacagagcaaggagtgcctggagaaagttgctgatagtatatcttttcttgcaagaagtaaggagtctcatttgcttctacttacaggtacagatttttggttattaaatttgttttattatgttcatcagggtcatgtaacacactacaattgatttttggttcttaaatttgttttattatgttcatcagggtcatgtaacacactacaattgatttttggttcttaaatttgttttattatcgatttgcaggagaggtgcaaaaagatagagcagctgagctgatgggcttgcagccttgtggtttcaagcctcgacactccagcaaacttggaaacgagtttcgggtgttcacaaactatgatcctgggacacgattagggggatgggagaaatagaagtggctgacattgccttgtaagtttgtacattgttgtgaagaaaaacaactcagaaaatatactgtataactttaacatttcatacatacttgggattgttaagtacttcacagaaagaaatcagcttcttctttttcttttttccttatttgctgatcttgactctggtgtgtttccattgtcacttgtataaaatatccaatccaaatatcgtttatatttagtttagcagcttcatagcgaaccatgaaacgtgatatcatcttatggggttaaatcttttcgacagattcattggtgggacaaagagacaattcttacttttgcaggaaaatcattcagttctagaaagatgacaatttcatcttaattccaagctttgtcaatgcagtatcaatggctttggagacggttaatggggtgatcatctctttgttcttgtaactttgcatatttcacttgttttggaggaagaaagaaaattgaagcgaaacttaagttaccctcaccctatctggataatggcttacttgtgttcacctctctactattcctaagattcttcaagttggtgttcttactgcattttataatttattacaaatatgaatcattggtttaggtatttgcctagttttatgattggccgcatagttttatttataatttattttattttaaagagtaaaatgaaaatttccattacataatagcataatcaacaagatagataaacgatgccgcttacaaaaatacaaatgaaaactctaatagcaaattcaattaaaatactaataagttgctaacgttgaagcatcaaaaaagcacaaagaatgctagatctttactttcaaatgaacatgtgacaaattacacgtattaataactattagttaaagatgttttaataaaatttgattaataacaactttattatttaatttagaataaaaagaaataacaaaataaccaaccagaacataataaataatctcataataaattatgaggtctatacaaacatattttctcttaagagcatctccaaggagatacaaaatttagtgttacactatcaccaaatttagtgtcaaaaattatttctactccaaccacaacaccaaaaattacactaaa

SEQ ID NO: 383128 - DNA, 1592 bp, Cannabis indica
atttttgtaaataaaatttatttcaagtataatattgaaaaaaaatttaaaaaataattcaatttaaatagttaaattctataaattgtatatacctttttggacatactttgtgtctgtgataattaaacattatcaaatttttaataatacaataagtagtacttgttattcttttatattacaataatttgtaagaaaagtaaaattcaaaaactcattctttgtattttttttttctttttaaaaataaattatatataattacccaatagcagcacatacctcgtatgtgcttgtacaactagtgaactaataatagaaaataatggttgataatttggtatgatgttttaaggtgatgcaatttgacaaaacaaaggtgggcaagttgcaagtatgatatatgtagatgtagtccaactgaccacttttatgagcacaataatgcatgaactaataataagtgtttgattgtataaccattaatgtatgtaaagcaaaaatcattgaaaggtgtatcggctatagcacaatctcatgtatataaagggcattgctattaggtaccagtggtgcttagtactttctcgacttgtcgcgttacgattggttagtgatacttcttaaaaattattatattaaattatatgggacccgatacttagttggaccaataacaatattaatacataggagagtgttaaacatcactaccacaactggtaccctttagcatttatctgtatgtaaatttactttaaagtggataactacaacgagtcagttgatcaatcaatgtaatggggccatattcatcgaaccactcaaatctttatctatcttttatgtccaacatttattattgtatatccaataaatcaaacttctggcatatttatagattcgaatatttgaacagaattgattaattaaattctttgttttgggcatttcaaaaattctttgttttgctctaaggaaatgaaattaatttaaaaactaattagatcataagtttctattctaaaaaagacaaataagtagttagggggaatatatatatagatgctaaaagattttagtcgagttagtagaagaattaggtattgaattttatataatttaattgaaaaattattataaaatattattagttattcataaaatgttacttataatgatatttaatatcaattctattacaattattttgctcttttatgagtgaagatttcgtagagaagggttaaaagaagtggacaacttagtattgatgttatgagaagtggcaggtacaattttttattataatcctttagttaatttttacactcgaaatcacatgttagaatattttcttttttaatttcttttcacagtgatatttgttatagttacaatatcattcctgtaaatttttatttaattctgaatagttaacagtaccgaaaataaaatttctgatatttcagtctaccacacatgttcaaaaaacttcaaacctatttttggtactgtaaactattcgaaaatttttaaaaatttacagaaatgatattataactataacgaacaccgctataaaaaaa

SEQ ID NO: 383129 - DNA, 3192 bp, Cannabis indica
aaatatgctaatgctgaattgaacagcagataccatatgatcttgacatcatctcgtgcaagagctagtgttataccaactacattgtcctccatgataagtgttgcaggaagtagaaagataacagctattggagccatatacaggaggaggttcattgagtttaacttttccctataataaaagacaattcatttcagaacacaattttaccattgtaaaacaaatacaattcttttaaaggaaacctcccaagaatctagaatccaattatatatatataaagtactagtaaaagagagaacgattcaatacccttcagaagaaagcaaaattccttgaagaaccgatttgagtgctctggcagctgtagctgctatacaaattatgaaaccaaatagatggaaactcggttcaccctatagccacaaaaacaaggagagagcaatgttaaaaggtcatgtatataaaaacatatgaacatcaacacaaccaaacatttcctataactgtaaactaatgtaactcggacagtgactcttgaccaaaatccatacatgtttcaataataacaaaagctgaaaaactggccacaaaattttcaaaaggaaaataacgaaactcagatgatatttaggacccttcatagaacccggaaagtcccagttttgaggcaatacaaattgtgcaaaaggaggaagcagtgtcggcaaaagatactaatttcagaaaagggcaaatttatctaattaatcgcaagaaaaacacaatcccaatgaggcaaaagaattgcactaggatccactgaaaaacttatcagacactcaggctcttaatgataaacctctaaacttctaaattttgcttctctctcctccaatatcctaaaacaaattaagcaaatattgaaatctatcaaatacaagaatcccattcaaccacatgaaagtgagaaaaagaataacataaaagtaatccaatttaaatagctaaaatctataaccgttactacaataataattagtaaaactgataaatttgcattaaaatagctacaccagagaagatccaaagtcacatttgactcaaattctcaataaattaatgaatacgaatgagaatgaagaaaagctcataccccacttgcgattatgactccggtaacaacaggaacgagagtcagataggtgagccaagcctccctcctaaaggtcataaggtaagcgaagacggctgtgaagaaaggcgtggtagctccaatagcctggttgaaagacacgggcaaatacctaagcgaaatgttcccaaacacaacagaaatgcagaagataaagctgagcgccgcgatcttcatcaattggacccaagatcttatggtctgcatagggaccatcttcatccacgctatggcgatgtagctgagcagagaacaagcggtcatgtggcacatggtaaggaagatcggatacttaaagccatagttgctaagcaagtacttgttgagcaagagtaccccaatgttggaggagtaccatgaggtaaccagaccgatcgtaaacaaacggctcttccccttcatttggcaaggtgggtcttgatcgaacggatgatattccaacacaaagacagatgggtcaaatgttttcaggttctggttgggttgttctagaagggcatggatccgctagggtttgactgagagcaaacgattctgaacattggccaaaccaaacagagaacgccgatgggtatcacagagaaatacaaggcggtctaccatggatctgagaattgaattccatggcctaaaaataagaagccaaaaaattctcgtcttaaattgtattgttattaccctcctcctcccttctctcactttttattttctcgggaaaataaggaattttagagagagaaaacaaaaatggtggtgggtcttgtcacattaacgagctagatcagagctttgaggacaaccgacgaggattttggctctctgcaagtgaagaaaaggaggagaaaataaagaagagtttaaaactatacaaaggtaaacgcgtaatatcatatagccattatttttatttttatttttatttttatttttattattcttattttgataatgaatttattattttccgtattttgtcgttttggttttactattttcccatgtgttatctcccttcaattctaatgttttagagatgtatagtacaagaaaagtatacaaaggaaaatgactttgactattacattcttactattttatacaaatgtttgtttctaaaagattaacaatgaattcggtatttcatcaaaaacacaaagaatttggcaaataaaaggtattacttcgaccaaatttataacctaaatatattctttttttttttttcatttttttccttccttgtgtgtaaaactttattggaaggatttggggctttttagaagtttaaacgtgaatcttgttgttgttgattaatttacaatgataaacttgctatattatgatctgtggttaccttttaaatcccaaacgttataagcacatattagcacaaaataaaactaaaatgtataattaaaaaataaaaagtggacgacaaaagcgtgtacgtgaattgttgatctattattgcatatttatttaagaaataaaagagaaaaagaatatccgaattaaagcaagatcagatgtgattttttttttttcattgatataccaaatggcatttaaacattatagttatttattaagaaatataaaataaaggaaaaggtatgggctgggatgggattctaccatgatttcatgacttggaattgaaattgggaaataggtagctgcaaagctgggtggggttctcgtcaacgaagaatactcaacgcgtttgtttgtttaataaaatagtgatatgtttggcagcaatgcaatgcaacgcaaattgaaaaacataaatggccgccactccaaacactgcctaaacatttattcaattgaatataaataaataaatatgagggggaaaataacaagtgtaaatctgggcatgtgatgttgaatttctatgcggcagggagcggaaccatcctcggcgtggggaccacataactttttttttattatattgccttcggaccctctcctatccgctcattccaaaccttatttatttatttttt

SEQ ID NO: 383130 - DNA, 1870 bp, Cannabis indica
attataattgtaattcgaagcgtctgcctatcttttgctctaaggcagtttatttttcctttatgattttttcacttttttcctgctttttttctgcaatttgcaacgattagaaactgtcttcttcctcaaacaactttgtattttgttgtcttgcttagtcatggatccattaaccagtaagatgaagggtgttatcaatcttgatgaagaagaggagtctgttcttgcttttgctgaagaagaatccaacaacaacaatgatcacacactgctggctcgtgtcctcaccaggaaatcagttttcctgtccacattacagaagcaaatgaagcaacactgggatggtcgtttccctgcaaaaatttcagaaaaagaaccagagttgtttatgatctcctttggctgtgaaggagataaagaaagagtcctgactcaagagccatggcacttccaaaatcaccatattgttctttataaacctactcctctacagaatgtaactccttcagaccttaaattctctcctttttggatacaagtttatcgactaccctttcttagcaaatcaaggggtctagcagtggctttaggaaacattattggggaatttcttgaggtctatactgattctcttaatgaaggttggggaccttttttgcgcattcgagtcaacatcgatgtcactaaaccattgagaagaggaaggaacataagattgcagcaagttaaggacaaattttgggtggaatttcaatatgaacggcttcccgaatggtgtatggaatgtggttgtcttggccacccttaccaaaaatgtcaaactttccttgaacttttggacaatggtatcgaaccagaacttgcttatggaccagaaattaaaggtgcggctctcccatcctcgggttatgatcgatataggactgatttctctaaaggtaatgcctggcctctacttactcgtttggcaagaaaaactattgtcgacaccatcctatcttttccaatccgtaaccaaccccagcctcgacaactcctctatggagaatcttcaaatgctggaaatccgcctcataaagtctcgacagatgtgggtatagatgaaccacaaaactctccacttttagccaacatgaacagcaataggcctctttcttttgcaccagcaactctggctgctgcatctttggttcctaagaatgttcatttgccaataccagcaataaatgatttttctggtgtacatcagcaaaagcaaaaattggattccactaatttctctgcatcagcatctgtggccgatcctttgggcaagaataaaggcatatctgaggccactactaatttgaattttcatggtctgcctattatttcgaagcctcacggtttgcagatacatggtgcttccaaatcaacacttgtggatgaaatctttaccaaaatgaacctaaaaaaaggcacgaacaactcacctttcaacacagtgtcccctgcatctcctaatgagagtgatctctctgatctttatatgcctaatgtcggacagcaagcagggattgttgctacatatccgcctgaaactatgcacactcagccacttaatgtgagatctgctgcaacttcacagcacattcaataccccacaatgacagattctacaatctgtatgcttcctactggtgctgattgtgacaaagagaacagttctcctaatcgtgcgaacaagagacttcctgagaaattgtctttacgcaaaacactcaagcgatgtaggggtcccaaacctatcctctcaacttcggagttgtctaccgatgctgagatgtatcagcatgtttctgaaattgcaacagattcaactgataat

SEQ ID NO: 383131 - DNA, 1204 bp, Cannabis indica
tgatttggtacatgttaaaattctggagaaaaaaaaaatactaattagtcaagaaattatgtagaaagtttaagtaagagattggagatattcaagttatagatgctatgccataccaggagctaatggactgccaattcgagtagcaaaataaaccacttgatcatgcactcatttaaatatttttagtaagaaaatatgctaaatttatgagaatgagggaaagaaaataaaaaatatatatattaaaagaaaagtaatattttgagatgatatatgctttcttttgacaattataaatagatcggggttagatgctcttacaagtcccatgtttttggtctcttagatgagagcttataagtttatgcacacaaaattcaaagattatcatatatgtccatacagctgtaagcatataacaatacatataatattcaattaaaggtactttatacgataaaccactcccaaatatgtatacataaatatagaaagtggaatactaaagtatactgatagtggagaaaagaggtgagtgtgttgagtaataaagaaacaccaccccatcttgatcattttgcttcctcattatatataaatacacatatataacaccatgtttggtacaccataaacaaagaaagtgttatttggattaaacaacattgaaggactcaaaaagaaaaaaagggaaaggtgtaaatagcttatatataatttggagccaatcatttcacaaaaccactttggtggatatttcatgacttgaagggaagtgctctgatcacaatttgatggtacaaggctgctagtgctgctccaatgaaaggaccaacccagaatatccactgcaataataattccaaaaacaatatacataaatatatcaaagactaatatattaaagcttaaaaaataatggaacagagtgaagataaatgctctgttttgcttacatgatcatcccaagcatgttctttgttgtagataagggcagccccaagacttctagctgggttgatacctgtcccagtgatagggattgtggccaagtgaactaggaacactgcaaacccaattggtagtggtgccaatatctgaaaatatacaattcaaattataccatatcaacccaataaaatttaggagttttttcatttttacattttaaaacagtttttttttgtatttttacgtaatt

SEQ ID NO: 383132 - DNA, 2365 bp, Cannabis indica
atttttattttttttttggtatggccagatcccaaaattgttatataatatttctaaacaattaattttcatatgtatataggaccactgctctatatctgattgtctgaatttgctttgaccaaaaatacgaccctcaaaagaaagaatataacaggaaaaaactaaaaacaaacctgacccaaacaataactacaagacagtattctctcctaaactggcatacatatattcttatcaattgtaaaaatccaacttaattagtatatgcttgaagaaaaattggaaacataaatttaataaaattaaatccctttatacattttctatagggttggccttgaccgggggaataatatatattctagatcaatataccattataaatgctcagtataaatatttatatatatatatcaaatcaagatcatgtcaagtataaattggacgtggatgtgaaaacataatgagttccacaaacgtaatgttataagaagcaaaatgaggagaatgaagggccacttagcgttcattgcattattagacattattttgtggtagtcatccaattctcttaacttgttttttcaaagcattacatcactccctccttggccttataatgtattaatgccaatcaaaatcatgaggtgctcactcattttagtgtccttatcctttatgtgagagagaaccctagctagatatatagctcctagctcctaggtatatttgttatgcactgtaattaataacactcaattttatatatatatagtatctaatatatagtatttaatttattttcatttatatatataatgcaagtgtcgagtatagtacagttttataaaaattatttttgaaagagggcaaattcaatatttttggaaagtacagataataattatttagtaaaaatagaatataaaatttacttagaaaaaaataaaatggagatctaagttggaatcttctccatcaataattaaaattgtagtgattaaactatcagtaagatcaaaattatacaataactagaaacacatcaagaacaatggcataaaatttatatgatttgaacagaacaaaaaccagagtaacaccagattttaagtggtttcaccaggctttgcaacctgatttaatccattgagggaacaggccacaaaggctttataatttttattcaatactgatgaaacagtatagctcgagtctaagaaccttcacaacaaacacctaagttcttggagcaaaaatttaactcgatcaacttctctctataaaatctctctctcacaatctgtttacaagttttctaacatgaggcattggtgattcaaatgagaacaaatgagccttagattttgtacaagtgtgatacaacaaagagataatagactaaacttaaaaaataaactcaggttcctcacatattgttgatgtggcagttaacttgatcataacatcgataatccatcttgatctagtaatttcacaataaaaaaaactttactcaatagatcacaaagaggcctcaactatctcctcttatgttcagcaagttcaagtaatgcttgaacttaacttgtgtaactagcttttgtgttgataactattagatttttgccattttatttcaacttatgaaataaaagtatcttttctaattttaccacttatctcttctaattatttaaatactaattttattttaataattataaataattatcaaataaaatacattttaaatatatttattaattagtttcacaaagtgtacaaattaacaaataaagctctatttttcttttttttcttaaaaatgcccaaacttgatgaaaattctcaaataagacagtctatattttcgaattctaattgacttattaaaccaattagttgagcctacacgatgatattatcctacacaatatgggaaccatgtgcttatgtaactaagctcctaataagtagattcgaaatttaccaagtaaatttcctaacttattaatttctcctgacttcactatagatttggaattacactcctgattacatagaagactccatgtaccaaatatatgtatgcattgaattatccattgttacaatttaaatagtcaatgatcctctatagacggtttacattgagtatggataaattaccgtttatccttcaatgtattttattcttaaaacacttagctacttgtaaatgatattttaaaaaactaatataattactgaaatgagcgctctatcatttatcgcgttaagccaagctctaagaaaatcatcgtttcacttttaatagaagctatagattccatatccattattagcgctcacactcaat

SEQ ID NO: 383133 - DNA, 924 bp, Cannabis indica
acgtattttcaacactgtaaattgttcggaattttgtaaaaatttatagagattattaaaaatataacgaacaccgccataaaaaaatatcatgtcatgtattttcagacacagagattgactataagaaactataatagaaggttaacggtaccactactcaattttaggagtaataaatggcgaaaggtaaaagattcatttttgttatcttggcttaatagcacatcaaataagctgtgctactctttattaatatatatagcatcatttcgcagttcgattggaatttgttggtttgccattattccattagagaagctctaaatggatcaatggaacagattaagatgcaaagtacgggcttgcttcattcccctcctcctcatctatttatttattattattatataatattgtaatttagtttaggtgttaaatttgtatttttttttattttaaataattatatatatatatgttcagtcgaatactaattaatggttattaacaattcctcttatcctcaccctaatagagtattagaagtgagaagcctaactaaatggggaatgaaggtgtattagacaaggtgttgattgtattcgaaagagtattgtaattaaacactaataatttttagaactacttttggttaataatattatataacagttatatgcatataaaatacttctcattttttgtcatcataactaaaaaatatcataataccccctatgtcatcattataacaagtctacaacttaaagtattagtcgcaataaattttatcactaacaataatttgtgactaaattaagtgtaacgtccccgcttcaaatttttattgggtccagaccaagtcaaacacgcttaactgtggagttctttcatgatgggctaccgaaaaacaagatgcac

SEQ ID NO: 383134 - DNA, 1550 bp, Cannabis indica
aaaattggttctcatttctgcaaatcaacaattgggaattgggttattcaaccgaaaaatgaaaatcctcacttgtggacggaggaaaactttggttacaacagtatccaaaacagcatacaagttatatgtcattataattggtgtgtttgaagatctcataacatcaacagatgactttgaataagcaaatagtttagttcaacaattggacactctgaacatataactattagattcatcacttcaaaaaattcctctattgtttttatcagcacatacattcaaaccaatgaaaactaatatataattgcacaaaccaatatacatacatagttcactataaaggaaactatagattttaagtaaattattgtgtaaaactaacacatgactataatcaagtctgcattttcatagtaataaaagaaaaatcaaaataatttatagattaagagattaaatccacaagcaaagttacctaacaaacaatttatatataaaatttgagtaaattagctcaaaaatctattctttaactgaactgaactcatctctcacctcacccaaagaaaagattataaatttcaacaaacagttgaataaggaaaagaatcatagagtttgaaacctgcattttcgtgttttttgagctctgattgagaaagaggggaagaaaatcttgagctgttaaccatcaaagggagaagagatggtcggtggacggtgtcgttctgttcgccgacggtatatagtatatacctagccacactgaatctctctctctctctctctctctctctctctctctttcctatgtaatgtttgtttggtataagaaagaaaaatgagaggaaagaaaagtgtttgagaggaaaagaaaggaaaatttatttgtttgtttggttggaaagaaaagaggatggaaaatggaattggagaaaaaaagtttaaaagttttttggtttaatttttttgataggaatgctactgttaatcaattattataatttcttaattaattttcgtgattgaaaacacatgccggaagtaatgttcgttatagttataacattattcttgtaaatttttaaataatttcgaatagtttacggtgctgaaaataggttttaagttttttgaaaacatgtgctaaactggtatattaaaaactttgttttcggtactgtaaattattcggaattttttaaaaatttacaaatataatattgtaattataacgaatatcactgtaaaaaatttgaaaaaatatattccagtgtgtaatttcggacatgaaagctgactaaaagattgtaattagttctcttcatttttgaagttatatgcataaatactagagactcgatacttaattgtatcaataacaatgtgttgcccctgattttgcccaatatacgtggaccaactagacaaggacacgtggatcgaacaacttataattcaaactatttgctaagtctttatgtaataaggcagcatccaggacatgcctcccggagaagacatagggagccccatgcgctccc

SEQ ID NO: 383135 - DNA, 1577 bp, Cannabis indica
agacttgaacaacaattggcagaagaacaagcagcaagactcagggcagaagagtttgcacagcaagctcagaagaattccaatgaggaaattcgtaagcttagagagcatcttgagcttgcacaggaggagctccgtaaaagaggtgaaaataagtgtaacatcctatgaagcagtaatgatttagtaaaaagatatttggttcttcctggtaacgattacttaaaatctttctttttttcatatacttgccttagtaactgttgaaacatatttttgtgtgtgggattttctggcatacaatatcgtctcttaagttaatatagcaaaatggttttatgtttgtattgagactttgaatctcttgtttgagttgtacagctacactatctattttagtatatatatcatttggtggtgttctctgcttctctctcttttcttagtattgggaaattatcatattaatctaaagatggagtacataatttgatatttgaaggaatagaaaagccttttggaatgggggtcatgtttggtttacatcaaaagcagttaaaaaataaagaaaatattatctttagaaacacaatttgatagtgatgaaaccagtcttctctttcaccagctatttcatattgctaattaattatttttgttgaccctatttccaactggggacagtaaagcaaatcataccatagtgtcacaaaatggataaattttgaactaaatatagtactaattcttttcaagctgaattttaattttgatttttttttttgaaggaatagaaaagccttttggaatgttatacgttgcatatatgctgaccaagagttcattttcatgtgtacttgatatttataattgctcaaccaaattatgatatttctgaagttacagccttaataagaatatgataataaatttaggaatattgctgttggatattagcggtatctagtattttttattggtagtattttacgattggttagtgatatttttttaattttttttttagaattatatgagatttaatacttaattacactaataaaggtataacattgagaaagagagtgttagagaccaataataccttttaacatttctctaaatttagagaaggtattgcatggagtcccgatactcgtggtgcggtgctcagtcctcctagaaacaaagtgtcaccttgggaatagtttgtattatttttataataattattaaattaaagagtattgtttatagcataccaaggtatctaagagtatctctaatggtagtattttttaagaatgctaaaaatttatatatcatctaaaaatataatattttattttatctctctttcccattatttttgacactcttactactaaaaacatgaggaaattacactctataccctttttatattgtcttcttttatttttaccttcttttttaaaatctatcatttttacctctttttttaaacattgtaccaattttacccctatcacttcaagatactctccatgtgattctcttatgcaagggtattttgggtacaatacatataaaaagag

SEQ ID NO: 383136 - DNA, 811 bp, Cannabis indica
ttaatttattttgtgtgagatgttttcttttgcagaacgtaattctgtatatcgtcatctacttctaaataactcaaactatcaatattagaaagttaggatgagagcttttattaatgctcaagatgagaaagcatggagagcgaacttgtctggatggtcacctcctattgaaaaatgtgaagatgaaaacacgaaggtaaaatctgaattttttggaatatagagaagacgaatttctagctctattaataataaagctctttactcaatttttaatggtgttagagaaaatttcattaaactagtttctacttgtgtttttgttaagtatgtttggataattcttcaaactcaatttgaagaaactgggaatgttaaacgttcactttattatgttacaaactaaatttgatgatcttaagatgtgataatgaagctttgtctaaattttatgaaaggttatttaatatttttaataaatatttcattcaaggtgagaaattattaattcgtaatcatattaaataaaattttaagactcataagacagataataagtcaccaacttataaataagtaccattgagtgaagtttggccagtacttcccgatagacttatatatgcttcaaatttataaaaatcgccctaaacccttggagaatcggtcaactgacccactaaattaggtatttgattgatcaattgataaacaaaatttattgttataaatttgaaatgtgcctattgtaaagtccttttttggcaagttaggtgacaaaataatttttcctttttatggtaagatt

SEQ ID NO: 383137 - DNA, 1066 bp, Cannabis indica
ataatcgtgtatatataggacagtgtaaatttttttaaaaaaaaacaaattatttttagtaccaaaaataatattcaaatactttgttgtactggttatttttttagtactctatctatttttaagtttttaaaaaatttataagtgatattattaaaacgaatatgaaaaaaaaatagaaaaaatatttcttaaattttaaattaatttttattttaaaattagatatgtggataaaaacttaacaaaagtcctatattttaccattatcaaaagtttgttgctaaaaaaaacattatctatggtttccaaaaattgttagcaaagaaattaattgagcacaatttatagtggtaatagtatactcgagggtgcaaaaatctccattgttaagcttttacaagaaattcaacttagagaaccatatgcatgggactgaagtgtaaaatgaaaaaattgatgataaaatgtgttataatgtatataaatatatatatatatatatattggttactctgaaatgtgttatgaatcttaaaaaacacatttacactatatatatccttaccaataaaaaaaaacaatttacacaatatatattagcacatttattaaaatataattttcatcataataataaatatattaaggaattataatcattaatttattatgttatattgtttaccaaataaaaaagaaaatcgacagcattattttactttatttacatgaatagtgtcttttaatttttttaataataaaaaagtcaaaaaatgtgatcaaacatgttatttttctaaagattctttgaccagtataaacccattatgggaaaagcccaaataaagaggggtaatggttttgtttggacccaaaagataggtccattaacgaggaacaatggagtaaaactgttttgggcctacttgattataggtttcttaatggagtttttacaaaaaattaagtaaaagtttacaattttactgtcacacgaatttttttacaaaaatactgtctttttataaaataattgtaaaacaacaaaataaaacaattaaaa

SEQ ID NO: 383138 - DNA, 3773 bp, Cannabis indica
ttttttttttgtaatgattaatgagctagaaaataatgattaagatttgctgtttgtggcttaaaaaaatttcagcaaattaactagttcatgtgggtttgaacagatctttctcgggaggaggtagcaattgcaaagcgctatcctgcacaaacatcgttgtgcatcagagatggttgggagttttgccgtccagaccatgcagcaggtttgtaattaacagggaatttctgtactattgatcactttgcaaattcagctgtagcatcatcaattagagcaccaataaagttatattgagaatgtcgtgttgagaacattatgtctgctgaggttatactgagttgtgtttgttgttaaatgttattaagctgctaaaatcggtttcttagtagcaaatagtttgagtggataacattattcttccctgtgctactttttcttttcttactttggatattagtttgtattttcatgcaataaaatatggacgaataaggtttgatttccatgcattacatcgatcgcactgcatatatatacatacaaagttgtatatatatttatatgaatactaattttaagaatgttttataagccatacaaaattcagttaaaatacaaatatattgtcttgttcttggtttatttgcattttatgatttactttactagcaacacaaggttagggatggaaatgaaattagttattaattagtctcttttcgggtacctaggatatatcatatattttatctaattatttgaatgctgtatattgtttatgtctgccatttaatttgcatttcgaggtaccattttgtagacatgaaaattctgcatttaaggttattttgcataagagctaaacatctgttactttttgtctgagaaatgctttgtttctgaattttggtatgttggacagattcaacatttcgctttctggctgaacgatggaaagagaatttgcctgcgggttacttggtcaaggaagcctctgtggatcgaccttctgaagaagatgcttgtcactgccactttacgtttgtgcaagagagcactttgagtgttgattcacagctagttttaagatatcaatggtttgtgggtgacagaacaccaacaaatttcactgttattcctgatgccagggaagaggtaattggtttttttggtattgccgatgtttttgacccttttgatgacaacggatcgttcattgtgttttcatgcaaaggtttcctttgtagtattagcatctgatgacatttcaccaattttattcgtttgataatggtttaccaggtttattggcccaagcatggagacattgataaagtattgaaggttgagtgtactcccgtactgggagaagttgagtaccctcctatatttgcgatttcttcacgagtttcacgaggtaattatttattaatttatgcattctttgaaaatgaaaatatgatcttgaagtttagctcaaatagaaaaaagattttttttttcatttgatctgacataaccgtcttgaaaaggaaatggaatcccaaaggttgtgaaccttgaagttcttggggagctagtggaggggaccgttttgaaaggccatgctgtggttgcatggtgtggaggtactcctggaaagggagttgccaggtgagttgtgtatcttgtgtggtttgttggagtgtacgcatgataccatccttggcgagtaacacagatttatgcggtggaaaacttaaaatatgtgatgtgatcattggtgctatcaaggaaatacacaccattgtttgtatagcctgcttagaatgctttacaggcatgaaaataataaagccacgtttctactcactttttcagttggttaaggaggaaatggaatggcagtcctattgtaattgctggtgctgaagatgaagagtatttgttaactgtagatgacgttgattccagtttggtttttatgtacacaccagtaacagaagaaggtgccaagggcgaaccacaatataaatacaccgattttgttaaagcaggtacacagtcaattctcagatgatcttgtcttcttatcacatatccaatataattgtcgatcaatgatgttttcaatttatatgtgatgattacacttttttgagtatatttacatgggtctctggtatatacaatttggacttactagagaagttgcacttatattgtgaaacatgagggtgcttacttgaagttggactacaatgaacatgtcaatatatttgtaggaaaaatttccaaaattggtattctaccaagatttgccaagtttactccagattaataatcattagatgtaggtaaaggagtggacattattttgtttgtattaatcgatgaatgatatgcggtaaaatatagccttatttaacaagagaatacagtttaatatatttaaataatccaaaattctagacaaaaatatctggccatgaaatcagtacaaatttgaaaaaaaaaccagtatgtgataattatttatgtttcattatttcagctcctccatccgtttctaatgtccaaatcattggagatgctattgaagaaactactgtcaaaggagttggtaagtactttggaggaagagagggccccagcaagtttgaatggttacgtgagaatttggatactgggtaagtataacttcttgttctatcaagcttttgtaactgagaacaagttgaatgtactcccttgctgtttaattatgtttctcttttctgtttcgcaaacttgccttctctgaatgtatagtctggcagttttctgttgttttgtttttaggaaaatccaaaaatgtttttgtttttgttatttttgggttgtacgtttctgtactccaatcctacccattgtattattttctctgtattaataatacaagtagtgttgttttgttttggaaaaaaaatcgttggtgaatcacctattttaattcattaaatctctagttttcattttgggtctttgattaaatgatgatttttttcccttttttttatggcttttcatttttcacgaggtataatcttaatgcataactattttgggtgtactctttattttggaatgaacattgtaatcccttattttctcctgatgacttttactgacagagactttgtgttactctcaactggcacatctgagtacgccttaactaaggaagatgttgggcgacgcttggcatttgtatatatacctattaattttgaaggttgtccatttaactttaattgtggaaacaacatacgtttaatttatagcttttttgatgatagcaacaattctggttggtgtgtttttcaggtcaagaaggggaatctgtttcagtggtgtctaatgtagtgaagcaaggtaactcaacacattttttgagttttgcttaatgttttgttatcatttataaaatttaattttagcatcaccatgtagcatactcttcctcgtaattacaaacatttttttctttctgctgagctccagcacctccgaaggtaacaaatgtcaagataattggggaaataagagagaacagtaaggttactgtgactggaatcgttaccggaggaactgaaggatttagcagagtacaatggttcaaaactgtttcttctactttggatggtgagaaagaccttgaagcattaagtacattaaagattgctaaggtagatggtacttccaaggagcataaaatcttaatagtcagaaaaaaatatttgatggtt

SEQ ID NO: 383139 - DNA, 1702 bp, Cannabis indica
aaatattgttatccagaaaagcagtgatgaaaggcaatgtctgattcaaaatcccctttggacacccaaggtcttaaatataccacaagaaccatgtttttaggatagaccttatctctacaatccttcacccattccctctgtcacatctccaccatgaatattttgatttcactataactaagggaattcattactttatttatttaattaaagttttttttttaaaaaaaaaaaaaaaaaaaactttcaatgttctcttgtaattttttttccttcaaaaagttaatatgtctgaacccaattttcacggatattttatcttttataaagttatactcaacattatatgtatattaattagctaattaaggaattttatataaaagcacgcagtttattattttgaaaatattgctattaggggtgtgagttaagctgtccaatactatactaaatgtgaatagttagtaattttttatattatttatcaaattaacatgtgagagatctaatattaaattgcactatacagcacctcttttgtcgtacattttgttatttgcacctaaggtgcctcgtcatttctttgatttgaaagtctattttattattttattttgtatagatacatatgtttaatatataatttcaaaaatttatcaaattttattagaacaatatatatatacattttctaacaaagtatatgaagacaagattaaaaaattattgaaactaatacaatgtgaaagaattttctttttaaaaaaattattagagtaaattttaaatgttaaaatttcttttttctttttttaatattggggtatactttttataatttgttgggattataatgcccatttttttaatatatatttatatatatatgaaataaataataataaatattctcttagtagctccactgttgttaatgcatgccgacccaatagtgatatatattggtccaatatttataagatgtccactcgttttgataaagagaatttattgttttatttatgtttatttcaaaccacattgactcttgtaataataacataaatactattgatcgctcaggctcagctaataacaagggacattaaactatatcaactggtaaagaataggattatatatataacgataacatgttttggaccacgtggcaaccagttataaaattaaaccatgcaaatgaaacgacttaattataaaggttattaagaagcatggatcttcctttggacatatatatacatatatatattctgtgagaaaattgatggagaagtaactaaagaaaatgatctggagcgtcgaaacctgatcttcaaagggtgaagctgtggtttagtggtatttcgctttcgttatctgttttggagtgagaaattgtggggtataaactatatagcaaaacaccataatttttaggttgcacaatatgtcgactgctgcttctatccacagctggtgtctcacctccacctccaccactgtctctccttctaactctcttaaaaataataaacccaccacattacgaccatgcgctaggcttggctcttcttcttctccttcttctcctactcctcctcctagtctcatccaaaacaagcccgtttttgcagctccttctcctatcatcaacccaactacttgggtaatataattaattaattaactaatt

SEQ ID NO: 383140 - DNA, 1868 bp, Cannabis indica
aattaaaaaataatattactaattaagagcttatatttaggttcaaaaatgaataattatgatttttcactaatttttagaattttctacttttattttaattaaaaatcaatttttaataaaaaatcatgtaacattcagaatggtgactaattagtaaccagctgggctggtcacaagtcaccttgtcaaggctgctagtaacagccttgtgtgtgtgcggatgggcatggaaggcccgagaattgaaggtgtgcatctcccaagagactgagatctctctgtcacatccctagtgatgtgcgcgtgagaggaatgaggcctgggggcttcgaggctgatacgtgcgcgcgataggcttccaaggtgagttttgtctgccagcctcgagcttgcataggaagcacccctcaaaaggggtttcaggtcaattttgacccgaaatcaattccgtaaaattcatgcatgtataattttcaaccaataatatctttaatcactaataaggcaaaataaaatatttttcatagaattacatacaatttcacataaaatttaccaaatcataaacaataaacatgatcccattcaaaacatggaataatcattttaaaacatatttaacatgaaaataaatgttgcctaggcacaaagactaattgttagaacttattttaccagaatctatttattattatgtatgtttgattattagcataataatttaacattctaaaagatgatttatcaaacgttaaaataaacatgtataaagttttaaattttttacattgattccatcaaaattaagtgactcctttcattccagcagtattgccaaataatgaacttggattgcttttcttaaatcgataagcgacaaacgatatgatcttccataaagatctaagtaccaccttgattagagtgggttggtgctcaactcattataggactgagagaaaggagagtttataattttgaaattggcttaaggactaaagcttttgttgtcttttgtcagagttaggttttcacatcttattagaaaaagctcgattatattccttatatagacttgtcatatggttagagttagattagatgggctaaaataaaagacatttgagctgaaaaaaatactccatggccgaaatacataatgtgtggcccatggttttgattttttccattttatttcaacttaatgaaacaatatgtcttttttaattttaccacttatcaaatctaaactctttaaatattaacttttaatttataattattaaataaaaatacaatttaaatatatttattaattaatctcacaaagtatcttaattaacaaataattttttttttctcaaaacaactcaaccttagtgaaaattctcaaataaaacatactctatttttaaaatccaattggcttattaaattaattaattgagtcattaaaatgatattattccagataatgtggggaccattggcctcttaaatcaagctcacaataagtagctttgaaatttaccgagtaaatttcctaacttattatttcctctaaactctattttagattcagaatcgcactctaattttcatagaacactctatatatccaatataaacacgctacaaattatctattattttaatcaaactaatcaatgatcctatacagataatctatattgaatagggataaaattactgttttatccttcaatgcattttatcccttaaacacttaactccttgtaaatgatatttcagtaaactaatataattactgaaaatgagtactccaccatttaacttattttaccaagcttaaaggaaagtatcattatgttgggttttatgcc

SEQ ID NO: 383141 - DNA, 1267 bp, Cannabis indica
tctctctctctctctcataatcaagatcaacaatggaatcaaaagaagaggacatagcagcaaattgtgaaagattgatttgggaattgaaagaattgatgaaaaaagttgacaagaagcttgaagagatgattagtaatgagtcttcattttctaaagacacattttataacatcaaaatacacaatcaaattcaagaaatcttcaaagaaagagtgaatgaattacaaacaaaaaacttctctatttgttgtaattcatcatcacaagatcaagatcaagatcatgagaatagtctcaaggtttcatcaaatgtgattaacaagaagattatgcttgttttgttgaatagaaagattcaaaagctcatcaaagaagaaaccaatcatttggatgagttgaatgagttgaaataatcttatctacttaatttttaggatattcatttcatgtaataataatcttcttttcttagtttgatttttgtagagttgggttttgaataatatcaattcattgttattaccttttgtttatgttaatgtaaaatatttgatatttttcatttgaattatatttgattatgttgtcttttattatgatcgattaatacaatatttgaccctttggatcaactcaattcttgtgtggattgacaaaatatattgatattatgtatataaaaaaagggggttatttctttaaaacatgtcgtttgaattttcaaagattatatagtttagaaaaaactacttgtagtttcgtttaacaaaatggcagcattgaaagtaatagagagaaagaaagggtgtttaagtttaataattctatttaaaaataaattaaggataaagtacatgcaaaatgacaagtattttttaatttaaaaatttacatgttcaaagactaattattcttcttattataaaagaatattgccaaagagtattatataaaaatctactttattgaagtaagtacaatgatcttagaatgtgaaacttaaatgatggtaatttgtgtttctaaatgggtttcactttataaatttaaataatggtaattaatttcacattctcttaatctaaagttttgtccaactcaaactcacataacaaacatgcataatttaatagggtaatagtggcataagtacccaaagttttaagtttgtaagtagcataaacctaataattttttttagtggcataagtaccaatgtttataaaactgtaattttcttccagtttcatcagtacagactctg

SEQ ID NO: 383142 - DNA, 1539 bp, Cannabis indica
acagttatgtcaggttaggatacatgtaggatgtcttaagatatacagacatatatatatatatatttatataaatttccatttgtattacctttggctagatgtataacctttacaagtatcgtgtgctagccattgtaacttttctagttgcgcgaatattataacaacaataataatttccctaactttttgtggtcaacaaaatggcatgcactgaacaaaatctaaatactgtatatatgtttttagcgacgtgcttaagatatttgttgcgggagaaagttaaaattattaaaatgttatttcttggtgtgagttctttaccaccacctctgccatcaaagttctgagtaagtttcttgagaggagacttcttgtgtctctagaaataggattaagtacttatgcaggtgttattagacggacagattgtactagcttttgcttgatgatcatgtgtatattttaattagttcgttgtgtactagctcttgctcttagtatggaatatttttgacaagatgtagtgagcattcttgatgagagtactcaaaggtacacatgagatgggaggatgactatatttgagagaggtagaggcgacatgtgcgctacagttatgcgtaggctcaaactcaagggtttgctaacccattgatggaatggaaaaataaatttgagaccgtacaagagctattatttagaaagtatcgaaccaatgatggcatgcatgatggatttgcttcacgaacacatgcacttgctgcttgacttatgaagaaagaatgctggctagagtaagcattcgcatcaacgtgaacgtcttagctattgtgtagagagatttggtattcagatgaaattttaatttattgcgagaaaactagactaaagctgttttagagataagtatgcacaacatacatgaaaatgcaaaaaatgttgttacactagtgacatgtgatggtatcataatcttattcttctcaagtaataaggccagggcaaccttagttttcacaaagggtcatcaatatggtctatatggttggtcagcgatgaagaattaatctttctctctcggttgcttggtctcctatttatttcttgtaggaattgaagtaaacatctcatattatgggtaatatataacaggcacttcctgcctttaaacagattcttactctctagatttcaccttgtaacgaatggaaatctacatattaatattaaatttgtatgtgaatatataaatatatatatatatactagcaaaaaaactacgtgcgaggcacgtatactaaatttatgctagtttttttctatgttatttgaaagtgatacaattaaaaattaaagaaaaaatattattaattattaggtgagattattattatgtgtatctaaatattatattttataatgttgtcaattaaaagtgaataccgaatgcaatatattagtgtttaagaaagcttgatgatttaaatatgttcttaagttaatccaaaaataaattaaaaattgatgttccaa

SEQ ID NO: 383143 - DNA, 652 bp, Cannabis indica
agtaataacatattactgcctgatacttttcttatatatatatatatatatatagacatattgattatattttaaaagttaacaaatagaagtaaaatagctaattaaaaaaaaaaaaagaagaaaaaatgctaatccttatcaacaaatacttgctcgagtggttaaaacaaaagacttatactgaaatttttggattttccaaagctatactttctttcttctctggcagaaaaataataatacaatttcgccatatcgggaatctcacacgccataacccggcccaattatcggtcaaagtccatgtgattaaccattgtctgcttactttttttttttttttttcctgtaatgaccatattcacgtgttcacactttcattaatggttaatattaatctaaaatgagtaataaaccaaaccaaatttaagattgtatcaaattggtccccaagaactaaatcttaagtgggtcccactccacatagacttgtcagagtaacccacagtgaagtatcatcacagacaaacacgttggatcgtgaacaatactttactataaattatattaatcattattcataaacaaataaaacaaaatgtctcaaaagaaaaaaaaccaaaaagaaaaaaatgacccatcgcctcaa

SEQ ID NO: 383144 - DNA, 1290 bp, Cannabis indica
ttttttttttagaaattttaggacaatttagtctaatttaaaaaaatcacgtgtagtagtaagtggtaatcattgttttcggaagaagaggctgcgagtctgcgacatgactatctttctcactctcacatttcactagggctctactcttacatccattcttagcccttggatctgatcacactcctcactcattatttcataccctacaatctcccaagtggtcttttaggtgggcccatagtccccatacattacagtacgtaattaatgttccaaatccaacggtcactccaagcccaatcgctcaaacccaacgcctcagatgaagaattatctgaagcagactgcgacaccgccgccaagttgttgcgcgtgtgcgtgtgcgtcttacctgacctttttcttagtcatactctcccttcgcagagagtcgtcgtgcgtgactcaatcaaatatcaaaagagtcaattattttaagtgcgtgtggtgcacattccttgatagcgagtagtgtttggaaagcaacgtggcatgatgtggtgggtccatgtatgaaagtaagttacagtggtggaaaactaaattcgcttcggacaaattttctggtcgtgtaatgtggtttgttggttttcgattctgtacgaacggttgcacggtggggacgcaatgcattagtttcgtttaattacacatatacccttggataagggggatgcattttcacactgtctgtggtctgaactataaacctcgaaggccgagccttgttgtacgggcaagcccgaatgagcccaagtggtgatttggtttccggaccgcaaatgccaaatattatttaactggacaaagagttcattaagattagctcacgtaaaacgagtaaagggtgaaatcgtcatttgataattactaaggtaaggtaatctcatgtgtcacggggggaccaccaaacttttactatgtacccattttaatggtattgtcttaacattgaggaaaaattaatatttgattttagtggttattttatgtttaaaaccgaaaatactggcttttaaaaaaaaaccaaatatagtggaactgttatatttccttgttagcattaaagagttggcctaaatttatttctaaatgacaataatgtatctcaatgtagggtgaagtaatcattttcgtaatttagaataaacaatttcattaattttaagatacctaattttgctgaagaattaaatttttagaaaataaaattattatattttgaaaacataaccaccagtattcttt

SEQ ID NO: 383145 - DNA, 2050 bp, Cannabis indica
attttctcaaagattgatagaatcatggctaatcaaagatggttagatgcttatccgaatgctgaagccctgtttttaaaggaaggactatatgatcactcacctgggattctggccttatttcccaaatggaaatgcgggaaaaagccattcaagtattacaggatgtggaagtctcacactgagtatgatggcagagtaaatgcagtgtggaatcaacaaatacatggcaccagtatgtatcaaattgtgcaaaagttgaagcttttgaagaatgtatttcgagagatcaatcagaaaggcttttctgatttgctagcaggtttgactcaagctaaacagtctatggaagttgctcagcatagtctacatgcagatccacttaatgaagagttgcagcaacaagaacttgtctctagaaatgcttttctcttagcccagcagaattattcctcctttttacagcagaaagcaaagattaattggcttaaggatggtgacagtaacactgcattatttcatgccagtatcaagcaaagacatagacaaaatcaagtattctccattgagaatgaatctggggtgcgagtctttgaaccagaacaagttacagaggcttttgtgtcatactacaagtccctcctgggttcaaaaatggcaagcagaaagactgtttctaacaagatcctaaatagaggacctagagttacttctgaacaagctcaattgctctctagtccaatcactaaggaggatgtcaagaaagttgtctttgagatctctgggaataaagccccaggtccagatggtttttcaagttttttcttccaagacaattgggacctggttggagaggatgtatacagggcagtttcatctttcctctcttctggtaagattctaaaagagataaattcaacaatccttacaatggttcctaaagtaaagtgtcctaacactgtcaaagattttaggccaatagcttgttgcaatgttatttataagattgcttccaagatattgtgctctagaatcaaatggattctccctgatctgatttcaaaatcccaaggaggtttcattcatggcagatttatagggcacaatattatgatctgtcaagatcttgtgaggcactatgggaggaaatcgaacaaggcaaactgcatgatcaaactggaccttcagaaagcttatgatacagtggaatgggagtttatagaggagatgctggttggacttcagtttccttcccttttcattcaaactgttatgaattgtgttagatcccctagattctctatcatgtttaatggttcggctcatggattctttgaagcaaaaaggggattgagacaaggagatcctatgtctcctttgctgtttgtgcttggcatggaatacttatctcgaaattgcaggaagttggagacaaaaatgacttcaattttcatgaaaggtgttcagaattgaagattaatcacttggcttttgctgatgatgtcatgctcttttgcaatggagactttaaaagtattttctacatgcttcaggggctgaaattgttctcattaacatctggtcttcacccgaattcccaaaaatcagcaatatactgcagcaatatgccacaggaggaggttagtagagttcttttagcttctgggtttacacagaaagaaatgcctttcacctatttaggcgttcctatttgtgctaaaagaatttttggaaacgaatgtattgctttggctgaaaaaatgacagcccgaatacgaacttggagctctaggaatctctcctttgcagcccgagtaattttaattaactctgtgctcctttctattcatgcttactggtgccaagtgtttatattgccaaaaaaagtaatcaggcagttggaatctatctgcaaagcttttctgtggaaaggtcaagctaatgcaacagggccggggttaattgcttgggaatccctttgccaacctaaagcttctggaggtcttgggtttaggaaaatcagagaatggaatcaagcggccatggggaa

SEQ ID NO: 383146 - DNA, 1300 bp, Cannabis indica
tacgacataacaaacttaacaaaatccttgtaacataatctccacgacaacttaagttagagcgcttctggatgagacatacgcttcctggaaggaagaccagagcgtacgctgaagggacttctgggataagaaagacgaaaattagagtcgactatctggatttctcttccaagtgggaataactagtcatgcatccgaaaatcctttctggaagaagactaactttccctaaaaacaccttccagagtggacaagatagacttacaagaacacatttccggatgacttctaacctccataacaagaacaacttttaaagacatttatatttagagaaactatatcacagtatgcttatatatgtttgtggcaaaatacaatattattaaaaataatattgaaattggataatttaggaggataaaaataaaatgtaaaaattgaaagtgtacttgtaagttttttttggcacaatagtattgtgatcggtcgagttcaactatatgactttaataccaacttaaacatataaaaaataaaaataattaaagagagaaaaaaaaaaccgattggtaaccatttaacatttaacaaattagagtactgtatttgaaaaataaaagaaggatattaatatatattaacataaaaatatttacatgaagcatgacagttggttaggttggctctaagaaaataaatattttattattgtaaaggtcataatctagcactttttgacataaagaaaatttgtttgaaactttcacaattagtatcttcatattaattttttgtataatgacaaagagaataatacgataaaataaaattaaatataatataaatacaacatatatataccaaatcaattaattataatatttctttaatacttttcaaaaaaaaaaataataatatttctttaatagataaatgtatattataaaaaccactccaatattgtaaaggataattccatgatgagaaatcatacttgaggccagctgttttttgttatattgtttattattcttaagtttatttatcactagattctattctatattcacgagtggagtgactatttgtatttgcatttcaatataaaccatatatatttttatttcttttgattaataagtttcgagaataattgatgacattatatgaaatgtttattgtgtaaaagattactttgtaacaacatatcatattttattattggttacaacttacaaccaacatataagggattattttttttttttgaatttattacttcatcaataattaa

SEQ ID NO: 383147 - DNA, 3813 bp, Cannabis indica
taatcaacatggtctagccaaaatgatcaatgagaaggtcaaagtaatgcaaccatttaagataaaaataatatatcagaaaaaacatgcctgtgcacagtaaccaagctgcatatctagaccccaagcatgaatcaagtcattctgcaaataatcaaacaagaaggtcattaagtcaaaattaacattcacgattcatttattttactgattttacataagaagagttgattcatggcatgtcattgtttttcttttgttttgaaattaggcactctctctaatcctacactattttgggagcataaaagaggacactataataaatgctatgttagtacccaggagggactcaaacatccgacctgggagcgaaccacaagcctgagcgtttgagctacccctgtcgggtgattcatttcattcataaaacagaaaagaactcacttggatcatataccatacacaacgccaagcagctcttgaaaaaacaggggccatcatttcaatccatctgcaacgaaaatcttcatttcatattatggtgtaaatgaacttatactataacagcaatacttttacaaaatgtacaaagaggatccactaaagttatttcaggaaagaaaaaaaaattcctatcttggttagcaagataacactattatgttgtagtactagtaagtctgaaagctgaaaatttacccagtgcatggaggagctgtactgctgccatcacaacctttcccactttcaccatgcttgtaaattcttctgcagacacaaacagtgaaaaacatgtaagccttcatactagagaactaaactacacacaggcattcctctaaattggtcaaatggtggcattaaataaccgcagctagaaatgattttaagcttaaaagaaaaaaataatcactctctgctacttgaatcttgaataattccttgtacacagtaaatagcaattatctgacaatacatatgaaggtaaaaccaaaatccctgtgaactttttcatacttttcttcacataaattttattgtctaaaactaaccatgttttcaaagatggtgtccttgtgatttgtttttgtttatcataagaaggacaacattcctttgtgccatacttcttcaaatgtagctaaaagttacaaaaactacaacttgccacgctgataatatggaattgttatcttaaaacacaaaacaattttactaatacctgtggactatcttcctcccccgtgcagtaatttgatgatgcagctctactgatttggctggatcaagtgcaggctgtgatatctcaagcccttcactttgaacaatagatatatacctaaaagattttaaaagaaacatcaactaaggtgttatttttcaatccttaatgcaactaatttaatacaaatgtaaagaatgcatttaaagaaaaagggtttaaggaaattttatgtctgaacttcgggtggtagctaacatgtgataaaagagtgagtttttaagataaaagatatgcaaccctcataatctggatatggtacgtgatatagagcattcataataggaaatacaaaaacacaaatgcataaacatgaggtgacatgacatacctttgaggactgaaactttctaccccaaggtcctcatcccaaaggaaaatgtagccatattcagccactatatcaggatgtaagaaacgcttggcgaaccacctagcatcaatggcatcatcacacgataaatcatgtttgaaaactgcagcttccattttaataaggttagactaaaagttgagacaagtaccattttgtttgattgattgcagatacatgtaaaacatggtcacaccattcataactcttccattcatcaagtttaccatcataatggaagagcattacagcaaaattattggatagaaactgcaaaacaatgtgtaaacaggaggaatcattcacttggatacagaaagtataactcattaattttagagagcaaaaatttgcttcatacctttttaaccattttattgattaaatccttttgttttatgccaacagccacagcaaataagttaaccttagcactttcatttttctggttgaaaaaggttgcaaatcagtattgacaagaagccttgaaaacacatttagaattctaatacttatagcaatcaatggactagaataagtcatctaaaatcatacctttggaaaaccccacaaaggccgcatttccaagtttgaagtcttggatacaataccttcgggtaatgcctcactcccattaggtctacattggttctaaagggacaaacaaatgtgaataacaacctcccaatatttatgtacattaataatttatattgtatggaagaaaacacaccttgcatttgttgaagttaagattatgtagagtatcagtcattccccatattgataatttctacacagaagtatcaaaagagtcattacaaagtttgagggacttaactatagaccagattctaagaaagtttgatcttatatttacattaaaaaaaaagtacaaaaagatgaatagaagaaataaatacctctttgtagattggtgctataaaagcattccctaataaaaaaactagacatagcaaagaagttgcaggaacaaggctacaaaagcaagacctcctactgtgtgaatcagcaagtaaagatacctgagaagaggagaaagaataaaccaaaagccaaatttaactacataaacagaacttttcaatgttatcttgcaaccccaaaagtactaattctgtaaaaaattcttatgggtactgacaaaaaagattcaataaccaataattgaaattaataagaggaaatgcaaagattcaggagagggacaatatattgcttgctatttatgagaacacaaattgttcaaattatgcaaagaataattatgttcaaatgggtaaggaaacttatgagtgaatgaaaataaaagagcacactttcttattgatgagtatatatagctttaatgtaatgccgatcaatgaaaactcaaaaacaatttgaagaaataacctaagcctttgtgtacaattacagcaaaaagaaaaatactttatcacaacttaagctgattggttttgtctgttaaaagtcataatgtgctggactcactgaaaccaagaaagtaaataaggatttattagcagcatcgaaattagtgtacttaaccaatgaagcaaacgcatgcaaaacgtatctatctctgtatacaaatgtaaaaatatatttatgggatttaggaactgcttttacataaattcttgttacaaaaggcagagaaacgacatatctgaaacccaacaatataatttatacgtatagatatcatttgtttggtgatgttcggttattaaaaatctaaactttaactaccaaagaaaaaacaaaaaacaaaaaaagagtaaaattggaaaaaagacagaagaaagatgaagatgggtacttacaaaatcaggagacttcatttgattatctgaaactgccaagaccccaacaccgaacaacaattactattactattataatcaatatatgcccaacacaacccaaaaacgtgttctttgaagcattttcaccaatggtcgaggattacgttactgggcacatatcaatcatcacaattatgtataatatattcaaaagaaagaaaaaaggaaaacgtggaacagatggagttggagagagagagagaaaagaagatatataattgtaaagagagagagagaagagagaagagagaagagagagagag

SEQ ID NO: 383148 - DNA, 1669 bp, Cannabis indica
atcatttaagattaagaatttaatgtttctaagaaaaatttagagactaatttactaaaaaaaataaaatttaaagacgaatttgctaaaacttatataatttaagaatcaatttacaaaaaaaataaaatttaaagagtaacttaccaaaatctagtttaggaaatataaatgattaatgcacctataattcttattttaagtaaataagcatgcattattaatattatggttaataatagcaaaaaatcttcactaaacaaagaaaaactactaaacataaggcaagatcatcaaaatatttacacggctaataatatttccaaagtttcctaatttaactcaaaaccaaccaattttgtacaaaccaaaatcaaaaaacaagaaaagaaattcttactttcattatcttcttccatattacttctttgttcatttttcttcttaattattctctctttccaaaatcaaaataacaacaatggaggaacagctaaagcttaaaatcaagctcaagctcaacaatggcgtccgaccaccactgttctcaaactcattcatcatcttcttattcttcattctctttaactcatcaaccgcattttgcgtaagccgaaacaacacactcttcggactttacttaacaaaatccaaaacggcgtcgtcttcttcctctgtttcaaccccaccaaaacagaatccaaaacttccgtcaccgtcaaaatctcagcaaacgttttccgttaaaccaaaccctaaccaacccaccaccaccaccgacaacgacgaccccaaaagcaacgactacatcttctcacgttcatcatcaatgccgattcccacacagccaccaacgacaactccgccggagatcaagaaaatctgcgacaacaccgattacccttctctctgcgttgcttcgttaaccccatttttgagtgggagagggaaagcggagccgatttctcttctgggtctggctattaaggcgacgactgttcacgccaagaaagctctggccatggcgtcgaagctggcggcggctccgggagcgtcgaagggagatgtgatgtcgttggagagctgtaaagagatctatgatgatgccatttctaaccttgaaaatgctaatgaagcggtggggagtcgagatattgggacggtgaatagtatgatgagtgcggtggtgactgattcggagaattgtgaagactcttttgatggagattcgccattgtttaagtatgatgataagcttaggaagatggctagtaattgtttagccattgcttctttaatcaattgattattatatatttatatatttaatttatgtatggtttagctaataatataatataatatatacatgtttttgttatttagatttttagagtaattttagtactatgatttatacagttgtttaatatgagaaatgctaaaaacaaatcggttgctttgctcctaatttgtatttttgttgttgtatttaagtatcaaattctacatcaattgaataattgttataaaaaataattacttacataaatgacatgtcttgatattgttttgggtaaatattattttaaattctgtctttttgtaaaatttttaattaaatatttaattctgttaaatgataaattaaatattatatttttttttt

SEQ ID NO: 383149 - DNA, 1352 bp, Cannabis indica
gcgaataccaaagtatataacccctaaagcttggaacaaaatttttgctgttgaaaacttttgtaagagcttgtattctttcttcaccgaatcctattcacagagtattttttatttttctcttacttttaaactatccgaggaagcaaccgtgtattaaaaaagaacttttaaaccaaaaattcaatatttgagttttgagacagcaactagcaatagatttccaaatagttatatgttttaggaaccatctaagagcaaaagagaaattaggtccaaaatgacatgatagaatcttatatattacagtgtctatttaagtttaattcaaccaaagtgatctgtaaaagtctgaaacaaaatgatacttaattggttacagtcaagtgttgtcttgagttgtgacttggaatcacctcttgtgttatttgtctctgaatgtaaacttgttcttcaatagtacagaataaatagcttccccttcccctcataggagagctcaaatcaatataaaatctatattcttctttacttttattttggccaaaagtttatttctttgtttttaatcttaaagaacagcattgaagtatataaaaaagagaaattaaacgtcatgagccggctaccatatttgtctgtatatagtcatgtgaattattttgtcatttcaagcactatgccttttcaaatgtgacaaaaataacaatcttgatcgataaattaagcacatattacataatacatatgtaaccattcattacataacaattaagaaaggccaaatggcctaaaactcatatttaattgacattgacaacacataaaacacatacataaaatgatgtattgacctttaacatatcaacaatgccaggaagccgtaaaggaaattacaacacaaatactaacaaaatatttgagtatggatcaaagtggccatcaacataatcactaaacaaaacacattataatagtttatagtacatattttatatcgttatcatatcaatggaggatttcatgtagcacttgctactttgctgaagttctatgtagtccttgtacgacatgccagagtacaccggagattggccttccctctctaatagctccggcaatggcacaaccaccgtgtccaccgacggtccatgtggcactgctatggagatccttgtcttcgtgttgttcaccacagctctatgccgtacactcttgtatttaccattggtcaccacctacaatacaatacaagaacacattatatctatagtataataaagaaacattgttacaagtcattttttttttgaaaacaatgacatgttagacttttatttgggcttacatta

SEQ ID NO: 383150 - DNA, 3456 bp, Cannabis indica
aataataattctccataaaaccaccaatcttggatctaggagaagtagaagtatccagacttattttgcttagggctggacttcaggtcaaaaaaccagttggtgttgtaggcggatggctggccgaatccttgagaagcatacaacccaaataaggtatacaggtatttaatgcctttaagagtgaattgggtcagactgagatgatagtagttgacaatctccttaaagtactgatgcaacggcaacattgcaccctacttggcatgaggacccagccacgcataataatcatttctagggtctgtttccagctgcccaggagaaggaaggaaacattcaacccgcctaaggatgtcttccataaagagaatggtcaatctcttgaacgttaggatggatggtaaagaaacccatcgagctccccttggatctctcctgcttatagggcaagcctcagtgtactcctcctctacgtactcttgcccagcttccaagacttctcccatcttagagacatgttctccctcttcattgaacgcaccaaaaggcagcatccggactaccccctcttcctcctctccactcttcttctctagcctcgaatggagtagtagaacggacctcgccctagtcctcaatttcctacacctcagtatccccattagtaatattcttttcctcgcctgtaggtcgggcttgttccactccagctgcattgaacaaacaggcaatatgggggtcggatgctaagactttctagtggtctgctttgttcgcaccattattttatgcctagacagaactttgtcagaagtgtgccttgcaacagtcacaataaactcggcaacaccatattggaccctgtatgtccaattagaaggtagataatgcctccaacctttctttagttcctaaatgaaacactcgtatccctttccatgtatttggttgggatacaactgatgctgcacctcaggctccgaagacactgtgtcctcactgctcacttcccaatcttcaaagctagaattcgagagattattgctagacgaagacgagcttggacagagtcgagggtggtctttgtataaaagttgaaccaagtcctggtcaatgtggtgcttgcctccccaaaaatcgttagggttcatctacaaaaggtgggagataagaaaataagagttggtaggagaaagggatgaaaagaaagggtttcactcaaagttggaattcttaatcccacaagttcaaaacttcgattggtacatggtattttttagaatctcatgaacgagtgtaaatgaacaattttaagtcaaaattgatatggaatcgaataatgagacgttatagttaaacgttagctaaagttttaaaccctagagctatatattctataattagtcaagaacaaacagagtttatggaaagaaatccatagataatacatatatttatttgcaatcatgtaaaagcaaagggaaaaatgacttactcactgtttgaagctttctcgatctgcttggacgatagcattaggggttttccagcatgttcttcaaagatttgagaaaattttgggcaggaatttttactctggttctttgagagtaaaagtgactgaaagaatgcccaaaagctttaatcaccttttataagcaaccaagaaaggaaaataaatcattttaaaattcaaatatttaggtttctctccaaaagtgaatgttagtattcattacaaggagtacaaccatcacacatgcactatcacttagccgtcaatgtgtgatttgaggtagagctttcaagtgatatttaatgcttagacaccgaagagacccttagtcaaagtcatgttagatcaacctcaaccgtcaaagacacgcgtcacccattcggacaagattcctaacggaatgaagtccacgtgcgaccaagaaggtctggcacagacttaagggcaaatattatcctattttttgtactatgatgtggcactgagctggatgacacgtgtctcatattttcctaattgggcagaaggttatactcctaacagtcaccaaagattagtagaatggtccatgttgtctgcacatagcaggatgtccgagcagagtcacctagggacatttgactaaagctcaatcaggtgatcaactcgcatgcaccggataggatgtgcgagttggaaatttcaaagataggcatctttactttcaagacacgaagataatccttacattcgtgggattagattaaagaataaagacaatgagcctcagttttccattctttgcattgtaattatggaattaatttagtttcttattttatttattataaattaagggaaaccattcttcaagtaataagctcctataaatagtggttcaatctcactattctggggacaaaaatttgattcagaaagaacactcaaaagagaaaagagcgatctaagagagagttactcagcgatccattgtaagagttttagagagagaatacttcattctttgtctctcaagtcaatacaacaaaaatgagagtaggctattactattctcacggggtcaaacttctagaaattttggtgttctcttatttcttttgctttctattatttactttatctaatcgttttatcttgattcaatgtcgttggctagaagcgaggtcaacaatgactgatcaaaaaatcattcccatccacaaaaaaattataacaaaactattaaatattagatttttatcttattactaaaatctggccaccacagcaacccccaagaactcacaatctcaacaagttaaaaccttaaaaaaattacaaagtaaaaaataatgcaatgtaccagaataaaattattaaatatcaaacttttactttaataaatactgagattcaacgtttttatgtctaaaatctggttgtcaaagctataaccaccacaatccccaccaacacactcactctacacttaaaagactaaatattatcattctaataccagtaataggttttttggtatggaaaatgagaaattttgcaaagaaaatagtggacaaatgagattttggggctgaagaggcgatggttgaagagggttcgtctgagtattttgagagaaaatgaacttttgctaaagaagacaaagtgagccttttggtctcgctgaaggggttttaagggcttacaatgatagttattatgtaatacctatcgtcataggggacacgtgtaacgaatcgcgtaataactgtcgctataggccttcaacgcgcgtatcctttccaatcggcttacaaaaataaagaaaaaaagccaaaggcatatataataaggtacttgttataaatattattaattatgtggatgtccaaatctttcaccattaatgtaatcaacattccctttttcttagtttccctttttcttagtttcttaat

SEQ ID NO: 383151 - DNA, 634 bp, Cannabis indica
actaaccaaggaggttctatcaaaattcctacttaacagagaagacatgaatgggaaagtacatctagacctcaaaatgatcatgcatagatgggtgtttgtgtgtataccagtaaagaatattttgtcccatcgatgttgcaagagctgttctccaacatctgagccgccttggataactttgacagctttaccgtcgaggtagctgggcatggtatttgctagaataaaagagcaagtaggggacaattctgaaggtttcagaacagctgtgtttccagcagctagtgctcctatgagaggttccaaggacagtcctaacaaatgaaataaattaatgttttagaaagaagaattaataagagctttcaataataaggtttctatctagttttgtcttgctacattttttctttttcacccaccaaatggaaaattccatgaagagaatatgagaaccagaccaagaggctcaggaaccaattctgcggtggtcagtaatgcaattgcaggtagtctagcctattcacgaagcagtaacaaatataggaattattagtataaatttgataaaaattacaagaagtttagtcaaagactgataagaaaaaaatttatcatagagtaccttttt

SEQ ID NO: 383152 - DNA, 2825 bp, Cannabis indica
aatgattagtctattcaaatggctattggtaaatggaaaatgttttagaaagatagttattaatccaaaccacatcgttccctatatttctcttagagaagaaaaatacatgtttcctcactcatataattaataaataacatactttgaaacctttattccaaccatgtatatatttagatttttattttatgaaaaatacaaaataaaaaactcttaaaaattgggatgcctactttttattttttactttcacttaaatatgttgagaccaacacaatatatgtgtttcttttttattttagacaaatatataaatatatagaattaaaaaaaaattattattacatattaccctatttctcttttctcatcatcaaagagagtatcatactactttgtttaacatggtgcttagtttgaatctttattatattggcctactatattcttgggttatgtatttctgtagtcaaaatgctaaaagcaatctcgataatttctttacagtatcctttaaaattaattaattactattttttaaaaaaaacttttaacattatattatacattattttttaaaattatatcactaaattatttttttttttcagttttttaatatattttatttatttcaaatatataatatttatatacaaatattaaaaaaaaaataattaaaacctaacacaattaataaaagagtaaataacatttttgctcttataatacaaaagtcattgatcggattttttatattttattaaaaataatacaaaataatatttttagtcacaactcaaaagtgtgactaattataaatcatataattcatatgttactaaaaggtctgtggctaaaggttagtcacaaaaattataattggttgtgactaaaaatatttttagtcacaatacttgttgtgactaaaactaaattagtgacaacttgtatctaaatactatgttttagtcacaagtaacatttattgtgattaaaatcacatttcactattggttttttctgacgtttttaaacagtcgtttaaagtattctcatcggcttctataattgttgcctatacaaccgtcgcaaaacaagtaaaataggtaactgttaaaaaccatcgctattgtggacttcccgccggtttaaaatcgtcgcctataacagagtataggcgaccgttttaaaccgtgtcctatactgtaggcaactgtacacataactacaatgtatatcatttagttctatatataccaaaaacaataaatatgatctctatgcagacaaagtgatgtccctatcttaaaattttccaatatataatagtaataagccaataaggataaacatttttatgtttattagtaattttcaaaataggtatgtttaaaatcgatagaagtaggttaaaaatttaaaattatttatgtatatatacaatatatatgtttataatcgatagaagcactcgtgaaggattctctttagattaaactcgctaccacttcaactctattcaagtactttggtatatatatttattagatattagataccaatatatatatatatatatatatatatatataaacatttatataataattagatgttgaataatttgtatatagaaatgaatgatcaaatatacgtgccatgatcttgtccatgcctccaataacttgccccgatagccatctaatagttagtatcttcttcattattattattagttaataaagaatatgttacgccagcttttatatatgatataacgacaacaacaaaattcaaagattattattatgatatgtattgataattgagaagttaattaatagagtaaatacatagtttattatttatatataattgtatacttacgtagttctttaggaaaaaaaaaaaaaagaatgattagctatagtagttaataatacgctacaaacaaacagcaactgcaatgaaattaaagtttaataaatataattgtatattgtatagctgattcctatatgaataaactctctatatatgtagaattttggggagaagtactttctaccaattatataatcttatatataaaattaggtacgtaacccaaattcattgatttttaatttgtatgttatacaaaaacaaagtattacttgtgcccaaattaggccaccaaaagtatagctttcatttatcaaaatgaagagaaagacgcggcatgtaatgtgtatataatatatcacacattattattataataatttataagcgtaggacacaagtcatgtaagagaaggcaatatatgggtatcatatttgatgaattttcaataaaagaagtcaatattattagtacatatatatataaatatatatgcccttcaatgcaatatggaaaagatgatcatcaacactttcagcctcctttttttctggagagcctaattcatcatcataaccatctgaattgcatcaaattcagcttcaccgttatttaagataaagttttaacccgaaaaagatgcaccaaattgccagagcactactacaaatttaaacagacgtttaaagtatttctgtcggtttctataaccgtcgcctatacgaccgtcgcaaaatgggtaaaataggcgacggttaaaaatcgtcgctaatgtggacttcctaacggtttaaaactgttgcttataacaggatataggcgacggttttaaaccgtgccctgttattgtatttttctattacaataacaactaactttaaaacacattaaatttatacaataacaaaataaatgtatatataataaataaata

SEQ ID NO: 383153 - DNA, 2407 bp, Cannabis indica
ggcattaatttatatactaggctaatcatgaatagttttataaattaaactacaccttaaaaataagtatatgtaattgtaagcaatattttgtactaatttaaaataacttcatgttcgttgtaaattaaataaaaaatttaaaaatctcttacttatttttaatttagctctcacatcgaaaataataacgacgtcaacttatttgtaaaaataagggtcattccactagttatcatttggttattaattataggattaaaatatttggtatcagagcttaacacttcaacaaaaactaataggtcctaaataaaatcttcacaaagaaaaagtgaagaataaaactttagattaaaaaatcaataatatcatataacatttaaaatatgaaaatacaatatattaataggaaatatctacatacactttatatagtcaatcacaatttatacttattacatattgcttacataaatcaagcattagttatcggacataaaagttcaaaaatagtaaattaaaaaaaggaataaaaataatttgaaaaataaataaaactaatattaattattttgatgttacaataacataaaattttaatgtaattttccatttggagcataaattttttaaccaagaataattactacatgacaaataattatacaaggttaccaaagagaaataataaaaaggattctctctataaattttatcaccatccataaatgtaatgtggtataatcatatagtctactttatataggtaaatttttaatcatacgattataatatgggcccatcattaaaacggcgataattaaaattggaggcctttgtagtcatatggagttaatggtatatggcaattcttttaacataatatatatttttccttaaaagtttaccccttagacccacttttaccctataaataaaagacctttctctttcaaacaagtcacagaaacaaaagtaattagcagaatacgagtgttcggtcattgaatctgttttctgtaagtcttctctcaaaattttacttcgtttcaatatttattttattcttaagatttggattttattataaaatcgtccattaatggtggtatatgctttggcaaatagtttatcttaaactcgatctttagtacagacgacaatctatcttcttcgtcttttatacaacaaaatagatattttattcattaaaaacatatcacgttttcttttctcacaaagagtaccttttcgtacaatactaaacccgagaagatcaaaagaagtgagatctagagaaaaactattttttagtaaaaatattatctttcgctcaattttcaccaacccttcttcacatgtatttcgtagattaatttattatttctcatcaatttttatattatcgatttattctcattattttatcaaaaaatctaaataaaaaacacaaatccaagtaaaaaatgtatatcaacatactctctccctacttataatattattcacttatatagatctttatattctcactcatgtattttatttcattctctcctttctatttttttaaatttttttcaataaaataaaatataatgttgagattattgacattgatatgtatatatatattgtgaaaattcaacagatctaatatttatataataatggataataataataataataatggtagttggagttacacaaagcaatataagatgatccaaaaagctttatggagagaaatgggttttggctatgttgatcttactcttcgattaagcttacctggaactcatcacaataatatccaatatgattttcaccaggtatatttaattttattttttattaaaaaaataattatgtgatgtgtatatatatatattaattatttttgttctcttgtttattatgattttcaccaggtatttaattttaattattttattaagaaaataattatgtgatgtatgtgtatatattaatattgaaatatattaattatttttgttctcttgtttattattgtgatttccataatagttgttttttgattttaatgtttgtttgtattttattcatatactcattttaggtatgtctatggttcaatatttgtatgtgtatttatttatttatttttttttttttgaaacagcaatatttgtatagtataacttttggcatttttggtaaaaaattaattatatataatttatacattacacataaaaaagaggaaattacactctatacccttgttatattgtcctcttttatttttaccctcttttttaaaatctatcatttttatctctttttttaaatattgtaccaattttgcccctgtcacttcaagatactttccatatgactctcttatgtcagggtattt

SEQ ID NO: 383154 - DNA, 1635 bp, Cannabis indica
tttttttttttttcaaatatttatcatgcatcgaacttaaaaacatgctaaaccaatctaattaatctctataagttgcttaaacaaaaacaagaaagacatgtccaaaacattaaaaaattacacaaaaaatttgagaatttatttatttttattctttttatgtcaacgaaaagaattggagaattttaattattttgaacccaaataataatcccaccaaatgagctgagcatatatatagttgggagactgtaatgcgtatattaaagagaaagacaagtcatgtcttagagggaccaaaaaaaagtaactggtccctcaatattttctccatatatatatagtccagtagatatacgtgatacagggaagaagagatatatatctcatatattttgtaatggacctaataatacgcatacacaagataaaataacaataaatttggtataaatgattaatgcaaataaaaggaagagcattgttattaggcacctgtagtgtctagcaccttttcgacatgtcgcgttgtgattggctagcgatactccctaaaagttattatattgaattatatgggatccgatacttaattggaccaatagcaatattaacacataagagagtactaaacaccactggtatcctttaacatttctctaaaaggaatgaatgaaatatcagtgaagagtactgtagcacagctgagctgaccaatcaccttcagtctttatccattattttcagggaagaaattaaagaatatctcataaagatgagtgggttgaaaatgaattgactatgtattgaatgttctcttctatatgtcatgttatgtcattctatgatttttttttttttttgttctcattttcttattttagcttattcaagtactactatatatcaatttagatattttctaaacatttccatggttgtctcacactccttagtgtatatcatttttaatttttccttgttatttcctagcacagcctttatttattctcttttcctttacaagcacagtctttaagagcaatcaactctctagctaaattaatttttaaaatacttcactaaaattttattttttttttttattttactttatacatttatattattttcttctctattttttatttttcttcctttatatcatttaaatagtataatttaaaatacattactaatttgctagagaaataaagaaaaaaccaaaataataataaggcactacaagaattttgtatagtaccggcagagacatccgccggtattaattgtctaaaccgccggtaataattattaccggcggaatccgccgttaattatccgccggtattaattggtcgctattaatgactattagcgaccaaaagggacttccgccggtaataatattaattaataggggtggggtccgccgatattagtgtcagcacttttatacgctgacacattaataccggcggaccacatttagtattccgctgatattaatattttttatataaaaaaaattattatttttaatatttatataataaaattaattataattatatataagaattattttataaatatattattaattagaaatcaaacattatcaaacattaa

SEQ ID NO: 383155 - DNA, 699 bp, Cannabis indica
ttccaatcaaatgtcacattaatcttttataaaaagtaactaaaaaaataacaatacaccgctacttatttagcactccattataaatgtttagaatttgaacttttcgacttccaccgtttaattaacttattttactggaaaaacaaataataacatttgtccacaagtaattggaatatttttttctttttaaatttttttagaggaaaataattggaaatcaagcctctctgttatgaaaactttagaagtttttaaggatttagactgtgaataaatgacacattacaatgttggtgacttcttacccaaacatatttttttaatcttttccttttatttctatcaccatttatatttatatatacgataaaataattgaataaaaatatatttaaaatataatatataaattacgttgaaaaaataaaattaatttatagcataatataaaattttgaaaaaagaaattgttttgtgtgtgatttcaactttaaaataggtaaataaaatattatttggtggactcaagagtaagagagtggtcttctttgaagccatcacaaatggtagttagattaagtgaaatattaaagggtataattatgtagtattattatattgttattttgaaaatttacacaatccacataaaattaaatttctttttactattttatgatttttttttctttt

SEQ ID NO: 383156 - DNA, 1399 bp, Cannabis indica
tttctgcttcttcaccagagacagagaatatcctttccgctgcagagaggaatggtttgctgtcaagctctcctaatctcttaacaccaatcaaagcacgatgtgaggaatctttcagtccctgtgaagaaagaaagttagatttcacctactcaaaagagcttacaatgaatcaaataaggattgaacatgcgtatgagagccaaaaatcaaagtcatctatcaagaaactaatacgtaaatagctgaaacttaaacccatttgtctcctttatttgtaaaatttgattcaagtatgacaggaaagaagagaaattttaacagggagaaaattgatccatacgcttatcatctccttacgagcctgctgtaactcatcattacttctacgttccttgacaataagtgcttggctaaggtcttctagagcttcatattcttcttccttttcctttagttgttcttgaatctctttcatgttcttttcgacctccatatcctcatctccacccatatgtttcattacttctaaagctcctctcatgcgctctatagtcaacactaaagcttgttctgaatcaagttgtttttccagttcaatgatttttttccgaagttcctccttttctttctgccatggccaataaatcaccaaagaataaaatagtatgaatgaaggagttttcaattctactatcaaaacgtcattataatcttgagaactctaatttaaaataataaaataaaatgaaggaaacaaaccttttgttcttttgctaaatcgagcatatttttttcagccttattttgctccaaagtagccttttcaatctaacattatgaagtacatactatgaatatcagatcacttcaaataagttttggacattggctgcggaacttacataagctacaaagagcattatgttaataataacaataacaataacaataacaataataataaagcactcagtaaccattataattataagggtttattttcctgttgttctttctcgaagaaaaacagtctcattttatccctaataagaaaacaatctactaaacaagtctcgtgacataattaatcaaggaaaaaaaaagggattagtacggtttgtaaaatatattctacctactactgaaaaggaaaacagttcttccacataaaacaggtattgaaagtcaacttcaataagtataagataatgccattacattttttttatcacttaatttcctgataaaatagaaaatctattgtcaaagtcaacaagtaaaatctacatagctgctaagtaaaactaaataagttaggattcaaggatgtgtgtgtgtggaggtactcgaattctaaaggctagtaatttttccccccaaactttaacatgtacta

SEQ ID NO: 383157 - DNA, 1182 bp, Cannabis indica
aaaaaaaaaaaaaaaaaattgtataatgagttgataaattcattatcataaaaggtttaaaatttatacacaaaattactattacttattatatatatatatatatatataataagtattacaaaattgactttcgaattcttctataattaaattttgtgtagaactaatagttttcctttgaaaatttaaattgatgtcccacgaaaaataaatgatgaaattaatagatatggatgaagaaatttagatttaaagcgtaaaaaaatgatattacaatttacaaccttttaaagggaggttctcaagtttgagttttcttctcatcgagtaaaacaaactaattagtcacgaaacaatcaatttctagtggtacatgaatcattcctgattatattaatttatggtcaaaatactagctaacagcaacatacaacatgtttgcttaaatttacattgtatattgttattatttaattattaatacaaataataattaaaaattaaatataaatcaattgtagcatatttcttaatatgtaaaatttagttaaattcatatttaggctcatatatgtataaaatatatatatatatatgtatatctaattttatacacttttaaataattaagttctattttgaaaaataattatttaattaaaaattaaattaaaatattttaagaaaaatattaacaaatttatttgaaaaaataatatttaatttaatttcaatttatataaaaaaaatatgagcataattattaaatttagatatttaaagtaaaatagttaatgatttttttaaaaataattaatttaatggtattaatttaaattgttgactttaacgaaatttaataattacacacatgctttatataatttatttataaacatatggtattggagtttgaattcgacttatctaatgtacgtattaattcgttaattttgaaattaaattaaataactaattatattttttttatattaatataggatttttggtggggacggcagtggttgttagctcgccacttttgactcactgagtcgagattcgtggaaagattactgtgttagtatggtggaaagtgaggaatggataacgcatatttagaaggctaaatagtaattttttcctttgaactttgacatatactaaattatgtctcct

SEQ ID NO: 383158 - DNA, 1998 bp, Cannabis indica
tttttttttttgaataaaaaagaagttttgtttttggaatacaaaaatgattttttatttattttgaaaattgtcaaatgagaatacactcaataaaaatttatcactattaattaatacccatagtaattaatttttttcaaaacaatttaataaatatttgcaatttttattgtaattaatttatatgtgacccttaactattgatatttaataagttgtttttttttttttttgaacatttaataagtgacccttaagagaaatgctaaagggtgccactggtgtctagcaccttcctacgtgtcaatatcgctattggtgcaattaagtatcgggtcccatatagtttaatataataatttttatagagtatcgctagccaattgcaagtcgacacatttagaaggtgctaggcactactggtgcccaatagcaatgctcgacccttaactattgatatttaataagttgtttggatggctgtgaattacattaatatcattaaatttattgatgcataagtttaaattcacaacgctcaagaaaggaattcgtcatcaattttcaattttaagaaattttaagaatgtttaagcatgatgaaaatttttgtatagttagtagattttttttctgaaaatattaattaaacattatttttttatgaaatattttttcattgctaaaaaaaatattttataaaagtcaaagtgatcaaataattatgattttttttggtaaggaaaaaattgcatgattaatcaatctttttatcactaggattctataacttatcctaagatttccctttcttatatttattctctaaaagagtttgagttcttaaaataaatttagactttaaataaaagcttataaacggcattagcttataataatatttttttgaaagcttaggttttaaaaatttgagtgtataatttaaaattaaaaattattgtgggcttggcaaaactgcctaggcatatcacattaattccttcaaacattcaactttcataactagaaatactaaataaatacattgccaaaaaaaaaatatatattaagtaaatagaaaaacttagaggttgtttaatttttcagtttttaaaattgtttttttaaaagtaaaattaattttttatcatttaaaaatttaatgatgtttggttaatatttttttaaaagttatttaaaaacttttttactaaagaaaatactttaatattttacaccataccacgagatgaacttagctccactccaaactcggccccaaccctgggcctgaccttgggaccagaacccagaccctgaactctcgacctagacccaaatctaggtatgtgatgtaaaaaataataagttagataaaaaaaaaaattattttaattctattttcaaaaaattgttataaaatttggtcaaacattcctataagtttttcatattattttttaaaagttgttttatgtttttaaaaattaaaaatagattttaagttataaagccaaccacctcttcttctcacatatattgttagcttgaattttcggcaactcaaataaaaaagaacaaaaatatttaagagaactagttcgagtattaatgaatcctagtacacgagttaatattattagtgttgttgacgttggaacttattttaccagaatcgaatttactaacaagtatgtctgattatatacattataatctaacacatcctaaaatatgaaattcattagaacccttacattggttgcaatagaaattagtgactcattctgtgacagtcaatagtcctatgatccgtaaggggatatactggataagttgtgcaatcccacattgcctatggaaggtcaagtgagttgattctaagactgtgtaagtatgggactccacagttaaagagtgcttaaatggattgattggtaccacctataacgacaaggtgcatcttattttctggtagctcatcacgaaagaact

SEQ ID NO: 383159 - DNA, 1686 bp, Cannabis indica
tacattaaccgtccaaattccatctctagttattacctctcaacaacactattttattgaggggttttaatattagatttgtgtcttttcgcaccataatgcatacacaattcattgaacttatcacacataaactcaaatccattatctattttaagggctttaatttttgattctttttgagtttcaacatacactttatagttcttaaattttgttagacaatgattcttatttttcaacaagaaaacccatattactaaaatcatcaacaatggacaaaaaatactggttacctccaaaagttttgatcctcatgacacaccacaaatcaacagtaggtattccaatatttatttttccttataacggctaaaagaaaactttatcatgtgttgctttccctgcacataagtctcactgaaaggaatgttagagggtttataattcaaaagcaagccctacttggagagttctaccaaacctttctcactgatatggccattcatgcatgcaataatttcaaatctaaattacattttgtgacatttgtagcttgtgcaagtgtcatagtcttaccatataagaggtatagtccatgcttcttaatgcctcttaaaacaaacagtgaccctgctgtgattctcattgttccatttcctttcttgtactcatatccctcatcattcaaacttcccaaagagatcaaatttctcttcaaatatggattgtgcctgacctttgtaagtattctgattgtgccatcatagattcttatggtaatggtacagataccaatgtgacattttttatcattccccatcatgacacttccaccatcaatcttgtagtagtcaataaactagtcctttttggactcatgtaataagaacaatgactattaaggatccattcatcttgaccttttgatctgagctagtacaggcatctcaaactgttgacttgggatcttgaacatcaataactgcgaatacatctccatctgagttatagctatcatccacctttttcacttagaattactgcgcttgtcttcttcctttttcttcttcttcttcttgtctcttaattcccaatagtttatgattaagtgacccatttttccacaatgattgaattttattgtttccctttgtcttgaattggatcttaaatttcctctgggtcttgaattgtctttggatcttgagccatttcttcatcttgaattttctcttctaggatgtctaccttgagccaatagaacttcattagaccatattcttgcttttctaccttttaccaattcaagttagcatcacttgatctcagagtgctcattacatcttccaaagtgagaatgcccctattatacattataacatttatcatttcttaaattgatcatgcaaaaccttaagaacaataacaacttgattttcttctttaatggttaatttcccccatgttagtaagagacataataattctatttaaatcatataagttctattctaatgaaacaataacattcatcttaaaaccataacacttccctttcaagaagatctttgttcgttttggtgatagactatctcactaggttgttactgttggaaatttattttaccacgatcttagatctactcacaagtatgtttgttaacaccctaaataagaactttc

SEQ ID NO: 383160 - DNA, 2838 bp, Cannabis indica
tgaggccttcagtcagatcctactagtggcctaatagcggtgtccattgcaagattcgctgtagaaaatgttggatgcataggccccattcggattgggtggcatggtctggtgccacattaaacatgggtggtgtttccgctccaatagtattttatagacgtcgctgcttaatttgggatgtgcccaacaaatctcatgccaaagagcataaagcatctctcgacaatttttgtcttctacagggagctaggttggcctccgtataccccttaagtactacttagatttgaagtctttgtggaagcatagtagaactggctatttttatttcggtcagattggtcaccaatggtcgggtgacactagctacacatgcatgtcaaagtttgcaagtacgccaaaaaatatttcattgcacaaggtcttagtgggattgagcaccaaggatttcagtatgtgccactcttaagacgttccattcctaccttgctaataagggatagagtaaatcacatcctttctttatcggttgagcaaagaaacattatcaggttgacagatgtggataatttctagatgtatggcttgtatcctccagctcatggagttctaagagtgccaactacaaatgaggcctgccctatggatgagtaaggctctgacttgatgatgataaattacctttatctcatatggcacagatttggagaggagagagaaggctccgccggtgtctggccagcgggggtccagtaggtgatgttttacttcaaatcattccgagagccaaggttttcgagagacctgtgcacccaatgcctacatctaggggcaagggcaagggtatagttgagggttctgatagctcctcttttgatgatgatggtatttgatagttgataacaccatgcttttgttcttgtattgaatatttatgaatgctctctgactttgctacttttttttttgtagacatgtcttccaagctgagtggtcttgcaggtggaccttcaaatgagcctactggataggttagggcaaaggttgtcaggacctctcgtggtgaaaatgctgtcggaccatcatcgcctccccctctactagggcctgcactagccggatagcttgtgatacagcctgccaacaaaggtacggaggcccagtagaggagtggggtcagctacaggacagaaggttactgagtcagccaaccaacgcttcaaaagagggttcttcctttcttggatgaggcttttaaggagctgggtgatgatggacctgacaaggtttactccggttgacatcgggatctttctctagtttgttatacatctagttctcttgattttcttggccctatataggctggctagtcgtggtgcttcttgcaagtggcttgttgaccttggaagcttgtataagggtctgatagaccatggcagtcaaaagaggggactggctagccaaagttgttatgttttgatactgttgttgttttgctttccttttaggcttgatgaaactgagctctactcgtaatggctctaggcagtcttttagattcttttcaggagcgtgtgaagatcttggaggcttcccttgcaacaaaagacaaagccaattccgagctggaggcccttctggcagagaggcaattaatggtttctagattggagaccatgctttgcgccagggatatagagaacaacacccaagctaccctcatctctgggttgcaaactgaacctgaggatcacaagaagaagttgcatgaggctcttgatggccagcatgccattaaggaagattacatcgatatatcctctaaacttaccaatgattttcacttgcacaaccctcgagccaaactatcgtacatgggtagtacgacctttgtggagagaacattgactcgtggaaaggtattgttcgagagccagattgagacagaccagattgttacttatctcgaggggtcatcatcaaggacacacgataaagagttggccgacccacctgtggaggaggtggccgaccaagatactggccattagcgcgactaacatggtggtgatggggccgacctggactctatcgatcttgatctcgcgactctagattagcttcttctacctttgcgcacatgtagacatcacttttattagtattcaacattatgtttgtatcacatatacaatgttttcatgttctgcatagcatgtggatttttatggcctgtggccttttagcttcagaacaatactaacttttgcgttccatgtggcctgtggccttttttgaactttacattcatgtcctatgtggcctgaggcctttttagaacattactttattatcagccctagggccttcaagttcgtatctttcgccataagcccactatttttgagcactactagtatttggccctattaattttttatcatggattatgtgaccaaccaatcgctctttaatcctggctatcttcttatggccttgacatgtaagggtcaggatttactttgccaagccgaagtatgcctgcaggacttagaggcaggcttagtagcttatactatgcaataaaatttttctcaataatttctttgtgctagtacgatgcattgtacaataggggtaacccccatgtgaccatacaaacaagtctcttggtcacttgctactcaccaagttttacagactttgcatgggttttgtcttgcaagggtaccatagtacgcatgtggacctaagagaataacattaaaaagttactctatgagcaattggttcatagacacaataaatagaatataaatatcgatattattc

SEQ ID NO: 383161 - DNA, 2236 bp, Cannabis indica
aacataaactactaactcaatattagtctaagaagaaggtgtgaaaaataaggatcatatacataatttaaatttactccctaaataaaataaaattaaaattaaggcaaaaaattaaaattaaaagataaaaaaatagttaagaaacaaatttatttatataccctcaaacaaaattgaagccataaacctaaaaatatatctaattgaaattaataaatattgaaacccttaaataaataataattattatagaaactaatttaattatgtggtttatctttttaaaaatactgcaacaaacctataattaaaattctaatagtttgtcttaaaaaaaaatcaaaaactaatatatactgaaaacaaacaatctaaaataataataacagtaaattattttgtaatacatatccactaaaaaaaatccaaattgacaatatactcttatttaaaacgcattaaaaatagtactacacattctatttgaaatacatatccttttattgaaaatacatatcaccaaaaaaataaattacaaaagtatcccttaaacttacattatatttcaagaagagaaaaaaccaattaaaatattatttttctgatatcaatttgagtactaataggtaacaaaaccggttataggaaatcaaataggttggattgaaaatgtattttggtttgtctcatttgagggatctcaaacctcaaattgaggtgagggacttcataagatccctttttttatttgcaattttttggaaaaataatgttacatgttgcgaaaacataggtttttttttttttaaacagaattcattcaatcaaatatcattacaatggattaggcgagtcatgcttcacagcttgactcacaagggggaacaatcccaactcacatggcactagctttgttgaacaaagtttcattggctaatacatgagcaacctgatttgcttccctataaacaaataaaatccctctaacccttacattctgcagaagacttttaatatgggcaatgatcccataaacatctctacaccctccctcgtctttctgcactaaagtaacagcttgtaagcagtcagactcaactgtaaaggctggtaaattgcactgtaactcggcttgaagacctgctgcaatcgcctgcaattcagcttgcaaaggagtcaattccttcagcagcaccgtggcaacagtagagtgtacatggccaacatgatcacgcacaatcgagcttacactagccactcctgcccccactttcactccagcatccacattgattttaaagaaatctgttgttggtggattgtagcctgccacctctctactttgtcgatctctcttagatgcattattctcacgaaaatcactaaggaacttgctgcaccactccaatatagcacaagtttggggcctttgaccccccatgattgacagaattacagacatactagaggttccatgagagaaccagaaaaaattcaaattcctccttagtaaaagtggctgagatgcgcataagaaaggctagcacatcttctcttccttgtctttgaatttttccatagaatccagtggatttccagacctcacggttcactctacaaccccataaagcatgaaaaacattctcatacgcaccattagagcatcggttacaataaggctcaacttgaatgttacggtgagcaagagccgcatttgttggaatccaagagtgagccattttccaagaaaaatgctttacctttggagggattttgagcttctaaagatgtttccaccatttctcagtaacctcagtattcgactgtacatcgcgcacttgtaaggcagctgccattcgataaccactacggacagaatactccccatctttgctatagtgccataagattttatcttctatttcccagtccgacgtagccatttttagaattaaatctgcatctgtttgattgaagacaactctaacaaactcctcatcccattctccattagcctttttcaaatcaatgacataaagttggtccggtaaatgcggtttgtcatagattttaaagtgacaggccgaggtagccaagggtcttcaagaacccgaactgagtttccattgccaattctccaacgatacccctttaaaaataatcttttttccccacaccaaacttcgccaaacaaatgaagtatgattcccacatttcgcctccaacaccccac

SEQ ID NO: 383162 - DNA, 852 bp, Cannabis indica
aaaaaataaagaaaagatcattaaaacatgcttaataacaaagggacattaattatttattacgactgaccccacgattctctatcacggttgttagggtttcggtggttgagtctcgtttctatcttcggtgtcgttggtctccctcttctccggtgacgtgctttgcaagttttcaagttgtgacgggatgggtaccatgaactacgatgatcttgcgatgttctacaaatcaatggctctcgacgatgatgaggccgataatgatatcaatgtggtcgaccagtcgctacttgatgaaggtgcactggtggtgactaaaatgatcgtgggcagggtcatctcgccacgctccgtcgatcgtaatgatctgatttacgtcgtgaatggcttttggaaaatttagcggtcctttacggtggaggctcgaggtatgaatacgtttgtgtgacgttttgatttgattaagaatcgtaaaagggtcatggagggtgggccatgggtctttgagcactgtctcttggtgcgcaaggaactgaacgcgtattggctccgacggagatggtctttgattttgctcctttttggattcagattcataaggtaccagtgtgttgtatgacgaaggcttggggttttgagtttgggaagtcggctggggaggttttggacgtgttgtgcagtccgaatggctttgtatgggggcatttatgaaagtccaggttaatgtcgacatccgtaagccccttgctcgtgtgattagaagacacttggcatcggataaacctcacagatgtcgttaaggtacgaactgttggaatttgttttaccagtatcttagatctactcaca

SEQ ID NO: 383163 - DNA, 2608 bp, Cannabis indica
tatggaggtggaagcgtgctggtaactctggacagtccaaaggaggcagaacttctagtggatcttaggagtttttgagggcatggaggtggagacacaccagtaactcgaaacctacatgccaggtttgtggtcgttatggccactctgctgcatactgttacaaccgataagatgtggcctatatgggttcagatccaaacaactctggcactggaaacaaaggaaatcaaggtggggttgttgctttcattgccacacctgatatggtggaggacatagcttggtacgcagatagtggggctagtaatcatgtcacagctaaggcaaacaacgtgacacaaaaggctgagtacaacggtgaggaattcttaactgttggcaatggtaatagacttcaaatagctcatgttggttgtggaaaattggtatctattgatcaaacatctcttgttctaaatgatgtgttacatgttcctaatattactaaaaccttgttagtatttcaaagctcacatctgataataacgtatctgttgaatttttctctcaaaattgttttgtgaaggacttggaaacaaagaaggtgctgcttcaagggaaatttaaagatggactctaccaatttgcagaccctaaagaaggtcgttgtgatcactccaccaagtctgtcaactctagttttgtgtttactggtttagtgtctaagtcaaaaagccagcatgttgctgagcaaagttttagttcaatcaaggataagttgcataggagacttggccacccatccaatcgtgtcttgagtcaagtgttgagtcttgctgatgtaaaacctactactaattgcaataaaaacttctgtgaggcttgtcaatttggcaagtctcatgcattacctcttaccactaattctgagcgtgctaaaaatatgttagatttaattcattccaatgtttggggccctacccccattctgtccaataccaactataggttctacatacactttgttgatgaccatagtcgatacacatggatctaccctctcaaacacaaaggtgaagccatctctgcatttttgagttcaaaaaccttgtggagaatcaatttgagagaaagatcaaagctctcaagacagattgaggaggagaatttcagtcattctccaactgtgtcattgaaaatggcatagattttcaacgttcttgtcctcatacatccgctccaaatggtcgagcggagcagaaacataggcacattgctgaaatgggtctaaccttacttgcttaagcctatatgccattaaaatacatgcgagactcattccaaacagtcgtttatctcataaattgtctccccactctagtattgaaaaatcagtgtcccttcaatattgtttactccaagaaaccagagtataaattccttaaagtctttggagtagcatgttatccttgcatctgaccataccagtcacataagttccaatttcactccattaaatgtgtgaatttgggatatagtgagtcccacaaaggctacaaatgtccaagcacaatggggagactttatatttctaggaatgtcattttcaattgaaatgacttcccctttagatcaggtttcttaaatactcaacaacttgagcaaactgtcaaagttagtgtccctttttggtctgctgcattttctcccttatccaagacacaaaatccaacccaagctagcaccagcaagcaacctactgatttttcccttgaaaaggcaccatcttctctaatacattccagtcctaatgatcaagatcatggcttaactatcgatttagttatgccaggtacttcatctcacacttcaaaaaccagtaattgtgatttagagtgtactcagaatgtagagagaaatacaacccatccaatactcgtggtatccacacatccaatgattacacatgccaaggctgggatatttaagcaaaaaacttacattggtgaagctaaatgggactgtgaaaatgctaaacagtcacggttgaagaagcattgcaacatcctgggtggacagcagccatggatgaggaaaactcagtattaaagaaaagtaaaacctgggtgtcagtgcctcgacaatcttgtataaatgtcattggaaacaagtgggtgtataaagtgaaaagaaacgctgctggtacacaccagagatacaaagcctgcttagtctcaaaaggcttcagtcaaaggcctggaatcgaatttggagagacctacagtctggttgtaaaagcttccacagcccggattattctctcaattgcagtggcaaaatcatgggaaataaggcagctcgacataaataatgcatttctaaatggacaacttcaagaaaccgtttatatggaatagccgcttggttttgaggacaagaaacatccggagtatgtctgcaaacttactaagtcactatacggtttaaaacaggcgcctagggcctggtatgtcaaattgaaggcaactctcattagctgcaggtgttgggttttgtgccccaaataaaacccattacaatctgattagttatcaatttagaattttgaagtgatttatgattacat

SEQ ID NO: 383164 - DNA, 1425 bp, Cannabis indica
agagagagagagagcgtacactggattgtgatggtggagaagttgaatacatgaaaggcttcccatggtgtgattgaagagagatgggagatagtgagtgactcactcacttaatgaatctatctgagctcttcaattaataaataccataacaaattataatatcttcgttctgggataggaataggatcccactacaaaaccaaactaaagtactaaagaatgagaaactgaaaggggttttcttattagccacaggatttaagaaaatattgagaagataatgcccgacgcatttgattggcccaatatcaaagtatctaataattgtactcttgtctaacgtagggtagttttctcatttctgtctcttactcactgcgcgtgttttcttaacaatataccacaaaggcctttctaaacattgccatgttttcttcatgagaatcttacgataccttccaagtagactccacttttagtcttcttggcatctagcctatgtcgttttaaataatttgaaatatcatgtccatcacttcacaaccttcttttcaaaacacttttatattcagccctaagaaaaacaaaagggaaaatataaattttatattggcttatgtagtttgtttttttttttttaggaaaatatacttgttattataaattagaaaagagtttcgtttacaacaacagagtaaataggaggagagatagtctccaaccaaaaacaagcctcatccacccctaacgcatgtttagccaagctatgagccgccatattggcatcacgcttgacatgagaaacaaatacattcgggaaaaaggataaaagactaagtacatcgacaattaaattactaaaagatgaaattgaattgaagggagctcgtagagcatttgagaccaagagagcatcagtttccacacaatcgattggcaattggtgttgcaaagccatgtttaagccaaaaaacaaagccttagcttccatttcatgcgacaagaagttgcccttcattggcattgaaagtgctgcaatcacttcaccaaactcattacgtataaccgcacccaagccaagtgtgtttgttgatgcattggcagccgcatcaacattgagtttgtgtagaccagcagcaggtggtttccaccgtgtgtgagatgcagtagtagctgaggtagtaaaagaagaaaccgcggccgcaggaacagtggaagagcttgatgcaagagccggtttgacatgctgatattttttattagcagcagtgaaattctgaagtaaagtggcagcagaggaaccagtaacagcagctggtttcgcaatttggccatgaacgactttattcctttcattccaaatagaccagaggatacaaaaaaattgctccatttcagcggtagaatggattgttgaaagga

SEQ ID NO: 383165 - DNA, 2393 bp, Cannabis indica
aaaaatagtttacaagtattgaactaaccatattttcaatcacatttatcaagattttcaaaaagtgattataaaataaacaagcttaaaaaaaaaagcaaattaagaagaagaaactaaaatttttacgtagtttgagtgtgaataaatattagtccacaggtccatattattaaattagaaaagctttaaactatttcttacaagtattatgtcctagttcaagaactctattcttagttcttttctcaagaatttaatttctaactttttgcatgaagagataatattctatttataagacagaactaggtatgggcatatccgaacttagtagattttctaagatcaactaagcactctaataaggtaaaatataataatattgattttaagtcatttgagtgaggaccaattcatgaggcaatgattgttcgtacaagcaggaccatttgaagatgtcagttgtcatacgcagtcatgtccgtaccgagaatgtcaaagaaaatagcgttggagaaaaaaataatcttctcttggtaatgttgtcagaggaatttagacaacatcaaaaattaagtattcaaaggctattgaatacctttttatagaattgtgagtattcacctaaagtggtgaatgctcaaagaaatatgtacgagtatgcaaataaaacagtataaatataaatgagacaacaaattatattggttcagtcagtgcttggtctacttagtccacttttgaaatagtgtttttcggtcccttattcagttcggatcacccctttatatagatacgatatatatacataaaaattataaaagtttggcaacaccgcgcgaagcacggcttagtttcctagttagtaatattaaaatacagaatttcaaaatgtaagaaaaaatcatgtacgtttgctttgcttaacgtcattagctcgactgcatgttatgctcatgtggtcttcatgttgtgtaatatcctaagattaacaaatcggattagcaaatcctaactagtttaatgtgtattaatgtggaattatattattatataatttagtatatatgaattatactgataaatgatatgttaagaccccgttggtgagctaggggtatttccataattttgatcgagaagggtaaaactgtaatttcaatgttataacgtgattatggactgtattattatatagtatattgtgtttttcttctgcaagtattttctgacaagtcggcgtggtatagtcacaattgggtattttgggtcaaactgggttcggggcccgaaatacatttttgggattttattttggcattttataaataattgaataatctgaaatttattttaagtgtggtatgtgatgaaatgacaattttgcccatgattgcatgcatatgtagtgtatttgaccctaggggcattttggtcatttgaccatttgatttattttcaacaaaaaggattttgtaaaatggaaaattcattattctgatcttcagcccctaaccgactccccctttctctcttttactcatctcactcaaagttcttgattttatgagttttacttgaagttggaggtgaatttggagttaatttttggcgttaggagcttggagtttgtgataagctcctaagatttcttagctgaattttatttttgttatttgaagttgaaaatgcatgtttttctatttgattatactcatgaatgcatatgtgtgagaattggtttaatgttggtgttctatgcatgattgtgttggtaaattagtgtgaattgcttttgatatatttggaggagattttagagacttcaagcttgagttttttggttttggtgttcaagcttttggttaggggaattatgttaattttagctcaagtttggagcttatttttgattgttggtgttttgaccttaaatacatatattggtgttgaaaagagcttgaattatgtgttgttaattctttggtgtgatagttgtaatcagggaattatgagtttgagtttgtatatgctttttaggagttttggtgtattttggacctataattcgatggctgaaatggggttttctggatttggaacccaggtgccgtgacgagcccttcgaaatcctggatttttcaactaaggtgtcgcggctcacttggggtgtgacgcggcccgccttgaggtttttgggcagtttgtgtgttaaatcttatttcgtgcataattttttgttccagactccgttttgggtgttccatatatcgttggaaagctcgttctgagctctacatgtttatctgtatttgaatgccaattatgtgattatgtgaaagtggatttagggattaaccctatttttgaatctcgagaattgtgactag

SEQ ID NO: 383166 - DNA, 2418 bp, Cannabis indica
atgtatttttcacgtatttatctttttcttttttaaataaaaaatcatctttattaataattaaactctgttatcaaactaggtaaaaaattagttggaacagactctaaattgaaacaacgactaaggtataaaataaaagatctagcgtaactataagtcaccctattagttgatcgctttatgaaaaaactgaaacatttctcaaatcttaaagtaaagatgtatgatcttgaataacacaaccaaataaagaaatcataataatgggactccgtaaagtgtgtacaaccttaagacaatatgtctccacatacatgtttgtccatctttttttcttgatccaactcacgacttccttaacttccaaggactcaacaaggtacatccctcaatgagaagacctatataatcctgagctaatattccaatcccatagcttcgacccacttcaaatatcattacatctacattgaccttgatgctattagcatgtggtaaagttcattgctcagcattgtcccctgcctgtaagctagaccaagacgactctttattagagttttgagtatttctccattgatcaagataatctctagcatatgtaataacattctcagccataaaactctatctattctaaactagatcattttgtcccccaaatagcccaacaaatagtagcaattaaataattcaactcattatccacattcttaagagtccatacaccgttcgtagaagttcgtacctagtgaaaccaaggtgccaattccaactctattgaaagccaattgcacttttatacaagtaactagacgatgaatggtagacacatcttccacattgcaaagagaacatagagaagctacctcttcatgtttttgtacgaagttaattcattgttggaagagagcccatagtagcatgctaaagcaagttttaaagttttggaggaactcttaatctccaaagatttttccaaaacgctgaggcttctgaatcaaccagatgaccatgaagctgctggaggagattatagagacttttgattgtataaatactcgaagcttctttggtccaagttaaatggtcacgggtttgagtcacatgaagtgggacactgacaatcagcttcttatctctctcttcaaatagatcttcaataactttcacatctaatccctttccatccattctcagtaaattacttactctagcattaattaaactacggtgatctgataatacataaggacgacgagtactatttggttaaatagaacttccatcccccatacaccattaaatcccagatttcacaagttgttgagactctcatatactctaccaaacaaagctatgattactaccaaggttagcatttaggaaagatttatttggatagtacctggcttggaagacacaatctactaagagtggctatgagtcaaaagcctccatccttgtttacccaaaaaagttagactaaaatctttgaggtttcaaaaacccattcctctattatctttgtgccgacttaatatatcccatgacatccagtgaattcctttactcgaactactagaagattaccaccaaaaactagtcatcattttttcaatatcgcgagagatttccaaaggaagaagaaacactctcatggaatagcttggtaatgagtggtcgactgatttattgagtatttctttgtcgactctcaaaataatttttccttcccatccttgaagtcttttccacacctgatccttaaggtaaccccacaaagctgacttgttttttcccattgtactaagaagttccaagtaaaaagctttctcatctgtaggcctcatattaagcatttgacaaatgtagttttgaatcccctcatcggtattggagctagaaaaaattgagaattttgcaaaattaacattttggctcggagcacactcaaacttgaaaaagagtagctgaatttttctagcctcttcaacaattgtcttgcaatataggtaactatcatccgcaaagagcatgtaagacactcttggagatccattattgattttatagctatgaatccaccccttgcttcatacttacaaagaatacctaacaaaccttccgcataaaaaatgaacaagtaaggcgacagtgaatctctttgtttaatccctctagtcggaataataggactcatttctcttaccccattgatgattgtgtattcaaattcaaatgaacccaatccagagaaaatccaaggttaagaagaacaacttccaagaagcaccattcaatacgattgtataccttactcatatccaacttcagagtcataaaactctgctttccttatctttgttaggctatttttagcctaagtttcgggtcatattttatagttgtttt

SEQ ID NO: 383167 - DNA, 3581 bp, Cannabis indica
ttaagtcaagggtgtatcgtacatactcttttaaggaaatagtattgtaaaatacactaaaattattgatattaggtgttttaaaagtttttgaagtgtaaatataattttcgaataatacgtgagaagcactgatgagttagttgaaaaaaagtgagggagagagagaagaatgagtgatggaatttgtttgtttgtttttttttttttttgacaaaagtgctagaatttgttttgtataaatttgaccaaagttataatttagtacgggtgttattatgctcacgtgtgggccgagatcgtatacagttcacactattatttaatatttattattattttttttggaaaaaaagcaatattatttttaattttagcctgttttgcctgtatttcttaggtattctttcttcttctattttttctttttccaatagagttttcaccgactatgacagtgacttataattttaattatactaatttattgtataataatatatatagttttgaaggaaaagcaggtcggcatgttatgttatgtagtgcatgttttattgaactacttgcacttgtatcaatttataccaatttaaatatatatacacgactcttaaaacaaattaaaaaaaaaaatatacacccaaaagatagtcttactatctcaaaaaaacaaaacaatagaaaatgatgagtcatacgacacatcacacatttgtattactttatattgaattaatattatgtataaaagatgatttaagatttaaccactcctccacacacacatctcactctcacatactccaaacttgaaagtagcatatacataactactttcggtatacttaattagaatttagatgcaagttactttatatatgttgttgattgaagaagaaaaaaatccaaagaattaatgatagcgtagtagacttgattggatactttcttttgttttttttttttgtttttggtagggatttgactagattctttcgtttagacttgtcattagggatgttagatcacatttaatgtttataagtttatttttgatttaattatatattggatgttaaattttgtctttcgatctgattcaattaattttagtcatccaatcgatccaatattagacgttggtttaaatcggttatatccgttagatatatttcatatatatatttattggtttaatttgggtttattcaatattttaaacttagtatttttttttcttttttgtatcatatcggatctatctaatattttaggtccagcatgtattagattggattcatccaatccaagaaaaaaaaagtaaaattttaatgttaatttttatatatacatatatattttacgtataacgatataaaatttaattattcatttaaactaaataaaaatactattagtttgattggatattggatttttggacactccatccaacatccgatctaatccaattgtatatttaaaaataacatctaatcacaattagatatttaatattaaacggttgattataattatctatttacaccctacttgtcatcctataaagttgaggtacatttatgatcatgataattaccaatcaatcttcaaaaccacgaaccaaaaagagtagtattactcctttatcatataaagttgaggtacttaattttccttgtttactagaatgtcaaaccttcaaaatgtttactttttcttttttaacacgtcacagtcattccagtccattccccaacaggtagtttcgttcacattgagagcttatataatataatatcattataatcttaatttatgtatatatatatatattttaattatatgagtgagtgagtactcatcctcggcctctgcctcttgtccatatataaccttacaaaactttcattatcttcctctttccctcactactatatatatttatgtatatataaatacaattcaagcatatcacttagcattgagtcccttctctttaattaattatttacaaaaatgaaagggtattcgaagattaacacgatgagcaacttggtagagagtagcagacacaaatcgagatccatagatttctcatcatcatcatcagcagcagcagcagatcttcctgatactacgtcgtttcctgaccaaatcccaaaacctaatattaatattaatactactgcaaatggagatgttgaacagttcaccaccactactactactactaagaaagttcacaaagaagaggaagaagaagaaatggatcatcgaaacggcgccgttgaggtaacgatgaacggatcaggtaataataatgtggcggttctgcgtaggaacagttcggtgaaaccaacggtgaagaggggttggtcgatgagaagatcttcgtctgtgacggacaggtacagccggatctatgaccactcgggcactttagcatcagctgatgaggatattcaagaagaagaagaagaagcggttacaacgagatctggtaataagaaaaaacacatcaaaatccttaaggcttgtaaacgcttgtttggactttaatttattattcattttcatatatcgaccatctccattttctattttttttctcttttaagaaaatgaaaattagtatcaagtcaagtagttattcaacttgtttttatcttttggttattattaccctccatttttggttttatattatgatgtatttgactaataaaatctttttttagtttataaaatgatgaataaattgaatgctcatgtaaattaattagctagatttgtctttaaaaaaaacttgggttgagtcctaattctgatattagaggggcttccgaaagctaattatagtttgtaatgtaacagtatcttattgtgttgttgaccattaaatttattgattgaagaatcctatgtaatttgaccacttgcgatccataaataggtgcgaaaattttctcaaacattgctaggttggtcgttacgtcatatgtatagttcgttagggaaaatgaggatttagctaaaacgtgaattaccatatatgatgttgatcatcatcattacgaaatcaatggagagatcattatgtagtaatatatttcccactcaatttcagctcttacttttccttgtttgattaaataatggatttctagattaattgtcacgatttggagctcgactttcctagttgcagacagaaatgatattttattgagttgaatttcgttttatatacattcaatatatattctactaatataaaaagattaagaaaatgtattgaataaagaaaaaccaaataataataataataataatttggatttttagaacgtgaggggtgactggtgactggtgactggtggtgagtatggacaacgtgcactttgtgctaggtattggaaaattagaatacatatgtcgaattattagagcatctccaaagagacaccaaatttagtgttacactatcaccaaatttggtgtcaaaaattatttctactccaaccacaacaccaaacattacactaaaaaaatattccttattattatattaattt

SEQ ID NO: 383168 - DNA, 1609 bp, Cannabis indica
aaaatacacccatatatatatattagtttgtttagttatctagcttaacaactattgtaagttttactctataaatacgaagcttagtgagactcaacttttctcttgagtctcttttcactgtatatttttcttttcttgagtttatttctggtatattaacaaagagctagcctcaatcttagggaatatatggtgtgtaatataaaattaaataaataaaaactttaacgtaaggatttaagcaaaaaagatttttgtagcatacatgcttgatgggcaagtctagtagaccccatatgcagcaaaagcactcttctttctactgcttcattttcatatttaaacttctattatttttcctttctcgtcaaatcagtcaaaaatatggcttcataatattccatccttttttccacatcttttgcttacaaatttacaatgttcttcttctaatttttagttaatattattttttttggtttgaaaatttattggttggaccatttatattcttaataatgaattaggatgaacaaatatagaaaatgtaacaagttttgtcataacagatcaaattactattaaattttatttgaaaaaaaaaataagctaatgtactattttgaaaattagttatattattaaaactaaatttttgtttcccaccaaaaatttgcaatgatactcatcataagtacaatgcatcaaatatttgaagagatgcttaaaaaagatttgaagtgacaactctgttgggcttgctcatccacccaacacgtgtcactgtatctatctagtatgcgggtcgagtaagtccatgcaccaactaaaaagtgttcacgcaaacttggggagacaaatgttatcctgaatcctatctaggtgacgtgacacgtatcgtggttctaagatcttggcggagtaaatagtcttccaagtgcccgcacagggtaaagagcttgctagacgcaacaataaataagcaaagtaaaacttgttgtacagaatgaacgaagttaacctagacaggaggaaataaccaacacttcacataattcgaccagagaaaaatgcgagaattcattaattgaagtttcccattttgtatataatcaaattcataattagaggatatatatatatatatatttgtcatcgtttaggaaagtcattaatttcctatttgtatggctagatagcctttggaaaactatttttcattgtaattatcccctataaatagaatagtcattccattataaagtgattcaaaattttaatttcaagagagctattacgctcctcaataatctgtaaaaaaaagttttcgagagagatcaagttgttattacttctcttctcacaagtgaaatacaatcagaaagagaaataaactattatcaaataaatgggactgaacctctataaaatcttgtgttcttagtttatgcttcaaattaaatatattctcattgatctaattaattttaaattgctttctagattgagcgtcgtcggctaaaagcgagattaacacctagtttcatgatcaagtgtcgctctctataattagttagcaattttctataatatttattaaaataaa

SEQ ID NO: 383169 - DNA, 1456 bp, Cannabis indica
ttttttttttttaaattttagttgggctaggacgacccggtttgggttcattaggttgaaaatccttcagcccgaaatcaacccatttggtgcgggttgggcccttctcaacccatgtgagtgaccccctaaatatgaacatatttcggcccatttcgggttgggttggccggtttgatcgacccatttccaacccatgctcaaccctatgttcaagaagttcaaaaaggttgaacaatgatttatttttaatcccctggtaaatgtcaactcccgagttatcatcaacactttattattgaaagtaaatcttcaggtttttttttgttggttatgactaataattcaatacatggtgcatttaatttttaatcacatttaagtgttgtagttttcaccaatttaagtgtgtgtctataatttttttttttaaaaaagaagtgtaagatttctcgtgctacttctaatcaaccttttcacgataaacgtaatacatatcacctgggaactggagatcacccaaatcatcttatcgcttcatttctcttaattggttaagaaaacttccagtcatggaagcaagcgactttgatcaatatcactaccaaaaaagactccttttattgatggtacattacttcgtctgctgccaaatgatctctttcgttctacttgggatatatgcaacaacatggttttgtcatggattcttcagtctatgtctcgtgagatcgctgctagcatcatgttcaaaaactctgctcatgagatgtggacaaaccttcatgatcgctttaatcaaagcaacggtccccatattttacaactctaagacctccgtcaacaatgttaaatgggaagataaatcagttaccacatacttcacccaattacaggctctttgggatgagatcaatgaatatcaactaaacccttgcacttatggatgtacttgtggtgccatgcaaaaagttcaagactattatacgagagaccagatcctctagttcttgattggcctcaatgagtcttactggagaatcaaggctcatatcatcctttacgatctccttctcccactgtccaagattttctctatggttgttcaacaagagcgttaatgtagccttggaaacactggtattgttgccattgctctagtcaaactgaaccccaactaactttctcggagtaagaagcctcgacccacttgttctaatcgcctcaaaccgggccacttggtttagatgtgctacttccttcatggtttttctcctggatatggagacaagaaaaagaacaactctaatgcccaggaaaattaagtgtcggccaccactactccagactcctctacggttggatcttctcagctacaacttagtcaacaattgatttctcttctcagtcaacaaatccgaggtgcaccatccacctgttggatatttattttacc

SEQ ID NO: 383170 - DNA, 934 bp, Cannabis indica
aaagagaacactaatcttaaggctcataaaattgaaccaaattggacaatttcttggacatctcttgttgaacatcctccatagcatccaactgactactcatcaaaactacttcctgcttgacttcgtacacatatgcaagagcatagcttgagcttgcagcagtagccgagggacttgcaccaacagacgcttttgggagcttgggaaagactccatcaaagtactccgatggttaaaaaattgtactagtcaaagtaggctctagagtctcattggactggcaacatttttctgagaggaaataaccttatagattagatttgggaaaataagcttatgagtgggtttcttacctcggtgaaacaaagtaatttgctccatgatgaatgaagacaaattaatggaaacacccatggtgattcgataaagaagaaaggccaaatcttgagacatcattgtcttgttggagttggaaaaccaattgctaaggataaactgcattagagaagcatgaccgtaagtgagatgagtgatgcgaacactatgactagcaggccattgaacttgttcatcagtttcagagagagaaaaaatcacgataagaagaaacagtttcactctcaacacctttcggcaattgtaatatttcaactatatcatctttagtaaaataaaaccaataccctcgaaataaaatagaaaagacacgtgaaagtaaaaaagatgaacactttcaatgtgattttaaaattaaaatttaaaaagataaatgtaatgaccgctttagtaattttgattagtaaaagcaaatagcactaatttctgttatttttataattatttatgaattttattatttgtggaccccattataattagtgagtattagaggtataatttctcaagtccggagattttattaaactctagg

SEQ ID NO: 383171 - DNA, 1826 bp, Cannabis indica
tttattttattttaattaaaatgttacttggacaccacaagtcccttttaggcattaaaatgtcgtgctccattgttttttaatttttgaaaatggaacgttgattcttaggcgggaattttctcgggcaaacttatgggcacgacatatgtcggccccagtggtctgccacatcgtaccgattgaatctatttgcacgataatggggccgacataagtcaggcccattttgcaagggttttaaatcagaaaccttctcttctccattcatttcatccatatttttttttttatttttaccaatattttcccctatccctctccgcctccaaccaccaaaaatcaattttaaaccaaaaattagcctaaaatattatcctgtaaagcaggccccacccttaatttgttaataccccttcaaaaaaaaaaaaataaaaccgtggcggcagagctagatctggcgtagactccgacaatcgtctaagatttttttttactttttttttttcattttgtatgtattgttcccatgacacatgttcatgtttatgtttagttttaattcattatataaatgtgattattaatgaattttgttttttctatttcggtagtgggtgatttttgtggtgggtgaggaactccgactataatgcgggagaagtgaaaagctttggctagattaaggtatgttttttttttatatatatatatttatatgttttcatatttttttatgtatagctatgtttatttgtatcatcattgtatatatttgtatatttatcaattttttttaggatttggcagtgggtatttttaatggttggtgttttctgttgtggatttcaatcttggcagtggtctttttcttacagtgatacattttttcggaaactatttaaatttgtcttgtgtatatatgtttgtatgtgtttcaatatataaaactatatatttgattttttattttttatttttatattaatctgttcacatatttatttttatataaatatatatatattaaggttttatatgcagtgtattttttggtgttgggttttaattttggtatttggtctctggggtgggcagtgggtctatcttggtatgtacaaattttattagataccattgtgatgattgtgttagattaatgtgtgtaaaaagttaatgatatataagttagtaatatatgtatgtttaatatttttgtagtgatattgttggatgtattatattatttgaatttgagtaacacacataataaactcttgtttaattattttcctaatgtgtattctttccaacaatacaactttggaaaatatagaatatatataattgctggataactatttaatggttattttttattgtaaccatgataattccatttgttttgacctgtaatatagaaagtttttaataggtaaaattttctttaataaaattaaattaattattttcttaaactaattaatttttaatttaaatatttaatgaaatccttttagcaattaatatttataatttttttatatttaaattatgatgtttttactagtcaaatcatttaaattaaaatatttacaatattttttttttttacaaaaatttagactttctacccttcctaaaataaatttttagaataattaattaatttctaaaaaaaagtaaaaaataattacggttaaacgtaaaattaatagttaactaacaaatttagtagtattattatatttttcctttataaatagaacttaaattaaattaagtttctataattttaaaattaaattttaaaaaaattaaaattt

SEQ ID NO: 383172 - DNA, 1357 bp, Cannabis indica
gaacctgaaaggtttataaccaatattctgaaccaccacagaagaaaccacacaggagcaatgatcagagacagtttcccaactgatgtgagcagtagagttagggaaacaatctatccatttctcatttttaataacatggtcaatacgagaataaattttgtcttggccatcttgattatttgtccacgtaaaatgagaacatgttctgtgtaaagtgccaccaatgcccaaagccaaccaatagttatcatcctccaactcagcttttgtaatcgggttacctcctactctgtcctggaaatcaaagattgcattgaaatcacccaagataagctagggatcattcactacatttagctcagtcaacttcctccataacttcttcctttgatcaagggagtttgaaccatacacaaaactagcaatgaagctatatttatgacaagccattttaatcgaacagtgaacaagttgtttagtctcttccaagaccatcacattcacaaagtcgttcctccaaatcagcagcaatctaccctcaacacacgggctagagtagtaactccaaccattgaacattctattcatagtctcaattatttcattcccttttatcttggtctctaaaatagccttaagacctattacaattgtgtgttttttttatgtttaaaatttttgtgaacgtccaattaaagttgttatgctactaacattttggtcaaattaagataaatttcattaaaaatgcataaattttaaataaaaaagttcaatcttagttaaaatttatatgtgtggcaattaattaatacacatattcaaataaataattgaataaagtttgttttcctttcttagaattttcaaaatggatagaaattggatgagtgtgaatatattatcaccagagtataaggaatgtgttgaccattttttgggttttggtcagaagcatgaaaaaaatccaaagttgtttctttttccttgtcttatatgcggtaacattgagcatatgaatagtactaagataaaggaacatttatttaggaatagactagacaagagttataagatttgatttcacaacgtggaaaagattagagttataacatctatgtctaagaaggttaagggtgttaattcagattatgaggaagatcacattctagaaatgataagagatgcataatttgaatcaaatgtcaatctattgaaatttcaaaattttgtaggggatcctgagaagcctatttacgctaattcttataggtttactaaattttctactcctgttagattatactattgacttcgcttttagccaacgacaatgagtctttttgataagcga

SEQ ID NO: 383173 - DNA, 1146 bp, Cannabis indica
accatgtaaatttcccaatttatattgttcttttgtaaaataaaaaaaattacaaataaaaataaattagtagtaaccacagagcctcttaatttgaaataattttatatttacatttgttcaaaagcaaaactcaatttgtttgacaaatgatattgtaaatatttatatttattaattataattaaaaatattaaaattatttttatacaaactgtaaattattttattgaaaaaaattcctaaaaaattatagtatatcacgattacaatatcacaccaacaataaatatttatataacctcacaatgtaattattttagattaatttacaacctaaatgtcttattatattaataattaatttgacaatataaatttctaattcattaaatgtattgataacataatgtctcttcaaataataatgaagaaattaactttgatcataagttattattttttttatcaatgatgtaaaggttataattaatttattttttgactaaataattttcacaaatttctattaattaattatatatatagtttgttttctaaatttatgattgaaaaataaatcataaaaataaacaattttattatgttaaatatcaattagttttttaaaaagaattatatgaccgcacgatgtgcggttttgttttctagttagatacataaaataattttagctttgatgtataaattataaatatggagattcagtaatcaatgggagatgggatattaaatatgtattaaaaagtttgatttattccattcttatgaagattttgaaataaatgggtaattaaagtttaagggtgattctacaatgcaccctcttaaaagggttatattgatgcaccccctacttgtttcggcatctaacaaaaattttaccctaatttttttttcatattcatgtacgtgatatctatttaagatatcctacaaaattttgagaaattcagaataatttacaatatagaaaacgatgttcaaacagtctattttacacgcgtataaaataaaatagtcacgcgtgcaacacactgcttgaacgtaattttcggcgtgttaaacttttctgaattttttaaaattttgcaggatgtcttaaataactataatttactatga

SEQ ID NO: 383174 - DNA, 3230 bp, Cannabis indica
ttggcttttccaaagccttagttcttatagtacttatttcactttggatgcttgttatgcagggttatatttggtatgctaattgctcttcctatcactctagtttactacgtcttgctgggactttgaagcataagaggaaaatatgttgagagaaactcagttgttacttagctagtgtttctcttattacttttttttttttgtccatctaactgaagagcaaacattatatagattttgagaaacttagagaagaagaagaagaaaaagaagaagaaagaaagattttgttccgcaaaaccgaaggacaagggtaattagaatgaagaaaaggacaagagaatgtggaaaatgaatatattaacatatgaaaaagaagcagaataggatatttttattttggttgtccttttgtagatttgatgaaccttgtgccttctacttgtgttgttttgatgatgacaaggaaagtgaagcttgtttttattaaattatttatttatttatttatttattttaaagtgtagtgagtagtagggtgtgtaatgtagtaaaccttagacagtctgtaccctctactttttcttctatactcgccttttttgtaatgtcaaaaacgataattaaacccagctggaatctctatgcaaaaagctaaacaaagatcttaacataacaccctaaagtacctttttattcattgcctagaggaaaacgtggggaaccaaacactgtggaaagttttattgagtttctcaacacacttttttagccttgttgagcttgcttcagccttttagcccaagaagggtctcaaaacaatacataggagctctcttcacgtatcatctgtcactcatttcaattccttttttgttttttttttaaaaaaagctaattaagattttttttttctaaactttgacatgtctaaatcatgtttattagatttaagaaattttgtttaattttagtaaaaaaaattctaacatagataaagttcagggagcgtggtttagtacataaacaatcgaagtattaaaattgaatgaaattaaacaaaattccttaaatctaacaatctcagtagttcggagaaaatttttaagagtcaaaaaaatttaagaaacataatttggtacatgtcaaagttttaagaaaaaaaatcctaattatcttttaaaaaaaaatatccttttattattattatcgttattatcattgaaaaaaaaaatcatggcatgggtttgttggtagtttggaacttgacaacattaatggcagaaaatttgaagtccttttctcatttatgagctggttaagaagatttgccgcaagcctatgttatagcttgagggagcctagcactaattgatgtcggattttctgttttttttattttatttatttttttttgaggcttttggttcttgcagtggtcataaaactctgcccctcttggtctttaatttttggaacatggggccccatagtcttttatgacaattgtatgaaaaagttttgactatagttggctaaatttcgaactatgttcctgctcaaaatgagaacccaaattgatttttgtagttaacaaaatgtgtttattagtgttttctacaaatagcttttagatttttctcatgaaaaataaagcttcataaaaaatttctttatatatttataaatattcatcaaaaaaggttgaaaactctcaaaaattaactttttggtaactttgggtgtatttttatagtaattatttaacttaatatttttttacttttctaaaaaaaaaaaattaatattttacttttaagttagaaaagtaaaatattttcaaaaaagatgtttggtaaacttgttttcatcttttgaaattagttaattttaaaatattttaaacaaatattttaattagactattttgtacttttactaggtatttcatcttctatttttttttgctggaatgtcttccattttttaaaaactcagaattgaagagattccaacaaaagaaaaaaatattttaataattgttttgtaaaattgatatgtaaatatacgcaatcgaaacaagtaatataatgataaataaactatggttctcttcatgattaattatcaattaccaattaattaattctttgtttctatttgatcaataaaaattattggataaaaagtgaataaaacaaacaataattaaaattaaaaaaataaaaataaataataaaataagaattaaaaaaataaaaataataataaaataagaattattatgatctccaactatcttttcttttaattaataatgtaattatccaatttttcttcttcctattcaatagataagttaagtgaagaagttataatctggttaagatttataaactgaatctatgtgaaaacttcctatatttctatggtaagtttaatcataaagatagcattaagcatagcaactaataaaatcatacaaacaatctaggtacttttgtcctaaatcaatttgcatccataacaatcagagcatattcaaatctcactttttaaatttttaatttaaattcataaataataattaagggttaccagtcaataattacaaaattaaaataaattatatagaatttaataaagagaagaataataaattgaataatcacattaatccataaaataaactcaaataatttacataataatccttaaaaaaatttagctactaaagatattttataacaaaagaaatttaactaaagacataaaagatagagatagaggagaaataacactctttggagtcttccaccggtgccttccactcttttctctccttctacactcagaattcctttcaatttttgaagtgtatgaaagcattggcatcaaccctctttttatagtgaaaatatgatcaagttaccatttttctgccaaggccgcaaccttacaagtgatttctgttggaatttattttaccaggacctagatttactaacaagtatgtttttaacatcctaaatatgaacttctaaaatgatataaaattaaacacataaaaggtatgagaaaccttatattggttgcagcgaaattaaatgactcaatccacttagatctctaacccttgtattctttctgtagcagagtatcaccaagatctgagcccaagactccttcagttgtttggattcttcacactcttacacactatgatt

SEQ ID NO: 383175 - DNA, 2898 bp, Cannabis indica
atatagaatagatataagatgaatataaattcattcgtaaagaaaaaaaaaaaacagaagagagatattattatataatatataaatagaatgaataatgcactgaatctagcggtgtatgagtctatgcactgtatccggcgctggttctccgccggcgccgaattccgggaatccctataagaactatatgcatgtatctaatttattacctcttcctgacgcgtgttctttttatcgaaattcacatacatgtgtctatagagagaaacagagtgtcagagtgacttcgtaacgaagtaaaacccagaaaagagaagaagagttctcatggcggaagtgaagaacaagcaggtcttactacgagactatgtctctagtaacccaaaagaatcagacatgtatgtaaccacttctactctcaaactcaagcttccacaagcctctaatggtgttttggttaagaatctctatctgtcctgcgacccttgtatggtaaattgtatgaagaagcatctcaatcctgcttcttatgtagattcttttaaaccccatctggtgagttaatcaatcactcattctctcctcctttttcttcatatgtttagttgtttgatgcttcatatttttgcagccaattagtgggtttggagtggctgaagtgttggaatctggggattcgaatttcaaagtgggagatttggttggaggaattactgggtgggagcaatatagtatcatagatcaaactgagtcactttgcaaaattcacctcactgatcttccactgtcttactatgctggtattcttggtaagcttactatgtgtttgttaatatttccaactgaccccttttactattcattacactgatttggtttagtttaaattcagtttggtattacagtcataacagttatgttagttattcattttgttatgataagattgtatacttgtactttgtatcttcactagctataactaatgcatcttttaaggtcatgtttggttgaaggtaatggaatggaatggaatgaaaaggaatcaagtggaaagaccattctcattttcattcctattcccgtatttttactcctcctaaccaaacatatcctaaatagtttttgctttgatttgctatttcagggaataactttgtatgacacaatttcttgaaattttcataataatgtattttatgtaggtatgcctggtatgactgcttacactggtttctatgagctttgctctccaaagaaaggagaatacgtctttgtttcggcggcatcgtgtgcaatcggtcagcttgttgggcagtttgcaaagctgatgggttgttatgtggtgggcagtgctgaaaacaaagaaaaagtgagtattattgtatactgtagacgatatagtactatacagtacaagtaattctaaagtctctcttttccttctgtttgaaggctgatttgttaaagaccaagtttggatttgatgaagctttcaacgatgaagaagaggctgatttggctgcagctttaaaaaggtttcatatatttttgttcacaacccaagttgtattctatactaatgtcatatccattgaaatgaaaagtgaataaattatctgttttcaactgtggcaggtactttcctgaaggaatagatatatactttgaaaatgttgggggaaagatgcttgatgcagtgctactaaatatgagattcaatgctcgaattgctgtgtgtggaatgatctcacagtacaatcttgagcaccctgaaggtgttcataacttaatgaaccttattaccaaacaagctcgattacaaggatttgtagtgactaactactatcatctctaccccaagtttcttgagtttattctacctttcatcaaacaagggaccatcatctatgtggaagatgttgctcaaggcttggacaatgcccctgcagctcttgttggcctattagctggctgcaacattggagcacaaatagttgctgtttcatgatttgtggcctagttgggatggttctttactgtttgtgttgtgctgcaatgcaacacaaattgttttacaccttacatcaccaagaatcgactgtgtttttgttaatcaaacgtatacagttcattttagttttgtctatgatttgttttctgtgtataatatatatatatatactaggtaaaagttacgtgccgagcacgtaaaccttaattttatttaaggtgttagataaaatatagttgtgtctataaatatatacattgttattaataattaaaaatatattaatcttaatatatacactcatatatatatatactagtttctatctccaagaagggagacaaatttaaggacagtttttatggccttcgggcccatcctttgaatgagggcccagtccctttcaaccatcagaagcacgtgaaggagtatcgccaccgcttcttctcttccggtttccaggccatggaccgcccggagcttctcacggagtgggttaggatctctccctacatgaggaccacgcctacccaaatttttcttcagaaggccaagatcttttccacgtatgacaagaaggccctcgatgtcggggagttggtcacgacagagaactgccggaaggccaaactaatatcggcgaaccagtcggtggatgacttcaacctttacaaagtcatctgcacgaatgcgaggactccggcagcagaaagggcactccgggtagacattatcgccacggcggaggacaagtaccagaagtacctcttcaaggagctggcctatatcaaggcccaggcggtcgttgggaggactcttcgcctggaagctccgccggagcggaagacccgtaggcccaagcctgtggtcccggtcccaaa

SEQ ID NO: 383176 - DNA, 854 bp, Cannabis indica
ggaacacctataacaacctcaaacaatatttcccaagcaataacagcaagaaataatcacagaaacacaatatgccattgacaagtaaagtttgagttccaagaactcaaaatttgtccaaccaccctatgatttaatacaactagctaaaatagagtttatctaaccaaattaacctcaaaaatttgaacctacactcaactaatcagacagaacctaatctctccaaaataaatatcaaaacccctaaaaactatgaaacaccaaaatagaaccaagataacttagattagacttttaccttgaattacactagccaaaaccagctgaagactcctcaattcacaccaaaatcctccagaattggtgctgccttatgtgattcgagaaagaaagagagagaagaaaagggttttcttcaatttttggtttcctttttccttaattattttctaattactaattcccacaaaaataaactttggctgaataagtggccaactgccactcttagggaatgccacctcatcgtcctatgcaaaatacctaaattacccttaagccttttaagcaaacctattgtgaacctaggggtaaaatggtcaaatgtcataacctcgttcatcctcggtattgaaaatatctcataagtttatcccactaagaaatagattctagacttacccatgtgactctaatggccatccatcgcatttcctgtcgttgtcgagcaaaatcataaaaattataaaactcagatatatcacaaataatactcctagagtttaataaaatctcctaatttgagaaattatatgtaacaccctaactaacttaggcgtattacgtgattt

SEQ ID NO: 383177 - DNA, 921 bp, Cannabis indica
ccccatccacatctcttttcttccgctttctctcgctcatcatcccaaccttctgacgcttcctcagctccgcgatatccctcaagaaatcattggtctgcccttcagtcatgtcgctatccacctcgaacaacccggctttcaacacgtacttcagccgatcgagccgagaatcgtcgtcctcaccgaagagagttataggctgcttgaggatccggagtcggcgaatgacttcttgctttggtaacacaaggttatcgatgtttcgctcatcagttagggatttggaagtggtcgtagccgatgaattcgtcgctgtgacggctgttgtggttgaggaagaattggatttgttggttccggccgcggcagcggtggctgccgtagtttgaagctgaactttagcctccaattcgcgtttttcctgctcgcgcagcttctgaatgttcttctgctcaatgtcggaccgcttgaaaactcgcttgccgccggtgtctgcggccaggctttggcgctttcggaggagctcttgcttgagaagatccatctatggttatctgagttctagggcttgtgtttgtattgtaatcaatgtgaattggaagttgggaattgaggtagaagaagaaagatgattcagtttgaatccaatccgaattagaaatagggaattatcttttttttttctttttttaagagaaattaggctgctcagttgggccgcccaacccaattcgcatttgggccccaaaaaagtataaaattaatgggccgaatatatatgagttgaaaaatgggttttttttagggctatttataaaaatatgggaaaataaggataagttttgatatatatggcataaaaacttaattacactaaatatgacatttttttaaaaaaacttgcaaatatgggaaaaa

SEQ ID NO: 383178 - DNA, 3714 bp, Cannabis indica
caaataaaatttgttgtccaccaaattttgaaaaaatattattatataattaaaaaaatttctaatatagaaaagtatcatataaatataaacaaataaccaaaataaattagtaagataatctcaaacatacaaaaatagaattattattatcataaccaaaatatttatctatcaaatttgggaagaacaaaaaaaaagaaaatgattatgattgtgaatatcaacaattgacaagtaccaatgaaacgcattcctacattttattaatccaggggtaatttcggtataaaaaagacaatggcatttttcgtaaataagtataaaaacatgggtaattatgtattattcattctataaatatagacgaaccccccattcctctaatcttccactcgtaccttctcatcctcacttttttctctctctctctctttattttctctctctaaaaatctctgggccctttttttttatttttttcgttagaaaatttttaattattatttatatatatttttattttttattttccaaaatttacttttaaagaaaaaagaatctttttcgcctaagattatattttaggtgaatttttttaaatgcccatagctgacgtggcatgcacccaaatttctttaaacaatgaataccaaaacgatgcgtcttcctcctcgtcgagttttaacggcgtcaagtaacaacaacaacaaaaagaggaaagaagaagaagttgaagttaacgcgttcagctcttgccgtcaaatacaacgaagaagcttaagtcggttcatcactctcagctcgtcggctcagataaggttcttggcgcctcggcgccggctaatcatctgttggctggttatttggctcacgagtttctcactaaaggaacgcttttcggacaggcgtgggactcggctcgagccggcttcgcaggtgtagatttggaggagaagaagaagaaacgtgaagccgagccgagccttgataagcttaggagatacgtggcagtagctgatttgttaagtggtgatgggacccacttacctggcatcgtcaaccctacccagcttgctcggcttctacagttgtaatgtaacgggagttggttgtgacacgtgtactaattgtatgtgggtcccattttgctccccaatttgaaaaatgtaaagagttttctctctcttttttgtttaattattatttattttattttattttatttttataatttgtcttgtaaattatggtgaaatttcctctctcatctctaaacaaaaaaagaattggaatattattaattcatattaacttttagggaaaaacaaaaaaaacctataaaatctatccattcaatatatttttttgtttcaaaaataaaataggaagaataataatatatgttaaaaaaaattctaggaaattcaattagttttagaaatctatatgaaattttgggttggaattgtttttgagatctagttttcaaatttatattaattttgtgaaacctaaaaccctctttttctttacatgatagaacaagtgaaatagaaattgttggtttatttttatttttaattttaaactttaaatttgaatgaattttttttttatatatttttggaaaaatttatgaaatgattgttggttggaaatgacttgttacttgttagtgaagaccttgtaaattattatttagtcaaatcattacataaatgtgttcctaaaaagtagattagatcaaaagagaagtattcataagggttttgctcttatttgcaaacattttagggttagtgagaattttagactttcacttattattattattataattatttattatttaagtttatctatttatttaaaagaaaagtttttcagttattattattggagtttggtacatctgtttttagtcacattaatttatactttatgaaaaaatatgataagatatatgaaaatcaagtcacacattattgaattttttttcataaaatgcaagacatatgttttacactacattttatgtttactttaataaacgttttttaaacaaaatgtacaccaattaaatatagggtaaatatgaatgagtttaataaaaattaatgatcaaagactctattttactaaataagaatttggaattagttagatgtgttatgatcaagctagttttttattttttgtttataacattttgaaaatctaatgtttgaattgcacaacacaaaatagaagagaaactgatcaataattttttatttttatttttttgaaaaaatagcttcagagaacgccagcaaagagcaactaagaggccgagagctaagatattgattgatcagtgacctcagtcaaaataaaattctaaatacaacgtggataatcaagccactaaagtgtatattgcagtagttgttaaggtagattttacaagagtatcagcaactacacaattttggagcaaagtaaaactcacaacattaaattatttacataaaactttaatatcatcaataattaaacttaaagatgaatccaagaacgtaaacatattaacatcatgaaccaagctttggtagtcgaatttaaaatgactgttgtgaattctaagagatatgcattacgaaactgcttgtctaatagcaagggcatctggccactcgggttgatgaagagactcacatttccacatcattgatgcatatacctccccattcgaatctcgaatgaccatccaaggccacaagagccactgttgacgtcgagagcggcgtcgatattagctttgaggaccaatcaataacttttacaaagtacaaaacgcatatttatctaattaaatatataatttatgggatacaattttgtcccgtgattgtactttcacggaatgcattccgtgatgtacgacagccgtcagatgagggacttatttgatctgacggctgagattgttctaggggtaattagggttaaaatgtagaaacgtactctgacactcatttaatgtaccccgagacccatctaatgtaccacggaatacattccgtgaaatacatcacgggacaaaatcgtatccctataatttatatcttgatatataaaaagtatgagttgaaaattaaattatagtacatatgaaaaaggtggtatccatggcttataatgtatttgtccactatctactatatctatactttagttttaatataaaataaaaagtcaactttgctatctatcttatttgatttgttccattttttttttaatttatacctttttttcttgataattctatttctttagtaaaaaaaaattatgacttgtaaactattcatttattttttattgaattacttgattcaatctttattcccctcttttcgatgaatgcattaatttatttattataaaaatttggtacaatatatttttaagtccgtcattgcatatgtttttagttacttggatagtaaatgtgtaatgttttagcaattttttatattttcgtaattattgaatatttaaatacatttagtaacctttggtatttttctccatcaaaaaattaagtttttaaatgctaaaaaaactaggctaattagcaatttttcccccgaactttgacatgtactaaatcatgcccctgaatttttttttgccgttaaaaattctccctgaagtattaagattgtt

SEQ ID NO: 383179 - DNA, 736 bp, Cannabis indica
aatttcaaaccatattttttttacggtgcggtgtgatgcggacagtttgagatgtttgatgaacactcttgtgttttcacaacaaatagattaggggactaatttgtgaagaaagataatttgaggactaaattgccaaataagataaagattaaggactaaagacaaaaaagccctcattttatttctcaacacaatcacactctctgtcgcctcgtttgcctcacgtacacaaccagaagaagaagaagaagaaaacaataacacacaccttcttctctcggtcattcatggcctcccaaacggaaccaacccgccctccgaatcccttatctcaaattctccactcaaccacctccaatcttctctctgttttcaaccccaagaaatcgactccgtctgctccttctaggctctgcgttcctattcttatccctgacacgcccaagtcactcgccttcgaatcatctccgctcgactcggcaccaccctccaaatcgactctcaaaggcgttccctcggcgccggagtccacttcggcgttcccttcctcggttaggatttctgggctcaagtctaaatccaaaggtggaggacctgcctttgtgggtcaggtcttcagtatgtgtgacctctctggaactggtctcatggctgtctcgacccacttcgacataccctttatttcccaaaggttcgttatcctaatcttctttattattttttttttctttta

SEQ ID NO: 383180 - DNA, 1477 bp, Cannabis indica
aaaaaaaaaaaaacaaactagaagtggaatatagatggttaccacacattgcaactcaaccacaataaattcttctgtaggtcatttattttcaactctcttcatttattatcataaaaatatttaaaatataccaataaataaaaaaaaaaaaaaaatcttttaagaaataacaaaataaaggaaaataataaaatttaaatatttgtaataatttaattaaataatatttaatattttttaaaaaaaataatatatgtatactgaatatttaaatgcaggaaataattgtgaattttctaacaaaattatttgtaaaaactattgcagactttgatatttgttataataataaaaattaaatcaactagtacactgagactcaactagagctaaaaataataatttgatttatcaatatgtatgttttattttatttttcttattacactatcaacatatttattttcattgttataaagctttttcacatttaaactaaaaagtttaaaaaatacctaatttgtactgtaaataatctttttcctaacattgcaagcctcgtctttgtccgatttcgtaaaagaatattagactcaataatctccacttgaattatggtatgtatctacttctttatatatttctttaacttttttttaattgatcgttttgttttgtttttctcttttttaagtttggtctcaatcatttgttaattttatagtattatattatgtaagcgatagaaacatttatttagattattattgtacagcatttcaataatctccatatatacatatattaaatttgaaataaaaagataaaaataaatatatttaccttttgaagtgaatcgggatatcttcgaatctttttgcaaattatatcctaaacagtacgtcaaactcacacattgctcttccaaatctaccaccacacacaaggtttagtgtgagctaataggatataaatatataatgtattcttgagtttatctcaacacacactataggcagaattcacgacagtcccaaggacatttttttaaggaccaacatcgctataaaaattatctgagtagtgaaaatcgtcgcctatagtatactactggcaacggttttcaacactaatatagattaggcgtcggtttataagtgtggattaaaactttaaaaaaaaatgcactatttttgacaatttagaaccgtcaagaatcgtggcccattataaaacctcaatttgaccgagtcaaaaagagaaaataaatcaggaacaaaaacaaaaaaaactaaaacaaaaacagaaaacaaataataaaaataattttttttaaaaaaaaaaaggacaccttagggggatttttctttggtaagtcaaatccttcaaccttcactgaggtcctagcatggacctgcaaaaaaaaagaaatacaaagtaaaacataagcaacaaatcttagatacaataacaa

SEQ ID NO: 383181 - DNA, 3641 bp, Cannabis indica
tattattttgaaaaatatagaataaaattttattatttataaaaaatattctaaataataaattttacaaactaaatggtctaaaaatattatttacccgtaactaaattaccttttatgctaagaaatctgacaagaagtacttttttttattattcttttcatttagactaattataattataatatagtagtatatttttattttctttttctcaccacagcagcttaattgttcttggtgttgacttagaggagtacattacatcacatgaaatcatttttcggtcccctgaatctataaatctcatgctatgatataccagtactagctaattatataactacaagcactaatttccattagaaaggttatataagctaaagatcttaaaaaaggtagtattattaagcttcgaatataaagaaaataataaattaataataaaaagacattagacatggatggaagacttgagttagaagcttcaaagagattaaaaagagaccactgacgcgtgtaacatacttgtctgtcatgacatgtatgatatctatacatacatatacgaaaatattattatatataatcccattatatattatatatgctatatacgcacctctccatgccatgcacacacgcaaatattaaaagaagaaaaaaaagccacaaccacaatcatcataaccaccaaaaaaagctcctctcttttcattcattcatatctcattctccaaattaaattccctataataattattaacaaccacatagtatatatataaatacatgtatagcttttcataaaaaaaaagaaaaaaattacaagctaataaaattctcgtctttcgaacttgatccactcctttttcttttcttcttttcttagagatgatcgtccctgttaccactaacaacccaaataaccaatctcccaacacaaaaaccgacaacaacaacaataatattccgaacaacaacatcgtatttcatcaaataattcccaatctctgttacgagcccacttctgttctagacctgggtcgtagcccaagtccggtactggcggcgccaggtggcggtggcgggaaaccagccaacaacaacaacaacaaggtagttattaataatagtaataataataataataattcggacgacgtcgttttgagtactcaaacgacaaatgatcatcataatacgctggagtggcctgtggacgatcaggttttgcataacttggattgggataatatcatgagagaattgggtttacatgatgattctgtcccttctcctttcaaaacagcttctactaatacaactaccaccaacgctactactcatcatcagatcatcacggccgataatcatgatcatcctcagcccttcgatccaactattgctactactactgatcatcacttcaacttattctctgataatcataatttgaatctctttcaggtttcccatgattttcaaaataataataataataataataattggaatattgggtttgattttattgaagatctaatccgagttgctgactgtttcgactcggacgatttacaactcgctcaggttatactagaccgtctcaacaaccgagtcagatctagtaatatcaataataataataataataataataataataaaggagtacaacaacagggtggtcgaccgtttcaacgtgctgctatttacttcaaagaagctcttgagtcaattctctccggttcgaaccggaccacaggtcgactctcttcatgggccgaaattgttcagaccatcagatcccataaggccttttcggatatctcgcctatcccgatgtttactcaattcactaccaatcaagctctactcgaagcccttggtgggtccaccttcattatccacgtcatcgatttcgacatcggacttgccggacactacgcctcgctcatgaaggaactcgccgagaaatacgagtctctgcgagttaactcgcctgttctccgagttacagccgttgttcccgaggaatacgcggtggagagccgattaattcgggaaaatctcacccagttttctcaagatctcaagatcagattccaaatcgacttcgtactcgtccgtgtctttgaagcgctgtcttttaaggctgttaattttagggaaggggagaagatcgccgtgatattttcctccgccgtgttgcgccgccacggcggcgggtttcttggagaggtgaggcgggtttcgccggcggttgtggtttttgtcgacggagaaggttggagtggcgagcccggtacggctccgacgacgtcgtttaggaggaatttcgttggtggattggagttttactcgatggttttggagtcgcttgatgcggccatggtgggatcggagtgggtaaggaagatcgaggcgtttgtgctgaaaccgaggattgtcatggcggtggaagctgcttctgcggcggcagctgctgtcggcagtgggagaagaacggcgtcgtttcgtgagatgtttcatggagccgggatgaggccggtccagctcagccggttcgcggattttcaagccgagtgtttactgggaaaggttcaagtgaggggtttccacgtggcgaaacgacaagctgagttggtgctttgttggcatgagcgggcccttgttgccacgtcagtgtggaggtgttaagaggattaaaaatgttaattaatttagggtataattttaattctctctttatttatattattaattagttattaaaaaaaaaatgagagggttaggaggagaagggaggtctggggatgtataaattaattgtaagagaagcatccatgaccatatattaatggttttatttaagtgttttttagtttgtgttgctgtctacttggttgttataatccttttttgatctttttatatatttgggagcttttgcttgtatttcttcaaacaaaaactacacaattattgcccttttgcatactcgtacataattatctaattttattttcacatcttctttataagtgaattcattaatctccatgttagtgcagatatttcaaatttacaccttttgtacaatctaaatacatgatgtgttaaaaagtttaataatttatataataaatatttattagaaaattataaatcaattaagataatattaaatatttaaattatattaattgttgaacatttcaaattataatgcaatttacaagcttgtcaaaatactgactaaattaataaaaattcacctatttatagctttgctccttattcttcgataacttataaatatacactatataaacacaatatatgaaacaataaagtaaagcctatgaggagattgagattatagaagctatgggccgatatcaacaggaactcagattgggcagaaaacaagcaatgacaaggtgtaaagattgaggatagtatgctctgtttaagacattagtaataattaaattttgagttctgtatttggtttgattattttttattatcaatttttgctttcttttctctacaaaatgtcagtttatctcttattagacgattgataaattgaataactcattacgctagtttgtaagtggcataatttaat

SEQ ID NO: 383182 - DNA, 4095 bp, Cannabis indica
ctctcgtgaaccctagaaaccagtaagagccaagggttttctttagtaattcagagattagatagcatcattgttgaggtttcaagcttgggtaagcttcctagttcatttttctatggtttctttagtttaagatagcttctcttgcatgatttttgagatgttgggttatgagtttttagagttgttggattttgtattttaatgatatattatggttgtttgaactgatttgaagttaatcgatggtttaatttggtgtttagacaaggtttgagtgttagaactcaaactttagtctttaatggtgaatcttgattctgtacatgttgacgtgttttattgccttggatatattctttggggtatattaagaaggtctggaagattttgtatggtttggattcgaattgatttaggtttcaaattttttgggttacttggtgtaaaccggttaaccagttttacaggccctgtaaaacccgttaaccagatcagtagttgggttgtcgaatttttcgtgctagtttcagagccttgattggtagactccttgattatttagggtattgccatgttgtttatcgatgggggaaatttttaagtccccggaaagtgattaagcgtgtcactcactcgtgttacgaataatgtgatttaggggcctataattcgtcgagcagctgttccactcaggttggccagcacacctgaattcgtaaacgaggtaagattagtataatgttatgcatatgtgtttacatgtttagtgtacatgttatttatgcctgttagagtagattgatagcagtatcagtatacatagagttatactggatactgatagatgtatgtttggcttaaatactgatcgatgctatcacataaatataactagagtatgactataatattgagtataggctgatattatggtcgatagtattatcgtatgaacgttctggactcagcaccgtgtgggacacgggaataaggttatggttgggtgtatgtgcgcctgattataatccagctcattgctatgttattatttatgcttttttgactcacagttgctatttctatatgtaggtaaggacaaggctaaggctgagcagccgtgagagtgagaaaatagagattgtacatgtcggggcggttaggcttggagcgtacagtctttgggacattagagcttattttatatagtcgctaggtgacaaacttttgtaatttgcacaatgaaacttttgtaaatacttttgtaaacgggatcccagatttatatatgtatgttattttatgttttcaattaattaagcaaaattttaattaatcacgattttctataaactcgttgattagcaacgagctgcacagtcagttaaaaatcatgttaacatgcttaaaatagttacactgattgtgatggatgatagatcgaaaacctagccccctaaaaaatttagagacacataagcttgaccaatatttccagtggattttattcttattattagaagttccccaccaaaaattggaaataagcctttggaggtttctacagttagatctaggcagtttaaaacaagacattgcataggagggtatagcctgaactgcagccttgataagagtctcttttcaagccctagaaaagaacttaccattccaaacattcatttttgaggaaacattttggactaggtagtgaaacacgaaactcattattatgctgctttttctaatcttttttgaatctgactactcatcctctttggtatttctcagttatcttcttgaccttcctctgttttaatcatgacttattgattatcatctgttcctgattaagtttcggtaaccctcccttccaaaattggatttgaacaacactcaccctgttcaagaatcttagaaacgtcatcatgacccttatttggactctaagatacaacaaactttttcccctttataacagcctccttattctcaattttagtgctcttggctttccatttctaacctaatcgacatacataagacctatgcccaaaaccaccacatttagagcattttgtaggtagcaattcatattgaatagggatagaatcaatcattccccgttcactactaaaaatggttttctcgacagttttaaattattggataaagtatttccatcagtttctataaccatcgcctattcgaccgtcgcaaaatgggaaaaattgacaacaattcgaaactgtaataattattgcaaatgaagattttattatcaatatgttatgttcatatttacttaaatttttaaactttagattataaataatgttaaatacacacacatgatttaataagttggataattattaaagtttctagaacccttcatttataatatagaagtccacacatgttctcgaagtaataataataatcatattaaatatattttaaaagtgataataatagtcttattaaatatatgatcatagataatatatgatgatattttaaaagtgataataataatcttattaaatatattatcaccaaaaaattatggatcatatgtgcatatagtatcagagctaatggtaaatgttatgggggcaacaaaatttcttttattaaaaaatgacacatatatttttatagaaaaaaaaatataaatattctggggacataaataaatatattagaattaaaattattttttttatagaataaatatgaaaatatgtaaaattaaaaaaattgtaattttagaaagaaaaaaatgaaaatatatgatggcaaaaataaaaaaaaaaaattgtggaggaaaatatgaatatataaaaaaattatacaaaaaattaatttattaaaagttgagtgaggttatgtgcccctcatccggccatgtgagcatgagaaggagacatattcatgttgcacttttttttctcttagtttaggtttcatcccactgagtttttctaacaagatttgtaacgagacaacttaaaaataatgatggatatgaaatatatgcatatatactgcactcttttttttttttcttaactcaagttttgtctcagtaagtgttcctagcaaggattttaacgaggcaacttgtaaaataattatagatatatgtatgaagagaatgtatgtacatattgtattatttttttccttttgtcctactacaaggattttcctgacaaagtttctaatgatgtaattttaaattatgttgagatacttgtaattcatgagcaagtagagaatgtgtgcgattgagattattggttgagtacatatgaattacactcaataatgcaatatcaataattctctatgaacataacgcaaaatgtattcctcaactaaagctataatgaaagatatagaaccaaagatatttttacttaaattcttctttacacacgatcttcaagagactagtgatatcgactgatattcaacaaattcaatcatctgacaatcttacaaatttattcacaaaattattactaacatcaacatttgagaagacgagatataagattacaatttgtcgattataagatcttcacgaatgcctaaatgagaggagtttagagaattgaaaaatagctggggcattttagtctttcttgaattctccactggttttttaaagtgcaaaaatgatggaatctttcctttatttttgtgccaattcggttagtattagattgtgtaatattccttttgctttaacaaatgtttacatgtgtatgccactgaatggctattgtatttgtcctcttcgaagtcactagcctataaatgaaataaatgttgtctcactaatttgagctgagatatttatttttccttttttgttagattttaaacttggtatcagagcactctaggccaccgccatggcaaatccaaactcagctccaactcaacaacaacggatctaaagtttagggactgctacattagacacgtttcactaaaactagccaaaaataatagcacaaacaaatgtacttgttcggactgctacaatgagtccaacacatatggctgttggaaattatttta

SEQ ID NO: 383183 - DNA, 2145 bp, Cannabis indica
atatatatatatatacatacaatgtcattgtgctccataatttgagttcctgttgcgagttggtacttctgtattatattctccatgctgtaacaataaattgacatattaaaaacatgcatgaaacgtatagtcattaacaaggttgtagttttttttttcctaacaattaacaaggttgtaattatattcattaaaaacaatataatttacagtataatattcaatgaatatattgtgacaaacaattttttttatgcagagccataatttgatttttcagggcacacaagttaataaatatattacaaaataatattgctcgagtatattaaacaaaattattttgtgacagaagcacataattaaataatattgctatcaatatatgtattcataaaccctagctattactcataatattgattcaaatttcatcatcattaatttgacatgtatgtagtgtgataaatttgacatttcatgagctagtcttcctttgacaatggaccatttccagaaatgttcttatgacagaaaagatctgtagatctagctctactgttcacaactcaattagtaattatattaattatctgagaggacaagaaagatcaaaaaaaaaaaaagagtttatgataaagagaaaagaaatgttataacaacaacaccaaataaaccaacaacaaaaataacatcgttaaactaagacagatcgaaggtaattattaataatataaaactaaagagatgatggtatatatataccttaaagggtcactgcagaactcatataatttgccattagcagagaaaatgatgaggccgatctgggcatcacaaagcacagcgagctcatgagtttttttcaaaagcccagctcggcgtttcgcaaaggtgacttgtcttgtggttttgttctctattcttgaaatgttaatcttcccacgtcccattctctgcacctctaattcttacaaacctcttctatatattaattaagaaaaaaaaaactatacaaattaagaagaataaagaggaaataaaataataaatcaacacaacaaaaatatcactaaattctaatttcaaattactagtaattaatatatttatatataataatggatgggattgttaatatttataggattgttaataatgtatatgctatgtacttcttttcatttttgccccgtttttctcggatgaaattaattgagaggaacaaggaaattaaatgtttacaggattggaaactcttgtttttgtttctggaaaaaaatatattatatgtaatatttctttattttcaaaaataaaatatatagtaaagcatgaaaggtaaggaaagagaaaagaagaagggttttacagggacgacattgcagacctaactagagaaaagaagaaggattttacagggtttgaatatttctttattttttttaaaatatatatatatagtaaagcatgaaaggtaataaggaaataaagaagaagggttttacagggatgagatacctaactagtttctctcagtagttcctgcacttgtagggttagaactttgggaagaaagctttttatggtagcttgagctggccaactctatttgtaatatgtttgcctcagttatcttatgcaaatagcccaaccctttccttcattattacgaatatgccaaatacacaactctatttgtaaaagataaatatagtgactaataacaatatatgattaactcagaattaaaaaaaagtcccttacaaaagaaaaaaaaaacacaaaaaaaaaggtcacaacaaaaggtaggattagtttcaagcaatattataagtttgagtacttatacctcatgtgatccgttgagtcaaactaaaattaaatcagtataaatggtatactggttaataaacttagctatgtattcttatccattctgcagctacgattagctatgtgaaaaattaatcatcaagctggcttaaataaaacgaaacaaaaataaaatattttttttagaaaaaaaaaatacaacatttatatatacattaaaagaaatgcaaatatattaatatgaaactaaagggtactactggtgactaggaccttccttagtgtcataccgctattggtgtaatt

SEQ ID NO: 383184 - DNA, 955 bp, Cannabis indica
ttttttttcctaaaaatataaattttgtgtgtgggtatggtgtgtagagaaaaataatgaattgtgaaaagagaaataagtatgaatttattgtgtggtaaaaatgagaaaaacaaataaattagaatttaagtagagaaattaagataatgagtatgtaattttaaaataaaagtgaaatataatttttattgtataggtttggtaattttaccaaaccaagttaaatttctttacttcactgcgaccacatgtaatgctgttggcattttgtttaatcatagtgaagaaaggacgccatataatttagcagtaatgttaaaaaaaggcacatgtgacttaccatagcagaataaaattaaaaacaacacgaaaagtaaatttaaataaattgtgaaagttattacttgtaataatatggtcaggtaatcaagtgatactaccttgaaaattaaataatgtaatttaggggcaaatggaaaagaaaaagaaaaaaaaaaaagtgaaagctagctactactattataaagatggccttcttgacttttagggaagaaaaaatgggttattatgtgggttgtcttccttcttctgataattatgtaactttctttaactgaatcatttggttccttgcttcacatttacgtttcatactcctattggattgaaggcaacaagaataataaaataaatgtaattgtagcatataaagttgacatagaggctggtgtagtaaatttttttattaattagttatatttaattaaggttaattagattatttttttctccgaattttaacatgtaccaaatcatgttctctgaatttttttagttgttaaaaattcctactgaaactattgagattgttagatttataggcttttgtctaatttcattcaattttactgtttcagtgattgtttatgtactaaaccatgctctccagact

SEQ ID NO: 383185 - DNA, 1398 bp, Cannabis indica
atttaatgagtaatagtacctcaacattctttgagctgagttttcacctttctagtaaaaaggtcaccatctttacttggtttcagagcctcaaattgctcacgcagtcatgtccgaccagtcactattcaaaaaccttacctacttctggagctgtacaaagggagcagcaggtaccagctaatgctggaaattagggaacaaatggtagacaagatttgcatcaaaccagctccccactagaccttaatggacctcacttttctgggtttcaaaatggatctagtggtttcacaagtgcaccattcggtaacactctatcccagccctttgcattaaaacttgatcgtaataactatgtcttgtggaaaactatggtttccacaatcatcagaggccacaggttagatggcttcataaatggtatgaggaatgctccagcaagagttgcaacaggagatggccaacctggttttggtgttcgaacaaacccagactatgagcaatgggttgtttgtgatcaactgctcatggaatggctctatggctcaatgacaaaggccatagctactgaagtcatgggatgcacttcagcaagatcactatggacatcgcttgagaatctttatggagctcattcacaggcaaagatggatgatctcagaactatgcttcaaaccacacgaaaggggtcaactacaatggctgattatctcagacagaagagatcatggtcagatcagttagctttggctggggatccttaccctgaatcacatctagtgtcaaatgttcttagtggacttgatgtcgaatacatcacaattgttgcattgattgaagctaaaaacaatctcacaccactaacatggcaggaacttcaggaaaccctcctaagtttagacagcaaacttgagaggcttggaggaattggatatgtaaaaacacaagggtcttcaagctctactccaccatctgcccatttagcctcataaacagaatcaaggcagcatcaacaatggtcgtggcagaggacacaactcgaatcaaaactatggtggaagaggcttcacacctagtaacagaggcaactataatggtcgtggtctaggcagaagtggaggcgaaaattctaaaccaacatgtcaagtctgtggtaaatatgggcattcagcaactcattactacaatagatatgacgaaagctacatgggttgcattccaaacactggagcagggaataactcaggacaagaaaggaaggatccagcagcttttgttgcaacaccagaaacggttgatcatgaggggtggtatgctgacagtggagcctcaaactattgttggaaatattttaccaggacctagatttactaccatgtatgtttcattaacatc

SEQ ID NO: 383186 - DNA, 1520 bp, Cannabis indica
aaaaaaaaaccggaaaaaaaaaagcgagataaaaaacaatgaacgtacgagtcgagataccgccgcatgaagatagaagtgagcttgagaagggtccgaggaggaaaggtaatgagcagccaaaatgttggccaaaacgcagtcttggtcatgtaaggtcgctttcaaaatcacagacctctctctcccataaattaacacctttgatttttccggtcaaaaaaaaaagaaaccattcagcatacttatggatattgaaagggaaagctagaaatagcgaaacgacactaaaaaagaaatggataaacctgatggtagtaatggttgatggccgagatgcaagcatctgaaggggtcctcacttcgtaccccatcgatctctttgacacctccctccatctctctctttctctcaaattttgtacacgaatgaaactagtgttgcttctgatgaagctcttgattctaatgtacaaaaacgaattataatattattattatttgtttttacggttaaaagaaatggtgtgtgacggaatgtccaagtttaatctttttgtcaaagaaaacataaatgatggtaataataaataaagacaacaatgtatggtgtcgtgttgaccattttggtttttagttgaaatcgaaacaattagtgtacagtcggtctctttggttaatgcgttggaatgagatgagatgggacagaggtagagacatgtggttcttctggataagatgatgctttattaatgtgttactttaaccagtgactgcgttcaactccaattaatgaaaattcttagagcactcaagggagtctctccactccatttttgaaatagctcattaaaattcaattttatctcgtatatttaaattcaattttgattttatttaaaatgtttttaatgacgatgatgctaagttgattctatccattttcaactctagtattgatttacaagatgagattatgtagcacttttcgaataatggcgaatatagtgtcaaaagtaggtacaaggtcgctattggattgattgagagtattgaagcttccaatatgaaactaattgagtccctttaaaatcacatttggaagttgagagttgttaacgcagattttcgttaactatatttgagcttaaattgtgataaacttgacgagtcaatcttattatatttctgatacaactctcaggttgttttttctcttatgaatctttcgtcccttttttagtgtaacttgcctctatttataattacatagtaaggcagttaattacatagttggctgatattttacaacaactatcccctgaaatcgtgggatttgattacagatcacgtaaaataaatgtggttaatatttgaaatcacacagctatgataggtccgcttttaccgggtcaaagtaaacgtgtattaaatacgttggaaatcgtaacgttctgggatgtctcgatgggaacataacatcaataaccttggtgcgagctggagcttttcccatgttt

SEQ ID NO: 383187 - DNA, 1741 bp, Cannabis indica
cacattcatcttgagacatgaacttgttaaggaagatctacttgggaaagaaatgattctcattgattatcaaagtacattacaaacttatataaagatgaatgtaacgaattccaagtatgactaaactaccctttaactaacttcttaactaattgagtagctaataacagaagagattaggtacaactgttggttattaagtctcttaacatccccctcaaacttagggtagagagagactttactcttttgcttatgagaagaacatcgagcatttgatagtgattttggtgaggatatcaacaatatttgatcataggctgctgtgtgcttcacctcgagagtcttggcaaggataggttctctgacaaagtatagatctaactcaatgtgttttgtttgagcatgtagaattggattgaaagacattagcactatgctgagcttgtcacaccagattgttggtggtcgaggtgtatttggactttagtcacttcgttgagcttgtatccaagtgctcttagccgttacactagctaggcttcgatattctgcttcattgtttgagcgaggtactgtttgttgcttttaagaggactaggtaaccaagtttgagccaaggtagacattgaaccttgaagtggagtgtctatcatcaacatcagatgcccaatcgacatcacaaaaccctagttaatcaagggtagaagagtgcttcatgttaagtccaaagtcaagtgtaccctttagatatcgaaggattcttttaacagttcttcaatgtgactccaaatgtgaatgcatgaactggcataccttgttaacaacatatgagatttcaagcctggttattgttgcatattctagggcccttactaggcttgatagagacggggtattttacagggtcacttccaatacctgatagtttttttcttccagtcactgagtaggtaggatgttggcaaaaagttagggctcttaagcttgttaagaacattggtgtaacacttcaaggctatttagcccaatattattgacttgtggactagggtttattaacacctgaaccatgtaaaaatattctccatttttaattcttttatttaatttatttacttagctcttattttattatattgagtttctaaaaatctcggcaaaaacactatctactcactacttctgagtctctgaccccacccttggtagaatatgaaatagaatatatatatatatgtatgttttttttggtgaaaatctatatgtatgtttatatataaaaaattagggaatggtagtaaaatgttaaggatcattggctccctcgtttgtctgcgtttcaaccaatcactcctctgatgagttgtctagctaggtgtgagagttggaggtggcaaattttatattactaagagagctaactttattgttattgctctattcatgctctctcgattcttgttagtatttgattattttaataaaattttataatttgaatttgttatatataaattaattttataaaataataaaaagaagtagtaatacttttgattaaaatactattaaaaaaatttagacaaaaaagtaaagctccctatccttttgctattatagagagttattttttggcacaaaacaaattttaactttgtgcttcaatacacaattgtaaaaatgttgatgtaaaaatttaatatctaattaatgttttaattaaaaaaaaataaaa

SEQ ID NO: 383188 - DNA, 879 bp, Cannabis indica
cttttgctcttatgaagtatgaagtagttgatatacttgttgaatccacttctttgattatgtttgactttaccgagcaaatattaatactatgtgaattttcatgtaaaatgatcaagaaaatattagtaacaaataataatcaaatatgtgtatatcatcaaaataagtgaatgattgacttttggtcaacactttgcccccaacgtgattatcacaaaagcctttgtggacttcactgaggaatcatgcaacttattctttataaaacatctcatgagaggtaaagagaattcatgcctgtacattaccctatctagaattagataccgtacaacttattgtacaaacttccgggcttcatttttttcgtcaggtagtgctcatgttttaaggtaggtcgcgatgggagtcatccatgaaggagtgatgtctagcaggttgatctcttctgaacaggtaatgcttggatcttcaaggtattcaattgacatgagatttgttttgtccacgactgtgctacttgctagtcgggccaatgcatctgatgttgcattttcttctcttgtgacctgccttatggtgtaccctttaaattgtgctagtaaatccttaatcttgctaagacatgctgcaattttttcaccccttgccatgtattctcctgtcacatgattgaccaccaattgtgagtcattacatatgtcaaggtgttcggtgtgtgttgtcgagcgaaattcgcaacaccaaaagtatatgataattctaataatacgaagaaattgtttgaagaacaaatgcgagtattcaacctaaaatagcaagtactcgagctgggaacgtaaatacttaatagaaaactggaaataacaagaagac

SEQ ID NO: 383189 - DNA, 1854 bp, Cannabis indica
tatttattttataatgtatttaagagatctatacatactaacaaagaaacatatggtactatgatatttatacatatttaataattattactatgatatttatacatatttaataattattttgtggtacagatcatccctaatacactgtggaacattttaattttgcttttttttttttgtgatggtgtagtgggccaccgaaagcagagttcaaaaaacttgttgcagtcttttaaaaaacaaaacacaaaaaggagtttgcatgcaacatactattagaattctgtttccgcactctaaaatatttagaatttttcagacttattatggaagtgtatctaactacaaaatcttattaccagacattccctacaatattgtttgtatatttatactgttttaaaagattaacaatctctgtatttatgtggaatggtgcaggatttgcaatatcagcagctagattggggttgccagatgcagggcttatatcgtatggagaaatggtggaacagggaagacagatcactcaagctgtatccattcctgtttttggagatgctgatactggctatggcaattcaatgaatgtaaaaagaactgttagggagtatattagagctggttttgctgccattagtcttgaagatcaggtttataattttatatcaacttaattttacagtcagtacatgatgagttgtttcatgtgaaattttcttaaagtcatcagttttgattaaattttaatttgaaatatttgcatataaatgtatacacataggtatctcccaaagcttgtggacacacacaagggaggaaagtggtgtcaagagaagaggcagtgatgaggataaaagcagctgtggatgcaaggaaggagagtggatctgacattgtgattgtggccaggagtgactctcgtcaagctgattctatgcaagaatcattatggcgagcaaaagcttttgctgatgctggtgctgatattatattccttactgctctcacttcaaaacaagagatgattgacttgtgtaaagttgctcctcatgttcctaaactggtatacatatatacataaatgtcctcacaccaaattaatgagtttttgtttttttttttggtgattaagagtgtgtcattttttgttattaggcaagtatgcttgaaggagggggaaagacgcccatactaagcccaactgaacttgagagtattggatataaacttgtgctttatccactttccttgcttggggtatccatccgagcaatgcaggtaccaatctaaatctaaattctataccatgatgttgaaagtgaaaaataatggtttttaaccagataaataattataatgtatgtatagaatttttctcatgctggttccaagttagtgacttaatttcttttcactagtacgtataaatgaaagtgactccaacttttaattgcgcagaatgcacttatctctatccaaaatggtcacgttcctcatgaaagcatgcccacttttgaagagttgaaggaaactgtgggtttcaataattatggtctagaggaaaagcgatatatgctccatccttccaataaatagtctactactttcaagtttcaacatatagaactcaagaagtttcaagtgtcatcacacccagttttttgttattgaataatttgcagcagaaagcaaacttaggggggaatgctctgtttttttactatttttttaatataagctggattcggcatctctttcaataatataaactatataatctaatctattaagtataagtctactgtgtatttgttatctactgttacatcagttaggcctactgttagt

SEQ ID NO: 383190 - DNA, 1932 bp, Cannabis indica
tgaaaatgaacatcatacctcttaaggccaagaatgttaacaagagaatcaaaaccaaacaattccaatttggagtccctttgaggtcgattggcttcctcatctacaacctcatcgatattttcctgcgaggtcgcatttactttcctgccatggggaattaacaaaacacattggaacatattcaaccaaatttatcttttccacttctcacaccttgctcagttagttctccagagaagaattttgtatgggataaaaatagtaaatgttcatatattttctaaaatgcaacaagcaaattgaaaatgaaacccgtagtttaataatgtaagcaatttaaaaaagaaacattctaagcttgtaactcatttatcagagagttacaaaattcaaggtaacgtagcagtagtatttcaaagcatcagtttcgagagacagaaacataagactatttaacttttgcattgcttaattatttgattaacaaactttaaacagcttaatgagctaagttaaaccaaaatcaacatcacaagcaaagcaaattgtcaaattcatgactaatttctctttacttcacgataaacaatcaaaaaccttgccattaataaacccaaacgaactcaaatacgcaatccacctaattcaatatcaaaagtaactattcatctcattgctcatttctttccaatcaaatttctagggaaacaaacagaaatactcatggaacagcaacatcactataatgcatcattcaaatccaaagtctcattcatttctatcgtagtatacatcaagaggggaaaaaatgaagaaagagtgcgcataacgaacatacttaaatggagcctggtgaacgacaggcaaagcggaagaagaagaagaagatccagaaggatccattgaagacatctcgagaacggcgctatcattatcgacaacaggacggtacttccgacctatcggcgcgcggagattgtcgtcggaattactttctatatcaccgttgtccattctctcggatccgaaatggagtcagtttttggttttccaggaaaattgaaatgtacaattttccgggaaaattttcagatcccgaaatcaaaatgcaaaatgcgtaagctaaggggatccgaaccaggaaacaaagcaagaaagaaaggcaatacaaatgttttagtaaaaaagaaaaaagaaaaagtgtaatttgtaatttgtaagtaacaaatattacatattattaaaatgaaatatgttattttgattaattttataatttgtcgaagaaaattcggagagaaaattaaaataaataataagagacgtctttgtttgtattttaaagaaggaacggagaaaggaagtgaaagaggagacagtcacattagagccctgaactggtatgtcgtttgttgttcaatgtcttgcgcttaaaaatgcttctagatagacttatgagggtaattttgtcatttcgtaatgtattttttaaaatagtactaaatagtatccttaaggcccaaactgtgagtcctcactcatgcgcaagaaaaaagcagattattgactggtcggttttactgcttcatttgacgttatagaatataattaagtgacagctcacctgccagctcaattcgacagcgcgcgtgtggtggattagtgtgtgagtcatcacttatgcgcaaaaaaattgggtgacccttagggcccaaactgtgagtcctcgcgcacatgtggtggactggtgtgtgagttcccaagataaaatagtctttgtacgagtcattctgcaccgaacgatattgctctattacacctaaataaaattgctctcagaaatttgatagaagtttttaaagagaagaaattgttctgtacagcttcttctagtgtttatatttgcagcaaagtctgagtcaacatagc

SEQ ID NO: 383191 - DNA, 1316 bp, Cannabis indica
aataaataataaaaaatatatatgttaaagaatagcagggcaaagataaaaaaaaaaatacttactagctgtattaggtttagactcttgtgccaatttcattacagaataaaagagagctccagcacaatccgcagttaccttgttgtatgacaacctgacacaatggccaaaatgtaactaaagccagttaataaacgcgaaatgtcaaaacattatgtcattagatattacaatgcatcccgttatacacaaattaaaatgtcaacagaagaataaacaactgcatcgtaggaaaatgctataattgcaactgaggttctgcttgtgttccaccacattttttataaataaaagacgatgacactatcatattaaagaaataaattgcaaccaaaagagaccttctgaggcaaagtaccaacagctaaactcacaaaacttatgttgaccaaaagggccagacaccatgatcaaagttcattctatctactttaaaaggtagttcataaaatagcaagactaaactaaattttcactccgccaaaagaaacacccacatacacaaatgttttttttcttagaaaaactagtttcattgttataatctttcttataaatacaggtgactctgaatgatacctaatcagtgtatcaagataccatacctaagtgaattgatttctaagattacattgtccactttaatattttcatgtacagctcttaaaaatgttgcttcaacctgcaaataaaccaaaaaaaaaatctaataattagtcccatgcaaatgtaactttcacttcttttaattaaatcattagggtcagtctttttcacctctttctcaaaatcaatcgaatcatccctaaagacattgctatcatcatcttccgaatcattagaatcaagtttcagatctccagaaggtgggagaatactgccatctggagctaattctaaatcatcatccatagcatcagttaattcagcaagtttttcagcagtaatgggcgcaactgaatgcctccattcttcatcatgtcccccatcacttaatgaccaaatataaccaactcctccagcaccaagctgatcaaaaatcacaactaccatcagataacatattacttgtaagacccaattcttctaaggatcatttcattataaagaagggaaataaaataaaccaagcaacaaatggctcgcatttaaaacaaacataacgagcacaaaaaagaattttgcatgcttcacattgtaacaacaaaaatgaaaatataacacccacctttcttgcactttagatttaaagt

SEQ ID NO: 383192 - DNA, 4173 bp, Cannabis indica
tttcatgtgtatatataagaaaaatcatgaaagaaccagaagaaaaagaaaaaaaaagtcttctttctttacttttcttgtctataattaagtggtaagtaagcatttccttctattttgtttgctgattcttctggattattttcatggggtttatatatataaataatttatataatattatgataaaaagaacaagtctttgaaagaaagactcaagagttgacaaattaggtagtttttctttctttcatcttctttctctttgtaattatttaagagagagagagttgaattacaagaggttcagatgggttgccttggatccagggaactcaaatgaaaataaataaagatggtttctttaataggtttttccctgtgattttttgggactgtagctttctttggcttctttctcatgatcccttttcttcttctatctttctttcttgtgtttggagataaggtcttgccttagtttcaagttttaatctttattgtttaattattatataactaaatgaatgatttatttaaagtagatttgtggttgtttcttggtgtagataataaagaagaagagtgtagagaagaagaaattgacagcaaagcttaaaagggtatctctatttttatctattttaagctaaagtttcacaaaaatggaagttgggatccattgttgttgactttagatctcaatacccttttcattttcataccctttaagctcataaagttcagaactttaagtcttaattgggttgattattattattatttattgttattattaggcaaatggaaaatggtaccattattattcacattcctaatatcatcattgttagtaaaaggaaggtagaatgttgttgttgtgatagttaagttgaaaaaaaatgacaagttgtgtagcttttttggagggtttttggggtaactttttgtacttgaaagataagatttttgatggaggagatgtctcctgcggttgcagtgccatttagagtaggcaattcagtctgtgataactcaaccatagtagctactactactactactaatcataacatggatgtcacaagacttaagctaatgacagatactactgatttgctatctgattctgttgttgttgtgcctaataaggcgatagtagaaccgagtagtagtagttgccccgaagaggaggaggaggaggattgtgattgtgattgtagtagtagtagtgttattaatggtttagatatgatatctcaaaacaaaagtaattgtgtttcttctgttgatgattctcgcgaaagcgaggaagaagattgtttatcggttgagggtgatcaagttcttgatggttcgggctctgtggctagtgagtgtagtagtttagaggattttttcggttttgaggctattactgatgtgggagcaacaacaacaacattaagttctgttgatattgagaagagtctttatagtgttgatgttgttgctaagatcacaagtttaggggagtcaaatgttgttggtgatactgtctcggttaggattgaagaaatcagttgtggtggtggtgatggttcttgctcgaaaccattgtctgtggagaaagggggagtggtggttcgtagtgtttatgaggtggattatgttcctctttggggatatacttcggtttgtggtagaagacctgagatggaagatgcagttgcttctgtacctcatcttttaaaaattccaatccaaatgttgattggtgatcgagtaatcgatgacatgatgaacaagtatttgtctcatcaaactgctcatttctttggtgtatacgacggtcatggaggttctcaggtaccatatcgaaaatacttgacactctattatgattttgtttctttttcatgacaatagagtttgtttacttgtttgttttcattaaggttgcaaactattgtcgcgaacgcctccatttagcaatgatggaggagatagagtacattaaagaaggcctaattcatggtagaattaaggatagttgtgaagagcaatggagaaaggcattcatgaattgttttcttaaggttgatgctgaagttggaggacaagctagtcttgatcccgttgccccagaaaccgttggttctactgcggttgttgctgttatttgctcctctcatatcatagtagcaaactgtggagattctagagcggttctttgtcgtgggaaagaagctattgctctctcagctgatcataaagtaactttccttatagttatgttttgttacatatagccctttcgatttaaactaattattagattctgttctcagccaaacagggaagatgaatatgctaggattgaagcatctggaggcaaagtcatacaatggaatggacaccgtgtgtttggcgttttggctatgtcgagatcaattggtgcgtacttcgttgtagttttttcttttgttctcaaatgctcggtttttttgatttaattagcctaaattttagcgaaattctcaatacattatgtcttcatcagggtttcattaagaataatctagtgtcacgccttctctaacacacccgagatttagtcaaaaatactcgacaccctagctcgaaggctattttttcatttcgggcattagttttagtattttcgagcctatacttgaagaacttgttgctttgagtagaatcataagggtctaatgcatatccataagtttgaatcccattccacctactcactaagcgaattacccgagcatagcgtaaaatgtgaactctatcatagttgaagaacttgttgatttcaggtgatagatacttaaaaccatggatcattcccgaaccagaagtgacattccttccccgagcaaaagaagacgattgcctaattctagcaagcgacggtctatgggatgtcatgacgaacgaagaagtatgtgaattggctaggaaacgaatacttatatggcacaaaaagaacggcggtacacttcctttggagaggagaggcgaggacatcgatcctgcagcacaagcagctgcagagtatctttcgaatcgagcccttcagaaaggaagcaaagacaacatcagtgtcattgtggttgatttgaaatctcaaagaaagtttaagaccaaaacatgatcatatgatgatgctaaacacttcatataattaatatatatagaaatatatatatataaatatagttcttttgcccacttggtttaatgtacttattattatatataacacattattgtagagatggtttgtttggttggttggttggttagggaagggaatataggattgaatcataattcattgttgcattgcatttgacaagaggggcaatattgtaatttgcattattattattattcattatgcctccgagttaaaaaaaattgctctgtggggtgttttttttatttgttggtattattagttttaatcgtttcatcttttataagaaaagtagcaattttagtaattatctctcttctcatttttgagcttgtgttttgtatcaatatgttacttgtttggatttttatagagggtttatttttcctttgaacaatgaagttttcattgaagataattggagtttaagacattatagtaaaaaggtggaagatgtaaactagctaatttatcatattgaaccatatttattaatcggagtataagaaattatagtgaaaagatggaaaatttaaactagctcgatcttaagtgtacaaattgctaattcattatgtgtaactctatttggcgaatgacaaagagcttagcttgttacaataagaagatttcctaaaaaaaattgaaatcaacacatatttctttatgaacttggggtcttttgttttgcatttctaagttttttgtgtaatcaaaattattgaattcattgcaaaattattgaattcattgcaaatatattatttttgttgaattttgtttactttttaaaaaattattattgcaacattgatatttagtatggtattaatatagcgtaatttaagagtttaagagaaatacatgacaaattttagaatatgtatatttatttttaggactaatatttgtatatattaagtgtcgataaatatgatttaactaactttagtttttctttttttgaa

SEQ ID NO: 383193 - DNA, 2103 bp, Cannabis indica
ataataataataatcataataattacccacatcatgcttggatctatctacctctcaccaaatcattaatcccaaaggcccaccaccaccactacccaccacttacattttaattaaaacttaatttgcaaaagcaaaacccaaaataaaaaaattaacagagagaatcaaacatcaaatcaaactccggtcgtcggcgggtttctgctcgtaacgttgcggatgccacgtcaccacgactcgattcccgccccggtgacatcattatcaaaattttctattcactttctccactcccaaaccccaaagtcttttcttctttcggatttaccggtgtttttttttattctccctccctataatccgccttctagaattatttattttttattttaagaaaaaaaaacttttaacctttcaaattaaaccaaaataaaaaaaaaaaaattaagtctttatacattgacgtcccaataattcaagccacgtaatcagatatctataaataatataatatttaatctcttctcctgtttctttccttataatttatttttataaataaaaaaaggcaacctaccaaagtagtagtagcactgctactacaacacctttttaagtccaaataaatcgtcactcatcttactatgcctttttataagtagatcctcttctcttcccttgttttttttttgtttgtttggtttgggttttactataactccaatattttagctcatcacctcctcaccactccacacacaccactaaaaataaaaatgccaattccatcgaaaaaaagctccttgaaaatctcagaagaagaagaagaaaatggaattacagaggctttgattccaggattaccaaacgacgtcgctgagctctgcctacttcgagttccgtatccgtatcaaactttggtccgttccgtttcagcttcgtggaacaaagccataacccatcctggatttctcctctccaagaagaatctctctctctcgctgcctttcatcttcgttttcgccttcaaaaaatcaacggccaggatgcagtggcaggccctcgaccctcgatcgggacgttggttcgtcctcccttctatgcctttaccgaacgacgacgtttcactttcaccctcctccttcgcctgtgcctcgctgccacgtcacggcaagttatttgttttaggcgggatgcgatccgatacatgtagccccatgcagagtaccgtggtctaccacgcgtccaccaatcaatggtcggaggcaaccccgatgctgtctccgagatcgtacttcgaggccggggaaatcaacggcgagatcttcgctgtcggagggagcgatgcaaccggtgaagccatcacctccgtagaaaggtacgatcacgtgaccgacacgtggaaagcctccgccaaactgccggcggcattggcgcggtacagctcggcggtggtggggggaaagttgtgcgttacggagggatggacgtggccgttcatgttttcaccgcggggatcaacgtacgatccagattcggacacgtggcgggagatgaaggcgggtatgagagaagggtggacgggggtgagcgttgtggtcggggacaggctgttggttatatcggaacacggagactgtccgatgaaagtgtacaatccggatgaagacacgtggcaatacgtggaaggggagaagttcccgtgcgacgcgcttagacgacctttcagtgcgatcggcttagatggattgatatacgttgtttcgagtgggttgtacgtaggcatagggaagttgtacgttgatgttggagaagggttagggaaaaagggtattactgtaaaagtagagtggcaggttgtgccagctccgaatgcttttcgtgggtttgctccgtcgagttgtcaattactttatgcctaatctaatctaatctattctaatcaaatttaatctaatccaagtgtcttctcttttatcactctattctttctgattaattaatattttcctttcttttttttttaaaaaaaaaaacgaaataaactataattagctagtgtagtgagtcacatctgtacatcttttttggcttcaattt

SEQ ID NO: 383194 - DNA, 4536 bp, Cannabis indica
tttttttttttttttacttaaacatgttttcatatacaaatattttatttgatatttgaaatatattttatttattttgtcacagaaaaacaaattgagaaaattgagtatagataaaaaaatatttaaataaagtaataataataaatggagaatcttgacaaagttttggtatgcccatgttaattatttatgagatagcatgaaatttacattttacccccattactagctaagtccgaagacattcattcggaataaataacctaaaagaaggtatatatgtttgggtttcgatgtgttattacctaaagtcccaaaaataaaaataaataaaataatataatataaatacaaaaacatttaatttatatttttattatagtatcgtcaacctacagtgcacacgctttgataaatgttaggtgtgtgaccttgttctcttatttattgtgagagtgttcttttattattagttttagtttttaagtacattttttaccattgatttaaaaaaacgtacatttttaccaccacaacaagtatcataataataataataataataataataataataataataataataataataataataataataaatagaagtacaatactgaatcaaaacagaaataacaaaatcgacctctctaactttttaccaacgtaaaagcttgatcaaaataaatgtgtacctttaattacttatttcaaagcacatgtataaatcctttcaaaaaaaaaaaaaaaaaacacatgtataaatcacattattgaattctttgtactgaaatcgtgagctatatattgaaaattgttgggcgttttaaattttttaaatattagtatttccaataatagtaacaaagttccatcaaatttatatcttgcttttaattttcaaaaaaaaaaaaatcatcttgcttttaattttcatagatatataaggggtcatctctcctcctgcagaaaatttactacatgattatcataatgatggtaaaacattaatgccgtgtacatactttttctattttttttatcttttgaggacaactattacacacatatatgtattttgaattggagggaatcaagtaaatatatatatttatatatatatatatatagatatagtacttcgaagcgtaagttggtctcaagtgttaatggagtgacgacctagatgcaacaaataattgatcataatctatgcatatatataatgctaaatataataattgtgtatagtttcggtacattaattgtgaagcaattatagcacgcggattgcttatttacctctcgttacatagctctaatttatatcagaaacaataaataataaagtaaattagggcaacatataatatgctagggttagatatatatgtatgtgtatattgatcattgttagctagtgcgatcgcgatacatacagtactgtatatatataatatatatatagggtcaaacgataaatatgttctctctactcactgtatatattgtttagagttcattattaaatatgtgtatacataatacgtgtgctggaatgataattaattcttgtcttatactttatgttgttagatcgactagaattttgttctcattaagaatctataccaatatatcatgatgctctactcttctgcatatgcaattctatatacatcgtgtagagtactttttggactttatatacatctactataatatccgttattacaactttttcttgtaattatctctccttttcgaacttttaagggtgattttttgtttttggatgaatttttcattcagaaatatgatcacagtcttatatataattaacatgtggactcaattcttgattggaaaaggttaacgtgtgaattacccgggtagagttatcatcgcatgattacaagttgcggaaaggtacgatcgacacaagatctagttgtacactatgcatagcatagtaataataaaagtataggacagggagaagttagcatagtcacatatatcaattatatgtgatgaaatatttctcccatacaccttatgtaaagactgcatctttacgagtttcttgtcccaatgattaatgtgtgcgacgactcactttgaacccgcgagttttatttgtcagcatgaatgctcaatacacgatcggtacagtcacaggcgtctattaaaaaccctaacaggttcacacatcgataaaaactcatgagttcgtgttactcggaatatgaacggcaaatgtccgacttcgatagttgcgccggtttgggtattaaatatgaactatcaaaattattctatcatttattttttaaaatgttttatttggattaaatgtaattaatgtaataacgttcttgtgtgactgattgtatgaactgaagaatcacttactttctataaaggagtaatctcattcgaatatgactaatcaaaaattatttactaaaatagactaagcagactgagttttgactggatcactatctgttagaaaatagttgttgcagaaaataaaaggaatgaagttagcgaattagaatctgggttgagccgcggactcggtcgctcgctttaagacgttcgcggaactgcccagatatgtgcaagaagactatcagcgtcgttgtccccatgatataaaatagcccagtcgaacacactgtatcggaactcaataccacacccaaaaatcgactactgctcggaatatatatgtaatataatcgtatgtatatatcgtatatgtttttcagtaaaaaagagatatgtttctccgattggtctagatgcattatataagcaatacactgaaggtagtaacaggaagaaagacgttacttgatgggaacgtcagaacatgggatcgtgggaacgatgctgaaaattaggaagcctatgtttaccaattaatcaaacacgttttaaaaaacactcttttaattaattaaataaataaattttctctaaaaaataaagttccaccacacccgcctgccacctcagctcggctcgacacgatcggacggacggcagcggcggcgctcgctcgcatgtgttggtttggtatgtgagtcctcacccatgtgcacaaaactgggtaccctttggggcccatacccaaatctcaaacttggactatttatatagttctaaggaagtatttctatcccatgtggaactccaatcactcacacacttcactattatttttgtaagattttacaaagttccaacaatcccccacttaaaaattttaaaaaataatattttctcgaacagtatcctaaacaaaaagattgacataaacaaaggcatctttcgatttgaaccttcgcgttgtgaatacaacttagaatataatagagtgactcgtagtcttcaactctatctctaacgatgtaccacgcacaacctttcttgggtgtagtgcaaaagctcgtgctttaatgtccatgcacgtctatcccagtgtagtgaacgctctagaaattcgcccaaatttcataggaagtggccccacttccacattcacgtaggtgattctatcaagagtactcatgtagcttggtactccactatacaagagtatagatctcattaagagtttctattaactcaaccttatatcgcttcaagatttcatgctttacatagcatgatctccttccttatcacatcataacttgttattacccattgaacctatttcttgggatctccaatcttataggtcaggttacctttatgagtgacttatttattctaagggcaatagtcccataacttttgagattttaagaactttctctctagcaaatcctttcgttaaaggattggctaagtttttattagtgcgtacgtgatccactcttactgctccaatagagaggaactctctaacagaattatgtttacgacgtatttgtcatctcttaccgttgtaataacggttcttaacttttacaatagccacggtactatcgcagtggatcaacatagttggtatcggtctttcccataaagggatctcagctagcaggctcctcaactaacctgattcttcactagtagttgctagtgctatcattacaaactccatggtggactgtgccaaatattgtttctttgatttccaagaaacagctcaccaactatactaaaaatatagccattagttgctttggagttattcgataaagtagtccagtcagcatcactgtatccttctaggacaactagaaacttatgataatgtaatccaagattcatggttctgttaaggtatcttatgaccctctcaatagcatgccactctatacaaggtctattggtaaacatgcattataatcccacaacataggcaatgtcgggtctagtacagtcaatagcatatcagtggctaccgattatgctagcatactctgactgtcttactccatctccagtgttcttgaataattttacacttgggtcttatggggtacaagcaggtttacagttaaa

SEQ ID NO: 383195 - DNA, 2663 bp, Cannabis indica
aggagggggtgggtggagatcgatggatgagagagacaagaagaagggagatcgagagagggaagaagacggcgagagaggagggcgatggtgcgaaggcgtgggtgggattttggagagttaagattttcggtttagggtgtgggaaatagagaagaaataggtggacatgggaaaatgaaaaaaaatgatgggtacgtgggaaatgtggcaagaagtaagtgatgatgttttaatggacccttataggttacggtttaaattgtcgcctatactatagacgacagtttaaaaccataggcgacagtttaaaaccgttgtcaatacaggtccattaaaaaatcgtattttattaaaaaaaaatgtcgcatattatgtttactacgattttaaaccgtcgggaatactaaatttttctcgacggttttaaatagttaattttttagcgacggtcccaaaaaaaaattatttttaggaccgtcgtgaattctgatatttatagtaatatattgatcttaatgatgctaaaatatctcaaaaactaaattatgagagcttaaactcaatgtgaacaatatcatattaatgtggagataaatgatgttcaacgatccgaacaattgtaattgcattgactatagtggaaaacttataaagagagctggattatgccttaattccaagctatgttgaaccaggataaactttgtattctctatatttatatatatagtttgaatttatacttttttttatgcttatttatgctcattaatgatgctctaataaaagagaagatacttctacacatttggagtgttaaattaggaacaattaaaattttcttaaaatgaaagttttatatagttttaagaaggatgatactacttctttatataactacaaaatcttgatgattggaataaaattgtcttagcccttataacatgagtaaaactattaagaagaagatcaagttgtgattgtagttattagtttacatgaccatactgtagtttacatgaccagttcaaagagttcaaagagatgaggattgttatcatgtctattaactcacatggagattttgttctatataattgagattattttattattgtgtaagttaaattagagatcgagtaaaatgataatacagtcattatttgaaattgaaatggtaatggtaattctgaaattaattgaactcagcaataaaaaaacagtctattttctcaaacaaacgccatgtcgttttgtccgaggaagggacaaacgtttcggagaaataaatggtcgtgttgtcttaacaaaaaagaccttagttttaataaaaatgcattatttaatcgactctatataacaatttctccttttggatttgtcttcaacattttctaattaaccatattgtgtttttttacttcactcaattggttaaggatacgtgatcattttcttaaaattactccttatataaaaaaatttacaattataaattatcatttttatgttgtgattgattaaaaggtccgtgattaaagttattaatcacaaaaattataatttgttgtgactaaatatatttttagtcacaatatttgttgtgactaaaactaaattagtaacaatttgtatttaaatactatgtttttgttgtgactaaaaatcacatttagtcacaaaaattatatattgtgaataaaaaattatcactaatagttgtttttttacagtaaccatatcataaaatttattaaaaggatccagaattaatgactattttctaattagtagtttgttttacaggtttatcaatacgtaatttttcaaatagaaggataaaattaagacgagcctaatatgttgaactacctattacagggatcttctcaaagtttttatcttttgtgttggctttggagtcatctactgtatatacaagattgagaggggttttttttggtctaaatttttgaaacatttctttcttatattaattgaaatgttattgttgcagctcaagaaagtgatttattcaactgaacttgtatgtagctgatcagcaaaactgaatgtcttctcaacagcaactgcactaagggatccttatctactcaattggctcattatttgacttcttataattaatatatattcatagatttgaagcaaacaaataaagttattggaacttataagatcagtcccataaattgtggtggtgtatatatacgtatctctcgtaacccgtaagtaatcactatatatagaccagttgaacccaacacgcattaatgaactagctaggatatgggatatatatacatatccccttatttatataaccacgattatggattaagtaatcaaatatatatataaaaaattcaaatgattatattaaatattaaatagttattgaatattgttaaacggttgtaaataattttaaaaattaataaaaataagtaattaattatctgtaatctatactaaatttgtatttaatatatttatttctttaataaataaaaaataaaataattattaaactccatatatatttattttttttaattttacagtttgagttaactaatcgtttttatgtatgttgttatatggattttgattgcgatttaagttgctaaatgagtttt

SEQ ID NO: 383196 - DNA, 4049 bp, Cannabis indica
aaaaaaattagaataaaaaatttatccactctttctagagtgtacattgtaaaagtactaactaatatatacaaaaatatatattgtttaacacttgggaattgtcccttgcccataattatatatccatttaagttagaataaataagatttattatcgaattataacacgaactctgctattcactctgtctgctattcactctgctcactgttagactagttggtcagttagccgtttattcggttattgatctttaattagagttaactgagtttgttattattttggttaagttagttgttgagtctgttatgattagtcaaaagtctttccttctctcttgtatatatagatccctgcctttcctttctctgtaacaattacattcttttcatcaaataaagttcttttcctctttcgcattatggtatcagagcggggaaagtaaggctttcccctgatccctcttcttccgcctccgttgccgtgattctcctccggcgtctcttccctgagctgatttccatctcaggcgttccttttgttcttccctgagccttttcttatctcaggcgctcctctgttccttcttcttcgatctactttcttttcttaaatgtcgactgataatcaagctgcaatccaagaaggagggaacgatgttactcagagtacgattgaaaatccctcaaatccaatcgtgcgaaccaatcacaaccagcaactaatcacacagcagaaaaatccacttgaagaccccacagatccatactatctgcaccatggagacaatccaggaaatgttcttgtgtctcaactactcacggggcaagacaactacatgtcttggagtagggcaatgcaactggcgatttagttaaaaacaaactcggattcttggatggtactattcctaaacccatgccttatgattttatcatgtataatgcttggcttagaaacaacaatattgtatttcttggatattaaattctgtttcgaaggaaatctcttctagtattctatatgatgagtccgctgcagctatttggattgatcttaagatccgatttcaacaaagaaatggaccccatatatacaacttaagaaagggattgatgaacttgaaacaagaaaatcaatctataagcatgtattttaccaagctcaagactatatgggaacaattgtctaattacagaccaacttgtgtttgtaatggctgcacatgtggtggtgttaaaaaatttcaagaacatcaccatatggagtatgtcatgtcttttcttatgggtttatctgattctttctctcaagtaagaagtagtattctcctaatggatcccttacccgaagttaatagagttttccacttggttactcaagaagaaaaccagaagggaaataccagcaacatttctgaaccaaatccatccatggcctttgcatttcaaggtgataagaacagcaacaacaagaaggattctcaaggaaataaatcacacccccctaagagaaataggcctttttgcacccactgcaacattcttggtcacaccattgaaaagtgctacaagattcatggataccctcctggatatgggaaaaacaacaacaccaaagatgctactgccaaccaatttcagaccagcagtgacagtagcaaaccccctggagacaaccagactcttctccctcaattaaatgctgttcagtaccagcaattactaaatttacttgcaaatcagcaacctggtatgcctgctactgaaactggtaatgtgacaggtaaatcgggtgttgttctctcttgcatgcccaattttcccataaatggtacttggattctagactcaggagccacaaggcatatttgccatgatattaacatgtttcaatgcatatgtgattcatatcctgttagactcatgctacctaacaacaattttattcttgcacataaagtaggaactgttgctgtctctaaacaaatcatattagaggatgttctctatgttcctagcttcaaatataacatcatatccgtgagctacttaactgatcataagtctcttagcattgaattcatgactaaccatttttatatacaggacaagatcagcaagaaggagattggcagaggtgaatccaagaatggtctctacatatttgattccaatttcaaggactctgccatcctcaatattactgctgaaacatggcattctagattaggacatctctctaataagcatttgaatattttgaataacaaattgcattgtaatgctactgcccttcataaaaactctccatgttacatatgccctttagcaaaacaaaggaagttgccttttcctaataacaatagttttgcttgtaatatttttgatttgatacattgcgatatatggggaccttatcatgttgtttctcattctggctatagatattttcttacccttgttgatgatcattctaggtttacttggatatatcttctaaaacataaatccgatgctttgtttgtcattcctcaatttatttcatatgttcaaactcaattcaattacatgatcaagtgtttcagatccgacaatgctcccgaacttgtctttaaagatctattctaacaaacatggaatcctacatgactttacatgtgttgacactcctgaacaaaatgcagtggccgagcgaaaacaccaacacctgcttaatgttgcccgagtccttatgttttcaagcacgactacctatcaaggttttggactgagtgtgtcatgactgcagcctactttgataaatcgcactcctacacctaaatttaaaaaataaaactccctatgaattgctttacaaagaaggaacctgattactctcatttaagggtcttagggtgtcttgtttttgcttcaacacttccaattcatagactaaattcgacccccgtgctagaacttgtgttttcataggctatccccaaggaattaaagggtacaagctttatgatattaacacaaaacaaattttcatatctcggaatgtggtttttcatgagaaatatttccatttcataaactaaatgaaagtattactaatgttgatccttttactgaattagttttaccttcctctcacatcactaacacacctatgagtgattatccaccgattgcagatgaacaaagggacaacacagaaaataacaaccatcctgctgccaatgaacaaagcatcgaggaaccagtcgctgctcctcaaagcacagaaccgtgtgctcaaaatcctgctgcaactgcaaatatagttcccaggaagtccagcaggatctcaaaacctcccacctatcttcgggactttgaatgttactcttctatacaggacaaatcatctactccccatagtttaaataaatatttgtcttatgcaagattatccgattcttacaaagcatttattcttgcagtcacttccttaaaggagccccaaacttaccaacaagctattcaattcaaacaatggttggatgctatggataatgaactcactgctttaaggaataacaaaacatggatagtggtccctctcccaccaaacaagaaagcaataggttgtagatgggtctacaagatcaaattcaacagcgatggttcaatagaaagattaaaggctagactagtagcccaagggtactctcaacaagaaggactcgacttctttgacaccttttctcctgtggctaaaatggtgacattcaaactgctacttgccatatctaccataaagcaatggcacactttgcaaattgacattaacaacgcgtttcttaatggagacctcaacgaagaggtttgtatgaccttaccacctggtttgacagtctctaataaagatcacacgggtcctcctcttgtttgcaaattgcagaaatcaatctatggcctcaagcaatcctcaaggcaatggtacaaaaagctcacggatgctctcatccaagaagggtttaagcaatcacaagccgactacactctctttacaagag

SEQ ID NO: 383197 - DNA, 1605 bp, Cannabis indica
ttttttttttctatttttataaaaatttacttagcaagtaaaagaaaaatttatatctcactcaaattcatttaagaacttatataaaaattatccaaataactcaaatcataaattaaaaaaaaagattttgtcaatctttctttgagtaagttagaccaattaacctttttactatattatttacttatttttttgctgaattatttttgtttcattttaagatatttgagctggaaaattgaattttttaaggcaaaaataagaatgagatggattttcatttcttaggtcatgtatttttttagtttggcataagtaaaatataaggaaatattttagtagagtaataataagcgcacatataatttatacatttagtaattttaattaattttttgtagttaagataagtcccacatattaaaagtgactgtgatataagtgcgtacaatatttgtatgtgagttatacacatacattatttacttattttagtattaattctctaaatatgaaatatattggacatttttttcctgagaaatattttatgtgatatgcagagatatattattacttttgagatattattattagagttagaaaaagttaagatttgatggataaaggggtaacattaaagcttgtactttgttcaaatgttgcagaaacttaaagaatagactaagactagtactatctatatttacggagtagaagtagctagatctagattgtccatatatcagagtcaaaataatatataatatatatataaaaaaataaaataatggatttattataattatagtctttactctcaacaacaacaataataattataatagattagaaaatagagtatgcaacaaaaattgtaacatggttttaacgacaaaagccatgcgaaattgcgccctttacgcaggttatttctccaaattgttgtttttattctatctccaaattaatttttatgataaaaagaataaaactgaattttttttttacaaaaatatctaattaaattaaatatatgaatagtgtggtgatgtataaataaacataatgattaattattgaaaattttgatattttttgttgtgttgtaatgtaacggcatgcatgtgggattggaccacacacgttcacatttttgacggtgatgccttattcgataaacattacaaaacccaatgataacgtctcttcattccagagtggttagatatcatttcatagtgttgtggtgtctcgtaattacaattaattaaccatattttttaattattttttaaaattatacgacaccaagtagagtaatgtaatagacactcgtttggaacgccgtattaagtcgtattgtattgtattatattgaattggattatctatcatatttttatataaaacaaatgttaaactttaatttatactaaaatattatatatttaggtgtccataaaaagttatttaccacatatagttttaactataaaaaaaaattgcataaaaatacaattcaatataatacaatacaatacaataacacctaaaatacggcgttccaaacgagcccagtatttttagtcatttctcttt

SEQ ID NO: 383198 - DNA, 3749 bp, Cannabis indica
tagataatggttaaatattaaaagttgtattacaatcgaatccaacatacatttttaaagtctgttttactatttaattcttgttagaacagaatatttttccattgtaagacaaacccactttcataaaaaggggtgcctgccatgccatcccaccaagagaactttggagcactgaacctccaaattaaactattattctactccaacccaatgaatgaactcaattcaacttaaaaagcaacgcagataataaataactatactaaaccatttagtgggaaagcattcaacaatgaaaaaggtaaaatgtgctctcatttgggaataagatatgaaaccaataagaaattgccattaaaactgaaaataaataaataaaaaattatcagaacctctgtcttttcgtaggaacaatcttgatcggagtccaattcgatagaagcaggaaacttttccggttgacatctgcgcactatatatatgcatatatacccagaaaggaaaattaacccattaccaaaaacaaagggcagtttctgaaaaatgaaaactttagagttgaattgaagaactaacaaggagagaatgactcaaaccgagtggaaagacccaaagacagagagtccgagggagaagacgatattgggagctggggttttggcggaatacgatggagactgtgaacaggaaagcgtgagtactggggacaatggatctgcaaccgccacgggttttgagtagatttcaaattcaaaagcattttgattagcaaatttcactctgtctctcaagaagttgacttttacaatcaaaatttgtatcagcttcaccttcacttcagatgttaaaattattattattggcaaagaataagtaaaaatatatataatttattattaaaaaaaggtttgcacaaatagaatggtaggataggtaaaatgatcagttgtatgctggttggcaatgtatgttggtaaatatgttacttcaaagccttctttcggtctggattttgatgagctatttactaaaaaaagttggttctcaagagaattagtgcctttgttgaaattccaactggtgatgaaattaggggagtgtatttaatcttcattccctaaaggcctggatggccttttgagatgttttgaagtattggaatatggtgggaagcaatttatgtgctgcggttaaggaagcttttctaaaaggggttgttaatcctaaactcaattttacatttatttgtcttatccaaaaaattgagttttctttgagtatggatcaattcaggcctataagtgtttgtaacttttttataggttgttgcaaacattctctccaatagattggaatcgcttatggatggtctagtgtcacccttgcaatcggcattcattcttggttgttggattgttgaatcctccattcttacccaagaaatcatccataaaatccaacataagaggaggtctgaaggtcttatggccttaaaacttgacatgcataaggctttcgacaaaatgaaatggagttttctcgagaaggtccttcttgctactagttttagtaagaaaattgctatctttcgatggcttgtgtgagaagtatttcatattcggtgcttttaaatggcaaccctcttaaaaaatttatccctcaaagaagcctttgtcaaggggacctcctctcccctttcttattcttactttgtcaggatgtgttgtgcaagatcattcttagagctgaagagaaaggtttcatccatagtatcaagattgcgagatctgtcccttcaatctctcatttagtgttcgcggatgatactattttcccgtgctaagaagaaacaagaatcttgattgattgcttatctctgtacgaaaaatagtctgggcagtcatgtagttcttcaaatctagtgttcttatttccaaaaacttgagcagtgggaagaagaacgcaattcaaaagatcctgaattttgagcaagttcggggtgaggaaagacacctggaaaatcctttcgtcttcaaacgtaagaaaaaagaagattatctcagattaaagaataacacgataaaaagattagagggttggaagatgatactcctctcttacgtggaaagattaactttgattaagttagcagcctcatctatgctggtttacgcaatgtctaccaataagattcctctgtcaagttgccaagagatggatgcaattttgagaaagtattggtggttgggtaatatagagaatgatagatttatggccctaagagcttgggatcagatctgccaacccaagtctttagggggcttaagaataagaatatttgagaatatgaatagagccttacctgcaaagctatcttggagtctagcaaacagagaagagaagccttgggccacttgcttattggggaagtactataaacatgagaacttttggagagtggagcaaaagagtaacgattcttatcagtggaagtgcatcctggaagtgaaggaaattttagcaaaaggttcagtcattctcgttgttggtagagataccgttgatttttagaatcaaccttggattccatggatggacctttgagaatttaaggagacaaagttcgaacttaagagtaagcgctttatggtcaagaccttactgatatctccataggcaacgattggaataaagaaatggtggtttagatctttggtgaagaggtggggaatagaatattgaatatctcgagaattattctaccttttaaggaccagctcttttggaaatacaagcaatatggctaattttcagtcaaagatgcttactttgaggatcaagcttggaggtttgcccccaagagagatatgtggaagtgggtatgggatactagtacccatcccaaaatctctatcttcctttggagagccctcaatgaggccatccccacaaaaaatagattaccttttgtctcgaataaggtctgctgtttgtgtggcaattttgaagaatatggcttccatctgtttagagattgtagcttctccaaagcgttgtggttagctggtctctttcccatgcaaattgagaaaatactaggggacttaatgattcaattcatggaaaacttaatttttaaaagtcgcgggatcaataggagaagacctcattatgttcgtaggctacctctttgctgaagtttggcaccaaaaaaatttacttagcttgagagaaacttgtgcgaacccctcacgaggtgtagacaagattgcagtagcttgcaaagaattttttgatgtgtttgaaatgtaattttttgatgcaatcctctcatggtccaattttgagtgacaaagatgtttctttatgtccaagggagaaagaagtcaataatgttatgttcactaatgcttcttggatcaaatagggattttggttggtgggctttcaaatcccagaggatcaatacaacatctattttggaagctaaactgaggacaaatttcttggctcttacttggatagaggataaaggatggaagagcattcaaattcgaaggtgatagtccaagctctatctgagaacagaggctctctagattggaaggtttttaatttctttcttttagtagttaatttaatttagaagtttatggtttgtaagttcttttatattaatcgtagtcttaactcctttgcggatggtgtagctaagtgtgctagagttgctagccaaccaactattt

SEQ ID NO: 383199 - DNA, 1431 bp, Cannabis indica
gtgctgagggcggagcatgccaatgctgagctgaggtgaaaggaagtagccaatgctttagatacgctaagatggaagctactataaagcaaagagtgtttgactctttggacaaggccctgacccgtgaaaggaaggcgaccaagatagagagggatcgtggagacatgtacaaggacttgcactccaccgcttttaccaaaatcaaagacttggaagctaacttgaagcaggccaagctggatgttcaggagaaagacaaaaatatcaccaccttatctgtggagtacgacagaaaggctcaaattatccaggataaatacatcaatgaaactactctagagagaaaggtgaagcaccatttggacaacagaaggagaaggtagctgaggcagaagctattaagagggctaaggaggctgagactaaacttaatgcatttgtgagggcttgtgaagaatcccaaaaaaagattaccgaagtagagggttaaaacttagatttaaagggacgtcttcaataggcaatctcaaaaaaataggagcaagaagcccaacacaccaaggctttggaacaggcgtttatctactcagtgtttactctttggtagcataacaaatctgtaatagatctcttcaatgccaaaaataaggaagatttgatgctcaagatcttggcactagaggaggtagacaaagctaaagaagcagcttaagagacagaatcggtcgatcccaaaaccaccattcctgttagtgagaacatggatgactttactcttctagcttctgaagtgcctatcataaacaattttgcgatcccgaaggcctcgtctgatgttcaagcccaagatgcacaatcattgaaggacccagcctagccttaatcattcttacctatcaaacaactttatctttattttttgctctttttatcttttaggagacaagggttcccctttttgtgtgtgcggagataatattttatacccttgccgcggggtttttagtacttagtagtactatttaattaattcttggatatgtacattttatcccatagaattttgctaagttaacctgaattaactgcttaatgtgcgagaattaattccaagtatgataagatagtggcttacttctagttccttcaggttccaattttagacaatactccctactcttatatttggttaaaatgttaaattgacttcaaatataataaggtagtggcttacctccggttccccgagattccaatttcaagcggtactccctactcttatattttagaatttaacttagttgtttcttgtggaagaggtaaaatcattaatgataatatcatatatgctctccctaagtaattaatagttgaggcttttaatcacttgttacatgaagaacttttaaagaccaaatatgaaatgaa

SEQ ID NO: 383200 - DNA, 1393 bp, Cannabis indica
tttttgaatatttatatcgaattcggagtaaatcactttttatacaattttaaatctttcaacaaaaaactcttaccccatagatttattctaaattcattaaaggtaaaatatagcttgattaaacctgttattgatttaagaactttattttatttgcttattaaattaaaacgagatatactttgttatgtaatcttattttcaaggttgatcggaagaaggaggtttggaaaagacttagccttccaaagtataaatttattttgattggctatgcttgatagatggcaaacaaaatataaattattcaaatttggtattactttaaacaacatttgtgttgtttgtggcggccatgaagaaaccattcaacacctcttctttagttgtacaaatagtaataagatcttggaagctctcaagaattggttcaattggaatacttcagctactattgttcaagaaattttgaagtgaatttggaagagaaaaatgtcaaagtgtaaatgccatgtgtatgcaacaatggtagtcgccacagtatatcatatctagaaaagctggaatcaagtttttcggtaccaaaatgtgcaatgttatcatgtaattgttaagcaagttaagtataagattataagtaaaataaactttcagttgttaaatcaaaattttgttatagatagacaataaattgctcagttataaacatagatagaatccttcaagccatgtggtactaaagtttgtatataacatgttgtgaaatgaataaatactcacctgattcccaaaagaaaatatatttaataaaactattaaataattaaattaaataatcatttataattgctatcactacgagaaatgtcactttggcaagtacatttttgtgctggcaaaagttagcattgcgctagtaaaataaaatttacttatgatgtgttggcaaattaatgttggtattagaacttttgtcagtataaaatgaaaagcgctgtcaaaaatgacttttttcagagcgtaaatacgctggtaaaagttagatttcaaccactgcaaatgtacgctggtaaaacgttgacctctttgccagtgcagtttgcgaaatgcgctggtaaaagtaacggagtagcaaactgtgttggtaaaagttacatttcttatttttcatcaagatttaaagtgtaaacttttaactatccaaattataaacatcattacatatcttatacaacctagaacatatcaaatacaagtgagttacggttgatctgttaatatttaattgatttttagttatggtttaagacattgtatttcttaaaataaaaaaaaaaaaataaaaagaaaactttgaaaagtaaatcatattattggataattttttttt

SEQ ID NO: 383201 - DNA, 1497 bp, Cannabis indica
tctagtggaggattattgtatattatttataatataataagtttagattaaaatgtgataaatatattattatgtgaataatatatattaagtgtattgtaaataaatgtgtaatctatgaatttaacctatatttttgtaacctacatgttgtaacttggagaaaagttacaatttgttatgacttgtaaatgtatataagttttctaatggaacttaaatctatcatttttctctacactccagtttcaataataacaaaatgggtcaaaataggtcaatatgaacacgacacgattttttacgggtcgggttacagttgaaaaaattagacacgagtcaaaaaataaattgacactccttatacgaaatatagaaacggttcaagtatgacacgtaaaagacacaataaggcattttgtcactcctaatatacattgaaatgtaaatttttaacgtaaaatagagaaaataaaaattttgatgatggttatttttttttaaaaaaaaaaaaaaaaaaactaatccatattcatccacttacccaaaatggaccatatctaatcaattggctaactataaatgacttcaccgtcccgtgacagccttgctatagctagctagctagtaattaataaaacaacattcacagttgagcagtcttttcataaaattttatttgaatatgactacaatgtctaacctcttcctatattggaattcaaatttaatttttgaatatatgaacaccaatttatataaatgcttctaataataacgttggatcatactctaatttaaaaaaattaataaaaattagttatagtggcaacaagagagaaaacccaacattaaaaacaagataggttggtccaaacgttaaaaataaaaacaagagagaaaaaccattgtcggatatggagtgagtgaggcagaagtgaaatatacgtggagccctagtgccatgcatgcttccatgcactgcccaatgagacatgtagccttgcttttaaatttaataattatttctatataatattgcatatagtccaccggcttagaattgattggcatcttcatcttaaaatactataaaaataataagaattcaaagttaaagtaggatatttttaacgtttcaaaaaaaaaaagtaggatatttttaaaacaaaaataaaattgcaagttagataaggcattgggcagctttgggcctcccaaccctatctacccatttagagcctccttcttttttgggaaattatatttaattttccattcttaacaaatattctgtaataaaatttagggctatttacaaaaatatggaaaaatgaattaaagttttgataaatatggcatgcaaacttaattgcattaaatatggcattttttcaaaaaatactttaaaatatgggaaaatcattataggtaaaaaaaaaatgccataaaaaactataaaattgtggttcattttttgtcatataaaataaccag

SEQ ID NO: 383202 - DNA, 2039 bp, Cannabis indica
tcttaaatagaggttctactgttatatgttataagttggagtataaacatagaatagaaatttggttggtgtgtaatactgataatagtgaggtaattaagttttgatttcacattggtaatgattttggggatacgctaaagttattatggctttccttaatgtttttattaatatttatatatatattgttgtttgcagttaaattcaggcatgttagtagggcattcaaattcctgaataatgggtcatcattaaattttgtattcatggcaaggtggtaaggatcatgatatgtgccaccatttttaatatttttttatataaaagaaatatctttttgaaaaaataaaaaaattattgagaaaaatagagattggttgtgttctccaacctctacaatattgaacaatttattggtatcaaatttgagaaaaatggaaatgcttgtagtcagggcaccgacccattagtaatcatgtggggcttatagcctccactaacaaaaaatattgtattttaacaaattaaatgtaatttttcaatttgattattatagactaaaatagtaaaaaatttccataaaattaaataaatttattaaaagtgattataatgtaaatataaatacttttttaatgataaataagcttccacaaagtaaaatttttgaatctgtcacctgatgtagtgtaacttatgagattccttttctaatttttgtcttaaaagtgatattttggcaatataatagtaaaatgctaaaaaatacttatggtacttaatattctcgtagtacaatttaataaaaattataaaaaaaatcgttaagtatttataaagcgtcaagcatatacattggtatagtatctcgtatcaatgctccatgagatgaaggctctaaatgttagtcggtaaaccctctaaaataaggaaccattattggtaagatggggaaataacagacaccaccctatctctttcttattccaaaaaaaaaggcaattaagagaaatggagacgttggaccacattttcataatgactatctattctaaagagtttacaccaccaactcctacccatttaaaaataaaaaataaaaataaataaaaaaaaaaaaaagttatgtataataaacatgcaatatggaaaaagaatctgaatcctttcaaaaaaaaaaaattaagaacaaaaaaagaatctgaactaagctttcttaatagctatcttaacgtctgttagcatcaagacccatgaattacataagggaaatttgattttttatgcttacatttaggttaattttttttttaacaaaataataactaatatttgtaagatatgacaatttttatgatatccctaaaatacctccatttacatcacctcatttacaccatcggaccacccatcgggccacccatcggaccatctatcgggccaccccatcgggccaccatcggaccacccatcgggccacccatcggacccatcggaccacccatcggactaccatcggaccaaatttgctaccaatttttttttatgtttttgtacatacaatagtagcatcaggtgaccatcagaccaccatcggactaccatcggaccccatcggactacctaatttttttttttttttatgtttttgcactaaaaaaaagtatggaaaatttgaaaggggtttttttgggttttagataaagtggtcatatattttcaatgatgatatgtattaatttagaaataaaatattaggtatatgtaagtatagaaaatcaaattttccttacataatttcaagcctaatggaactaaccatcacaccatgaccatcataaatatttttaccttttagaaacaactgttagactttttatttgggcttacattaagttttattggttttattaaaacttgggttgattggatagttctttgctgtgttagcccatgttgttggtgatcaattgttaatgggcttagcatctgtgtgtaaagtctatgtgaagcaaaagtgtgggcttttctagttg

SEQ ID NO: 383203 - DNA, 2015 bp, Cannabis indica
accattccggtggttgatagtggttgggtggcctaagccgcctttagttcttactattcatatggtctaccaaaagtttttaatgtgttgtctcacatataaagtataaatagaaagaacaagagagatgttaaccttgggtggattcattaccagacttgaaagaagttgacctcaaattttagagcaaggatttataggtgccattttgtatatttgctcacataaacattttactgatatacctgtaatatgttcaccagaaaatgtcacaggacacaaagtagctacagtatatacatttgttctacacagctgaataaccaaatcaaataaacaaaaaattataactcataacaaaattttgattttatatatacaaactccacttcaacagagagttacaataaattaattgactttaatgacaatccacctaccccatttttcacaaatatcataacttcttttttttactttaagtaatttatctgaagcataagttctgagcatatatttaagtattgttcaaatagcgttgaagccataaaaataaaactaaaaggaaagtcattcatgctatatactttaattgcaaagcatttgattatctaaattgagtatgacaatgatggtgaattcgaaactttgagcaatctaaataggaagaaagtcatatttagatatctcctggatcttgagactaagcatcaagttttgtctatgtatttgtggttgacacaactcttcaaaggagaaaattttccctatgtgaagaaagttgaggcaatggcgacagatattgctgacttattggggaaacaggaggcaagaaatgcaaggaaaccaaagcctcaacagaaggccgattgttatgagaggccattgtcactcattaaacaatatgattaggaaagacacaataaattcataccacaaaaaagcagtcagagaaagtaattgcttagcttgtggtcagtgcttattatttgtagctgactaattcagtgttcaaaaccaatgaagtttagctagtcaagcgtaatctgtagtgctgtattttagttttggtgaagacatactagcttgtaaattgaaatttttgtagttgaaatcttagatagggcataacaacatgtattatcaaaatataagagcttgatattttgttctaggctgtgaatactgaatgcaaaagccaatgttcattaaacatggtgtcataaatgttaagaatactgtaaattttaatttagccctaattaattcatgagaattaaacaatagaattgtagtttaatggaagcgtaccggagtccatagaattgattttgaatggtatgatcttccaattattgcatcaaagttttctctctggaacttgagtttttttaatgatggggattcaagaaataaagatacgatatgtgaagctatgcaaaaaattgggaccaatacgtgtttattaataactgaataattagtaattaatcttttttgacatttttggcccctcatcaaattaaaacttgtctaattggaatcgacatattaaaatcatgacaatcatgctcttaagtcaaactttattccaaaatagaccacataaatttaacttatttatttaaggctaattaggatttttgcctcgtgtaccaaattatgccccctcaacttttaaggtcgttaaaaatgcctctgaactattgtttatgtacttaatcatgctccctaaaatttaatatctaccaaaccatgtcccttgaactttgacatgtactaaatcatgtctcctgaacttttatccatattagatttttttattaaaattggacaaaagtcattaaatccaacaatgtcaatacacatttttatataaacaattgtgatctcaataatttctaacaataaacacaattttgattggcaagtactagagaaaagatgttatttatgaaggccatagataaatggttatggttaaattaggtgtcgtttggtaatatttttatttt

SEQ ID NO: 383204 - DNA, 1291 bp, Cannabis indica
gagagatagcaatttgaaaatcaagcgcccatgtcaaactatgaaacattgctttagctttaatctcagcatatgtaaaattaccaacaaactacctttgcaagagcagccacaacctgacctttatcatctcagatcaccgctccaactcctatggtgttttgacatgaattcaaggatgcatctacatttattttaagtgtacctatttgtggaggcttccatcggacttgatcttgtacaattgtggagagagttggtgttgcactatttactgtgtggtatttttctttagctgtacgaaaattttgaagataattttcagcaaaaatggccattgctgctgttggttttaatggagatccatgaacaactttgtttctttccgtccaaattgcccagagaagacaaaaaacatgttccatttcagctttagtaagcatagtcaattggattgactaagttgtttatacccaaatccctgacttgatatgtgttattgcaaatggaatataatatttctaaatcacaattcaattttataaaaaataaaaacataatgtaaaaacagaccttgccatggctttcgaagtgaaggagaaatggttgaaattattgtgcagagatttcaaatggttttaataaccatttctttctcatggataaaatcagattgagatatagtagttttgaatcatggatcctaatgttgtgtgagatttctagggtttaggggagagagtttcaaaagccgatgacggtgttccaagttcaactgagtgccaccgaaggttggagttgaagacggagtgccgaaggtcggagttaaagctcatgatggttttaactaattgtctagttgaagtaattttcttaattttatttagaataataaaaaggaaggaaaataaaaacttaaagtatggtattttatttttttttaataaaattatagcataaaaaagtccataaaaaggtaaaaaaaaaaaaaaaatctatatccaattataattatttaattatgccataaaaaataaatccttaaatttttttcataattcatgtaacttttacttgatttcctctcggatttatgtggcattgattttggtttttttggcttttggttcacatggaaaaatgctagaaatcatgaaaatcacgtccgtaagagactaaattaggaaactgcaaatatggactagtgtaataggttcttaaaggcagatgacaagaagctgccgaaaatccagaagatgagcccggtaaagggaaatgaagtctagcccaa

SEQ ID NO: 383205 - DNA, 1300 bp, Cannabis indica
aattgtctagtgcagcagcataagcaatccttggtgtcagttcttgttgctgcatatcaaagtttaaaggatcctttctgagattatcttgacaacaatccaagaaatccttggctttcattgttgccataggtatgtcagcaaaatgctgctggtttagagccttgaaaacctgctttaggttccttagcttcgaaacaaactggtacatatttgtaccattgacctactgagaccacacttcagcaacatcttctgcatatttaggatgagttacccacatcctaaaatatctaaatggctttttgctcccctagttcaaattatctactattaaataagcaggggaatgatcaaagataccttcattttggaaatgaacttctgcagtaggaaaattgtcaaaccaacattgatttgctaaaactctatcaatcttggagtatatcctatcttctccttgcttgttactccatgtaaagaagttacacgtgaactttacatcttcaagctaacaagtttctacacaatctttgaagtttgaggaaaccttgaatcgaacccggttgccgattctctcatccttattgaggatgtcattaaaatccctaagaacaagccatgaatccttgatagccagctcccttgagtccctccaaagagtccttcttccatcctcagtgttaaatctatagatgaaggtggcaaaaaaaaaaaattctttcttatctatggtttcaacaaagaggtgaatcaattgacttgaacactttaaaatattgatagaaaaactattagggttccaactattatctacctcccttatgccacacacaattgggagtgaagcaccaccccgaaaatatttgaacatataaggctccaagatttcgagccttaactctcatctcgaggagaccgaccagcccaatcttttgatttctaatcaattgcttggctaaattttgtttctattggttgtctattcctcggacgtttcaactcattattttatccatttgcaagagagggatctcctccccccctcctgtgttaacaacttcatccccttgctcttgcttcttttcagcttgctcagtcttctcattcccatactcatttagttgcagcacctgaaatgaactacttgtgcttgcttccatttcaatctctttatcctttggcttccatcctttgaccacagcctgaaaactatcagcatctaccttgttcttcttagcttcaattttctttttctagggtacctttgttgggttttatgccctaaataaaactcttt

SEQ ID NO: 383206 - DNA, 1571 bp, Cannabis indica
agtaacttttgcaaaacatatggtttaaaatgatatgtaccctaaataaaacaaaaaaaaaaaaatacttttgaaattcccctatttgttttgcatcacccttacccatgatttttctaagcctccttatttttctttccattcaaccaaacaatggtaaaagaaaaatagataactcaaagtagtcttacctgtccggcgtggaagtacacttgtttttgatgtgccaccctacaaacggaaccatggcgcacaagccatgccagatgttgtcatagttatagtgattgttagacacaaacgttaggcccttcatgagtgtggcgttatgcggcaacgtgccggccacgccaaagcgtaggaattccacgaaccgtcgtggcggtcgcggcctttaatgcaaagaagtctaccttccgatgactcggaagggaattcctggtattgtacctccccttcctcgtgatcatcgtacatagagctcataaaccacgtgtggccctgttgagcggtgttagagtaccgaagatccttcagaggaaggaatgttactgctcggcggagtttagctgaaacttcctccgccgagcaggaacagtttttaactattccaaccgaggcagcagcctcagtagaacatttttgttcgactgtgactgctgctgcctcgatggaattgttgaatatgattctctgccactgttgggtgaaagaccatgtggcgggcttcggagggagttggagagagttgatgtggaagagaatgaagaggactacacaagtggctgctaaaaggtaaatggagaatttaggagagtaaaaaaggtggttattattacgatggtgatatttgagttgttgtggtgttttgctcatggtgagaagaaaggtggagcaagaagaatttgatgagaaacgacgtcgttcaagtgtttgattgattgagagaaagagatattgagtaactagttacaaatgttatgataagtaaagtagctagttcatgttttgtgccattaaattgagaagctaccagattttgtggcggaaaggaagtgagtgagtttattttatgaagatggtgaaaaccaagtgatcttaaattatggctaaagcaatatttataaaatgattaattgtttgtaatcagagctttttggcaagagtttcatgtaattaatgctttctgccttgtaagtaacgtagatcatgtatataatgtcaaacacgtttacacactttctcaagtcatttttcttaactgccctccaaaaaaaaaattactttctagagtggatggagacaagagtttaaaatgacacacataattaacattttgatgttagacaatttatatgtatagactaaaacatatatgtttatgtataaattgcggaattaaatcaaacataaatacactatgaataaggatcgaaatacctccagccattgattcttgagcttcaaacccacataagcttcgatctgcaagggaaactggttgatgtgggtaatcgggcttcctcgctctctcaactctctttagatggattttgctgttatgaacagaa

SEQ ID NO: 383207 - DNA, 3564 bp, Cannabis indica
acacaaatgagtacctttcgaactcaactcaactctcatacactcatcatcaggctgctttattactctgaacactaccccgagatctcatagcaacagaaggaaggccctcaacgagagacctccgctcaccaattctctaggaaatgggccgacgagcccactaaaaatataaatattggagcacataacaaagggccaataaagatttgagattctctaagatctaaagaccaaagtgagagaccaagatatcttccttgaagcgatttagatctatcgatgagtagacaccgataaaccaattggagacagagcttacacctttcaccaagacaaaaacaaatcctattaatctaatagggtgtggagaaccaccattagaaaaaaaaaacaaaataaaaactaaactaattaaacataacaataaaaaattaaaaattgaaaaaaaaaacaccatacaaattgatacccatcgaaccttgctcaactctcatacactcatcaccagattgctttattactttgaaacctaccccgagatctcataacaacagaaggaaggtcctaaacaagagaccttcgctcatcaatcctcttgtgcaacgggctgactagaaatgaaaatccccagacccttagtaatgataataaaaattcgagcatttctattgggaattaatagtgcccaacactttttataggtgccaccttatgattagttagtgatatttcttaaaagttatttttttaagttatatgagactcgatacttaattacaccaataacagtatgacaccgaggagggtgctaaacactaatagtgtcttttaacaattctctaaaaaatcaaatgaaaatgctcctttattataagctgaattaatatttcactagataattagaatatgaagttttgagatcgttcactatagaagaaataatagtgcaaacatctttggatttttatcatcttttttatcttgtggattagtattattgctataatattattatttttcgacaattaaattctgacttttttttaggatgagatgagactatcagtggccttgaaacttgaccataataaacttggcaagacaatttataaattaaattaacacccatgtataaagtaccattatcttttcttttctttcaaaagaaaaagcaacattttttttttcattccttaatatatattatgtctttctacgaaaatgttacatatataattatacaaaaatttgtactttgtagtggaattctttgtttctttttcatgaaatttctcctcgtgggaaagataaaaaggaaaatatagaaaccaaaaaagaagagccaattttttttttttttcaaaacactattgaaaaataatggcaaaaaaattaaactatatatatatatacaataataatcttaatatttcgaacgtgaacatgcttttgaataagtcacaccccttcatacctcgagtttttaatcttttcattatgtcgtgggatcataatatataaatatatgtaaattttattaaaaattgtgtacaataataataaaatactctgtacatatattattgtattttttaaatacaacccacatatatataatacgtatataaaaactaattaaagggccacttcatacacctgcagatagatattcagaaggtcttaaagtcactaatgaattacaacatttaatgcttaggaatgcaaactaataattaatattattaattattattattattagaaccccaaaaacgtcccattctactctccaagtgttgtattctagcacaatatttttatttttttattttataaatacaactaaaaaaatcttaaaaacatggggtgacccatgtcgtgtatgtctaaaatactttattttatatagaaaaattacacgtacggaatcttcaattttgggctaaaagaaatgaaaaaaatcgtatgagtatagtactgatctaaactactcttaaaattagaagatacttattaataataaattaattaattaattaaatgggatcaaaaaggggtcgtgcccacgagtgggattgctagagagtgaaaatgtccctaaaatcagattcatgtcacttaattaaactatctaactaatattaataacttaattacctaatctcactctataatgtttccactgaagacattcacaagagtacactatatatatattattattctgagaaatttgtacacgtggtgtaaggagaaatcgccatgtggctgcaagctgagttggactgtttttttgggttgttaaacaacctacctataattaaagttagtcatcacctaattaaataatatatatatgaaacatttgcatatatggtttaattaatatttaattaattcactaatcattgtctaaacattgcttaatgatattcagaggtggcaattacagaatcagttgaggttgagacatggtaatctcaaacacaagatttaatgctaattaatatttacagagagtgagagagagagaacatgcataccattgatcttaatttttggctttggtttgcctttatttttttctacattgtattgtgctttttgaacactagctaattaataattatagatttaatttgtgtaacaatatataacatgacaactaattgtaaaagaacttgagcttaattaatcatgaaaatgtcaatcttcgctggctttcttagcaaagctatgtggttttattttaataattaatgtatatatatataatccaataattaatgtattttttagcttggtcaaataataagtgtagatgaagaaaaaaaaccgaaaattattctctaccaaatccatatggctctcccatttttagggctttcttttctgatattttaaagcttattgcaaaccaattaattcttaatttttattatgtttggatgatcaaatgagagataattaaattattgaaattttaatatatctacaatatacattgtcagaattatgacgtaacaaatatgataataaattttaatatcatttaatatttactttatttattacatattatatatttattttatataggtgtgtttttatttcattatgtacaagaatgtcaaaagctatcaacaaataaatggtgttttttaatgagctaggagtgttgtttcaagaagttataagtttattgtctaaattttcgggaacagttttatcccatgtggctcgcgataagatttttgcagctcatgatttggcaaagtatgcctttcggttagatgatgagctattcttgatttgaggaggtaccgccgtcgattataaattagggtcagcttggcacaactgtgctgtgggaaaaagcagctgtagttgtgctgtgagaaaaagcagctacagaagaattggaaaaaagctaagctgagtgtttggtaaattataaattttaaagtactgtgagttcaatgaattgttaagatttattataacgataatgttataatctagtttattataattgcaaatatataaaaacttattttatat

SEQ ID NO: 383208 - DNA, 3688 bp, Cannabis indica
tttttggccaattctagccgctcgagaattggtaggcttccaaagccaaccgggatagtccctgaaatgagattatgttgtattcgaacccgaaccaaggacaaacaagttgaaagacctaacgggataaaactcgaaaatgaattgttgaagaggatgagtttagtgagattaccggagtcacacaaacctggtggaatctcacctgataatgaatttgatgacacgtctaaccattttaaaggtgagttctttccaaggttcataggcaaaggacctgttaagttattcttccacagctcaagaatctctaacttagttaactcctccagcttgtgaggaaccaaaccagatagattattgcacatcaagttcaacagccgcaaattcttcaactctgcaagctctcctggtatctcgcctgaaatctgattatcggaaaggtccaaaaacacaagcgatgctatgttgccaatctctggtgggatccttccttgaaacttatttctgtataaaaaaactgttgtaagtttctgcagcttacccatctcaggtggtatttgaccactgagattgcccactgccaagtcaagatactgaagacttgtaaggtttccaagctcagctgggatttcaccttgaaaatcattgtatccaagaataatggtctctaatgatgagagttccccaagctctcgtgggattgttccagtcagattattacctgaaaggcctagaaacttcaacttctgcagattcctgtatgagattggaatagaaccttcaaagaaacttcctctaaaatcaaggatttcgagagctgttgcattgccgagatcctctggaagaaggccggagaagttattgctcgacgcattaacataagtcaatccggcagacgttccaagacctgttggaaacttgccaacaaaagagttttgactcacatcaatggtcttcaatgaggtgagattgtacagagatttcggcaaatgagaagcaaactcattgcaggaaatgttaagagaatacaggctgctcaagctttgaatgtgatccgataaatggccactgaggctcatgttggacagatcaagcttttccacaaagcctttggagctgcaccaaactccagtccagttgcaatgaagtgaactgttcttgctcaccggcttcttccagtcgttaaggcaatccattggatcaaccaaaactgattttatggacaacaagactgacaattcttcattaggcagagtctgagcctccagaacaaagacaagagagagaccaatgaaacaatagaagaacaacagggactttggcattgtgttgttcttctggctctgctcttttcagatgtgtagtagcatgtctgggctatcttctgtggtagtggcaagagggtgtctttgtatgatgactaataaaagaggaagagagtgagataacagttttatgtattttggctggggaataaataataataataataataataataataataataataataacaataataaatggggataaacttattgtacttttgtagatacgtgtgttcttgggatctgaaccagctaattatctgcacttaatcactgtgaagctttggacttattgaaaatctcccagacagcaaaacatggagagaatgtgttttcagtgactgatttattattcttatgttttacctgtataatttatcaatggtcaacccatatgggtattgggtattaaccaaatagatgctttttacataattatgcggaaagggtaatttgtactgtacgtctctctcacacacacaacttatttccattttaaatagcacagaacaaagttcttgggtacactgaaaaaggaattagacttatttggttatgacacattataggagggttgccttttaacatttctccttaattaattcatttcttccataaaaactcttttcaagaaattggtaactcaatggaggctttttgtgtataaaactggctgtgaaacaaccatcaagacatttttttgggtaaagaattttggtttaagttgtttattgggttgatttatactgatctaaataattaaattgcaaaacaagaatctctccatgttagaagaggataaagaaaagattagaaacaagagacaacttggaactttcacaagagaaaggagagataggtaatgcaacaatcattgtcttggccaaaataactcccattccatctcccataaaaaacaattgcaccccatttctaagccttcattttcacatgcaaacacctgtctttatgcaattatttataaacttaaaaattatttaatatagatacattatattagatgccctactaaagggtaataattcaaagcaataaaagaggaagaaaagggctggaggccatgtgagaggactcaaaatttcccattattgtaacactatcacattgacataagaagatctgacttattaaaaaaggggaaaaaaaagtttccattggattattttggatttggatggtccttaatactatacatatgtatctttcccatacttttgtgcccttttgagagaatccatttaggatgttagatataggattaggtgcccccacatggctttatactaaagccacctccacccttccataattttttgttcatcatttgagattttggaatcgaaatgtgggcagtctatgaagttcattattttagtgatgaagaaggtagtaaggttcacattagtttgatttaccatttgaaaattttaatgacaactgactaaaataattagcaacaactgcttcatttagtacaaatctaggtcataatgacattctagtctccaattttattaagtgtatacatatacatatttaatttattttaagagaagattttgtgaatacacattataaaaattgtgagtactaacatctgatgtttctttacttccaactttttttatttatttatttttaatgaaattttgcgtaagatcatcaaagcctagttcttgaggtgggtcagtgttgtttttcttcatacttgaagattaagtttccttatgtataacaattatctatatcacatgaccaattattagtgatataataatattgtactcagatcagataaaaaaatatatattgttgtgaaaacttatccccaaaaatatttcattcctttcatgtgtcaggctttcattttttagcttttacaagatccatgagccctttttacacttggtgacttgaggatactacaacttagaaaggtaatgattggaagactaataataattagtataatgaagtgattatttctgtcaaacttttattttgtttgattgagcttgagaatataatgatacaagtgttgtaagatatagagcccatagatacctaatatcctcaataacaaggctaagcatagagtttaaagggtcctttagtaggctgtataagtcttattatattaaataagatagtatttgttaggcctgcacatgggttgggttgggcggtttttgggcggtttggcagtttttttatttggcggttttttaaaatcacaacccatacccgcccaataaaagtttgggttgggcggttttttagggggcggttttatgcggttttttgggcagtttgggttgcttaaaaatcaaaac

SEQ ID NO: 383209 - DNA, 1541 bp, Cannabis indica
ctccatatcgcccaacagagaactggcaacaacttccttttatcggcatcagcagtagaaaaagactggatacaccagtctagaaaactactcgccccagtagctgcaattgcagtcccaatgccaacacggtcccagaccagtttcggttgtgtacatatcagtaaagcatgttcaattgactcatctgcatcacggcaaattggacaaagagcttgcacgtccaccctccttatccgcagttgtttcaaggtaggcaaacattccctgccagcgcgccaaaccaggtttttgaccttgggacattggtttaaagtttggacaagaagattttctttgttcatgatttactattataaaaattattgattgaattttccgttttattaaatgaaaaattgaattatatattttttaaaatgatactaaatagtactataaattattattttttatcaaaataacttgatgtagaggtgttatatgacaatagtagttacgttttctgcatttgtccatgtcagaattattttcaagttggttttataaaaaaaaaataaaaattgagtttatggtcctattttgtaaaattttagaaaatacaaggtttattttatcatttaacaaaatagagagtctaatcagtaatttttgtaaaacatagaatctaaaatggtgtttatttttttctaaaaaatagtttagggaaggtctgatgtacaattccttaagggctcgttaggtacgccgtataagggtcgtattgtattaaataagaaagaacactatgtttagattaaataatgtattgtattaattattacgaccaaattttttaataattaataccttctcttgtctggtgccgacttagtcagggaccaaacatctctagcggcagcagtccaagcagaccataaattcgaaatctctgggtcttggaacccaaaacttagtcttccctcctgtccccgatctctcgagctcaccctctgtctctctcctttctctcttctccgtcgaacagccacaaccaggtccgacgtcaaccgttctcggtcgtccaagctcgaaaagaaccccaaacaactcgaaattcaaaccccaaccttccaccttctagctcactcactgtccgtctttctccttctctccttctcagttgtgcacaacagtgccagcttcgttcactacaagccaaatgaaggccacaaatagcctctctaggtcctaaagtccctagtcccatggtcatgacccatgtcctcgtttgttgctgacaaaacagtgaccacaacctgtggtggtgcttcagtggagctatcgcggctgagtgaagaagacgaagaagaaaaaaaaattgttttttttattttattttaaatacagatttaaaattataatttagaccaatacaaaattaatatgtaatattttattaatttctaaaaaatcagttgaaaaaataactaccaccaatttttaagattggaaaataaaatataaatatttttaagacttatacccaattttcttgaaaa

SEQ ID NO: 383210 - DNA, 2524 bp, Cannabis indica
atcagattttttattttattaatgagaatttactgtattttgcaaaataaaacatataaatacgctaaattagattttgttcaatatattaattaccctcattcatcgttgataatagttaaaaatattggtcctatactattatttcaatctcttgaatgatctaagaatttaaaagattaaaagagataaaaatatggtaaatgcacttataacaacaatcaattagcagaagaagaaattttaagaaattcacaccacatggtttcttaaaactgtattttttcaacctaaatatatatatttagtaagtttaagatgaagaagatatgaatcaaggtattttatgtaatataggtataaaatgaatccgattcggtaatcttagaaagaaataaagaaatttagaatcaaatcaaaatgatatgtattaacttatttttcttgtaccattattatttatttcttttatcaaattatttttttacttttagtaacaaagtatatgtttaagattttatttatttatttttttcaaaaaaaaaaaaaaacaaaacaagagaattgagacttttttctacatatattatttttgaaaagaagaataaattattaggataggattgattttttttttaccaaattatatttatagtatcatcatgttccctttggaaaaacagccatttgtgagatttaatttaagtgatgtattattattattattattatcattttttggctttaaattacttaagttgaaggatgaaagatttcaaatcttgaataggtctcaagagtgcaaccacttgtagatgcatttaatagttgtgacacagaacaagaaaagtgcataatattaatcaacaagcttaagtcctctctttacatactgcaaacaagagaatggtaagttgataatgtgttccatttctatggatttggatgtaagggtattcaatataacatctctatcataattcccatcaatcattccgaaacctttgcaaacaaccagagttgtattgcatatccaaggaactgacacagtgaatcccaaaccagaatttttctctccattggagcttgtcttttcacccaatacatctttataggctcggccaacttgagaaacatatttccccatgggcaagatttgctcgagaacagatggaacagagccgtcgggatctaagagctcagagtctgagtgaaggttcaccacaacagtcccatgtttgggatgaagctgattactgagagcttttagaaaaggggaatccgggtcccataattggcgagggaagatgtcctcgccgtcataagcatcaatgaaaatcatatcatataagttggtgttcttgagtatgaacttctctgcatctgactcataaaggtacaacctttcgtgagtgcctttccacataacttcatccgtcgaatctggtttggagaaggctcgattccctgatggagtcatgactgagaaagctggaaaccccatagcttgaattgatgctgatataactagaggatcaatttcaactatgtgaacctcagcacctgaaagaaccaaacaagcgttattagtctcaaaatttcttatcgcatgttttgaaaagagacaactggccataaaattagcaagacacagcaaaagcaaccaaatgaaacatcagcatttgctagaaaaatagcttatttactacacattgggtgaacattacttgttcatcaaatttcaaatgaagggtatcatctgtgacttgagtagaagtttacttaagctctcaatctttacatgtaacatgttagagtttcagttcacaataacatgataggaacacaaaaactatcattttcttttcttgtaacgccaatccgaatacacaaaacatctcttaaccatggcacacaagattcttgtaaatctgaaagcaaaaaccgcaaaacacaactagtgaatgcaaactattacccggaattttactagctataaacaagggcaagcttcctccaccatgaccaatgcacaacacacgcatttgcttcttcccctcaactgcactcttaacatcataattacatgatgctatggtggccaatccaaccgataccatactcttcaaatctgaaaatagaattatgataccattcaatgttataaagaaatactttaaaccatcaatttttttaagaacaaagtggaagtaatttacatggaacagcaaggcaatgtggctgttgcataaggaaaacagaaccaggctcagaatcacggttagcagccaatactttcacagtactttggcgagtaacaccattgaaacgaagcaccctccattgatatccaagtatattgaatttttctttgtgtttcacatctgggtttgcttcaagatacctcttttgaagccaattttctattgttggccagtaaacttcactctgaatcattttgtaaaacacattaagtacatcaaagacatatacagaaatatatagatatagagagagagagaga

SEQ ID NO: 383211 - DNA, 1279 bp, Cannabis indica
ccatgtaaattttcctttttattccatcaaattttagcattaaaccaatatctttacaaaaaagttccattatttaacaattttccaaacatgatttttacccaactttgaacctcttgcatttcttccaaactaaacccgattggacaaaaccaacgggaaatcaaactttgaatcaccctctcgaaattccatcaaaccccattcaatactctattttatccaaaaatttaggtagggaaaaacgtataactccaaaactataacgaatttggacctgagaatttactgggattttcttttatattaaacctacatactcaccaattttcataatttttccccattatatattcacacataaattaaacattacaatctttacaatgcttgctgtcgggaatttttccagcgtacacatcgaacttcatcagtctataacttgagtttagggaagctttgtagttattccaaaactaaaattcaagtactcttcgagtactttacttaaatataattttttttacaaaatcaatgatattatcttatgatctgacccattaaaaagtcgaaccgtaacccaattttaaatatttccagcaacaaacaacataactcaagaacataaaataaatgaagctcaaaactcacatgcatgcatgatcagaccttaaatcctacttaaagagaaactctaaaaagcctataaaaattgttaacaagattcaatgactatagttatgggaaaatcacaagaatatgatgaaactatttttacctcttcaaaagctccaacccgatggatgctttacgtagggtttggaatccttccaatatgtgatattacaataaaaacccaagtcccatgagcccaataatagaaatagaaacttataaaatgaaggaaaagtactttctttgagcacaaagcttcttccttgctttttgcttgaataagatgaactaatggtaaattgagctttgctgagagcttcatcaatagagtaaaaatcaaacaatgaaagagtgatagaggagagaatgcttgggttacgacttgaagagaagtcaggaagagtatttggttaggtttagtggtaaccatctcagcatcaccccttggtgagcatcttggcaccaacaagtggtgaccaactcaacatcaggcccgaccctgggcataggcgggctagtcctgtgcctagggcccgcctatgcccagggtccacccagcccaggggcccaaaattattttttctcttttaaaattatatatttt

SEQ ID NO: 383212 - DNA, 1997 bp, Cannabis indica
aaaatagagtaattactacaattcaacttgaaagaagagaattcttacaatagtaaagatcaaaacagaagaggacgcgaatgtggacatggtttaggaaaacaaaaaaaaggaaggggtggctttaataacaacttcatcaatgaagaatagaagcgaaattcagaagcagcaagagggcacggaagaggaaactcatggtcttggagcgataaatcgcacatcaagtgctacaattacaacaaatttgatcattttgcctcagagtgtagatcaaggagggttgaataaagagccaatttcatcaaagacaaaggtggagaagaaggaactttgccgcttgcttacaaaccaatgttagcaatcatatgtgtggaaaagaaagaatatttgttgagctcaatcaaatggtaaaatagaatgtctcttttttagagatttaatcaaaaatacttgtgaaaagtaaagataagcttcttatatgctagaaaaatggaagccatcaattcatctcaaatgtttactttgtgctcaacatgaaaaataatattttgagtttgggtcaattactacagaaaggttatgatattgacttaaaataaaataacattttcttaagatatgataaaagtaattttatagccaaggttcccatgacaaataatagaatgtttctcttgaatattcaatacgatgttaaaaagtgtttaaaggcttgctacaatgagtcatcatgactttggcatctacgctttggatatctcaactttggtacgcttatactcttggacaagaaggagatgatcagaggccttccatgcatcaaccaaacagatcaattttgggaaggatgtttgcatgggaagcaatttgagagaagtttaccaaagaagtcgttatcaagagccacaaagccacttgagatcatacacattgatgtttgtggaccaatcaaaccaaacatatttggtaagattaaatatttcttccttttcattgatgattttttcataaaaattatgggcttatttcttgaaagagaagtcagaagggttcaagaatttcaaaaaaactcaaggctctgttgaaaaataaagtgttcttcctattaaggccatgagatctgaccaaggaggagagttcacatcaaatgagttctgtaaatattgtgaagataatggaatttgttgtcccttaactataagaccctactagattaggtatgttatcgggattacttaatgttttccactcctttactaatcaaacagtttatggaaaaacgtgaataattaaaacattcttgatgaacctttgaaattaaataaacaaaacttttacataatctacgatcttgtctttaaaatttacaactgtaatacaaaatatttaactacaaaagttgttgcctagcgactaccaaaataaagcctactgctccaaagatcaaatcacaaggtctaactgccttgatatgtacaaccttcatccgctcgtactcaatattgttcagtcttagctttacctttacctacagatataaacattaactgtgaattggcagactcaataataaaagaataatcataacataaatataaactagattttaacttggcacccatacacctaattataaccttatcctgtatcccacacatactgatctagaacagtcatacaaaagtaatattgaccataatatcagcctatactcagtaccctagttgcaccaatgtgatagtatcaattaatacttaagctaaatatatttctgtcggtattcagtacaactctatggacacaaatactgccattaccgatatgttatctaacatacattcataaacatgtaattatatatgcaataattatactaatcttacatttattttaaattcagttttgtccgtaaacttgagcgaaaactgttgctcgacaatttcaggcccctaagtcaaaacatttgtagaattgataagtgatatgctaaatca

SEQ ID NO: 383213 - DNA, 2748 bp, Cannabis indica
caaaagttctccaattaactcagttacataatctactcagtttcttgttacaccatccagttcattattaaagaacaaaataaggtactcacttgagaattattgtggagaaaaacttataaggtaattttgatgtagtatttttttatttacctcgcaagacaaactcgtacaatacaaacattagtaaaattaaactataagaaaccaaattagaataaatttcaataatttcaatattaactaaaacagtctctgtcaacgacaccaaaaatttaacaaaaaatacaacacgcaaatatacgtaacatttctatgtaataaactcacctgagtgagattgattccacaaagattgtagctaagtagcaaataattgaatctttgtttctaaattaataatttgaatgacgattgtaattggttaataaaaagaaagtaaaaaacaaacaggcaattaacaatgattaaaaatataggaaatggcctaatacaatttaattacttcttcaatttcatgtgatagcatattaacaattcaatctgtgttaaattacacatataatctgcattaaacaaaagaatcctaattgatatatagaccatataggtactttcgtccaacatcgaaatctatgtctattttactatagtataatcaatactttttcagattttgcattgaaatcataaataaataattagcgatcaagcaattataagcattaaacacaaattacataagaaattgaacaaaaactcaaattgtattaaaccatagaaaagtatcaaacaatatccattaaaaaatcctaaatatgagtttaactcataatcattctaaacagttgcaaataacaaactgaaaacatcaaatgaagatagaagagaagaactgatgaagaacaatggttattcttgaaaattttcatttttactctaatttttgtgcctccaaagttgcctcatgaaaagctcacttgaattttcgaattagggtttaaaaaacctaattaggccaatttttaagaatgcgggccgcgacattgtaaaacccatgtcgtggtccgtgtccgaaattggacacgctaatggttataaaaagggatatttacagaaatatgagaaaaaaggaaaagctttgatatatatgacatgcaaatataattgcaccaaatatgacatttcttttttttttaaaaaaaaaacttaaaaacatggtataaatcatcatagataaaaataaataccataaaaaacttaaaaactcgtatataaattttatataatcaaaactagtttcttgatgaaaaaacctagtttcttagaataaaaaaaatcagtttcttgattaaaaactagtttattgatgaaggatctttagtgagtttcgctctgaccaatcgttgtcagatgggtaaaaaacttgaaactcatatatacattttacttcttataatcaaaaccagtttcttgatgaaaaaactagtttcttgatgtaggatctttggtgagcaatttatttaggggtatttacatatatactataaaatgggctaagtattacatttatactgtaatatgctaaaaattacatttatactgtcctcttctaatattctttcttttacactgtacagaggctaaagcaaaaagcaacaccacacttactgtctgaaacaccagagcaacgccaaaatagtcgaaaaactaccattaatgctagtgagatgaaccagaaacactaaaattgacgtaaaaataaaacacaatagcttcatcaataccaaaattaaacggatcaaaaagataagaatctgaaacctatacaattattttgatagtgtgttaaatttgatttatgttaaaaattgtgtcaaatttgacagacaatataattttatacatattttacatcaccataaatattactcttcttaatttattcttacaccattttattatttttaaaaatcacataaattttttactttattattctagcaaaattttatgatgcactcagttaagctaaaaaaaagaagaattaagttaagcaaaaaaaaaactttatgatgcactcctaaaatggagtgtattgctgcattcgtattttcaacatatagatattttaattttaattttattatatggcaactaaactaagaaaagatacatctaagctaaaatatcattttacattaatatccccagaaatacccattaagtttcatttttatttataaaataagaaaaacttttaaaatatagtttaacatacattgaatttcattagagcctgtgcacaaagggaaatttaatttttttatgcttatatttactattttgtttttcttaaactcataataactaatatttgtaggatatgacaacttttatgatatccctaaaatactccctatttacaacactctcatttacacaatcgggtccccttcatcgaatcccacaacggacacaattggacccatcgaacccccatcggaaccattcgtaccccccatcagatttaagtctcctacctcgcaaactcacagtttcattcgaccctatcagaccacattagatttacatcgaaccccatcgaaccttgtccaaaataacagatctgagattctaaaacctaaatctatccctaaatctaacaaagtctatctttaacactaaaatcacaaacaaaatcaataaaaaaaaataaaaaacagtggtggtgcttcggtggtggtg

SEQ ID NO: 383214 - DNA, 4573 bp, Cannabis indica
gtggattctgaagactcaagtacagtagatgattcatcttatatagctaatacatatgaatcttcatctgtttgttcatcttcaaatgatgaagaaaaaattgatcagctgaaggacctttccagtcaaagttttgagcttgaagagaaatacttatctgggttaagcttctctataacttctcccttcaataattatgaggaaaaatcttgtgaatgtgaggaatcacttcatattgaaagtgatgcagatggactttgtgaaagagatgtacttcatgggaaacttttggatcaaatatctgtggccaaagaatcacaagaacaaaattgggcatgtagatctgtcaataagtatctagaacgtttacccaacaatgattggttaggtcatttgaaaagttctgtcagtgttgaaggaagttctggaggtgattcaaggtcaaatctggaggactgtgacccaaggatgagtacaaaaggaaccattgaggacggtatctcttattgtagaaaattgatggtcacgagtgattctttttctgaggagctgtttagcaaggatggacaagagaacagcataaataattcagccttagttaccaagaaagactggaaggttaactcacacaacaattttcttagcataaatcccatgctaaggaaatcctctttcctaaaattgcaaactgatcctggagagggagatggcacacgctatggcaaagccttacctttttttgacttttcttcagtagaagattcttgtaaccgatgcttggaaaacctttctgcaagacttttggaccctggtgcttcagccgctagtaataagattgatcttcatgttgaaaattgcaagcgagatatgttgttggttgaacccaaaataagctatgataattctcttttggaagtgaaggactataatcaagaagatactgcatcagcacttgtttctggaggaagtagttgggagatgttacttggtagatcctgtaacactgtcaataatggtgttagagatcacataaaaagttcattagccaaatttgacataccacttgactttatcattgacaaatgcttgctgcaggaaattatgcttcagtatccttatctttgtgctaaatgtactagtgagagtatagtatacgtttttgcagactttttctcttacccttgttgttctctttatcctaccttggttaaggctaactaaatctttgaactcatatgaaatgtggtttaagctgactataagttttagtttatatgaaataaggcaatttgctttcatgtgaagttttgtggtgctttacagaatatagagcaattagggaaaaatagccatattaggactgtttttttttttttaatattttctaatgcttttttgcaatgcatccacaggactttgttttgtgagtaacaatgtaaaagtttggcttttaattttcttgcattattctatatttgattaacttactgttggctcagttgtttcctctacatgatgtttctgaaaaaagtgtcttatccttaagaaaaacatagatacaagtatgttagcaagttaactattaagttgcttgaagaaggatttgattttaaagaacatttattagcacttcgacggtaccacttcatggagtttgcagactgggcagatttgtttatcatgtcactttggcatcatgtattgttctttagtaatcatgtcaataaattcaataatctgttatcatttaatgtactctcatctgatgatgtttttcttgctctttaaatgacagaaatggtgcatcacagaggcagagcaaagacttgcagaaattcaaggacttcttgagttgtcaattcagaggtcttcttgccaatttgatcataataaagacagattgtatgtgttcattaaaggacatgacacaatgcctctttcagcatctgctattggtacattactgtttttttttttttgaaagggatatacattactgttctgttgttatgttcttgtctttttttttttagtttttattttttcttttattttccatagtcgaatgcccctaataattaattattactccttcaacgttggtgtttctatcagcctttttttttgaaatatattgttctaatatatgctctgttatcacagggctccattcttttgattttctaggtttgggttatcgcgtggactggccagtcagtattgttttgactcctgaggcattgaaaatatattctgaaatatttagttttttgataaaagtgaagattggcattttttcattgtctgatatatggcgctcattaaaggtatgcttttatactggattgcgatttgcagtttctcatttagttttatagtacctacactatgtgcaatttcccctttaatttatagctctcactctggtttgcaatttctcacttgattttatagccaatataagatatacattcatggatagaatatcattcttcaatcttctggaaagtggaaaatgactagtgaagaaatttagaaactttgctaaaatatattgatgtatttgctaaagatatatttttgtatttcatcatagtaaccaactaagtttgcttttaatatttgtggataggagttgaggcccttgatcagtgtcaaccaacaggctgaactatccaaacaggaagtgggtcattttaacttattgatgaagatgaggttagtgtatctctttaggctttgtagtattatttaaattcacaatatcaaaccaaactaacacaaagttactttattatataaaatttaccatactctcactttaattgaaacggcttggaacaaaggtaacatatttgaatacaaaacacaacagtatcaacaaaaagtaaaggccaacaatcaataaaagcttatgaaacagtctgaatgtgttgaggaatggtcagagcttttggtgatccatgatgccaactaaatggtttggtcttgggaagagtttttgctctctgattagttagtacttttcatgattatggcctctgcaagctattgccattttactaaggatatagagttagaacattaagttttcattagaaaaagatggtggattatattccactttagctttaagtgaagaataataaagctaggtaaaatatggtggatttggatggagctacatggatatgtaatgttgtcaagaagaaagtcatggagtagggaagtttggagggcttcagaagcaaatgtagaggtaataattacattcatccttaatttggtgcaccatgtgcaaaaagaattctgagactgttggtcatctatttctctgctcttttctcagagccatgttattgaagatcctccatttgatggggattgactgggcgtggccttgcttgaattgtgatatgttgcaatggggtaatggggagctaagagaaggaaggatataaactgtggaatgtgggaactatattggataaggtttaaacatttggtggcactggggttgggtctaatgttacttgttttgcagaatcagtggttgtatgccaactgttagaagtgttaatttgtccaattgaattttgaaaacctagggcacattatttttagtgaaggtatctcaattggccccaagaagatctcagctatggtggggattgaagggatttcttggtcttattggctatttcgaaagttcttttcttgttttgggaagattgttaacctctgacagatcaacccaaaaaggacaagttttggtaatctttattggccagggatgctttccaaaattcaagtccacaataacttttttattttggccttagctcttccggatttcagctagctggttgttctagaggcaaaggcgtatgagttttgagttgtaatgcaaggtggttgtccaattgtctatttgatttatgagtgtgaactgatggccttacttcatcctctaggttggaagtttgtgatctgtacagactagactagagtgtgtaaggtttaggagagtagcgttttctttatttagattttcaaaagtggctcactgaggtccttggttatgatttggacatgactgcccatataatagagttggagatatcttgcatgcatgttgatgccactttattagctctaattgtgcaaagtgttatctagttggagggactcgctgatcaaagtattcaaggtctccttttgatgggtatatactcaaattgcaagatggtgcattgctcataagatttacacattggagcaattaaatgcaacaagaatgacacaagatctggctacctgccagaatgctcctaaagtatttgaaattgtatctttcacgtggccattatgtccctaagtcttttaacacataaatttagatggaatcatataaaggcttctcaccaacgctgcatcaattccgccgtcatgatatgtgtattagaagtttcaaagtaatacattgaaaaagttgaaaactttgacgaattctatatgttcctgaaatttcagacttctgttgcttttactggtttgtttttttttttttttt

SEQ ID NO: 383215 - DNA, 692 bp, Cannabis indica
ttatttttgaatgaactagaaacacaaaggtttgatacactgtcagatttcttgataagggcccaaggcttcattagtttggaggaagcctataccagagatttttaagtggctctggcgccatcactcaatgtcaacaattccacgtctgcgccacaactattggttccatctatagtccctccaggaacccaatacaaaactcaaaccatttacggacccgctgcctcagggtatgcacttccacaaatgagtttctctgagtttgaagcagtacagactggatatagtgctgcttctggacagaagtagacaaaccaacaaacaaaagttccagaagtaggaataagccagtcacaaaataagagggatggagaaattcaagcctggagcgaggctttaaaaaaagtaagcaaaggatacgagccccagtatactaatttgatcgagtcaagagagaatatctacaaggatacgtgcaactcaattcactacctgaagtcccccattgatgtacaagggggcatgcataagagagatcacagtaaaagatgtgaataccacgaagatattgagtataccacgaagatattcaaagttggttagttgtagataactaaatatcaacttaaataggaatatttaatgaaaaatttaaattaagctccagaaagaatctagatggttataat

SEQ ID NO: 383216 - DNA, 2836 bp, Cannabis indica
catctttgccgggaagcagctagaggatggtaggactcttgctgattacaacattcaaaaggagtctaccctccacttggttctccgtcttcgtggtggtatgcaaatcttttgttacaacgaccctcgaactggaaagaaccctagtaacgtttggaggttgagagctccgacaccattgacaacgtaaaagctaaaatacaagacaaggagggaatccccccagaccagcagaggctcatctttgccgggaagcagctagaagatggtaggactcttgctgattacaacattcaaaaggagtctaccctccacttggttctccgtcttcgtggtggtatgcagattttcgtaaagacccttacatggaaagacaataaccttggaggttgagagctccgacactattgacaatgtcaaagcaaagatccaagacaaggaaggtatcccaccagatcagcagagacttatctttgccggtaagcaactcgaggatggaaggacacttgctgactacaatattcagaaagagtccacccttcatcttgtgcttcgtctccgtggtggaatgcaaatttttgtgaagacccttacaggaaagaccatcaccctcgaggttgaaagctcggatacaatcgacaatgttaaggcaaaaattcaagacaaggaaggaatcccccctgaccaacagaggttgatttttgctgggaagcaattggaggatggcaggactcttgcggattacaacatccagaaagagtcgacccttcaccttgtgctgcgtctgaggggtggcatgcagatctttgtgaagacattgactgggaagaccatcactttggaggtggagagctccgataccattgataatgtcaaggcgaaaattcaagacaaagagggcatcccaccagaccagcagaggttgatttttgctgggaaacaattggaagatggaaggactttggctgattacaacattcaaaaggagtctactcttcaccttgttctccgtcttcgtggtggcttttaaatccatttcccaattatgaatgcattttatttttctgtttatggtttactactatggaactgcttttatgttttagtacggtttatggttttaaaaacttttatatatgacggtttatggttggcctagggaggtctgaataaaatttggtatttcgtgctatggtttgtgccttgtggtggtattttcatattcagagtgagaaattcttctcatgtttatgttcttcaattatttttaatgttgccaattgccatatattatcaaggtttaggtaggatccccttctaaacaaagtgaaaaaaagaattcaactttttgaatgaaaatgaatcatttcatttaatcaaatatcatctaagaataatgtcctttgaaacaacaatctgactaagaataatgccattcaaattgtaaagtatgatgtaatgagtgaggacgatgtctgtcctctgaattacaatctgaataagaataattttacttgaattgtaagtatgatgtaattctacttggctatgaacctttattatttctaactctaatgttaataataaagcctcgaataatatgaagctctgaaccttaattattattgctcgagagaattttcctctttccaggtttcactttcaagtggcgtcggtggagtttgattacacccaattacatggaactagattatgcgttctatccatattgatataatatatgaagtttgaaaaacagtattttatcattgtaaatcacacgtagtacagtagtactagatcgatcactacaaaatatctagtgtttctacagttaccttcatttcttgggtactcctttcaattgctaacaaataaatcgtatatttttcatcctttcatcttgtcgaaataatggaaccactaaattgaaaagttgccactataatctagtttggatttcagataaataaactaaatcgtatattccaaattttgaaaatgatgaactaagacttgagagattaaatttatgggattataaagggtttataactaagacaaaaataactgaaaatttatttagtatataaaagaagaagaacatatctaaataaatattggctaattaagatttctttctcacttacacatgtatcaatttatttagtattaaaattttctggacattaaaatttattccatttctctttaattttattttattaacctaacgtgatagttgtttatgtattaaaatactttttaaattttgacatatgttaaattttatttatgaatttaataattgatagaaatattttttttttatagttacaattaaaaaaaattgaatatatcacatctattttctttatttaatgatatattaatctatgtgtttataacagtttggggatggtaaggagctttggaataaaacggttcctagtgtgattaaagtaaatgtggatgcggcattttttgaagaagagaatcgttttggttatgggttggtggccagagatttcacagggaagctccttgaagcttgctgccagtcgatttaaggacagttgaatgttgcagcagctgaggcgatgggagtcaaggaggccctcagttggattaaaagaaaacaatggaatcatgttgaagttgaaactgatagtaaattaattgtgcaagtagtttgtagttcaattgctctgaaatcagtattcggtcttcttgttaatgattgtcgttgtttattccaagctatgcctaatgttagtttatgttttgttaaactgtctgccaatcgagttgctcactatgttgctaggcaatctcg

SEQ ID NO: 383217 - DNA, 2455 bp, Cannabis indica
agagattgattgtgatttaggagttggtgagcaaattgacttggacgtactcttcctgtgtatcttagggttttatacttaaacatcttctagaagctcacctcttcaaatagtcatatatatatattatattgtatatatgatagatacataaattaaaaataaaagattcttcataaaattaagggtcaaactttgttttattgtgttcaggctaaaataataaaactaattaatataagatttttgcttactgagactttaatacgaattaattaaattgaacttataatataacatcatgtttctgtagttttattttattttttaaaatttataagttattgattaagactaattatataaaattcatgacttgtttttcagcaagaagtaactatagctagccacacactatatatgtacatatatatacatgtatatataaatttgccaatttaatttttttttatcaaaattttgttacgtatatacaaatcaaatagtgtggtttgaccatgtatagtttttttataattattttgagagagatgaccacatatttaattagtggtttcttattcaaaaggaaaaagaaacagttaaaaaataatctaatctattatatgtagtacatatatagtgtttaaaaggacaacatgtggatattaggtcattaattaaaatatatatattggtttatccatttttattacatggtattttccttataatttacttgagaaactgttgaaatgtttagtatgaagtattcaattaataattagaataataaaatagagaatataattattgggcagaaacttacaactgtatttagtaatacataaaaatatttaattaaattacatagaaatctaataatttgttgtaaaaagttatataaaaatattaatatattaaatccatagtattaagattgaacttctgtttgaaatccacatttttcgaaagatttaagattgattccttagaggttaatttaatttccacactgaccttaaaatagaaaaatcttatacaggccatatgtaagacattatcattcttattaaaacatattacttcataccaaccaaccctaacggtaattaaataaatttatgacttatatataagaccatatccttatttattttctttttaataattaaaatgaaaaaataataactagactacaattaataaataaaaaaattcccattattaaggaccatgactctagatcgactagagtactaatttaaagtacgtattatatttaagggaaatttattttatatattattttttattttttttcttaaatttgcagtttgagtttgtaaagtggtttctccggtggtttctatatatgtaggttgctatacgatttttggttgcgattttaagttagctctagttacaatagaagtttctatataaaattaccataaaataataatacaaaataaattgtatttaagtagtaaaaataaaaaaaaatcccttatattaattatacaactattaattaattattcaagtgtaattagtgtgttattaattatggaatataatggactgttttagtcaatttgaacttttatccttttagaattaacgaagcttctcatgtctaatgaaaatatatatactaaaattatcaattaactatctttttttttttttaatatatatacttataaatatttcgaaacaccacactaatacatatataatcatcaatttgagtaatattaattatttgcattgttgccaatttgttgttttgcagctttgcttgactttttatgccattatattagaaaacattaaaattatttaggagtgttaattaagaatttttattcaatttaattctgtttaagattacatattgtcagaatattttttataataatattcgttatagttataatattatttttgtaaatttttaaaaaattctaaatatatagtttatagtaacaaaaatagaattcctgatattgtattttaccatgtattcaaaaaatttcaaataaaaaagattcaaaaaatcttaaaaatttattacaaagatgatattgtaaacataacgaaaatatttcatttacaaaaattaactagaattttacaacaagaaattaacgatatcacttttataatagttattattaattaattatagccaatttaacaacttcttgctcgcttgtacgtaacatatataattatatgattaatgttatatatatatgggtatcctcttaatgggtattacccatgtatgagtattttattcttgaccattgttattctctatattcctaaaatagataaaactattaatagaaataaaaaatttataaatagaattgttatttaaaaaataaaacacaactaaaaaaattaacaaactatttttttttaataaaaatcattttaaaga

SEQ ID NO: 383218 - DNA, 1512 bp, Cannabis indica
aaaaaaaaaaaaaataacctaattactcttctctctttccctctccccttacaatgctcttttgtttaattctctagaacaactaacgttaattatttcacctatgggatcttcatcataaccttaattgacatttttcttccccatgggaggttgcgtgtccgtgtccgcaagaacaggtctctacaagaggcggagggacatcaagacagtgacgacgacagagatcaaccccggcacaccccacaagctaaccctccgcctctcagccactctcaggccgactgcggtccttgatgaccccgtcggccatgacatcttctcaaactacaggtttggcaaggaattagggaggggagagttcggagtcacctaccaatgcttcaagctcgacacaggtgacaccttcgcttgtaagatgatatcgaaaagcaagctcaagacagaaattgacattgaggatgtgcgaagggaagtccggataatgcgacatttgccggatcatcccaacattgtcacgttcaaggaggcttttgaagacaaagaggctgtttatcttgtgatggagctctgccaaggtggtgagctttttgatcaaattgttagtaaaggccattacacggagcgtgctgctgctaacattactaagacaatgctcgaagtttgcaaggttctttccttttcatccaccagatatatgaaatctcttgtttgttttcatgctaatttcaaattttagtttctactaatattatctaccaattttacttggatgagaaaacagatttgccatcaacatggagtgatacatagggacttgaaaccagagaatttcttgtttaaagatagcagtgaaacttctcaacttaaggcaattgattttggactctctgtattctttgattccggtaattatactttagaaattgaacaaatatccaatttggcttcttacttccaatttagtatcatttaattaatctatgtttgatgttataatttactacactgcctaattggtaggtcagagattcaatgaaattgttggaagtccatattacatggctcctgaagtattgagacgaaactatggaccagaagtggatgtttggagtactggggttatcctctatatcctgctttgcggagttcctcctttctgggcaggtaattggtttcaaagctaggtttgctttcattaacttatcttttatatttaagggtcttggcttattaggagaaattacatatatagaactatcttctgaccatgagaatttataactagcacagaaactgaggaaggaattgcacaggcaattattcgaggtagcatcgatttcgaaagggacccttggccaaaggtctctgcaaacgcaaaagatctcttgaagtgcatgcttgatcccaatccttacagcaggctcactgttgaagaagttctcggtgtgtctctataatattctttttttttttttcagccatttcatcttgaaaatttataattttgat

SEQ ID NO: 383219 - DNA, 4362 bp, Cannabis indica
aacaagatatacatgaaatcagacaaacacaacaaagcagcacatgcaatcaaagcaatacgcacaacacaacaaatctactgaataaagtaataatgtatattgactaaaaaacaggacattatttattagtatgaaggtggttagttaagacttaagagatagtttttcatggtttaaattgccacaacaagtctactgtttatgaatatataccgcatcaacagctgcctcagcgggacccctgatgcatattaaagaggattcaacgagtcgtcggtatccttgttcaggagcaattaaatgtggttgatatccatctgcttcagtaataatcttgcgaacattgtccattgaaaggtgtttatcgaattgcaacctcttcaaagcagctggaaactgattatcaaaaacaccgtagattttatcgcccccaggtcgcctgtggtcattatatttattataatcataaatgtaaaaattgactctaaaatcaaagtgattttaatagcaagagaaaacgtacacgccatcaagatgttctttaaatatctgatcaaaagtacgacagatttccataatcatgtaaagctttccctgcaatttcaaaaatatgaagcatgtgaacactcaaaggtcatagctaccaagggttaacgaacccatgataagttttggtaattggattatgtgtgattcaaatttataaaaaaaaagaaagaaaaaagctgtctgtggttttgtttatattagaaggttttgatacaagtgctaggtttgtgattgaaatttatccaaaaaataaataataataatatagaaagtgaaaaaaccgctaaaggaaagggaagaaaatgaaaattagaggaaggtagtgggtgcaattcttacaccggcatcggtagcaatgggccttccaagtcggctcaattctccctccagctccgtaatagtcttgctaataagagactgaaggctcggaattctggacttgatcacagtttccaaatgctgaaaatttgattaccaatcaaatgttaagaaccaatcaatgtacagagagaacattgagcatgatttcaatgatactggaatgtttaaacaaattgagagaataataatataactttgcattcataaataccttggaaagcatctttcctaaatgctcagaacccatacgatgagcaagatgcctgtactctgtggtattcgaaaagtactcgcgctccctacgtcgggcagcaatcatatcaacacttttgttgatatcagcttgggaacgattgacaacaccaatccaaggaaactgaagcttataagattttccctccaagatctgagtgaaagagagacagactacattagatagcttgtttgggatttaaaatgaatttgaatgatttgataatttaaacgagtaccaataaagttatgcatcatcaacaagtcaaaaatgcgttcaccatatttgttcaggtattgataattaaatattagtaattcataacatggagaaaaaagtgttggcctatttactcaattactgtcaagtctaagctgttctttcctgatttaaattttcctttcaagattccttttctttttctttttttcagttttcctatgaatttggagctagaacttacatcagctgcattagtacccttgtccataagatcaatttttgtcaaaactccaaatgtcctctcccctgagtaattgacgataaagaaactaaatcaatatttgtagaaggaaaaacactttagtgactcaataaaacagcttatgatatcaattaaaattgtcatagcatccaagaataataagaaactttgtacatcttacctttaggatctacttcacgagagatcttaattgcatcagaagtggcaagatcctggttggcaggagaaattgctagaataatacaatttggctgcaaaaagtccagtcatataagcaatgttgcaatatataattttcttaataagaacacataaatcttgacatccttgattacaccatacacaagtgtcaaaatttactaatttaggttaaatgtgaaatttactcactctacatgtttcacttgctttcttttattttttgttgccccctttacttgcataacgttggtaaatatctcgaaaattcaacaaatagctaccttttcaatgaaagatcgaaccatattctcgatgtcctgcacaatgctctctggctgaccctctaaaagaccacaaaataccaaatgtcaatgagccagtcttgaaagcagtgcactaactagcaagcagaactttcggtacataactcaccaacagctacttttgtaagtccaggaagatcaatcagagtcaagttcacaactgtcagggtcaaacaagcaaacatttacaatagcttacagacaagacaattcacaatattatttactcaaaaagaacaatttctaaagtaacaaacttatggtccctttttttgtcaaaataaaaaacttatgacgtatataccatttctgctctgagttacttggatgatgaatcgaatttgtagcatataaggtatgtcaagtaagtgaaacaaagtgcatgattgccacacagcatgtatgtatatatataccattgggagaatagatactgagatggattggaacactagaaatttgtttggtactgcggcctgtctcacgatcagtctcatcaccgatctcctttctcacagcagctaaacacaatacaatatcaataaattagagaatccaaacattgtctaaagatatatatgcattttttctttttgaatataaacactaaatgatccaagggtaaaacattgtctcgaaaataataatcaatcaatactccatactactttcacactcatcaactcaatcaattaagaaaactctacaagccaccactataatgtatatctcaaactaagtaacaattttaaaattttggtcgctcacactaactaacttttaagcaaaccgtggatcaagactcaagagagttatattgcaatagcttttccttacaaaatctttaatgactaaattgtttttctagaaagtcgcttttgcattatattttataaacgaaaaaacgtgggcaatatgtaaagatggatagagagcaattactagaaattttttaatacagttttgatcatttctaaataatgataccaaaatcggtgaattttttcctggggagatgcataaactctgcatattctcttccatcatcaatcctgtgaagctgcaggacaagaggacgccgagtaacaatccctgcatgttacgattcatgattatccaaaataaacaccaatgccgtatatatacaggattatgaagattcttcttcttcttctttttcagtttaagtagtcttacctgatccacgaggcagaaagtccttccccacaacactctccaaaaccgaagattttccagagctctacaaagacagagattgtatcaaggaaataaaaattcgaatgaaacgatggaagaaatcaagataaaccgtgtccaaaaaatcacgaacgaaaaatagacatcaatataatcatgagatcgaaagaaaggaaaaacggaaaataaaatcgatatcgaacctggcccccaacgacagcaattgacggcaatgcgtcccagagagtgggcaatgcgctttcttcgccgtgatcgccaagggcggtgcacgccctctgtatcttgttcaccaacgagatcaggttctccatgaaatctggaaacgaagagttggtagaagcgagaagagtgagatgagctggtatgtgaatcggagttagagtagatagcaatggagggagaagtttctataatagaggaagacttcgttggcgaaagaaccgggaaacgtagaatggaacagagtatgagagagagaagtccaacgattgaaaatttgaatattcttttcgggccgggctaagtgggccttactttctaggcctcaaaatttgtttccaaggctaactatttgagattttttttagggtttacaaaaaactggatttttgggtaagtttacaattttactgtaactataataaaatagaacaattaaaacaaaaaacaaccgtaaaaacttaacacggtatacagtatttttgaaaaaaattctgctccacgataaaataaatacttaatgtaagggtaaattgcggcataaatacttaatgttttagattttatacacttaaatacctaatatttatttttggaggcaaaaatacctaatgttataattctcttacaccgttactaccacttccgtaaatatagacacgtggagggcacaaatgcattacatttat

SEQ ID NO: 383220 - DNA, 4791 bp, Cannabis indica
gtcattggtcttatatagtctttgttgcattgttctgtgatgttgtttgttttgttctagtcttatagcattcgatgtagttttcttttctacatttcagttcttatgagagcttgcttataagagttttatttctttgtttttgaatgaaaagaagaagagaatgctaccgtcaatttcctattacaatctcttagtcaatcgttatacctgaaaacacatgttggaatatttttttttttttttttttttttcatgtcggtgttggttatgcttacaatatatcatctctaataaaattttaaaaaatttaaataatttacaatgtcgaaaatacgtttgaaatttttttaaacacgcatagtaagttggaatatcaagaactttgtcgatactgtaaactatttagaatttttcaaaaatttatagtgataatactttaactataacaaataccgctataaaaaaaattagaaaaaaatatttcggtatataatttcgggcataaaaattaactataaaattataataaaaggttgtaattaacactcctaacaaaattgcctaccaaactcaattgtagaaaaggtcaaaagaaaacgacatgaaaatctgaaatatgacaactaatatgtatatgcaactagttaagaacatctaattaaataaagagtaaacgacaacaaaaggttgaaatacttttttcttaaagcagaaaacacattggaactatctaaattttctaatcacgacaaaacacaaaaacaaagaaacaagaaaataacaataactaacaactaacaaagacgacaatgtgtgaataacaacaagaagactcaattttcatttaagaaaaaagttagaaaacctgtaacaaaacaacaaaaataaaacttgtaaaagaaataaaaaataaaacagtaagaacaccaagtttataacggttcggccagtacaataactttccaatttgagcatcattctcaacaatttgctataaaataatagctactacaattctcaactcagtcaaaattgaaagcttctttgattctcacaagtactctcaccaaaactcacattagtaccctttaatccaagcccttcccccaagaacaatctctctcttgtgtgatcttctttcactctaattacaaaagctaaaattaattctaaataagtaatatttatgcacagaggacttactctaataagtaagaaataacagacttcaactaactcttttcaatagagtttcttgaaaaaatcaactagataagttgtaactgttagttcagctcatcctagtcacatgccacatgtctctagcctattggtatctaacctttttcctcaaattgccaacatgtcaagactttggacaacggtttctgttagttatgttagttaaaatttctattatgattgtgttgccttgttgtcaagtctagagcttccctataaaaccaaccacttatgtacaatgtaagttagttggttaaagctagattgtgagtagagagaaaagaaaaaagagagaattatggtgagatctagtgattgagagagaaagaaatctctgaatgttggttactgcattgttgcagaaggaattgagaaaccatagttgaaggcttgctcctagtttgtattctcttcgagacaccatcaagatcaatggttagaaattgaacctttcagattaagggagttcaacacaagggattaggcttccaatgaaacttaggaagtttgaacctctttaattgattgtgttcatttgctattttatgtttttaatgtgtttgatgattgttcttgataacttgtgcaaagaaactatgagagtgttgtttgtacaagttgttacttaagattggagttagaattgagatccaaaaagtggtatcagagctcaggttagagcagattaatctcaagggtgtggatcaagattcaagaatcatcaagaaaaggagaacaaaatagttgaagaaggttcttgaagaatcaagaacatgacttctgtcaaggtggacattgagaaattcagtgggaaaaataacttcctgtttgtggagagaaaagatgagagctcatcttgggaatctcagattggatgaagctctatcaaaggaagctgctaaaccagtaaacatggaacaaaaagattttgacagtacactcaagaaggccaagaacaccatcattctttgtcttgaagatgtggtgttgagaaatgtggtaaaggagactgttatcccaaagtttgcataactgacgggcctttccatgtagcatgactcagccatctctttgacctggcaaagaacctccgggcaaaaatatgcctgacaagtccatataaggacggatagccagaagttggccaatatgtctcatgcaacttttgaccggatgctcaacctcccggctagataaaatgggagcaacaccttgtaagggtgattgtacaagccaagttcataaagaagataagtgtcaagggatctaactggatgaccaacatgccggccaaatctagcactgccatgagtaccggacagagatacacgatccttgattttatcttcatcaagcttcttcaaatatctacaactgaatcatacaaactcagattcaaaaaatatatccgagaataaagaagatttatcagaccgtaactacatcctaaacaatagggatattgattattctgtttactccttttacaaagccatatgtaacaactctcccctataaatagtgaaggcattcacaatgggagaggaccaaaaaactgagagctatactcgtacttatgcatctaagatcactttgctgaaagatttatctgtaaacattttaagagtcgaagctagatatcactttgttttccttagtgatctgcacgattttatctcacaagtaatacaactaaaggggaagtaggtcattacccacatacaagggggctgaacctctataaattatatgtgttctttatttatttattattctaacctccttaccagtgattaactagtgtttattagaccgagttagttggttattttcccagtcaacatttttggtgctttcattgagagcttcaactttcttgtaaagatctcatcacttggtaatcacaatggttctgacaaggaggagcagatccacagagcctcaagatccaatggttgtggaccctaatgtctaggttccaccaactggtgacaacctgaccaactctgcttgaccacctcaggcagccccaactgcagtgactaggcccgaaggctcagtcaatacctgtcagggtcacacatgtatcgagcaactcccagtcaatgctggataacctacctagactaccacagggaaacctttaacaaggcctaccctaggtatacactgaagaaactggaccaaggattggccaacttggcataaacgagcccttggttgacttgggggatgactctgaacttgccaggctgagagaggccgtaggaaaagttcagggtcacacaaactttctccatcatgaacaagaagaaacacgcgctgctgtgagcgatgcttttgcctagtagagacgcgaattccatgaatggatggatcagtaggccacaatcctccaagcccatcaggcggagctgaactaccgaaatagggaggcaaattagctgatcagatggtttaacgaaagggttgggtctagagtggaagagccaccacttgtaagggatcccctttcggggaaaatgtccctatgtcccagagggaatgtcccctatgtccccagaggggactcataagatatatctctcaaattgctaactcgcatctcctagtcggtgcatgtgagccacttgcttgatggaagctggtcgattatcaatgcatactctgtttagaggtcacaactcctatatgtgagtttgagaatcaactcttcttgtacggattattgagagtaggattcccgtccaggttatgaaatatgttccacatgtcacctagatcgatgccacgtcattgtgcagaaatttagataacacttatcatattaattaattggactataacaataattatttatgattcggctgaatcatgacaaaaaagctttcatttgtcattctaccaaaatcttttgcgtccttctttgttattaattttgtgtcaaatctgttaggaagcgcacgaacaattttttgaaccaacagatattcatctaatttttcttccaaaacaaaaaactattagcaatatcaaattttctttcataaaaatcagacaaaatttcaatttatgacatgctatttatcaaatctagtttgcaacatgttaaaacatgatctttttacatcaacggtaccttcaaattgagtttgaggatttcttacgcttcctttatagattcataagatgatattcatttgataaatcattcaccaataccattaaaaatattaaattaacatgcaaagctttattattataaccagacattttttcatctttagtagtcccattcagttcaagttttaccttagcattaccttcatcattattttccgtaggttgagaccaacctgtaaatacagcccaccaacttctcagcttgtgacttaatgaatgatgtcattctgaccttccaatatggataattcgagtcattcaacaggggtaatcgagtaatggagcttccttctgcaagcaacgacatctcacacaaaataaaataaatagaataaaataatctcaagatctcactaagagttt

SEQ ID NO: 383221 - DNA, 654 bp, Cannabis indica
aggagtagtagcagtgcaagctcagaacttgagagctccattcaaggagccatagcacactgtaagcagtcatcacagcaacagctattcagtgcttcatatagatcaaagagacttactcaagatggtgattttccattgtgttcatcaaggattgcagtttgattatttttataattaaaatgatggctctatcaatgttatgtttaagcactaatatatttaattttagaaaatatatacatgtttggataattgttaattgtttgttcaaatcaaatctacttagcccacttcctttcttgactttcttttgtacttgcttgtaactctttacaataacattttcaatattcactctatacaagtatgtttctttcataatcatcataagcccaactttttttttttttttacatgatggacatttgatagctaagcaaagagctgagtgagactaagaatcagctcagctcattcattaaatgatgaaaaaaaaagctttttgtttttcagtgacagctgctttaatagaatctttctgaaaatgtaaacaaatgaatagaaaactgagactttttctatctagattcacaatgtctttcacgctttattagctacaaccgtccttttaaaaaatgaaaactgagtgtt

SEQ ID NO: 383222 - DNA, 3534 bp, Cannabis indica
tttatttgcacgtcagtctgatctaaagttcatgaaaatgtagttttcattttatgttttttactgaacttgtgttttttgtcattgtatagcaatcgggatgtttttttttcctttataatttcatttgcttaagaatgtggaatgtgatgatgacaaattatcaaagcactagcaatgctgaattgtttatttgcacgtcagtctgatccatgtttattgtattgcaattggatgtttttcttttctctatccaattttcattttaacctaagccagggttagttgcttggggattcagaagatgatgacaaacaatcaaattatcaaagcacctgcaatgctgaattgtatatttgcacgtcagtctgattcaaatttatgaaaatacagtcttcattttatatcttttcctgaactttttttttcatcattgtattgcatttgggagtattttttctttccttttccatcttaatccaaggtgtgaattgcttaggaatttggaatgtgatgacagacactcaatttatcaaagcaccagcaatgctgaattgtttatttgcacgtcagtctgatccaaaattcaggaaaatgtaggcttcatttattatcttttcccttgagtttttttggttaggcaggggttagggatttggaaggtgatgacgaacaatcgaattatcaaagcaacaacaatgctgaattgttatttgcacgtcagtctgattcaaatttcaattttactttttcaagttatttttatgtcatagtattccattcaatttttatcttttttgagttttgaatcttgagctgggggacttgcttgctccttaaaaatttggaagatgctgactcattaaaagcaaatgattaaggctgaattattttaagttttatcttaggttttggcctgtgtttgagcatttctcttttttattattttcttttgttgctgaatttgaatatttcattattggtaatccatgtgagcttttattttgtaagttttactataattgttttcttattgttaattttcattttgaggcttccctcagttagttgcttcctaggaatttgggagatgatgacacaatacaatcaaattatcaaagcaccagcaatgctgaatttgtatatttgcacgtcagtctgatcctaaatttcatttattgaatgtttttccagtttagcattttgcgtgaatttattaatatttattgttatggcttttatattctctcttttgttagttcaatttgctttcctcacattgattttttttttcaaacgattatgtgagacggttgggcactaaaattttcctttgtgatttatatgcaggtgtccttgttaaagaaccgtgtaaatattgccagtggtacaccaagcaggtaaagcatcattcttctacaatattctgtgtttccttttagttgcttgtatactggtaactgcagctctgacttaacatatcctgttctttttagacaagatttaatataacaaatgaggttaggtcccttttatttatttgtaatgatatgccataacttgtaaagaagtttcttcatccaagttagttttcagtttcattttatgttattgagtaataagccctgatccaaggtttttctgaatgccaaaaaaattgaagaaacaaaataaagcatttctgtctcgctctttatttgctttatgttcggttaatagttaactgctaggttggattgtcagagttttttggcttcaggccaccatcatttttgtctacctaaagtattcagttttttcctgattatttgtttgtacaaatcccaggataaagaagctaattgatattgaagcattaggactttcaagattggcagtcattgtactggacattcggtcagatgtcaagggatattcattgttgactctaccacaagtcaggtttgttcatcacttgctgaaatcttttttatattttgactatcaggaaaatccgtaataaaatacaatgtcaaatttttatacaatataggctgtattattaataacatttctcatgtatttttcactatatttattggtggaaaatataacgttaaatttcagtttattttatctctctttgaaaccttttaacgttaaatttcttggtgaatcttaattggcagagatgaattctgggatttatacaagaactatttccaccagcgagttgtggatgggagtctgcgtctcagtctatatggttcattaccaagtgggactgtgttgaagggaaaaaagaagtcataataattgaagttttgaatttgtttagatatgaatcttgatcttgagtaatcaatcaagcctgtatttttagctaatatttcatctttctatttaatagatcaatttatccctctgtctcccactttttctcttatggtagcaaggtgtagtaggcttatgtttcttctctatttaattcttttcaccctgaaattatttcatcagtaaaccaacacattttatttcttaaaaaaaaaaaatctcattatgggtttcggaagcagagagttgacatataatgtcgcatttgctctaaaatttctttagtaattaaggaaatactatatagtactagacaattgaaattactagtggtaaagagcattcttgaataatagtgatgtggagcatcggtggagcgtgtttgtaggttggtgtggctgcaattgaggggtttcttcttttcttgcatgtatctagccattgatggtcactggcagtttcttgccattgacttttggtcgatgctggtttctttagtgtcctccagtaatggtggttttttgttttctcccttcaactttgtgtgcagtttgagagaatgtggtgtgtggtgatcaaatggtaataaagagtaacttttagcttattccgggagtggagatattgaccgaaaggtctgtcaattgggtgaaactttgtggcctcaatgtcgtctataaacgtaggaatatgaacacctaaattgatacttttttagagcatctacaatgttaacatttctaaaagtattaaatttttttacataacttaaatatataatattttattttatatttgttttaatagtcagtacttcaaaatattattaaaataatattatattactatttaacatatattaaagggtaaatacccatttggtacattatattttgtaaaaagatatatttgataccttttgtttttatataatgatgaattggtaccttctatttctaaaaactaccactttagtacctgtgattaatttttttaatattcctaaattacccaacatcaataattaattgtaatatctaaattaataaaatgaacaccataataaatataatttatgaaaatgataaattgtaaaaaaataaatttattttataaaagaaataaactatatatattctttcgagtgatgaatacttttattaggaaaatgacttttcaaatattttaattagcaaaatagccttcttttaaaattgatat

SEQ ID NO: 383223 - DNA, 3058 bp, Cannabis indica
aaaaaaaaagctaaaaaaaataaatttttcacactttggaaaaaagatatatagaaatcaaatattatatcattctatatattaaaaaaaatcaaatattataggtttttaaaaaatataacacgtattaaatattatcttaattattcatagtttctatgaaacctacaatcttaattcttaatcattcttatttggactcacacataccaaacatagtcttataataactctttgccacacacttattcaaccaataataattgttcagaaactttgttaaaggaaaacaaccaaattaatatatataatcaaacttattagacaaaaggattaatttaattaattatatattatattattcatgcattgcaaagtatgtattaaaccaacaaacttacaataatatatgttatcctatgtaaataatatttaataataaagtttatacctttacaacatgacctaattagttattgaccaatgaagtaaccttttatgccataccaacacattaattagcaagagttgtatttgtttatatgcattattgtttatgatatgcctattgattatttaaagaaattaattgcacccaaaattaattaattgtttaaggatcatgatgtgttatgatgatgattattactttttctatataattaaaaattaataatagttcaatttgatgttttatgatgtgtcaactcacatcttatgaataaaattaggtttatactaggttttctcaattgttattgatttattatatgtgataaaataaatatggaggagtaatgttttattcatctactaattattaataagtctctttcttagcaaaaagaaaaaaaatattattaataaatctcatgacaaagaacatagaatatggattatggtgttattcaaataaataaaatattaataaaggagataagattgagtcctataaacaaacttaattagtgtatgaaatcatcacaatttaagatttagtcatatatgataaaattaaattaatattgctggctgagtatagattggagttagtttagttaattttattaaagtaaaaaaattacaaaaaaaaagtcattatttgatgtgtcaaataagatatatgttcatttttgttttgacacaccactcaattattttttttattgttttatttttttaagaactttaaaacaaaaaattatgagaaataacttttctaaatattatgttattattaatgcaatcaagtattaaattttatataatttaatgtgatagctttaagagaatatcactatactaactaatcgtaggacataatctttaaaaaatacgagacactacttgtgtccaataacaatattctaaatttattactatccaccatgaaaatatcacctagtattataaatagctaactaagaatataggtcactcgttttcttgctattttttttaagggtaattgttataaattaaagaaaacaatatcaaaagacaaaaataaaaagaattcctgcattcaaaaaaacttactatttatcctaaggacatgctaaaccagactatgggtcgcaacattaatgttgcattaatgttgcaattcacataaaaaagagttgtttacgaaaagctatacagtaaaactttagtatcaaaaaagaaatctctgagatgtgattctgccccacagcatatctataaaaaatgtagatcaatatcaaattaagtaaataacaaaaatataaaaatatcaattataatgtaataattatattggggtgtgcgtaaatcatctaatccaatgacaatcgactgatccaattataaccgaccgccaaacattagatatccaattgtaatcggatcggattggatgttatttttgaatatccaatttgatcgaatcgaatgttggatggggtgtctaaaaatccaatacatccaacatccaatcgaactaattagtattttcatttaatttggatgagtaattagattttatattgtacacgataaatatatttatatataaaaattaatattaaaattgtactctttttttcttagtttggatagatccaattcgattcaaaaaaaatactaagtctgaaatattgaataaacccaaattaaatcaataaatatatatataatacatctaacggatagaatcgatccaatctaacatccaatggatgttggatcgattggatgactgaaattaattggatcagatcggatggtaaaatcaaacatccaatatataattagatcagatctgaatagacctaaaaatattagatgtaatccaataaacacccctaattattatatctataaaatctctattgttgagaacataaccactatatctaatttattcttataccaaaataaaattatgatgacacgtttactataatattcagaatcataataaattaatagaaaaatacaacagaatcaatgaagaataattataatcaatatttgtaatatgttaatttattaaaattgtttagaaattaaataatttatcttgtttgctttatcaagaaacataattacaataattaaattgactaaattatcatttatagttaaactataatatataatagttattttgtaaaatatattttaaaaaataaagttgttattgtatatttaatattaaaaaataaaataaaattcattaccttaatgatattcttaaaaaaaatgatagtgaaagtatttcttttattccatatttaacaaagtagtaaacaaatataaaaaataactaccttattattgattcttattagttgttagtaaacataagctaaaaccttttaagtcctcccctttctgaattgaattggaacaattaaaatacataatacctttttaaattactctttataaataaaaccagtttaatttttaagtgagtaattagtgtattttaattaatccacacacacaaaaaaaaaattacaacaacaaaaaactccttccattttataagctaataattaaaaaacataaaagaaaaaaaagaaaaaaa

SEQ ID NO: 383224 - DNA, 964 bp, Cannabis indica
ttaactacatgagacaatgaaacatggttttacctgtaacttgtctctataccaactcttattatactaatttatttatctaactctcaataattgagtaataaaataaggtcagatacactgagttcctcactttgattataataatttggtttttatttatatatataaaaaaacaagatgtaaaggtaaaattgccaagagagtgagtacaaatacaaaataaaacaatctttggatgtgcatgaatttgtggttggtttagtgaatgaaattctgcttctactgttttccaacccctatatatgggaagccatcttttagtgggtttaacctattttttattttattattgttttatttatttaaaatcaaaagaatttcatttttttttattattataatgaatacaccttaactataaatggaaaaataataagcaaatagaataaaaaatatgtcatcaaaaataaaagataaaaacccatcttaccaatagaatatattcctctcacaagttacaaatttggacggtgcaggatttttttttgttttataattgttattttctattttagatttattggtttgtatttttttttttctaatatatatgataagtgcattttatgatttgttttataatgtttttgatgcataatttgagttaacatatatgtccccaaaggttataacattttgttgttggttttttgaacaaacattttgttgttaggtaatctagtttttgaaaatttttatatatatacactttccatacaaatatatttcagactctaaaattttgatattaaaaaaatttgattatatttatgtatttttctcttgaatgtctacacatttaatataatgcttaattgatgtcattgattttaaaattatacatatttaaatttaaatttgtttgataaaattttataaattttgaatttaaatttaatta

SEQ ID NO: 383225 - DNA, 2733 bp, Cannabis indica
taacaaagtaatctaaatcacaacccaaaattacatatcaactcatatagaaaccaccggagcaatccaaaccataaaaataataaaaaaggttttaaaaaatattatataaagtgattctcctataatttataatctaaatgtgtgatcatatatacattattataaaataacatatatatattatctcatcagagcctaaaatgggatagagcagaagttgttccaaggcctttcgagttgaagtgagcaacaaactctttaatggtggtctctctatacttgggaggattatcttcgcttaacaattccttaattggaccatactttaaagacgattccatatctgtcctaaaaaagcaagcaacagatactcgaggaccgtcgtgatttgccactactctatgctcaacacttttcaacatgtcattcgatacaagctacaaaacccaacaattgattattattgcttataagaatataattttttaggttaattaggatttttgtcccctgaactttgatatgtatcaaatcatgccccttgaacttttaagttcgttaaaaatgcccctgaactattgagattgttagaatatttaaagacttttttccaattttagtaaaaaagtctaacatggatgaaaatctaagggccatgatttagaacatgtcaaaattcgaggggcatgatttggtagatatcaaagtctggagagcatgacttagtatataaacaatcactgaaatagtaaaattgaatgaaattagacaaaagtccttaaatccagcaatttcaatagtgcatggggcatttttaacaaccttaaaagtttagggggcatgatttggtacatgtcaaagtttatggggcaaaaatcctaattagccaattttttattatgacatagatctagtgtcgcaatcaagtaccattgttgttttaattcagagtagtgtacaaaatattattgtaaattattctgaatgaaacaacactaatactaaagtgacactatatctaaaactcgaaattttatacatatatagaaagatgtcataagtcattttttatgacatacctgtagcaagtcgccaatgttaataaccaaagctccgggaataggaggaacatcgatccaacgattctgatgaagaacttgcaaaccaccaattacgcggtcaagtagaagaattgtaaagaaatcaccatcggcgtgcttgcttgttcccatagttagttctggctccggacaaggtggataataatggcacaaaacgtccaatccttgagcgcattccatgtcttttaagtaatttttgttgactccaagagcttcagatagtaactccaacaacacaattcctagtttcatcacctcatttgagtactccaatagtatatctctattaattacaatatagggtcacataagcataatgtaaatagggattatatatactttccaatcaatttaagcctagctaattaatacaaaatggtgtgatgaaataaaatctgttaagatcaatataattactatattaccctctttatttacaatactaaaaaaagtaccctagcatcatctaatatatcatatcattattttataaaatatcattaactattcataagactctaaatattaataaacccttttaagttcatgtaccagacaaatgactcataataaaaaagattaatttttttatttgttttgtctaacttctgactctgttttgcctcttctcctttctttatttttctcttattacatcacaaagtacattaaatctaaacttaaatacataaaaccactcaatttaaaccaaaaaaaaagtaaataaaatatagtgtaatacctcaatgccaatggcaactcctctggcttaggaggattaggagccataacacaaaacacagtgtccctccaattagctgctggggcattaaacagatcaaaattactattataccgaaccttcctcgacgaatcgcgagtgtaaaactctttcttcacctcattttcttgctcaaaaaacctcctcaccgcggtctccatttcctcaagaacacttagaggaataccatgattaaccacttgaaaaaatccccatgactcggccgcaaccccgacttcttgcacgatctcttggcgtcgagtcaaatcatttttgacgttttcgagatcaacaactggaatactgagttgggtttcccccgaatttgaatcgggtgatggaataatgttgttatcattttgttttggctcatagaaaattcttgggatttttgtgatgccggaatcaactagccctttgacaccagcttttgtgtcatcaaaagcttttagctcactttttctatcatagttgagctcatccatagcttaacaaactctagaaagaattagtgagtatttttaagctatgaaaaagtcaaaaagagaagaaataattgtgagtgaatgttagttattgcaacacattttgaccattcattctaccaaactatagtgactgttagttatggcattgaaattattcaaatgcattaattgctttgggttgatcagagatttgatgtaaataaaatatgagaaatgctaaagggcaccactggtgcctagcaccctcctacatgtcaatatcgctattagtgcaattaagtatcgggttccatatagtttaatataataatttttatagagtatcgctagccaattgcaa

SEQ ID NO: 383226 - DNA, 1778 bp, Cannabis indica
aaaaatactcattttagtaattctttttattatgaagacccaaaacacaacaatcaaatcaatttaggaacaaaatgcaacaactatatttaaatggataattataatttatatatatcgaaattagaagaaggcatcgatattatatatgtacaatacaatttctttcatattaattatgtaacacaaatgtaatttctttcacattaattatgtaacacatcaaaacccatgaactgtcacctacttccaaactcattacaaaccaagtaagaaaaacaaaatcgataaataattatgcaaatgaaaatgaaacacatgtatattgaaaatcaaaaatcaaaacccatgaaaaaaataataaacaaactcaacacttaccaacaataaagggagttccgatcaacattaaaattaagttttgtcaagaaagaatgcaagaacctcatattacagattttttttacttaatatataaatggggtgggtcagccccaatcctaaaggataagtgatgggatggtgtagggcgaggcgggtagaaacttgaatacaaacctgattattgcgtggcagagtcccctcgtcgggtcaggaccccaactcgacccatgaaaataacttaaatttctatccctaactgatattaagttgcaatacaattgtggtacaaataaaacatgctcaagggtcaaaccatcagttaacaaaatacaactaattttataatcaacgattgcaccattaggtaacccaacagaatatactggattatgataagtgttcgtcaaacaagatttagtgcgagtaatatgatgagaagtgttatctgcatttttacctgcataacatgcagcgaataattaaggagagacgagaagtcactaagctgcccaagggtctcactcagtgatcccagaggattaaggctctaaacctgtggacaaatcctcacagacctccgcgaggaaagtcctcacaaatgcagaccttaagggaggtatccgcgagtcagtaaccctctcctttggaaggcgagaccttttgctcccgcgaagatcgtgggccttccatcaagatgtattggttcggggtactcctttaacctgaagaggttcggtacgcaaatgccagcctgagggcccaccactcgctcatttcctatgtatattgtcagaggtacttgtctctcacaccacatagagcgtgcatgtccttctgtaccatgcaaaccaatcgaataactaggagcaagagtaatttaaaatatgagaaaggccctagagtgacacacgcccaccgtcagtacagccagtacaatctgacatcgctagaggccacatggaaaatatgccacctaccaatcaaacggtgcgggttcatccttatgaagatccatcaacgacagtccttgcgaaagaatcgacctataaatacccctgaaggcacacaaggtaggggattcgatccgagcttcgacttcctctccttcaatcccttcgactctccaccttaagaccaaaggagaattattggcaaacacattactgtaactctattattaactctagaatattcctactaagtgtaaagaccgcttaactttaatatagaaattagcatataaatatgatttaattatgaaacttgcatattagttatgaattatcagtttacggagatttatttgaattcagaatgcattttatatgtcatatatgaaaatttatattttttgcatgttttgtgcccggtaacattggaacgcgacgtttgac

SEQ ID NO: 383227 - DNA, 3625 bp, Cannabis indica
gccttctacctctgtatccaataatgatgctgtatcccttgctgctcatcggtttggaatggttgggagagggcacaagagacataggcaagtctcttcactccttaaattaacccccaaatgcttgcttataataataataataataataataataataataatcatggtttagttttgccctgaattatggccctttgtatagttatgtccccaaaactatatcaaaaaaaggttgcagaaatgtatacgtattcttagagctaatgtttgtatgtttaatctcgataaactgaattttgtataggttaaagtgacaggggatatttgcaacaatttgcatagttagggagaatttttgcaacaattttgggggaaaatcctatttattcttaatgtaatgttagccacctaaagcccacttatctctgtgtagtattcaaatgttcaatggtctttgattggtgattttactgggattttgatgtttatatgtatttctaattgtttgctcatttggtcaaagaccaattaggatgttctgtatggaagttccaatgttttatcctttagcctcttgtgttatttcagtattgaccttgaaatgtcaatatttctgtattctttgttctgatcagattactttgctcactatgcttttgcaggattagatatggtgtgttactcaatataggcttaatagttttcttcacagtgttattggtgtacgtagattggtgtgcatggagaattgttagacttcctttagaaccatttcatttgactcgcccctttctcctgtcagccataatatcctcttgtgctggctacgtttgcgtacctttactctacggtttaaaaatgtatcaaattctcagaaaagaagggcctgcaaggcactctattaaaaagagaaccccaacaatggggggattgttttttgttccggtaggtgtgatcgtggcaaaatttattgctggtttctcatctactgaagtttctggagctgctgctgctactctggcctttggtgcaattgggctacttgatgatgtcttaagcctaatcaagaatcgcaatagtggtttatctgctcgaatgaaattgcttttggaggtggaacttttgaactagttactttttctgtggtttaaatgctaatgatttatgaattaggagttgaatattgctcacaatgttaagttgcaattcttttgcaggtagcagttgggatctgcttttcattttggctgaatactagaagtgtctcgtcaccctacggcatgtatactttcttataactaatctggtcaacatttttctgatggtaactcacatgtctgttcttgggaagacaaacttagaaaataaaccattgaaattcactcattcaagactaggatggacaagtaggaaattattgtaaggagaatagagttttgaaacaagatttagttaaataaattgagaatgtacaaaagaagcattggatttctttggtgagtcacataataatgattaattagttatggaaaatatagcatataaggattgtcattagtgactttttctgttatgttttctgatgcaggaaaatgttggttccccttcctgcacctttgggtcttgtccagctgggaaaatggtatctattgttgacttcattttgttttgtttctatgggaaacggagtcaatttaacagacggtcttgacgggttggctggggggactgctgccttagcatttgtgggaatgtcaattgcagtgcttccaatatgtcccggttagtatggatcttcttgaaataagaataacatgtctgaatattaacagttagataattttttatattttacttgtttatcggttggaccgtattcataatgatgtgataatttagctatgtcaatcatggcttttagttatcttgctaattcaattgttggaaaagttctcagttgttaagtattgttgtgatttgaaacagatctttcaatatttggggcctcaatggcaggagcctgtgttggctttcttctgcacaatcgatacaaagcatcgattttcatgggcgatactggatcattagctctcggtggtgctttagcagcaatggctgcctgcacgggaatgttctttccgctgtttatttcatccgcgatctttgtgttggaagcatcatcggtcgttatgcaggtttagctaattagccaccgaattcaacttgctatttttctgtgtacttgtgtattttttttttatgctgtctctatgtttcaggttctatacttcaaaacaacgaaacactttttgggttatggtcgtcgtcttttccgaatggccccgattcatcaccatctcgaactatgtgggatcaaagaaccgttaattgtggccggtgcctacgttatatcatcctcgttggcgttgtttgccgggtatttgggccttatttctgcctaggatttttagatctttgcctaccacacctttgtagttagttaatttgagccacacaaagaaaaagagaaaagaaaaaaaagtttagttaggaatacgtttcaatttcagtcatttaaatttctaaggtgagcaatcaattgttatacattatatgccaattttgagatgaaaataagtgaatatacaaatgtcacatataatatcttgacattgaataagtgtgttaaacaatcaaatgaaatctgtttaaaaaaaaaaaatacaaaatcaaaataaaaaatacaaaatcaaaataaaacattatcatttatattctcacgaaatatactctgtttcacagtaaataatttaattaaaaccaccttacaaagaaccaaaaaaaaaaaaaaactacatctgaaaaaattccctagcaattgtatatgttctcaagaacaaactttattgtaattaatttctgctaaaatatgagagtgagtataaattcagcaagaggatgaactataacaataattttcttaaattaataggagaaagttgaaaagaatccataggagaaactataaattttatttttatatgaattatgagtttgattttggtgttattcatggaatataaacattgtaaatatatatatatatatatatattttaatttaatgttttatgaaagttgtgtaatttaggttcaatccttgatagaattgtagatatataaaagtcgaaatttttacatgacatgaaaccgatatgagttcgagaggcgtgcgtaagtacgattcaacataaacaaatataggtttagttacaacacgacataatattgtaaattgacatgacacaacaagaaaaatatagaattaaacaagacacaacacaacaagttcgatggcacaacaagtatatacttatagcttaatccaaaagcatgacaagttaaaaaatatgagtgcttaagcatgatagtataagtccgaaagcacattatgtaagcatgaatatattaagatgaaagcaagacacattaaaaattctaaaaataataattataaatatttatttatcatttaaaattaattaaaatggtagcaaatattcatattaataattataattttgttatatggttgtgggtaactattgttaaaaaattatata

SEQ ID NO: 383228 - DNA, 2221 bp, Cannabis indica
atatatatggtaggtacataggtaaacgtaccatcccctccattttggaagtaaactgaccgccacattgctgtttcaacttagttaaaatacatttttcatgttcctcactggcactcctatcaaaaagtagacgacgagcaagcttcttcctgtaaaaagaaacaatattgagaatttaacaagggaattgaagaagttaaattgtttacttgtttagcatttaattgcaaattaccgataaaattctgcaaaaaggtctttgtcactaatatatgcaagtaacttgacaacctgcaggaaaatatcaaattttaaatcaaagactaaactcctcattttaagacttaacactaacatcaatacaagaaacaagcatattgtggcagaaaaccttccataactaccttctctagagtatcttcgatagcctcatcactcaacttctcgctcccacctttcttaaggatattatcacaaaaagcagcaagcagttctgcacttgaagttccagcaacagttttattgcagaacacctcaaaagcctctttcaaagcctatttgagaataataataaaaaaaaaattagccacacaaattgaagaagcgagaccaaaataactactatactctttgatttctaaccttgtgaaacaaagtatggttaagaaaacaatcattcacatattccataaacttgtcatgcagctcaatgatttttctgacaaggacctgaagacaacaaagcgagtcaatttttgaactttccagagatgatgaataaacaaacatattttgaagaagcaaaataaatacctgttcctgagcactagcaccgcttgcagcctgcataagcacagttgtcaactcttagtaccatgatgaattaactaactaaactgttaactttatgaatggaacttagcccttgctaagcacagccagcagagcatgaatatattataatatgattaaactattagacaaataaaccaataaaatatcgagtggaaagattatgccacatccaccagaccataccaactccgtttgaaaaaaaaagtctcataaattttagtgtatattctaactttaaacaacaaaatcacataaatccaagaaggtaatcattttatactgcaaattttaacagaaagttatgtagctcctaatactaccccattctaaatttaaatgaggacaacattagagtacagtctcacataatgctaaaaactcaggtatctcttacagaccacaagaactctaaatgctatgggtacagagattatgcaaagaacaaaacatcaattaaaatattctgcatgtaacactattaatatgaaaccgcataataagaattcgagcatacacaactttataagaatgaagtaggataacaaactacaaagatatcagcaaagatgatgaacctggttagtgcaagcatcttctgcctgttggactagtgctgtcccttcactggtaatatgctgtaaaaggaaaaggcataagatatatacgcatatgagtactagatactagacaaaaataaataaaatggaatgtaatcatgaaacctaacctgcttgaaaacattggcaactggttcaagccccttctgaattttatggtatagtctgtacatccttgaaagatcctcaacctaaaagtgacatcataaatctgcatcacaacattatctaatacagtcgagatatgatatctttactccaaggtaattataaaccttatcatctcgaagcagagcacgacatccagagtgctccttctcaagtaattgggttgcataaacgaccaacaactcatgttgcactttctgcaaataaaacatgaaacatatcaatgttattgaatgaaaatctaccttagataggtaaaagtttactccttaagaacatacatgcatctaaattctaaagtcaagactgtccacgacaaaatcagtgtcaactgaatattcacatattaaactggctcaggataatcttttggcacataataccataccaccctactaatttaacccctttgttgctactttaagagcagacacttagtcgagaagcattcagactaactgcatactcaactttctattccttatgtagacataataaattaggtggcgtttggatggaggtaatgaaatggaatggaaaggaaataattttcattccatttctttgtttggttgcat

SEQ ID NO: 383229 - DNA, 1265 bp, Cannabis indica
taaccccccaccccccaccccccaaacccctccccccgccccccaaaaatgatgaacaataaaactatgaaagcccaaaaataccttcttaaccagagctttcgacactagttgtttcttcttattagcatttgcaatgtcctgcttaagttgctctaactcagacttatcatgagtccgcttcgcatcaattttctgctgctcagttacaagttctgtaattttcttgtctatctgtgggaaaatttagcaaaacaaaagcacagagcatgcaaataataatgaacaccaaccaaagggttatttgtatgaccatacttttaactgtttaaccaaaaactacaagttgaggcatcatcttatattacagtataactgagtggatacaacaccaaaaaaaaaaattaggacttctcgtgtgtgggtgtgtgcgtgggagggagggaccagaccacgggcattgtaatattccaaagcctatcaaagttgtaaattggcaagtttctatcccaaccataaacctataactcaaaaaaagtgtttaccaaatatcacagctaacaccacaaaactccagattatctttccatgaactacataactggttttcccacaaatgcactatggtattaccaatcattaaccactatagagcagttttattattccttcgtgctcttactccagattatcccagcaataaacttaatcctcaaaagcatttccaaatagcacagctaacaccaaaaaactcaagatatcttttgcatgagctgctgacaaaaaatcgccacaaaataagcactggtattatcaatcataaaccactatagagaagttttattattcttttttccagttttggccacatatctagagaggagaagacatctcactgcgctattgtttgtgtttccccgtcttatacttccttcttggaatacatggcaatgaaacttaaaacccacaaacatgatgaataataataaataaacatttacatgcagcaagtccttagaaatagctagccaaaaggatatcttgaagctcaaatctgactttttccaattcatcttcctttgcttttatagaattggtgttctgcatgacaatattcataaacttcaattttgatctccggtgatcataaaatccaccagtcataccacctttcttgctcacttgatcacctgtcaaaagatattataagccatcaaacatccaccaaaaaaatccacattcattacaaaaaataataataaaaa

SEQ ID NO: 383230 - DNA, 2416 bp, Cannabis indica
agttcatcaccatataacaccttaaatataccttactaaaacaatcatagcaagaaaaaatccagagcataacttgaacaaatgacttctatcctagcgtagagtaaaaaaaagtacaataagttcaagaaaacttacttgtaatgcgattcgaagaagagggatggttgttgaaattgattcgaaaatttcgtgcctagttgatgactcgatcaaagcctgcctgaacgtcaaactcttcgtttgattggggttgggttgcgttaaggttaagggtcggtccgctagggaaacaacgtgtacgaacttgtaagaaatagtctataagaagcttgaaactatcattcattcactagtgaagccagtgaaggtatgtagtaacagattgagatatttcagtttgtgttctgagagaaatgttttggttcaagtttttgaaaacgaaggaattttgaaaaccgccaaatgatggaaaaaaaagaaggcgagtggttttgcgtctatttacatccaagaccaacctgtgtgatttgaaattatcggcctagatgatcccttcaaaaagcacaagatgatctaacggttggagagttgaaaggatggcatctaatgtccttcggttaaaatataaacattcatttttcatcattacctacctcgggcccagtgtgcattaaaggattgtcatgtcaataatcttgccgtctattgggtttttaagacaaatgtgccctctgcaggcgggcgttgactacagactcattaaagacacgacgcgcgtgcaatgccagttgcgcttgactttttgaccttccaattgctgaaggccaaacaggaaggatgctttcgtgtttttgaaagtcacccacgtgtcaccactttgatgatccggaagagggttgaaagatcttgcaactcaggaagtcccggaagcttgttgggtaaatattatccgtgttttcggacaaggaaggcatgacataaaatgagaggcacgaccttaaatagtcactaattaagcccctttaattaggaaaggtcacaaagaggctttttgagtcccgaaaagaactaagcccaagggctacacggaggcttgccctgcagcatattgtcattcgagacccagaggccttagtatctctctagaacccagagaaggccaagctcatcatatgtccaagcgacacctggaaggaactcgaagagcctaacatggacactaactgcacaaaggaagtcacacgtatactatagaaagagacctgaattgccccagcgacagttatacctttttttgacacaggatcaaatcttgtctcctgtctcagaccatggtagtgcgcagacctcacctctgaacacgcctttttgcctgacagttttctaggcgtcttcttttcaaggtgaaaccttttggcaacatgtgtcctgtaccgacaatggtccccattgtctagttgcctctccacacgagtagaaaccttcttgggggcccaactgtcagttatttacatgtattttaccccagtagtaggctttttgcaataaccctaaacgggtcatgggcatgtccaaactcgaactatagcctataaatatctttgatttccacacaaaaggggggatcagagaattacgagctgaaaatctgttgaaaaatctctctaagctttgttcttctccaagaaagactaagagaaccagatttatggtttattgtaaaaaccaattgtaatacattatacaagcttacaaggccaatacactcacttgtggactaaggaccattaacgtgtgaatcacgtaaaaatacttgtctaatttctttattgatttattcatttcttacgctcgtatttaattaatttctaaaaattttggtaaacaaaaaatataaagtttagagtgaatttcgtaaatgagaggaaactaaaccaattagagaaaaatattcttgagagactaagggctttgtaagtatggtgtaaagagggtgggttaaatttattgttgattgtaaatgagttgatattgataaatggaatatattttcttgattaaaaaaaattacaagttactgtttgaaagaggaaattacatgaagctgtgtacgagcgattcaggaaacaacaaccaccaatattcaatgggagctcggactcacttgaagctgaggaatggttgcgctcagtggagtccatattggaatatatggacctcaatgatagggaaagagtatcctgtgctgccagccacttaaaagggatgaacggatctggtgggaagtagtaagacagagtcgcaacatagcagctatgacctggttggactttgttgatgtgttcaacaggaagtactacagtgccgccatattggctgcaaaagaagatgagtttatgaatctgaggcagaa

SEQ ID NO: 383231 - DNA, 1934 bp, Cannabis indica
gattatttgggagggagggcatagctctaacactgatttttcgtttagggatggggagtggctgtgcttgtgggagtgcccaacaaggatgctgtgttcatgaccaaaccgattaatgttctcaatgaaaggacacttaaaggaactttctttgggaattacaagcctcgaaccgaccttccttcggttgttgatatgtacatgagcaaggtatagcttaaattaagagattttgtttatgaaaaaatggaatgccatggatgaataactcaagggaaattttactttttggtcttacagaaactgcaattggagaagttcataacccatcaattacctttctcagagatcaataaggcttttgagtacatgttaaagggagaaggactgaggtgtatcattaacatggaagagtaaatcgaaattttaacaaataaattatgagttttatgtgtattattttcttgcctagaaaaaacatgtaataagaagcctcttgtttaacttgaaatgaaaataaaagctcaattccaaggcatgatttttggcttgtgttaacataacaacaaagaaaataaatattctaacaaggctctttttgcacattgagattgttggcaaaagctaagcctgtctttaaacttataaagctgtacagcaactgaagatgtgactagatcaattaaagaagcaacctatatatattatgacaattatttctagttggtcatcctttgaatatgaatgagcaagaactggattttctgtgtcccttgaaaatggctacttgtacttttccatgatacttctagcttcttctagagagtcttcagtagatgtaggagtgcctttagtagttgtcatgttatcatcatttccttttggtccttcatctttatacaaagctatgaatgtaaagtatacaagtcccatagtggcctgttttcatgcaatatttaacaccattagaaatataaataataaagaaacagttttgaaattcttattttttaacacttctcataagatcttcaccaaaacaaagattagtgcataagaaaggctgcattttactatgatggttttacattttcttgaaaaccaggacaagaaaaagctactcatatggtgaaaaataaaagttggacaagattcgaagagccttaacatattgtcagactaaaagctaaaaggttcttctcaacttaaattctcagaaagattactcctactagaaatgctacatgaagtaagcatgtctcgaaggattctgagatgataattggcagaataaatctatgaatttgaccttataaccgagccaccgatgaagaaaaacgttctagcaatcagaacaatctgaattctaaattaaagaaatataagcttgcataatgaaagctgcttgaaactttgtttaacttaaagttcttctaatgattaaacttacttgagctatttcttatattctcctcttttaaaactaaatctttcccaacttagatggtcaataacttcaccaaaaagcattatctaatcctattaccattttttgttcaccaaatatcagttcacactaatcagatatacttgcaaatttacacagaagcagcagcataactcgaaataataataataataaaaaaaatcaatacaaaaaccctcttagaggggtaaaagaattagcaacataccagcacaaagaaagctgtggacaagaaagatttgataacaaagagtgaaacggtcaagccaactatcgccacagatacctttgctaccggtcttggtaccgaagcctaatgaaatttacagaacttgaaaatgttattattaaactatgtactgaaaatgagataaagagaattaagtttgaagatcaacagagctacaaaaatggaaatctaacactcaccggtaccatattggttcca

SEQ ID NO: 383232 - DNA, 1897 bp, Cannabis indica
ggagcaacattctacaagcaatgataattttttttagtttgtgtaatcttgtttgttgttatatttagtttagaatgttgttttgatgcttgatctgtggattgttgctgttattttgctgttttttgtgttaaaatgtttgctttctgtaaaaacgggattttttcttggtttctgcaattttttttcgtctcgcccgatagggtccgatgctagttcgatgggggggcccaatgccttatcaatatagttgaaaggggtatgggcccgatgtaggcccgatggtgtgcccaatggtaccctaaattttttcatttttgggccaggtccgatgggcccaatgggtgcccaaaggggggtccgatgggtgcccaatggggggtccgatgggtgcccgatggaaccaagcattaaagaatcagattgtgagatatttgattgagaaaaagggggagtattacctcgatacatgttgcctgatccataaggagagaaatttggagaagaaggagttgtgcctctgccaacttgagctttagtattggcaagattagcttcactttttgcaatgtcaagatccttagcagctttgtccaattgcacctcctgagccattaaaagtgctttgattttagccacactatagggatctatcctggtattgacagatgtgatgaacacattgtattcagcaggtaatccattgaagatcgcttcaatgtgatcttgagaggatgtagggtgagcgattgaagcaagagtgtcgatgatgctcttgagcttaggaagatagccgcttagagaactctgcattttggtgtttccaagaagagttttgtactgaccgatcttagctcgatttagggaggtgtagtactcacgaagattggtccagatctgagctgcagattcagatctaaccattctagtgaggactttatcggacatggataaaagaagccaagaaaccaaaacattatcctgttgttcctagtcctcaaattcaggactcactctgtcttgctgccgatcttcatcagtgagaaattttggtggtgcaaggttaacctacttactttgattgctgccagaacttgatgcctccatggaagatagttgaattcatccaaccgaacagatagagaatgagagaaggaaacaagattagttttaggcagggcgatttgagacaaatttggaggagtcaacgaacctccattgttgacaacagacgaatactccatgacaaggacgattattgctctgataccatgttaatcttcaagaaatagaggaacgaaaagaaagagtgaagcaattgatttcattgattgaagaaagtgatacactgttacatttatatagagctaaacacccagtagagactaacagaaaattagttagagaatgtaacaacctaactgacaattaactaactcactaatgaactaggtcctcttaacatctacaactattattcacaatattttgctataaagtgaaggattcctcctcaaatgtggctttgaagcttcagactcttcatataacaagcataaatggagtatattcagcatctcaaatttagtattttccacttatatcatattaaaacttcatactcaataattagtattatgtcttatttaatatatttatttttatttcaatctgtataaagtactttactatcaaaatctgaaataagagaaaaaaaattataaattacgcagtccaaaactaaccacattttaaaaaaatattttacaatgtgcctaaaactattctatcaataatatacactgtcgcataaaaaaatataataaattctaatgaaaaaccgtgtttttgcaaatgtcagtagtatatacgaaaatataaaaactgtaagcgtttg

SEQ ID NO: 383233 - DNA, 1502 bp, Cannabis indica
agtactcaaagtctttacattcacaatttatacaagtctatagaattcacttgcattattttggttaaacatttcacaaagttttctttttctaattatgattgtatgttgacatgttgtaattacttagaacaatttataaattattaaaaaatttcaaataatttataatactaaaataaatttaaatattttgtgttattgttttttttttaatatgtagtaagtaatgaattttatttttaatgtcttaaataactaaacatgaaaatggattaaaaaattcttataaatactgaaataaaaactgaaatcgtaactaattattcacattgaattactagtaaagaaatagaaaaacagcaggggatttttccaagcattaatcgaacacaataatgctgccaaatatataataattgtgtaataatatacaaatgttgttattcttttggagaaaagggccaaataagacaaagaaaagctatagcctaattcatcataaactcaatctgtagagtatccaaaggtgaagacaattaatgcaacttaaaccagcttccacatacttgaatctctctactctatatataattgtattatctcaacttggaataatatattgtatagttgataaggaccgaatctctgactcacactctcaaaaggattgaccatgtacatttatatttatatatatatatagcttcctacaatcactaattaacatatatacgttatagctgattttcttattaatcacaaaccagctaatatgatcaatattcaaaacttggtcaagctcaaaaagcatgaaatcaatgacttatatatatatatatatatatatgttatatacatcggacactcataccaagcgtatctctgctaaattgcaaaacgccaaggaagaaagtaatagaattaatgtgttctttctttaattaattatttatcatacaatttataattaatatttattttctaccaaaaatggcacgcctagctagctagctaagatctagcatagactgatcataaataatcataatttaaaaagaaaaaaaaaggaaaaaaaaacaatgaggcttacacttgagctatagcagagaagactttttgtggtcctaactaattatataaaatatgatcagtgaagaaagactgaacatacagttcacttaattgtagtcatgatctcaaataaaaagtttttaataagtaaaaactatttttttatttgcatgcatggcagcagtcattagcaatagcagaacacctttgttttctataaagtataataatacaattacaaaagtaatgtacacacaattagctagtctccccttgtttgcttaattactctaattgtatatatatattcatgagttcaacactaatgaaaaaaataaaataaaaatcctttcaaattttaataaactttttgaaaatgcagtactctactgtacacactggttgtttatttatttatttttgttttt

SEQ ID NO: 383234 - DNA, 2394 bp, Cannabis indica
gaaaattatgtcattatcagaatataaacttttgatttagttcaaaaagttgacaagaaatggttcacttcgttgcctgataattagtttcatacaattatttatcttattaatttataataaaaaaatattaaattgtgaatgatgtataaaattgttaatgtaataattttgtaaggtaaaatataatttttaataattataaaatgacatttttaattttttaaaagtaatttattattaaatttagcttattacaaaaatcatatttgtgatatatttttcaagtgtaaaacaagaaaaagtgaagatttatttaattattatgcataacttaatgtaagaggtattttttttgtattataaattatttttcgttaatagtaatttttatatataattaaaaaaaatagaaaatattatattttaaattacattcataataaaaaatttatttattttaatataaaattaaaaagatatttaaaactgcgcgaaaccctggcctattccctagttatataataagaggaaataataatagaatatatagtatagaataagaacgtaaaaaatagaatacacagatcaccaatagcttgaataaactttttacacatttgtccaaaatatttatttctcctacaatcaagcactgcactgagggtttagataaaaatgtttttgggaatgaacaagtcttataatattttctagctagtgcttttagatagaaaataagtgtattttaagagtgaaccacaagcctctatttatagtgtttggagaaccaaacttaaaaatccaatcccacatttattttggttgttactaggtgtgtaagagggattaaatagaataaaaaacgttaacatgaaagtaagaaacattcctattaaagagatgaacgttttgcaatgtttctaaaaaagaaatagttccaggcgacatgtcgcttggagtgataccttcaaacccttcatcaagaaacatcacaaaaccttaaaaatctcataatgtaacccttaggcgacataacatgtcgactggtacaatttcagccaactcttttttattttttgtaactcttcttgaggcaacttttccacaaacgtttcaatctttattttaatgatataaatgagatatgaacattttccaacagctataaacttatagctatcaatcccataacctattgtgtaataactcacatattaataatatataatcaagtatgatccatgagttacaaatcccatttttaaatttgtaactactcatatcttataattctatgtgtagttacattcagggacggacccacttgagttattgtaactactcaagtatttataatatatgtataaatattttttaataataaataagcccccacaaaataaaatttttgggtccgtcactggttacattatatatcatataatataatcaccaatataataacctatcattaatatatcatatgtcacttttaattgtatattatattatttgttaaataacaaatagtataatatttcaccaccagattaaaatttgtgacatctcattgaaatacttatttaataaatcaacattttctatagattctttgcttaagtgcataaggtaaagtttctttcaacttgaactttaccatagtgtagtcaccataaattttgacaaaaatttgattgaaaaagcattgaaccaacttttctttataatataatagtgatgatacacacacctttctaggttcacccaagacctcaatgtctcactttgcactgttaatggccttgtgtactttccattcgttggcctttttgagacaattatacttcttaattctcatctagggcgacactacccttatgtcaacataggtagaattcttatagtatttgttatcaaaatacttgttttcgaaactaaattctattaaatgttagacatttatatatataaactgaaatgtatatgtttaagtattaagtgcggaattaatcaaacatatatacactatgaataaggatcgaaatacctccagccattgaatcttgagcttcaaacccacataagctttgatctgcaaaggaaattgactaccatgggtaatcgggcttcctcgctctctcaactctctttagatggaatttgctgttatgaacagaatgagtgaggagctcggggaccgagaccctatatttataggtgagatactccatcagtatctgtgccacattaattgtcagaatattttgacaattaattcaggaaatcaaatcaggtaatgaatatagaaatctgaccatatatagaatattacgtaattgattctgtccagattcaatgaatataaaatattcatttatcagaatcaataat

SEQ ID NO: 383235 - DNA, 2449 bp, Cannabis indica
agagtaggatccgcaccattatttagaacatctaaaactgatttcgtaaaaagggggccaacaatgtgccaatagttagtgaagaacataattgacataccatcaaccccaggacttttatcctctgtcatcgaatttagagcagtgaaaacatcagcttcagtatatggtgcagaaattgtttctcgagattgctcatcaattgtagttgggattacttccaagatagcattaatagcaggatcatgaaccccttggctgctaaaaatagtctgaaagtaagtttgaatgatatctagcaaggccggttcactggtctgagtatttccagcttcatctctgagttttttaatgcgattgttgacagatcttgcattagcacgttgatggaagaactttgtatttgaatcacccgatttcatccaggaaattcttgctctttaatgccaagaatcctcttctttagctaacaactcatccaagattaattcagaattttttaatgcagcaaagtgttgagggtcagtgcttgaggagttttgaagtgcagatacatgttgatgtgactcttttatttcctgcttcagattaccgaaattggagaaatgccacttctgcaagctggaggcacagttcaatatatttgtagtgagctgaagtaacgggctgctattgcaagaactccaattggcaagaataatctcagcacaagcctcttcttgcaaactgtggagattgaggccgatcaataagtgtggagatagatgcttttaatgctcaatgatcagagtgataaaaatccaaatgtgttaaagatggagcaagaaaagtagtatcccaacagctattggtaaatccataatcaaggcgttctttaacatttccatttccttgactcttattagtccaagttgttcgatcaccttgaaaaggaatttcacacaatttgcaagtaccgatggcagaacgtaaagcattaatctgagtatcaacacgccgtgaacctccaattttatcctcatgagaaataacttcattgaaatctcctaaaaccagccaaggagataagggtgaaatatgacagcaccgacgcagcagagtccaagttaaatgcctttgagaagcacaaggatgcccataaaaaccagtaaaatgcaaagatggcccatcttgactttccaagaagcaatcaatgtgattaagtgagtaattattaatggaaagagtaacatgggacttccaaaggagtataagtccaccacctagtatctgtctaggaacttcaatgccatgagggaaattcaatttaccacgaagtctatctatactaccatattgtaatttagtttccattatgaaaagaacacagggagcttgctccttaacaagcaagcgcaaatgcctgaatgcactcgagtttcccaaaccccgggcattccaactgacgagaatcatggctgagcgcggtgttgcggagcaacaaccgctgaaacttcaggctgcaactcctctgaatccaaagatttgttgttggagacatacggagttagactaatatcactcggtgctgaagagtcagactgaatatggatagtatttgatcgacatcgtttaagaacattccgaagagattccgagtcaagttgccttttaaattgcttattgggattaatgttctcaatttcatcatccaaaacaaggacagctttgccttttgcatttggctgagaaggttgtaatgtggcagggatattggaggaaacaatggtgctataatttggggatatcataggaaaagtggtgggcataaatggtaaacgggtagatggctgaagtgagggtgaattaggcgggtaagtggcaatcataggtgtaatgggaagatatgaggggaatggaataacgggtacatcagtagaggaagtagtgttcgaaactggtgtagtaacaggtaagttaatggtcgagggagtagttgaagtaacatgtgaatttgaatgtgacttggaggatgatgcagattctcgattagtcatattttggggcagaggaagtgaaaccttagacagatttgggatagcagcagtgaaagaattctttgcaagtctagtcattaagggccatgctccacctttgaaaaaatctgatctgtaacgatcatagccagattcaggaagtggggatccaatcatagcaggtccatattcaagagaagggtcatttccattgtaaatatgctcaagaaacttatggcatgattcaaaaggatgtctgatggtaccgcattctaaacaaaactcgggtaatctttcataacggaactctaaccagaattcgttaagtgagttattgagtttcaccatttttctctaagtaacggcttggatatgtcaagaattgcacgaaaacgcagaaacggaccccaaccttcattcaaagagtcttcatg

SEQ ID NO: 383236 - DNA, 1085 bp, Cannabis indica
tctctctctctctctctcagcctccaaggctccttgtgtcatctttactatttatcgttcttatttacaaatggtgattgtcagtcataaataaggctccactgtcggttgaccaaatttggagtaagcattttgttgctttcattgagagccttttttagttccttcatctcgttttgatcaattaccatggttctaaccagaagaactccccccttaaatcctccttaggatcccatgatggtggatcccaatgttcgtgttcccctaccacaaaaggtcctattaatccggatgcactgccaatccagccaatcttgtgaatcctaatgatcctgccatttttccaaggctggaacaactcacaggatcgcatgtagaagagcgaatcaacatggaacaacctccatagaacacaattgaggatgttccacattcctacgtaggagaaacagggctagcaattggtgaaccagttattagtgagcctcccttggccctgggagatgatattgagctagccaggcttagagaaacggtagaccatgtcacaaagataggacaagaagaactaagcgatgctagttgccatgcttttgcccagtagagatgtaaattcctaaggtggatggatggcgagcaggccatcctctgggcccgtcaagaagagctaaactgccgtaatcgagaggccaatgacctgataaggtagttcagtgagtgaactgttggaaaaggtcaaaatttgataagagatcctttacaaggaaggcctgacaacatgtcaggcagggtctacaggcaggtagacaagagatagacagtccaactagattcctcaaacacgaggatagacccttccctacctaacagtcaaatcttgctaaacacaccgtgtaatatcccggaaaataaataatgtttaaataggcatatttaattaaatatgtaattatgttggtaatgaagtaagattatgatcttacttaggataatgattgagaatttactcaatgaaataaatagcgtaatttattaattacggagattattttgggatatgtgagtaccgaggatatcaattt

SEQ ID NO: 383237 - DNA, 1186 bp, Cannabis indica
ttttttttggggggggggggttaaagaagaggttaaagctatgattcttgatttaggtcagattaaagaaggttcttttcccctcaaatacttgggggtcaaccttcgtcatacaaaatagaaagcatcagactgtggtgttatcatggacaagctaaataggaatctaagctattgggctagtagaaacttatcgtttgttggccgcgctcaattgattcactcggtcttgcttggaattaggaatttttttatgagtatattcattattatttttaaggttatggctgccatagacaagagttatcgtgatttattatgggattctaaagggtatagaagcaatctccaccttgcatcttgggaaaaggtgtgtctcccaaaaaatctaggtggggttggcttctgagacggcaaaaaatggaacaaggctcttatggcgaaacttctgtgggctctagccaataagcaagactggttatgggttaaatggatcaattcaatttatttgagaggctataatatatggagttgtcctaagaaacaagattacaactggtatttcaagaagtttctgaatctaagagataaaactgatgaaacaagtttaaatactattgtgataggtaacatattcaaagcaaaaagattttacaatttaatggtggatgaaaacactgttgtctatgcaggtgctgttggaataaacttgttgttccttaacacaggtttctttattggcaattattaaattcccaacttcttactcgtgaccatttgagtcgtttcatgactttgcaaaaaacacttcctgcccaatttttgaagcagaaatagaaacacatgatcatgtgttcttcaactatgtcttctctaaataggtgtttgtggatattaacacttggctaggaaggtttcactggcctgatatgttgctggtttgatggacaggtgcaaaacaaagccccaggacttccaagaccgtatcttcaatgcgattcttgctgcaactttgtatcttctgtggaaaaatcaaaaagatgtatgtttgatctagcttgtactgttgttagaagtttaagtttggaagtaaggagaaatgtccaacttagaatcttgagtagggaaaccttacattggatgcagcgaaatatgactcttttcgttaagatctctagcccttgat

SEQ ID NO: 383238 - DNA, 1036 bp, Cannabis indica
acataaaacagttttcaaatctcaaaccaatcacacggagtattatattaccaaaaaaataataataaaagaaaaaattgagaagcaagatgttctacttttttcttaagattttagtatcaaatattggaatctggtatttctatgctcacatggcacattatcattgtaaataagttagtcgaagcaatttttttgttaatattttaagtttcttataaaaactctttaaggtttttttttttttagttatgtagtgactgaacttaaggttaaaaactttgcttgcaaacttggcccaaatagaaggaaacctttgcttgcagacttgcttggatgattctcaatttctaattgaaacaaatagaaactaagactgatcatattcaatacataacattttatattttaatataaatactacatttctaaacatcgaattaataagagtattccatacaagctaatataaggatcagtgctcaagatttactttaacaatatgttatatgtactcactttaatataattatatatttatgataataaaccacaatatttggttatttaaatgctacacttttcagtgtttttctttaggaatttaaatgctacaaatagtaaatatttggtattttggcttacaaacctttatgatttattgattactactgagtagtgaatagtgttgtaaatgcaggtcgaattttttaacacagcatgaaatcggcatgagcttgaaagacacgagcacgactaggcacgacacagaatgatgctataaattgacacgatacggtatgaaaaatttatccttaagcacgactcggtacgagaaacataaaaagcacaatacgtaaagcacgaatagactagtctgaaaggcactgcacaagacaagcctgaaaaagcacgacacgatatattaaaaaatattataaatttaataataacaatgtacatttattaattataaataagataaaataataataaaatttaaatataatatagaatattataattttataattat

SEQ ID NO: 383239 - DNA, 1453 bp, Cannabis indica
taaaaactgtatagtattttttttttttttaaaaaaaacaggttagaattatatctaatttgttaattactataatatgcatctttatttagctattattactatatatattgacaatgtgtaataattattataaatcttgcaatagacaattatacagtaaatgattattaattagatgggtatttataggaaatgggaaaacagaataaatacctttttttattattgataataaaaaaaaagttgaatttcaatttatatatgaccatttctttttaaagaaaatgcctagcgttcgttttttttttttttttctctaatagaaaatgccagcttattactctacatctacatttacgtgtatagatgatgctatacataattgattggtatatatgttattattatgattattaatgtgatgaataaaattgatgaatattagaaataatgcaacttgtagcgatagtatggcaagtttcatgtgaaactccttattatataagacatgatgatcctgatcaccatgcatgtatgttccttattatatatatttataaggaattattaatttcgtaaaaaatgtaaaaaaaaataaaaaaattattttaaagtgtaaaaataataataaaaaaaaccctgtataatacatccatattgatatttttttgtatattataaaaattaattataatgttttgtaattaaatttattattcacctaatcaattcacatcccacactaattaattaacaatccttttcaagaacatacatgattcatttatcaaaattaatacatataatagctctcgtgaagaacacttatttttcatgtgaacgtattatttataaaataattataatatgtactatatatacataatttatttttacaagcatacattaatttattttattttcttaaattttttatgttgaaatttggattttcataaatatatatagctagataaaattaaacatttctatctttatttttattttctgaataatttttattttatttagtgtgggtgaaaattgatttcccatatcttatggtatcaatgaatctataacacttttgttctcttcagccaccttcaatttatccatacaatgtacctatatataacctcttttggtatcataatattctgatctgatcaattaatagtaataccaatgcttacgtttcttcagttataaataattagctaattagggtttttatctatgaactttgaaatatactaaattatgcccttgaacttttaaggtcgttaaaaatgctccctgaactattgagattgttgaatttaaggacttttatccaattttagtaaaaaaaagtttaacatgaatgaaaattcaggagatatgatttagtatatatcaaagtttgagaagtttgatttgatagatatcaaagtctggggagcatggt

SEQ ID NO: 383240 - DNA, 2667 bp, Cannabis indica
acatgtaaagcccttagccctataaatacaagtacctcactattaaactagccacaaaatagccttacataataaaatggtcccatattatgaaaaagggactcattcatttgattatgaccccatttcttgagtacccttttcatatatatgtaaaaaaaaaaaattaagatagaaaatattaataacaataagaacaagatagtctttttcttaggaaccaaaatggaccattttctatacaaattggatttatatatattaaggggtacttgatttgatcaatagccactttgtttccaaaggagttgccttgaaatttcttcactcccttaaaagtaggaccctattcttagttttcaaggaatttttgactttttgtgacattaatttacccatattttactagctaatttgtttggaaaaatgtttttgatttcttgtttggatcttattttttgtttgtttcacatgatacatttaatgtttcaaattaatttgactaagttagttagtgattcagaaaaaattggaaagcaaaagacaagttgtgtactaattattatgcaattgggtaaatttattttgagttgatatatataattttttttttctaaaaaacatcatgcattttaatttaattagaaaaattgttaattatatttgaaaaagatggcagtgcaggattatctccttaaaataagaacatcgtttcaatataatgatagatatttttccgaaagtgatattaataaatatacatttttttttaaaaaaaataaaaaagttttgaatacattaaaatttggccatgtttctccttaaaaatttaaggcaacaaatacaaatatgtggtcctttaaaataaggacacaaatttctgaacttatgaaaattctataacatagttttaaactattttttgatttaattgtatacaaatttgttgttaaaaaataaaggtttttcaatgtttttttttttattatttttatttttatggaatatagtaaactcatagagtaacgtaaataaataaaaaataaatcgtaaaaatcaaaaaaattaaaaaaaatagtaaataaagtgattcccttcaaaaatataatttttcttaatatcatgttgcacaaattaatcaaataaataaataaattagatttacctaaattttctacaaatggttaaaaaatctcaaaatgttctttggtgatattcagttattatttttttaagccacgaaaataaacacttttacatattttaatgtagtttggtgcttgacaaaataggaggttaaagatacataaaattatgggatttttaagtacttttaattgagtatttttatgaaaaatatttattttattgaatactttcacttacatatagcaaacaaacttaatagtaaaaacataattaaactgagtcaaaacataaataaaaattattcttaaaataaaattcaaggggttaaatataaatattcattttgtttaacctctgaatttttaaaattcgaataaatagttttagaattacattgtagctttcatagagaaatatttgaaaattaatttataaattacacattatttatcttaacatctcaatctcacgtgcttaattaaattcatgcataagaaaatataagcgtgtctttggattgaccgaccaatgatgtaactctatggactatggttacgttttcattaatttgtaaaactcaaaaaatgcatctaacaatatctaacacactaaattaaaaatttatttaaagaaattagaacattttggtcataataataataaaaatttaaaatttaacttatcggtgagggaggaaaagtaaaaaaataaagaaaaaggacacgagttcgaactactcataagacactatatgactttgtgtgtcaaggaagagaatcattagttgtgtttgctatttttaacgagttgcaagctgctattcaaagaaatcgggcttcgtttggtgtcgaagccgattgtctacaatcgatgaagctcatctaaaaattgggaaaattgcttttggaaagtggacgggctggtttaggagattaaaaagttgctgcaacacctgttagttaccgatttaacatttgcatttagagaagctaatcgagtgactcatagtttagccaatcatgccttgttaactaaagtaagtgctatgtagattaaaatctcgtccccttatgcaagttaagctatttggtttgagttgccattttcttttaatctttctgctaattattgaattccatttccaaataaaaaaaaaaatagttatagaacaactaataagctctactaaaatggtatatcaattgatacttcactaaaaagaaaaatgttatattacttttttaaaaggaaaaattgtatatcttccacttttattgcatattaatacagctgtgtataaacaaataacatgatagctatataaaatgtagtgtattattatttttttatgttttgctaaaatgtaattttaattgtgatgtaaaatgtgtgataaatttgaccaagttaaaaattgtattaattttagcatagaaaataatttaaggtaaattttaactcataaatactatattttttaagtactttttttatcgttcatttatattatttattaat

SEQ ID NO: 383241 - DNA, 1216 bp, Cannabis indica
gtcatccactcgtgcagtcaacggcctccaagcccgaatccgagcctgagtacttcgaggataagcgctaacttggtatgtgtcaacattctatttgattaagttattagttttgttattatgattcttgggcatgttggtggagattgtgtagtttttcttttttttaattttttttttttttgtgttcgaaaatggttaacattttgattcttgagcaatttatttttgtattggaatttgggttaagaaacaacattggtatatttatgagcccataaggaaattctgggttgcttgagctgggatcgttattttagtggcattgctgcataactatggcggcaggttatgcattgtgattatgaggttgttattttcgttctcttaaactaatcacgggtacaatttatacgggtgcaggaggacttatggatggctgcatttcccgttggaacagaggttcgttatattttgagtttttaaactattttgtatgaaggttttgcttctttgttgctcatatgctacactgctttgtatgacagtgggatcaactggacatcctttaccagttcaagtgggatttttcgaacctagaggtgactagagatatgtcgttgcttttcatatgttacattgcttttgggtttgtttctattcctcatcctagaacgttcagtgctgaaagttaatactttgttgtggtcagaaagcgtttgaagagggtggaacattacatgggaagaaagcttatctctttggttgcactgagcgtaagtagctttttcaaacttgatttcccccccaatagacaggcacttgcctttaattgccaattaagaaggaatgaagtatcccaacgtgttattcagttttctaaatcaagtcatatgttgcatgccatttaatatttactttctacttctctctgaaatttattatttatactgcttttggattgtgctttacttagttgatgttgcctgcagctcaattggtctctgtgaagggggagaataaagttatctgcatacctgttgtggtggctgtaagttatttaaagcttgtgtataagtttgtcttaaagtcttgctaagagcatttccaatctatacgctaaatttggtctaaatttggtgttacactaataccaaatttagtgtgaaaaactctttccactccggccgcaacacttaaaaaatattcattatta

SEQ ID NO: 383242 - DNA, 2224 bp, Cannabis indica
gcctcggctgacgataagttaggtggaatagttgccggattatgacataagccgtcggagtactcctttcccgagctaaaaactgtcttgtctttccggtcaccggagttggaattgggtttgtagtctttttctttcttcatcccaaacaagcccttaagccacctcattgctttacccattttttctagtgtttgatctgagagtgagtgagagagaagaaaaaggaaaacgcaagctaaaaatagagacagatagtggaaagatgagaagggttttgtgagattgaatctgaaaaaccggaaaataaaaaaagtttttgtttttcttttttagttttcttccaacaggtttttacagctcacatagtttagtttaggtacatttccatgttaaggaaagtgatgaaacagagttgttaaaaagagaaaatcactggaaaaacccatttatatgagaaaaaaaatatatatatatttaaaaataaataatggggaattttctattgttcttttttattaagtgaaattaaaaactaaaacctctgtcaaagtcgcgtgaaaaaactgcattacgtgacaaaaaacatagtgctgagcatgcaggagttacaatattatgttttgtttttattttaaagatgaatagtaatagtaaaaaaagaagtaatctaattggaagttacatctaaatcataaaaataataagaaatgaagggtaaccccacattggtatactcagattctgattagaaaagtaaaatagtacttgtaaaaaaaaaattaaagaaaggtaagaagttaataaagagaagaaaaggaaagcaatcgaaaatgctgtttctttcttcttttattttataattttcacttctccaatgggaaactcagtaaaggttttatctttgttccataagaaaatgaacactcatataaacaacaacagaagaggcagtgattaaagaagagagaagactactctctctctctcttctattacttttctggagcgacgtgtcctcaaaaagaaagatacctcagtgtcctcagcctctgacagagtcccgtgaagccctatgattttatatattctttcttcctcttttctaaaaccccacctttaccatctattcccctgcaatgcaacttgtttttttttttctaatttattttattaagtggtgtaacaaattctattattttctcacttttccctttattttataaagatagtagataaatggggttccttccatttttcttggtatttttttcttttcttttctttctatgtaggacttttccttttccactatccaaacaaactggttgtgaaaagaactcctcttcacttgggtaaagaagaagaagaagaagaagacaatcattacccttttccgcaattcatcttctctgattagcaattaatgctcagccaatcaaagatggtggtttttgtaattttattttttttgaatatataaaaaaaaattgattatcttctggtttttggaaagatccttaagttagttttttgagagaaagatccttaagttagttgcagttgcaatatctaactctgcaatttgatcagaattctttttatttactgttttcttcaaaactatttgtttcgttatttaattctactgtcaatgtatatgtaatttttctttttaccacccattttctacccagaacactgagtttggcttaaagtactctatcattaaagcctttctactatacattgctacgtactttttttttagcagaattcagtcatttcataacttagaaaaagcgctaaaatatggtgcaacattttatacatgcatatatatatgcttaaataattcgtacaaactttaaaaatgactacacatatatatttggatcacgtgttacattgattaattattttatgttaatatgtaatattaatacttgtcattatagtgtgtgactgttctatgaaaatgaccatccgaagccattttatacatgaatttattatataaatactaaccaattgatcaacagaggaggagcctctagtctagtctatatagtatatttgtatatattttaatgattgtgactttgaatatagagctcaacagtagtgcatttcaaaatagcatatgtaagtgtaacacaatggttcaaataaaagtttgttttacaacaccaaccaaataaatccaaaaaaagaaaagaaaaaa

SEQ ID NO: 383243 - DNA, 3107 bp, Cannabis indica
ctttctttttttttagtgtaggcattcaagttaggactaggttagatgggcttaaattcattatagggtacaaattccacgttaacgggccatagagttagactttttcgaccacgcctatttcatttaaatagaaatagtgtgtcctttttttttttattatttattttaccaattatctcatataattatttaaagaccaattttaatttaataattataaataattattaaattcaataaaatttagatacatttattaattggacccacacagtgtcttaattaacaaataaacctctatttatctttttcttctcaaaatctcccaaacttggtgaaaattatcaaataagacatagtctattttcgaattctaattgacttattaaatcaattaattgagtctacaagataatattatctcaaacaatgtgagaatcatgggcctatgttaccaagctcttagtaagtagatctaaaatttacttagtaaattccttagattattaatttcttctgaccccactataaatatagaattgtattcttaattacgtaaaacactctatatactaattatagatatgttatgaattatccattgttacaatctaaacaatcattgatcctctatagacaatttatatcgactaaggacaaatttatcgttttaccttttaatatattttatccttaaaatacttaactacttgtaaataatatttcagtaaactaatataattgttaaaatgagcgctctatcatttagccaagctcaaaggaaactatcatttcacttttaaatagttatagaagctatagattttatatctatgattaacactcccactcaattgcattatcgaatttttaagatgtaagtatgggctagtcctataggtaagcaggtcacaaacaagtcaaagaactcgtatagtacaattaagttagaacaaattcatttcaatattgagatcaattaacctaagatcaactaagtgatatcgacttacaaaagatataacagtaagtttatgatatatttttcatagtcaatacagtccagtctgatgtatagccgatacatccaatacaagtttactttactaataccctgaaaaggatattccacttatacaagtgtaagtaaattacatgttgattatcacatcactatatatccagtgcactgataagttgtgggactaaatagtttgatgtatataatcatgattattttctactgtgtagacaacactataatcatgagtaactatatgttcaggatttaatagaatttatgttaatatataatcatgaaagtaatcatgtgaatcatgcatcataaaatattttatgatcttttattaattagtaataaataagattatattgaaatgcattttatttagagcataaaattctaacaagattaacttttctgatatcaaaaaattagcccttgagttggaaaatacatgcacgatattggcttgagaatttttgctccagggcttgccataccgagaaagaagtggtgaagtttgcaataaaggcaagaacaccctccgacattgacgatcgtaaccaagagagaagcaactagcctttctattttcattgtccatacatgtggtaaagttcattgttgagaagagtgtgagggggagggacacctgagaagaggatgtcgtcaagttcatggttaatcacagtggaaaccacttgtaatttacataccgaaaaatttaagtgattaagtttgatggtgagagatgatgaaagggaactggaaaaaggatttcatagtgaggtgttagagtagcaactgggactggagtagcttgcgaggctgcaggatcaatcaaggaggaattgacattagttagtagaaactgataccatgtaaagatcaaaggaaataagaattgtcttttaaatgatattaaatgaaaaagctttattcaataccaagagagacttcttttatttatagacataggcagagtacaaaactaatcaagaagtactatttacaattaacataaataactaactaactaatctcgaaaaaaagttagtgaataatattaacaacctggaaggttgagatctatgggagatcagctggaataattgtctatagatgactctttcagaatattatagtacaaatgtatttttaattagaaataatatcttggtttgtaaatattcaactatagtttgttttaaaaaagttttaattatcacatatttaaactgaaacgagattttttattgtaaaactgtttgattggaaaatgttagcacaataattagaaaatacgcaaagtgcctcagatattagggtgttacaaatttagtacttgaaaatcgacaattagaatgaccaggattcaaaggaggcctaaagtattggatgatccattttttgcatcaccgaagatgagatttgcagccatcttgttcgagatatcaactagagattgatggcactcaaattgacattcatgagccattagaagagcttgaatttctcccacacgtttggaatcattattggaggtgattatagacacaattgagtcaaactccgggccaagaccattaagaaattgtaattccaagtcttgatcattgatcgtgcatccaactacaacaagattgtcacaaagagattttaattttgtcaacataatcaaaaatttataaattacctttttgaatgttagaaaattgacttttcaattgcaggaggtgaactttggattggcctgaaatgtacttttcaagagcacgccaaactttgtagaaagtagaatacacaacaacagatccaagtactcctccagtcatggaggatcagagccatgagagaagtagccaatctcattgtttccactgcgtgtattcgagattgatcacactagtaaccaactttgtcgaaggaaagacattattgaatagggtcttgtccaaatcatgtccaacaactatttgaacgaataatgattttcaggccagaaaattgactcggtcgagtttgagggtgttaggctaaaattagtctaagattcgggtcgtatttcggttagttttca

SEQ ID NO: 383244 - DNA, 1332 bp, Cannabis indica
gaaccaagagtagaccagtttttttgatagaacaaggcattaacaccatccaaaccaggggctttgtccccagccatttgaaaaagaacagccttcacctcatcagaagtgaaaggctcatcgagcatctgaatgtccaaatcaccaagatgattcgagacaaaacttaagagttgctcaacagcataatcatccgaaccttgagcaataaagagagtactataaaaattgagaaaatgctcattgatatcaaccggattatcaataagctcaccactatcaagcacaaggttacggattaagttatttctatgtctagaggaggctttagaatgaaaatatttaatatttttatctcctgctctaagccaattgactctcgaacgttgcttccaaaagacctcttccttgaagagaagagaatcaatttaggactgaatttctttggctttagtattattcaaatcagaaaagggttgacaagacaaaacattatcaagactactttgaagaaaattaattctatgtctaaaattatttttattagtgccccaatgctgaacagacctaagataagactcttgcctaagcaggaaagaacgaagtgggtcagaagagcaaaagtttaacaaattgttcttccacccatcctccacaacagaaagaaagtcaggttcagaaaaccagaaattctcacacataaaacgccaactacgagtagtcttatgaagatgatcactaagtaaaatttggagagcccgatggtcagaaccaaaaaagcctaaatggtggagggaagctaaaggaaaaagatttaaacaagaatcattaacaatgcaccaatcaaccctttcaaaggagttactatgtttccaagtgaacttatttccaatacatggcaaaggagtaagattaaacttagaaataaaactctgaaaattatgtatagcatacgcagggggataattagtattagatctatcattaacagtgagataatcattaaaatcaccaaaaataaaccacgacatagtaggggcaatatcatacaaccgattcaaaagagtccaagtatgagtttttgccgaaacataaggagaaccatagaaataggaaacatgccatttagtattaggattatcattcatagttacaaaatagtccacatgattagaggagtaattgttaatatgtacatcaatagcagcagtccaaaacagaagtaaaccccctcctaagccccttctaggaatttccaaaatattatcaaaagaaagcctagacttaaaactaaaactagaaccaaccactagtttagtttccataacaaaa

SEQ ID NO: 383245 - DNA, 1667 bp, Cannabis indica
cttttttgcataatccttgtttgtttattttaaaattggtggcgtatattaaaatcaattatagaattttaatatatatattttttaaaaaagtataatgcttaattgatttaataaatactaaattatttcaaaatttaaattcttaatagtagccatgatagccatgatatttcataaattaattatttttgattattaatgtaaataatataaaatacaagattttttaaataaaatatatttatttgataagtgaattattagagatattgtatcaaaaataaaaatttatgtcaaatattaattagtatagatttcacaccaaattaatataactattaattagaaatggtctaacaaggggaagatttttgtgtgctcataggtaaagagaaatgctaataggtacgttatgatactaagtatcaaaagagatgttatatatatggcttacatttatgtttttgttttatttctcactttggtttgatttaaaaggaacataataaatcaaaatccattgcacttccaacaagtttaggaattcgacaaagtttcattggcatcatttctatatgaattggatccaatttggtccatgattcgaccttgtactattttaatggataactaaagagaataagaaccaatcaacaatgcatggcatatagactttttcttttttcaaacttatattataaacttaatttaatttatctgtgtacgcactaaacacgtgataacttttcaattatattactaggttaacctaatagcttttctaaattaaatcataatataatatggactcacatcacataagaagcgattagcatttaatatatatgtatatatttatatatataataaattattcaattcacccgactcagacccaagctccgacctctgaacccaaacattggacagcagacctggtggccctcgacctaaacgcaaacattagacctgcacaaactcatacacaaactcatactgtgattctggtctcagccctgggactcgggattcaagacttgagacttggactcccactctgacccaaacctcggccccaaaacttggaccccgaccccgatctcggatccaaacattggtcctgaccccaaccctcaccctttgaccatttctagatataaataatgcaaactaataaggacaatttttaagtataaatagaataatatttttgtcctcctgaacttttgacacaacctgatcctgcaccctaaaacatacgacttgtcaattttttttttaaaaatataacagttacataattatactctttttgttaggttttgtttcttcaaccgttaaaaaattaaaatttttaccccctgaactttgaccaatacaaaaatttgtccccttttataaaaaactaattttaaaaattataaactaaatatttatagatgtacgattctcttttctatatctgacacaccaccactcttcttcttcgtcttcttcttctagataagtttttctcattctcacgtcaacgtcttcttttgtgaggggttcaagagcagtcatctgagagtggttcggttcgactcaacgacgtccttcgtttcagatttttgttttcatttattaatttactattattatagcttaattccaattaatgtttt

SEQ ID NO: 383246 - DNA, 4140 bp, Cannabis indica
ttttagaatctgcactcgtcaacttctgtttagtataacaaagctagttacttgttcatttaaaaaataaatagttaaaaatgaaacttttatagaaagtttgaaagtattggggctaattactagtaatatatgttgctataataattttgttctcacaagaagaagaagaaaattgtggctgaagatctgtgcttatggtgtgcaggttcaattgataaggattgaattgagagtgcctgaatatggttggacaacccagaaggttttccatcttatgaatttcattgttaatggaggttagtgttgcagcctttctaaaataattttgagtttttttcaatttatgtcatctaattgttggattactcttttttttattattttcggtgttgggggcagtacgtgcaattgtgtttggatttcacaagcaagtatttcttttgcatccaaaggttagtcatttcattctgtagaaatgattagttgcttttgcaaagtaagtaataagtcactctattttttctctactttacaaaagaagggcatttcagaatacgctacctttctctttgccgtgctttatcacatgcttgcttagatttaactgtcattagaatatattgagttagtgtacatcgccaaattaacttttttctttgctctagcatcattaacaatcttgactgctataaattaatcatttctcttggttttttttatatttttaagcaaaactacaatctgtactcaagaaatgaattttgctactttatgtctaacattaatggagaaataaaattgcctttcatgatgaatatactaagtatagtagctgtatctcaaatcaggtgctaacgttggtggtattggatcttccgggactgctcttcttcactacttacactcttcttgtcctgttttgggcagagatatatcaccaggcaagtgcatgttctaagctctttattccttacttgtgtgttgatagtgaaggtgttaattgtcattttgtcatgtgtgaagcctgagtcctggtgatatataactaatgtttttattttcctttgtattccaaccaacgaacaggcaagaagtttaccaacagataagctcaggattttttatgttgcagtcaattgtttgatgtatgttatacaggtcagttccatctctatgttctttcagaatgcataatttttattaatttagtaattagttggttctttggttcttcatttaaatttgttctttaagtatatactgttttcaattatccataagtacattagatagcattttcaaatggtttttggagattatgagaggcaaggtttgaaggttataatacaagttgtccatgtcatccgaaattatacatacaacagctggctccctcgtacatactaatttcttttgatcgcatatttctttatccttgtaaatgacatgctttatcttcatgttctttaatgaataaattagagacgaaggataatgggggaaactaagaattctctgatagtgctagcagttttataagatgactggtatatatatgtttgttaatccttgtggctggaagaagagtaaaaaaaaatgtggttgcccaaacaaccgctgatggaacctttctgggatgtccctttgtggtagtttattattgaatcttatttttttttgtgtgtgtggattgtagagtttgcaattagctcaatattatagctgagctgttcacacaccgatcctctttccaaccacaaactaaagtttttcttccgctgtttagaaacatctttttaccctattactctagaatcatatctaaatgaaggcaaactccaggtgggcatttggataatcatctggtttaatgacaacaatactgtggaatttgtgggaaagatttttattgcaggtcagaaattgaatctatttatttgtgaattattttcagaaattacattcctggtattgagatttcacatttccattaattagtaagaacattattatacccattgttggtatctgacttttttctttctttctttctcttcatccagttatatcctttttagctgcattagggttcttgctttatggaggaaggtgagtgttcttcattagatttcacaattgtttattttgtgcgtctcttcatcttctcaccgcttattgtacatcacctccagattatttttcatgttaagacgcttccccatagaatccaaagggagaagaaagaagcttcacgaggtttgtgccttccctttactatttaactgacatttttttgggcgtggttgcttgctatttcctcataaggtttttgcttaatgtcacaggtcggttctgtcacagccatatgtttcacctgcttcctcataagatgtgttgtggtaatgattatactgttatctgcatcattactaaaaaacgaaacattttgtctgtgactttcttgtcattgttacttttgtttgtttgcgtccttgggcggtgctgccttttccaatgatgcataggattacataattattatttttgacttgattctaaattttaggttgtattgtctgcctttgatgttgatgcctcacttgatgttttggatcatccagttttaaatttgatctactacgtggtatatttttctcccaaccttggaatgttaccacatgtttttcagctgtttataaaaaatctaatcatgttgttttgtcctaactgaacattggaaatgtctgattgatccaataacagctggttgagatcttcccttcagctctagtcctttacatcttgcgtaaattgcccccgaagcgagtgtcagcccagtatcactcaatccagtaggcaagtgtatcaacttctgttctgaaccttattcatgctcccccgaatatcaatttttgttttggtgtgggagttgagaactttctaagagaagcaatagacaggtttgagaaatgaggtgtcgtattcgggtatgactcgctttgccagaaaagttttctgagaagtttaatgcacagcttgcgagagtgagaatgacatttatttatttgattcgattaaggattataagcagtgtatttttgaacgtgttacaaaatgaaattttcctgtaaactaggtgacttttctgtccatctcgagtctttcttaaaacccatcgattgatataatacataatatgtactaagcctctttaggcttttctattgtaaatatttgttcttatagcactctcaaatctcacatggggttaaaatagttcaataacaaaatctataaatgtagaactacattaccaactatgtagttctaaaagatttaaaattatgaataagctctaaagaatttaaactgtaaacatcaactagaggatgaaatttgtaaaacaaagttttaggcaagaataaggtactattgcaataaaaacaactaccactgacgacaaataacaaatatttatacaaaagatgaaactgtttacaaactcttaacaaaaacaacgaaacaagaaaacccaaaccataagaaaaaccattaacaataacatattatcaaaactggaactaaattgtaaaagatgaggatagattattatttattcaagcttgcaaataatactgcatttcataaatgctgtcatttcacacgttccaaactgtgtaactcaatgttccaaaccaaccttcataatttctccatttcaacggtaagttatatttctatatgaacttgaagactaggaacagataatatatagggagcattgatattagtaatttattattggatgcttaccaatgcaccctaatcagttttagtatttaaaagaatttttagtctaattttttgtatgatattttaagttgtagttatttaaaacattctataaaattttaaaaaattcggaaaaatttaacacactgaaaacaaagttcaaataatatcactaaccaatcgtagggtatcacctatcaaaaatgttaggcatcactgatacccaatagcaatgctctaataaccccaaacattatcaaacctgtaaatttttaaaaactcttgatagtttgtagtatcaataacagaattcttaatatttcaatttagtgcttgttcaaaaaa

SEQ ID NO: 383247 - DNA, 1639 bp, Cannabis indica
ttttttttttttttcatgttttctttgctgaatatttataaccctcaaatcgatgctattgttattttgaaattgaacttcctattgttttaaacaaatgaaaattattggaatatttcatcaatccaattatttaatattttgtagtgtatttattctccaaaatcgtatctaagtctggtcaacaaactcttctaacctgaaccactaacatgttaaaaaatcccatgattaaattacctttaaaaaaaatattaaatataatggtattttaagtgtaattaatatacttagttgtgaagctatcctaattatctagtcatatttgcgcttacacgcaagagtgagtgttgtggagccatttgtattttattacaaattaatattctggggccaccaaaccaatctttaaataaatttaaattaacatatttgttttgatctcatattgacaacaagaatatggccttaatgattggtttgtttcgtttgtattatgtatacatatatatatatatatatagcccaccgttgtcatcaatttataaagaatatatactttatattagtttaatcactagcaaggaatgaaaccatttgctagttgtaccatacgatcttttatctgtattttatttatgagtttgataatatacatatataggtaattttttttttttgaacataacatatataggtaattaataaaccgtgtttgtttgtttatttattttgcatggaactctatagctgtgaggtactatttattttacaaccccaaaacacacaaatatgcatacaaaaatatgtatgggaatgtgtgtgtgtctgatgaaccttcatcatttcagtttagtttgtcatgatctgccattgactttcttgcactagctgacatgtatttgatttggctgatgcatatagtttattattattattgttcacaaaattgcagcttcttaatagataatatccaattattactcctaatatcagtccctccttttgtaaagaaaaaaacaaacaaacaaaaaagaatccaactatcaatttccctaattttttttttatgtgtgtatatatataaatcttgttactatcaccaaatcaatcaatttggttcttcactatagtcaaattatataggatccacgtgttatcttttcaattatcatttaacatcaattgatcttctcattaatgaaataaaaattgaaaattatcccgcaagattgcctaacacggtatatccaaaaataaaactttatccaagaaaaaattcaaaaattgcttaaaattttgaaaaaacactaaaaatataaaatatacaaaaacacggatttgatttccataatttcataaaaataaaataggcaatttccataagggcattatagtaaatttgttatttaatataatccgcagcagccaactgaagagaccaaaacagaccattctccatatttctctctccgctactctctctttctctctcttctcaactccatatcgtcttcattgtatatagtatatacatatattaacttgcagagaaagccagaaagaagagagagaaacccctaatcatcaaaattagaaactcttcttaattctttttttaattttaataattaaaaaa

SEQ ID NO: 383248 - DNA, 1870 bp, Cannabis indica
aaaaagaaatactaaaaagcacttcttttacctaatactctctaatattatatattattagtataaatattaaatatgtgagtcttatttattttaataaaataacttttataaagtatcattacataacactaccttcagatggtgttagagtacttaatagtaattttttaaaattattttcgtttattaccttgctaaaaaaataaaagtgaacatgacttgtttgtggtctaggcttaaccaatcattaccggcttcatatactactagttgttcaaccaaataatactaaattaattattatcattattaataacaaatttatgtgatcagttacaccagattgaacgagcttaattaatatgtgtataataatattaattgtttgatttggtcttattggttttctccggttgaacatgatcatgtttagtgaaaattactccatataaatgggactcattccttttttaattaattaaagaataattatggattctccataaacaagttgtggagtaattaatatattaatttcgaaaaaaaaagtgccatgtggatatattggtgatttgtaaagtaataatgtggactttagaaaaactttaaaatatataatagagaaatattttattgatttggacactaatttggaaaaagcacacacaatatttctccagtatttgggagccacatacccacttttgttaagattcttttgctatgtatgtagtgggcatcttagctgatctgatcgaagtttttttggatctatttatggtaattggttatggtatatggacgtcaatgctacaaaattttatatacgtactaaagaaagcattaaatatgtattatatttatattcatatattatatacactcgtcaaacatataaattacgatctttcacttcttttaagggttatattctttttaactttagtttagtttaaattaaactgtgtaatctttgatgctgatgtgtgctactaagcgatcctgctgtgtggaacatttttgtgagaagatagtactatattaatacaaatttgataaaacacttttttttttcatatttatagtcgatttttcagaaagaaatagaaatatttattaatggataaatttaaatggatcaaatctgttatatgaagataatgttattatttggaataagataaatgatgttacatctcaaaactaattggtaataggatgagtagttcatttattttatatacacattaacaatgtgagactctctaacattctccctcaagatggtagctatcttatttgcttaccatcttggacaattcgatcataagcagctcttttttaactcactattcttaatcacaagtgactaaatctttttgctctactttttgatgagagaagagtgttttcggttggtaagacttttatacatgtcaaaccaagagtaatgtatttgaccaactggtaattaactagttgcgcgccaattttttctttcacggaccataatatattaaaataatgagttaaaatggtaaagtgaagaaaacaaagctctttcttcatattagcttatcctcgatccatgatcgatggtaattgtcgacgaggttggtgcttatctattgtccttgcatgtcggtacactacaacattcaacaccattagcgacagatccctccgccgctgttggtgtcctttctggccgctaaagggcattagcggcggacctcggccgctattggtctgccgctaatgcttggccgctattaatagcattagcggccaaaaaaggggtccgccgctaacactacaagaaaactctttttcaatgctaaatttttagtcattaaaactcattaat

SEQ ID NO: 383249 - DNA, 1941 bp, Cannabis indica
tatatataaatataaattttggacgcataaatttcataaatataaaaatgctgaattaatcataggaaaacacaagcatatacatatcaaaataacaaaagatacatcattgttgtgatgcttagttggataaacaagcactctcttctattcagtctcatgttaataaaatacatataagggtacgtaatattcaatctcttctgttttcattaaggtattgttttataacacaaatgtacagtacatcttcacaatcaagaataatatttgagtgccttttatgtggtgaaatggattctggtgtttagtgtgtcaactgattttattaatctatgattaattgttatttacagcttgagttaacaaaattaactttcactaataaatttatttcattgttggattgagaattgtttctaatcattccgtcaaaatggtatatgcttgtatgaatccattctcttcagttgacatttttactaagtttaccttcccttctgcaaagacatctgtaatgaattgcaaccttacatctatatgtctagttctttcatgatacatctgattttttttaagtgtatagcactttaattgccacattgtaccatgattgttgttttattgatccccgattcccgaatgattcatttgagccaaatagcttctttgacagcttttgtgaaagagatataatctgtctttgttgttgaaagagccattatagatttgagattggctttccaacttatagtgcagttgttgactctaaaaactcagccttattatgaccttcttgtgttaatatctccatcataatcagagtccatgaaaccattcactgtaggttcattttcatcagggcgatacagcaaatcaatatctatagtacctttgagatacttcattagccactttattgcctttcagtgttccatgcatgggttccctatgtacatgctgacaatgctaacaacatggctcaagttaggtcttgcactgtaacgaaacccttccatttccttagattcatgttttgtggtaggagattgcttgctagatagtttgaagtgttgtgcaattggtgtgctaactggtgtagcatctaaaaacccaaaattgctcagtactttagagatgtaaccagcttgagacaacttaaaaattctagatttcttgtctctgagaatttctgtgtcaaggatctttcttcagggcctagatccttcatttcaaactcatcactgagcattctcttgacatggttaatctcatgtgtgtctttactagcaattagcatatcatccacatacaaaagtaggtagagagtagcttttgtttttaatgattttacatagacacaactatcatacacacttcttttaaagcctactttgtgtatagaatcatcaaaccttttataccggtgattggttgagaccatactgagaccttttaagcaaacacaccttatcctcctttcctttctccacataaccctctggttgctgcattagaatttgttcctccgattctccatgtaaaaagacaatcttgacatccatctattaaaactctaagtcatatattgttgtcatgcccaatattaatttgattgaggtatgtttcaccataggagaaaagattaatttatgtgtagtctacccattctcttttgtgtatacccatttgtcaccaatatagctctatatcttcctttttcaccagcaggagctgattccttatgtttgtacacccacttgcaaccaatcacccttatgtctgggcagcatggggtgtatatcgtgaaatcatgtaactgtgtgtgatcttggccatctttcgctgaaagtctctattaaatttattaaacatattgaggatgttgtcgcttaaattttctattacttttatctaaatagtaatactttattttcaact

SEQ ID NO: 383250 - DNA, 1643 bp, Cannabis indica
ttaaaagagtatgtagtgataaaattaaataaaaattataatttggtcaaaaaaaattattaaatcaatattgtaaactaaaaaattacttataccaaatattctcttatatctttttgacgacccaatatagtgtttatctacagctgagttgatgtttccacttacagaaaacgttaaaataaatatatccatttttaatcactataaataaaagaaaaataaaaatttaatgtttaattattttatatttctggtcaacatcaactagaacttactatatattagatacatcgttttctttttctttttaattatgtaatatattattattaattaaccttgctagctactctcattcagttatttttaaaactattaattaattatagtagtggtctaatagtctgggctcatgtaagtcaaatatatattttttcaaacaaaaaaaatcactttgaaataaaaaaataatatgtacataattaattattacagaatgtacattcccagtccctaccattaattttaaaaaattaaatatgtatgttagaatatataatgcctatatcaacatccataatttatacaatctattgtgaggaattatgcttaattcttgaaaggggcattattggaattggaacccttataggtagtggttgctatagggtctacgaaattgtctaagccatcgaaaaagtcatcgaaaaagtaagaaaaaaatctgcatcacgtgattctctttttttcatatatatatatatatattatataaattagaaagagaaaaaaacatcataattcatatttttgtgtcattgtcatgtataagaaatgccaagtcaccctagtcaagaatttagataagtgaaagtcataggttctacacaagaaccatatgtaacaatacatgttacaatatgatatttatgaggttttatcaaagccaaatatcctcccataatgtcattatctcttcaactaaattattttgaattttgatcattataacgtggaaaaatataacaaaaatcattttataatgatacaatcacattaaacaaattgcaaaaattggtctatttatagagtaataaatatacctacacacaattatgatgatattttggtgcataatttgtgtacatatatcattactcttttatccgtcatcaatagttgaaagcaaaataattccaaaaataatttctcaaagaaaatataattatccaacaaaatgtaatattaagaataataaacaagattaaagggaggggcaaggtggctgctacggctttaacggctgcgatttacaacattcgggggtgcgccggctctggtgcttcgcattcggaatgaggtgaaaatggagatttcaacaattttaccaaaaaaatgaaacaaaataataacataatatcaccttgtttctgagcctatttttggtgattaatcctaaaattgttgtatccctttaaactaatcactaaacctactacaagtaacttaataaattgtaaatttaagggatatttacggtgaaactcttttaatatttgcaattgttacatttatgaccttaataaaaaaagtaatgtcaaaactcaaaagtattttattttacgattttattacagtcg

SEQ ID NO: 383251 - DNA, 1530 bp, Cannabis indica
gcccccaaccaatgcctcctgtacttcctgctgctcttcacctgtagttgttagtatgctaaatgcattctgtgtttcggtttctgcaagaacttctaggtttctagttttctttcctttagtaaccggttgaaagccatatgcatccaagtgcttttttgtgctgtctactctataatcattcttcacaatccattccttcttggcatgggtcttctttttgcattcagctgtcaaatgacccattccaaagcaatgttgacacaaacttggcttccattcgtactgaaccaccccagaggtgttcattccatactcattctcaaattcaattaatcctggcaattcttgatcaatgctaacctcaattagcaccctagggtaagtaagcctttctctttctctagtaacctcatctaccataataggtttgcctaattgcccaacaattttgaacaaagacttctcccctagtacttaagctctaattcctctaattgtatccaaattggcaccagtttcacatcttctttctctaagcttgaattcgggtcccatggcttcataataaccggtttgttattaaagaaaatgtagcccccattcagtacctcatctctctgctcaattgaattgaatctgattaagaacacaccatatgctaatagcttgactttgtccactttctcactccatttacgtttggcaaacccttcaaggatgtgtaatggttgattggatccaaggacataacacaccaaataaggcttccaacaattgatttcatcctctatgtattctaattctatcttcaccctcctattttgctgagaacctttaaaagaattctctaaatttctcacaacagttgcagatatcagaataggaggtgtagggttcatacctttggataggttactgttacattgcttggtagccttgaggaagcttatgaaatcttgttgagcatcatcccatctttgaatctctcttagtgagctttgaggagacagtggctcttgaaatagatcctcctggttcgatctcaagatccttctcccctgtccaatttcacctgcttcttcttcactttcagtgagttctaaagggtcgatctcagttggataactcatcaaattcgtctgcaactccacctgaccagctcgatttccatctttcttcgatttcttaagatcagatttcagtttcccccctctcttcgaccttgttttgccatggcttcagcagagtgctgcaagagtctaagcggagagaaaactaaaaattaatatctgtggtattatctctttggagagaataatataccatagattttgcatcaataataaaacacaaacacatacaaaacatgataaacatataaatataattggtattggcatacacgttagagtaaataagaagctcaatttcataaaagcaattcataatgaaaattttttaaaaagaaaattttattaataatctcaaaaatgtcataatgaattgtctgtaataatataaaatagg

SEQ ID NO: 383252 - DNA, 1945 bp, Cannabis indica
gctcagtatgtgaattgtatttatatgcaaagtaaagtttgaatacaaggcaatacagatctgttacactaactgtatggccagctgtgaagagtaacaaactctgacttaaacgcacagctggcataactaccataacttactatatatatctaaccgttttctccaatatctatgaacatggctatgatggtggtctgccttgaggcagtgccgaatgtgaattgtagtttgttcttactacatggagctatgcctgctccactaaagccatatattagttgttcccatgattttaagtctttgagtgaaaaacccatcggtattatggtttgcttaaatcagatgttcaaggatgctccgtcatcaatcatcacccttgataccattatgttggctatttgcacctcaacaactaaaggatcattatgagggtaattgacatgatatgagttggagtctgagaatgatagtatcatgggttcaaataaatgccatcactacaataatataatccaataactaactaaatcaaattttgtaatattcagtagtagaaatgtataatattttataattatatattagaagagagaagggaattataagtttactgttcaaaatatgttacattaatttattggtataacagtaccctatttatgtgggttttaaaagaaaaaaccctatttatatgttacatgaatgatgcagcttaaaagatgacgacatacatggattcaaataaacgccataactacactaatataatccaataaataataaaattaacttttataatattcatatataattatttaataattatatattagaagagagatgggagttataggtttaactaatcgttttccaactcataaagtacaccgtagctaggccaagatattccttttttttttccctattcactggtagtgtttggttttgctgctttagttccacctttattcggatttcataatatcctgttcatgcacattgaaacaacctaattatcatttttgatgaatttctagtttttaagtgttaaagtagtagtgagtagtatggcgtttcgttccattaatatataatatcaactagtggaaaatgcggaaacgaaatgttgtacaacataaaaataagaccacgtgatgaaattcattaatttaaaaacattgcttaaatgtcccagtaaggttaattaattattgaagaatgcattattaataatcatgcactttgtagagaaacataattggcaggttgattttatacattttttttcagaacaagtagaatttttgaaaagaaatgtgagctgctagtataccttccatatttacactaaaattggctttaatacaactgctacaaattaattatacctcggtgaaaacgtaacactttcacatttcctagtctaaagataggatgtaggtacgtacttccctcacaaaactgctccaattgtttatgcattacatattagtaatcaaaagtaacatgtataaataattttagtggcaaagtcatgaaattttttacgtatgctcaatgtcatagttatattttgtataattttactgctatcaaaatattatatatacatgttcacaataatttattcatagaagatgaaatgtgatgcttaatgtattccatattgtataggcatcattctgcttaagatgacggttgtgattgatatacggagattagtattacatcttaaaagtcaaagatggatcaaagtttgactgagaatatataatgagagaactccaaaatgtatatatgataatagtaaagaaaaaagtcaaaaaatgataaaaaaaaaataaagctttaaagaatgctacactatttctctatatttttttatataatatctaattaatatttgaattatattttattattttacattattattgtgtat

SEQ ID NO: 383253 - DNA, 2563 bp, Cannabis indica
cttcttcctcaccatctcacatattatatatatatatatatatatatatatatatatttatgtgtgtgccaagattgtggtagtgttcatctaccaaatatttgatctttattataattaaaaaatttcaattaattataatggatgatcaaaaaagtagtgttgatttgattagtaatcttccacttgatattctaagacacataatttcatttcttccactcaaagaagctgtacaaagtatgagcctttccactctttggagccaagttttggctcccattaatgtcaaattaaagagctttaatgaagaagaagaagaagaagttagttgcaaagagattgaagaagtgtttggtgggtttttgagctcttacaattctcctcaacttttgtgtattggtaaagttgtcttagccactaaaggggttgaaaatgagcttcatctaaacttctttgaccaatctattattactaattccacttctccttttcatttaaagctacatacaaaaaataccttaaacaatgctaattttgccttctcttctcttagaactcttcatctttgttatgttaatagtaaagttataaacttggttagtgaattgtttaaagggtttcatcttcttcaaagtttgagagttgagaaatgtgtcgggttggaggaacttcatgtggatatgaccaattctctccataatttggaagtgttggattgtaatgacattgtaagtgttgtagtttgtgctccatatctcaaaagtttcaagttttgtggactttttcttccccgaatcatgcaacttgtaaaccctatcgatttggttgaagccactcttgaattcgagggaggtggagtagtgggtgatggcgaattcgagtgtgaggatgttctttcactcttgaattcgcttaaggatgttcaaactctcaccataagtggttggcttcttgaggtatatattcttgaaacgctagatattaaatttattcgaatactctgtctggaaactatattacagaaaattatcaaaagaacattatgaaaaaaagttatattgtcaccgtctttctttatatttttattttttatttttctaataataattattttgtttgttctttcaaagtggatgtgtagaggaggagtgatatttagaaggcttgatttccaattcaacaagttagagaagctatgttggattggatcttccatagacaaggctaagagagattctttggcttgtttcttaaacatatgtccttcattgctcaaactctctattgaggtaaattatcatgacttagtctcaactcaatttgaaaattttgtgacaaaaaattatgtgtaactatattgcaaattgtcatcatctgaaaaaagaattataatttattaatttaccaaaaatataaaacaacattaacatatttatatttatatgtatttttttgttgactccattgttcacttacttaaaactaattataattgttatgtttattgtgtgcagatgaatcataggctaagcatcattgattgtccatttttccactattattggcatgagcctcatctttggatggattgtgaaagtgtgaaaagtaacacattacaactaaaacaactcaaaatgttaaggttagaaggatttttgggtgaagaagatgaaattttgttaatggagctattgcttaacaaagctgtggttcttgagtcaatgacaatagcataattaagtactaagtagagcttgttaaacaaggtagagcaaaatttgctcatgattttcaatgtaaatgtaattaaactcattaatataatattataaatttggttaaaaaccctcatagaggcaccttatttgtaaagttttggatgtaatctagcatttgtggctaaagttagtcaaaaacataaattgattacctaaaggctaataaaataaaattggggacttagacaatacaccactgaaaaagttagggaccttaagtgctatttaggaaaatatgaattatctattcaaagttgaaattttataagtcaaaattatgagatcataatcataggaaaattagaataatgacttttttttctttctttcatattagcaagtggccataaacgactagatgcccattttctccacgtggatgggacccgggttctctaatgggatagaaattttttattgggaatttcttactctgtcctcaatagagaatgatcgggaatgaggattaaaattattaacggagatagagacagaagagtactccccgcaaatttctcgctccatgtgtatctcttaattgaataaaatcactaatattaggggtgtatatcagtcagtttgatcggtttaagttacattttatttaacccaatgtgaagaccaggttataaaaatttaagtgtaacccggccaattaagaaaaaaaaattcaacctaccttatgaactggtcggtttggtcgggttaacccttccaactccaaaccgagcactaatgttatttttttttctacattcaattgctatattttaattaattgt

SEQ ID NO: 383254 - DNA, 1765 bp, Cannabis indica
tttaaaatagttgcagcgctagttgcaataggggtttctatacgatttttttattgcaatttaaattgcagcgttagttgcaataggagtttctatgtagaattccgtaaaaatgtaaacaaaattgttttgaaatgtaaaaatagaaaaaaaaccccataaaaaatattactttgttatattacatgacaattcagttttaaaaataatatttaaagtaattacataaaagtattttaaattataagctaccataatataattttaaaataactaaataattactaagatgtatattaataaatttagaggcaatcaaaacatatctcaaattatataatataaaaataattttttttatggaaactaattagtttcttatcaatactattaataattaaaatataaatttaaaaaatgtaaaaaaatacaaaaaaaaaaaaaaaaataaaaaatattaaatttagcttacatgaaatgtgaattataaaattagtaattttattattataaattaggtgactgtaaattttacctatttaattatagcacgtaacactaccaaagcaagtaaaaatatgagtcgttgatatgttgtttcctattgaaaattaaaataaatagaggagaaaggagaggagtatactcactcatggcttgggtgatccgccttcggtcagcactgatgaatctggtgttaggcacaacacgggcacgtgagcaggaataggcgccatgtggcgtcctaaatgtgtagttggtggggaggcgccaagtgatgttgctactaccctcgccacccacggctatctgaaacgccgtcgttgagttatggtagctctggactcgagagagtagaacccctcccttacaacaaccgtcgatcttctgattctgtgtaacctcatcatcatcagccgtcagatcaagaattgtgggtgccttagcacacgaagttggcacattctcttgaaccgcctacagttgccttgatccgctacgcgagccccgatagttgtccatatgatctctttgtgggcccacctccagctcagcttccaaccgggtgcatccaccttccgatacttctggtagttggtgatattaaccactgcctattataacataatttaagtaaatcattaataatttgttataattaaaacagtagttaatgaattattagtagtgctagcataccacgtagccgtctggagtgggtgagataatgtcccaacggatggtgatgttgccgagaggatctcgccaatcgtagccgttgatttggtggaaagatagtgaagaaatggccaaagagagaagacactgaagaaaattagctctgttccagtacatctttactatcatgccctattacgaaaataaattcattccgatctaataatgaacagttgactaagatagatataaatatgtgtatatatattcttcatcaagagtataattatgtgttaatttttaattaatggtgtaatgtatgtatgcacgtgcttactccctataattatggaataaaataattaagtcaaagattcgtggcagctcaatatcccaagaaattattgcatcttaatgatacacatagtttctattgacaatattatgtaagacatagctattagatatcttaaaaatatttaatgttaaaatgtgttactacttaaggattttttatattatttatttaattaaaattacaaattttttaaaaaatataataataaattacatcaataataatata

SEQ ID NO: 383255 - DNA, 1163 bp, Cannabis indica
tcaggggagagagagcttaagaaatgtaaacctttctttatttaattaggatctttaccaaatacttagtaatccaagtaatatctgttgaaaacgagtttatagtgatacattaggttagtaaaatgagtcgagttcattgtgagaggtttctctctaaatctatcttgtgtttcttcaacaaatctatagaatcatggtacgcaccgatcaaggtttatgtcgaaatcactgaaattaaattgtcaaactaccgatgtttcgccgctgagatcgggaaagttaccgtccgaattagtgagggtgagaccccattgggaagaatgtggatattctgaatctcatccaattgtgacggtaactttcctgatcttggcggcgaaacatcggtggtttgaaaatttaatttcagtgatttcgatataaactatgatcggtgtccacatgattctatagatttgttgaagaaataggggatagatttcgagataaacctcccccacggaatcaacttgactcattttgttaacttgatgtatcactataggctcgttttcaacagcaatattacatgattattttttacagcgcctatgattttgggtatttggtcggtgtcttgttctgtttttgtatccctttgtgggcaatagttgttcatatctgtttaaaatctaatgagaatgttagttatagctattaagcttcaaatcatatcttgtttggttagcagctctacttaaacaaatacattttaaacctaatatttgttggtaatcaaacgacaattgagcttttatgagattctggcattgtcatgattgagcttttttgtatcagatccaagattcttacataagtttcttgtattatttattattgtttagcttcttgaaacttttatctcctttggtgtttttgagttcaaaaatagttattgtgtgcatcaattcagtcaaaaacagggatataaatgtcagtgtcatttatttggaccttcagtaaagcaaacacttgagatatatgaattcttatctcaagttacttcccaattcaattgctaatttggtgaatttgcaaacattaaaactcagttattgtttacttttccatgaactacttagagatattgagaaactcatcaaccttaggcatcttgaaat

SEQ ID NO: 383256 - DNA, 3465 bp, Cannabis indica
ggtgcttctcgagctatcactgttcccacgaatttgtctgcagtctggacttctttgcagcaattgctacaagatatggatggaacgagtggtgtagctgttgatagctcatttttccaatctctttttaatggacttctcaaggaaggcgagattcttggatcacttcgagcaggagttcattggacacctactgtatgtagcctaatctcattattgttatttttgaaacaacagcctaaatcacatttaaaaatattataagaaaaaaaaattgcctattctcagtgtctgtatgatgtgtagtatttatgttcaaaaaaagggctactattcttcaaggaaaaacctggataaactaagaaagaaaataatttttgtttatagaatcatcatggcatagcacttatttgattttaattttctagttttattctttgaatatatttttaactggtattaggcataaaattactattatcactattactatttttatctaattcaaattattgcattttaattttaacttgaatgaaaaaaattccataaactaaagtgtgaagatcaccatttctgagagatttgatgcatgtttaaataaaccatttgttctttcttcctttttctgtggcaactggcagataaagatcatcttcactaaattacattaaatttgtaatgatagtgtataaatatataaacatataaatgcagtatattgcgatgaaatttctagattaaaaaatcatgtatggttgttggaaatcatgtcttcatctcatgtgtatttttgttacaggtctttgcagttgctcaaaaggaaggtgtcgattcttttttctcacaggtatgatgctctatttccttggttcctttgtaactttatagtgttactctctgtacttctaaattatatatgcaatacatacttgatccaattgtttcttattttcgtttggttattttacttacgttcttacaagttacaacctctgggtcagagtcaagcatagattgatgcaaatgtaggctcttgcatagattatattatatattattctaatggtaatggattatcttttctccatggggaaaaatactccaaagtgacgctaacctctcgcccttatgtttctttatatgccacagaattcattcatcaattatggggttcttcaaaaccttggcatcccccagcctcctcagtatctgaaggtatctaattgctatcatatgtgatgctagttttctggataattgactgtgtagactatttctatactatgtgaacccttcttagaatattgtctaattaggttcttttggttttatacacaaatatagtccaggtatcctgaaggaatagctctgattgatgttttcgtccatccctcgttgattgaaatgctggatgccgctactgaggatgctcttgaacgtggtagttggtgagggttatactagaaaatttcactttgctaactgttcaaatagctccatttttaataacttaattttcattatcctatttgaacagtttactgaaatgatcttctaatcatattaagtaacaggaagaaattatttgctgcatattttggcttaaatattctaaaacttgtgatgtaatgttagtagagtgcagacttcaaatttcttctttccttgtcttacgggatagtttgatgcaggattgatgctctttcagtattacctgcttcctttgggtctcaagatgcatctaaacttttgtcgctttgtccttcagttcagttagcgctaaaggtggcattcctgtattcattattgttactttcacattaaactagatgattcttataaccttttgtgtgatacttctctgcagtctaataaggcagtaatctttggagagtcctatctatttagtgatggttttcttaaggtaatacctctaatatacgtctacctgctttatttgcagtccaccacttgcttcatgatgaccttgctctgtgtttttctatgcaactgaaaatttaaggaatctaagaaatgtctataatttttaaagtctatcattaggaagcacagcatagtaatatcacatgtacatgtcctctgtctgatgcttttgatgctgtcttttctgactaggctgtgtatgatcgagtggagaaggatatggagtcctttagtgtttcagggtcttctggggctgtgccgtcagatgttttatctgataccaaaattggacatgattcaagcaggattacagattcaaatgaagctgttaatgagacgagtagtaataaacagacaactgagaaaggatcaaagaagaaaagaggtaaatcttctgggactgccgcagcaagtgcaacagagaatagtgtgaatgtgcaggaaaatcctacatcaaaatcaaagaaaagtcagaagaaaggcaaggatacatctttgcaattttcagattcaaaagcttctgtgaagaaagaatcaagtaaaataaaagaggagaataacaacattccttcagaagaatgggtaatgcagaaaatctcagtactggcttctgattttgaagaacaaggtttgttgactttatcttggagttgtccattccaattacaacatagcaggattttattccattctccattgtggcaggtattgatgatccggagacaattattagacctttagcaaactatttaagacctaagctagtcgaattttggaagcagagaaggaaggcattgtttacagaaaacgcagagaaaatgaagagtgtgcttgacaatttgcaaaagaaacttgatgaggttagtttacctccatgtttttcctttgcctgtggtcagtatttcaaatgccttattttttttttccctacatttgtaattatttgaattataattacctagatggaatcattaagtggctacgtatttggattcttctgaatgctgaactctactaactagttacttctttctctatttgtgatctctctcctttgcagtccttcttgaacatgcagttgtatgaaaaagccttggatttgtttgacgatgatcaatcaacttcggtgagtttttctatacttaaaagcattttcagagcaaaggtcaattatataaaagaagcctaacattctatgtcagcaggtcattttgcacaggcatttgttaagaacaacagctgcagctattgcagacacactcatctataacttggtattgtttgatagttttgcattttagatgatctttttatctattatgaatcggccacataatttaatttgacatatttgtttgattttaggatatgcacacaaaactaaagaatggagttgaagttgaagaatctcaggattcagattctgtttcacttagttctggagaacgaattgccatcgtacgaataatcatgaatctcagctaatattgttttacactgtgccagtgagattggctt

SEQ ID NO: 383257 - DNA, 3582 bp, Cannabis indica
aaacacagcataactgttgatagccttgtcctcccgaagcttgatatttcgattgcaccagatgatataaaccaaagctgcaagaacagtagaaaattgatttttattaaatttactaagctttgcttttcctaaccaaatgacagaacgagacaaaaaagatgcattcatcctccaatgaagtcagtttttggtcaaactcaagcaatcttgagcaaaaggacaagtaaaaaacaattgatcaatggtctcctcatcattgctgcaaagcaaacaacaagtttctatatctggtttgaactttttaattctgtccttggtcttgagtttctgcagcattgacaaccataaaatgaagttatgtttggggcagtttaaactaggggtgttcatcaaaccgcccgcaccgcaccaaattacataggtgcaatgctctttcatacctgtaggaactagcttttgatacccaagtgatatcttataattgctgcaaatatcttctctttcccctgtatcaaataattccttcattctttcttttaaagtaactaatttccttcaataccagctatcacttgatttagcactataaaaccaccaatcttcttcttttacatacacactatgtacccatttaacctataggttgtcctctttctttgcaacagcgcaaacgtatttaaacattgctgcaatgttccattcaacaacagatttgagtcccaggccaccagctgacttggaaaggcataccttgcaccaagctacaacagcagcccctatcaagggttgcttgctattccaaagaaagcctctacaaatagcctcaattttcttaataatgttttttggaagcaccattatttgagtccaataagaattaatatagtaccatcagaaccgaattaaggagtacaacccttccagcaaaagacaaattcccggtgctccatgttcaaatcctggcaaccatcttttcgactagaatagagcactcctttgttgaaatcttcttaagacatatgggaatgctcaaatatttaaaagggacattatattttgaaaatctagaagcatctaaaattctttggatttctgtaccacacatgttattacaattaacatcattcttattgggattaggcttcaaacctgatgtttgtgaaaatagctgaaggccctaaagcatgtagtagatgctattgtagtccacattacaaaacaacaagacatcatctgcaaagctgaggtgattaagcttcaactctccacatctttcatggaatttgaatttctgtttaagccctattttcttcataatcatggatagatatttcattctcagtacaaacaagagaggagacattgggtcaccttgtctcagtcctctctttgcctcaaaaattccatgcatgcatggatccattaaacatcagagagaatttaggagttctgacacaaaccattattaacttgacaaagctagctggaaattgaaagccaaagtatttcttcaatgaagtctcattccattgtatcatatgctttttgcaaatccaacattatcatacaattagccttagctaaatttcttccatgatgtcttatgagatcctgacagatcattatgttatggccaatgaatctccctttaacaaaactactctgattctgtgaaaccaaatcaggctgcaccattttgagccttgaacaaattatctttataccagctttatacaatacattgcagcatgctattggtctataatctccaactgagtttggacacttagttttgggaataagtgatcaaaacagtagtgtttacctcacttaaaatctgtccaggatgcaaaagagaggttatggcttcataaatgtcattccccaccaagtctcagttgtcttgaaaaaagaagctacagaaaccatcaagtctaggagttttgttgctaggtatatcaaagatatctttcttgacttcatctcttatgaattgttaaactagcatcttagcttggtccttagagagaacagacccttgcttaataatacttttctttgcagatttcttgttatacatcttactaccaagctatggaatgtaatactataaaaacatagaggatataagttgaggattatctattcttatcccattagagtccatgatagacaaaatttgattctgacttcttctagcatggatattgtggtaaaatgctgagttagaatccccatctttaagccagattaacttagcaatttgctatagaaaagaaagatatgatgtttatacagtagcataatccttcctaaaagtagcttcttagatctgtaattcagcattcaaaagattctgatgcactagagtttgacaagcatctaatttctccttagccattgcattagcagcaggcaaatcagtaaagtattgcttatttagctactttaaaagaggcttcagacctttcaacttagagaccacttggtacattttagtaccaatattcttttcctgccatcaactttcaactagccttcgatactcacgatgagaagaccacaacctgaaatatcataaaggtttctttcctcaaggagaagctgtaaaaaattgttaatacagttggggaatggtcaaaaaggcccttattttgaaagatagcctcacctggagggtggaagtttagccaagttggatttgcaaggaccctatctattttagaataaatcctctcatctccaatctgcttattacaccatgtaaaagcacaaagcaagaccagttgcaaaaggatactcacaacaatacagagtcgactacaacgaaacatttgctccagttgcacgcctcgacactattagggctttaataggtctagctgcacaaaagaaataaaagatttttcaactcgatgtgaagtcggcattccaaaatggttatcttgaagaagaaatttatgtggagcaacctcaagggttcatagcacaaggacaagaagataaagttcttagattgaaaaaggctttatatggcctaaatcaagctcatcgagtctggtatagcagaattgcacaactactttaccgagcaaggattcaggaagagtaagagtgagccaaccctttacatcaaattcaaggtacgaatgatacactaattttctctttatatgttgatgatctaaaatacacaggcaataatgagaagatgataaagaagtttaaagaagacatcatgatgaaaaattttgagatgatcgacctgagattaatggactactttctcacgatcgaaataacttaaaaagacgatgggatcttcttctcacaaaagaagtatacagagacactattgaagaaattcaaaatggagggatccaagactgtatcaactccattagacaacaacaaagctctcaagaaggaagatggctcaccgaaagctgatgaatcaaaattttgaagtctaattggcagcctatactatatctaactgctacaagatcagacataatgtacgcagttagtctcctatcaagattcatgcatgatccaagtcaagttcactacggagca

SEQ ID NO: 383258 - DNA, 2321 bp, Cannabis indica
aaaaaaaaacaagtaaacaggataagcacattagctctgctggttgtgctcatattttcatccattttataacagcagttatgttctagatagtttacatttaaatccttcaataactaattttggaaagaaaaattctattcatcctgattaaaaaatctgaacgagctgattcggttttatttgattggtcctttgcaaagtgattaagttcatttaataaattttattaatttgtaaaattttaagatccaatacaagtggattggaataaaaattccactgtgatggatagcaaagctcctttgcaaatggctacctatacacataaaagctggaaggaagcagagaaactttattactccaagaggacaattacaaagattagatgagacttgacaaagagcaaagcaacaacaaatggaagccctaatcaagaatatgaaaataggttttctagtagacataccactgagctctgagtttaagtctgaaactaatggttatacaaatgaagtaccatattgagattgtgtaccctagttaaaatattaaaatcaacaataaaaaatcagcaaaaatctacctatcatcggttaactacttggtgcgaaaacaaaaaagaagagaaaaagtctcatcaatgaaaactagcatccatagagtacaaaggtttcatcacatacaaatctcagctaatataagcataagactataagaaacaaaatgattaaaaccctttggtagcgtttggttagcggtaatgaaatggaaaggaaatgaatcaaatttaattccattcttttgtttggttgcatgttagagtattggaatgtcatttcaccattttggtggaatgactattccaatttgaaatggaaagaaagactattccaatagaagatgagaaaaacttaataacttttttatctgattcatttatgcatttacaatttcattccattctattcctatttatattctcattcacattcctattccatagtttttattcctcccaaccaaatacaacctaaagtgtatttagttgcggggtaatgaaatggaatggaaaggaatcaatttatctttcattttagttgcattttaaagcattagaaataacatttccatcatttggttggaatgactattccatttccaaatgggaagaaatgctattccattgaaagataaaaagaaattaataacttttttttttatcaattttattatgcatattaaattttatttcaatctatttattacaattcccaatcctactccatgtttttattgcactttccatacacgaggaaaggataacacattcacaaacatgagaaggaatgttaaccacaagctacaatatctgaattctattatttcataaacttcaaacgtggcataaaatatcttataaattatttaaaacacaaatacaaagataacaattattttgtatagaactacaaactagattctacttcataactaaaaatattatatatttatgttaagcaagaagcgctattaaagggacggacagctcagctctcttaattttacagcaaaggctacattaaagacatggaattaaggttcctaatgaataaaattaaagctggtatttttattaagtcttctcggacttctaaataaaaaacctcacctttcattttagcagcaaaaactatgtaagtaaaaacaaaattcaaactgggctttcttattaacttattaaaatttaatggcctttaagtccaaagagcctaaactgagagtcatcaattctgtgaagcacccctaaaggggacagtttgcagtagggaggcggtgtacgtgtatgcctcttcatttctcacaacatataactcactcttttttaatgttcttattcccatcttccaccccaattaagtctgaattacttttttttataagagtacaagactttacgttttaagaaatggcactaggtcttattcatctaatgtgtaattgtgtgtatgcttacattaaatatcaaaattagtgagcctaaaatactgagttggaaagaggtgaagcatttctcattcaaggttcatgtttacaaaaatgataaatttcagtaaaaagaacagaacagtgttaagtcatttaaggacattgaaattttgaactcaaattatatattcacatcttactatgtaactataaaaaatgtgcagtgctatgtgtacctaaaatatgcaccaaacaattacacatcaatcacaattttgtaaatcacgtcactgggtgtaatgttttggtgcatattttgagtgcacatatca

SEQ ID NO: 383259 - DNA, 2607 bp, Cannabis indica
gtcaagggatcaattcttaatctttacagaatttttaaaagatttaccatcacactaaattattaaattataataattaaactatatatacaaggttccaaaatttaattttgtcttaaacctcatacaacggtttggataactattatatgaagattattttttttaataaaaaataccttttaaagtgtttgaatatcattaaaaaaaatcttctagaagtaaattaagaattatataaattattttaatttttaaaataatttctcaaaaattattttggggaagttacaaatcctaacttcttcaaaagattttgaaattaaaaaaatatatatatatcttatatctaaacatctgtagaagggcattttttaattctaaaaatttaaaaaaaaaaaaaaaaacttatagaaactaagtcatgtcatatattatggcctcttccatacaaattaactataacagaacattaggttaattcttttttaattggccctttaagaatataaataagttaattcaagcgaatcaacattatttcaagctacttttgttaatcttataatttcaaagttcattaggactacgcgctcatacgtatacaacgaccatatatacattacttattttaagcacgagcaacaatatgtgcatataaagctactatgcaaacacacacacaaacatatacatacatacatatatatttatataagtagagtttggatggagattgagaaagaaaacataccggttcttttgggtctcccatcatcgtctacttcttgggcttcctcttttttctgaggcggcaaaccagtctcgaaaaaaccatattccattatttgatcaactggctcggtcatagtacttcccattctgagactatttctctcttcctttctctctgtatacaatatatatatatatataactgtaacgttaattatatactgtatctgtaaaaggaaagctagtgtttggaggagagaatgagtccaaactttgtcaagtgtacgtatatgaagtgtgcacttaacacagaatgtgatattaattggtctctattatatatagtactcaatatatatataagattagtatacaaatggatgcactatttatattattatttttttaatcatattaatattattataagatcattatgcaaactttgaaagtcgatgctacgtggcgtgaaataattggagtgaaaaattattctccttatcatgaaaggaaagatatatgatgcaagagaattgttttgttagttgccaagtagtagtggagttgataatttatatgacaatttattaattaaagcatatgaaaagtatctattttcgtgagcagaattaggaattagtatcctcatttccaagttcatatgtattcaaaccttcactaacaatgaggatataagctccaacacatcccttgactctgaattaattaatacatattttttaaattagtttttttttttttgaataatgtacatttaaaatagttttattgaaccaaaaccatcacaaatttgacagagaaattaatataataattttcacaagtaaaagtaatatttgaaataaaatacgtgcatataaatgaaattatattatgtatacagtgacatttagtaatacttttgtttttaaattttttaattacaaaaataaaagtacaatttttgtttttaaaattttgattttaaaaaacaaaaatgcgttctataatcatttttattttttaattttaaaaatagaaaataaaagtgtaatctgtcaattttatttttatttgttgattttatttaagttggattcggtctctgaagccgggatcgggggctgggtccggagtcagggtcagggttcgtctgagttccaaggtcaaggttggagtcagagaccaaaatattaattaagaaaaaaaattgtttaaaacaatttagaaagttttttttaaaaaattgaaaagtgaaaacaattttatagaacatggtttcagaaaatatttcacttttttaattttaagaaaaatttgcggttaaatccccgtatattttaattgttatacacttaaccctttttttagtggtaatacctccttatgttcaattctgtttgcaactttgatgtttctattaaatttggctgttaagtgccgattcaatctatcactgtatacacgtagtatatttttcttggcccaaataaatttattaatttaaatattttaaaaaattattttaaaataaaaaataaataataataatatttttttgtcttttctttttactgatcggattatatttttaaataaataataaaaaatactcgcaacaaatccctcatgaaatccctctctctcatcagctctcaacagagagaatgattcaactaaaaaataacagaaacaaagaataacccaaacccatcatctttatcctcaaattcaacacattttttctaaatcaagcttctaaagtgcccaaatcaccattatcaattccttgaacctgtttaacatcatcactcacaatttccttagcctccttctccatgtcatcaccaccatcatcatcatcaacttttt

SEQ ID NO: 383260 - DNA, 1754 bp, Cannabis indica
aaacttgaaactttgggtacttatgttgttatgtaccctatttttttttaataatatatggtttgctgtttggattttaaaatgtatattgttgtttgttgagaaattgttatttctaaatttgataatgtaaatttcatagtttggattgcatatttggctcggagtaatttgtggccagatttgaaagttttttttttttgtggtgttggttcttaaccaagacatatagtgaaaaaatgaattgcacaccagtaagtgtcaatttagaactgacaccaatacccagaaggctcggttcaaaatcaacaccaaataaaaatataattttttttctcggtggaataggtgttagttctatgaaccgacactataggtttaattgtgagtttataaccgacactacaagtgaattttgtagtagtgtctgtcaaactccacaataaaaacttctcactttggcaaccttttcagagcctatctgctatcaaagtttatcgtcttcttgactgcatgtccgattcattttctccatcgaagaaattctttagtgaaattgatcaagattctggtacaattagtcctctatttattccatcggaggtgcaagatcaaatactctattcgtggcttctctcctcgatgactaggaattctcacttgtatggttgggagtgaaactttatctcaagtctggagaactttttaggttttcttcgttactcaaacctcgacaaagattgatcaattcacatctcaactgaaaaagatcaagaaatgattgttttctatcaatgaatacatgataccaaaggtatttttgactgtctaggatctgttggccatcagatttatgtcatagatgacgtgattgccattttcaaaaatttacccaatgattatgacactttagtaatttttattaactctcgcaatgttctttatattgtttcaaaaatagagttgttgttacttttttaaaaacattacatatatacccattctaaagattttgattcaatcaagctaccaatcgtggctaccatggtaggggaaatattcttccaattcatttagaactagacctaatttttcaggcagtggctacaattcatctcttggtcatgggacttggaaaccctatgttactactcctcgtagaggttttgctcagactaatcatcctctgtttgtattggtcatgccacttagccttcattttctcctgttgattcttcttctggtggtcgaccaacttattgataatgctctaaatctagataaatttcctctcgttgctatcaaaagttcaatatggaattttctaggagttgatgctactaatattgacaaacaatctacaaatattaccaaagcaaatagcatagttaatgttgcttagaatcctgattctggagctacatcccagtgcacttcggacgtgaacaatttcactcataagtaggcttactttggtgttggataagtgcacatgactgatgctattgggatccctatatagaatttttgttaaatctcttttcactaagccttatttgtaacactctagaatttaaaaatagattagcaaaaccctaattaaataattatgaataatagaggaattatattattatatagttcagtatatcggaattaatatgaattttaatatgttaagatcccgttggtgagccaggggcattttggtaattatgacccaagaagggtaaaatgatgaaattaatttaatt

SEQ ID NO: 383261 - DNA, 1223 bp, Cannabis indica
atgtaaagctggtgatgattatgatccagctttttatctcatacgatgttgttctatgtatggtgaagttaactgtttcaattatgctactttctctgtaaaatatgataatgattgtgtctctgttttgtaattttgattttatggatttgacaaagagatgggatttcattcatgagatatggttagttcattcaaataggaatgaaaaagatttctttaattaattggataataaataaaggcacccccacacgataaaaccagagtttcagtcaaacaacagaggaattcactgaacaaacaacataaaagtttaaaatttactaaataactgcattttgattttacattaacatgatggtagtgttaattttttcagggcatagtattgtattgtataattctactgtgttaatattatttaatataatagtttgtagttttatattatttgtattaatagtttgtataaaattatatttatatgtacaacaataaggctcaaacgtatataatgtttgtacatataaactaaccaataacttcataaacatcctttagatctctttcccattactatactattattaatttcttattattgatatatttgtcaatatatatataaatattgtttttgattacaatatatagttaattggcatgtgatttactacccactttggatttgtaacaataaactttcaataatatgtgctccgccgttcaaaaatccggtggagtaattccggcgaggaggagactggttaagagcttgatgctggcttatatactcaaactggggtcctctttagttcaacatggacttatgaagaaacgggtttacccctacctatcactgtgatcactaccgtcgccggagcttggtgacggaaaaaattgatagggatgatgaaactttctttaaattttcaaacttagtttatattttatcttttgatgtatgccactaatttttccttcttttttttgcgtttttaatggatccattgtattagttaatcagtatgaaagattttatattgaaaatatttgagctataaaattttttggatttcagaacaggggaattaattagtatgttcagttgtgaaagaaaggtttaggctccttatcgggtcgggtatccgttattatccgaattttattctgttatagaaaggaaatttatatggtgtatactaacttttatcaatttt

SEQ ID NO: 383262 - DNA, 2681 bp, Cannabis indica
tttaggtgtgtttgtgagaaaaaatgtgggattaaagtgaagaaaatattgagatttagagtcaaaatcaaaattttaaagtgaaacttagatttggcccaaaaacgaagcccactcgcgtgatgaaggagctgccatccgatccgttcgttgacgaattcgacagttcttatggcgcacatgtcctccactccagagacagcagcgtgggcgtcaggtccctaccgcatgctagcacctgcgttggtaccctttttaacgcccaaatgtgacttctactggcggtggttgtagtatagatcggacggtcgattctacaggaaggtgattatggaaaaaagcgttaatagaaaaataaacacaaaagattgataaaaagtgagaatagtaaccaatgagtttgaggatttttttttttttttggtaattaatattaaaagaaagcaaataaaggtgtaatcaatagtaaaagagagaaaggcttcaagaatcatccatatgcttgtttagctatcttgtacctttgattcacaaagttgatacaaatgatgtaacattaaagttcattatattttgagtataaaagttcttggaaataaaagaaataatttaatctgatgtagaatttaaaaatgacattatacatcaagcaataatgcaataagagattaaacataaaactaaatatcaatattattttcactaaataataacacatagaaagaggatgactaatcatatatatttttagtaaattaaaataatgacagcatgactaaatctatttatatatatttagtatataatagcatatatagtagtatagataaaagaaaaacataaaaataaaagtagaataaaaacttgcattactcatataaatattacatgtgaattaaagatacaaaataatttcactttgtatacggaatcatctctaaccttccaaagaagattacgtcattatgtatcattctcataaaaattctaaaaagaaatatgagaaaaaaaatgagaagaatttttgctataaaaattacactaaaaattacactcttaaacaatagaaaaatgagctcctatttatagagtcttttaaaaggattaaaatgtaaaatataagtaatatagggttataataataataatagtagtaataataataataataaataatctatagcttttttttgtatgttactattatatattattatatatatttgattgttgatttaaaaaggctttgatgttgtagtatggtatttggtccatgcaggtacacgttatgggctttggagtggaaatgggagcagtagcaagagcccacgtgctggagcagaagaggaaaagggagcagctccttactggtagagaagagtggtttgggcttgggctgctcccttttgggcttcttcttttttttttttttacaattttactacttgcttttattcttttcaacaacacacttttattcctacataatagcaacaaattaaatatttttaataaaaaaatatatctcatcaatcaaaatattaatttaaagttaatatattttaaactttaagatcaaaaaaatgtgtatttttcaccattaatcaccctttaacccgtctgccttctctcctagtaatgctagctctgcacgaaccagatcgtgccacatcagcactgctaactccatctattatggaataatataattcaatttctagtaccaatttctatgcaataacaggtttacttaagtaatttataatccgctaagatatacaaatctcaattacatgcaaattttctattttcatgataaattcaaatatgcaaaaggtattaaacacaaaaatcctataagctatccaaacaacataggtactctcgtccaacataaaaatttgttcatattttactatagcataattgacacttctgagatctcgtatcaacatcataaatatttaattgatggccatacaattaaaagaaataagaacaaataaaatagaacacataaaaaaattgagaaaaaatcaaatcatattaaaaccataaaaaaatatcaaacagtatccatcaataccctaataattgtatagctattcttgttcttcgtaacaattaaacataaatcaattaagaacataagaagaaaatagggaaaaagaaattattgaaaaattccgttaaaaagccttctcggtcactttgtttctctcaaactcgtactctctaattgtgttgatgaaaattgtgaaaatccactcttttttatagccaaaaaaggataaaaaagataggaaaaatatcaaattttcaaaaagactgaaatcgttcatttggaaattaagtagagatactcccgtttggtagtcggctccaaaggatctttagaaacaacttgagctgtgtcatttgtggcgatgtagacgattttgttcagcatctaaactacacttgtcctctggccatggttgtgtggtttgctagttgtgtgttgattagaagtgagtgtgtgagcttcatcactcctagggacctggttgaatggattttactagaggtgagcataaaattcaaaaaccgccattgaacggtctagattttttttttttgggtaataaaccgaccgaaaaaactgaaaccaatggtaatacatatatatacattaatttatt

SEQ ID NO: 383263 - DNA, 1379 bp, Cannabis indica
tattcgtttttcttagatatccatagtacggataaaagggttataaacgtttggttcgttggaagatggacacacgaaaaagcataataagttgagatgtgaccttttagagaatatgagataccactgaaaatagcaaaggaaactccaactgaagttacaactgtacctaatagttttcatgtgaaacttgagaaaggaatatatgttcaccaaccagggtactggtgagaatccaagaagagaaactcaagtctccaacaatctagataattaccaacttgctagagacagggttagaagggagattagacatccaaaaaagtttagttatgttgatttttcagcatatgtagtgtctattgcatttgaggtggatagtttagttccatagacctaccaagaggaaatcaacatcaaggatagtgccaaattgctacagaccatggaagaagaaaaacagtcacttgtgaagaacaaaacctggaagatagtgagaagacctgttcggtagagacttgtgagatgaaaatggatctttagggtcaaggaaggcatttcaagactagaacaagtcagattcaaaacaaggaaggtttacaagggcttcacacaaaaagaagggataaattatactgatatattctctcatgttgtgaaataagcttttatcggggtcattatggcgaaggctgctaaatttgatcttgatgttgatcaaatggatgtaaagacaacctttcttcagggaagcctagaaaagatcatctacatgacgattccagaaggctttgaaaacaatgatccagatcaagtttgtttgttacacaaatccttgtatggattgaagcaagctcactactataaaaaggcttatccctatcaatttacaaatcggttattttgggggtcatcgccaataaagttaggtgattgtttaaaatcattaggaatactccactattcccaaaggtgttaaacaatatgctttagaatcctcgattgtgcaaagcaatcacaattttaaatttaaaaaacgagttataaatgtatccccaacgatttataatcgtcgggtatactataaccaacagttttaaaccgtcggaaataatagtaaatccgacagttttaaactattaggaataacattttaaacatataaaaaaccccaaaaaattcattttgttcaaaaactttagatatcgtgtgtaatacccggaattaagaaaaaggattagcaaaaccctaattagataattatgagttaattgaggaattatattattatatagttcaatatatgtgaaattatatgaaatttaacatgttaaagaccccgttggtgagctaggggcattttggtaattatgacccga

SEQ ID NO: 383264 - DNA, 1539 bp, Cannabis indica
aatttctggcttcgtcactgtttttagtactataaattgttcgaaagtgttttaaaaatttgtaagaattatgttataattataacgaatatcacaataaaaaaaattattcaaacatgtattttcgagcatagagattgattaaatagttgtaataagaggttgacgataacactatttttttttaataaatgaatttttattttttttaaacaagaaaaactttattaatgacaatcattcaagatcacatcaagaaatttaggagaaatattgtcattcttgataatacgatcgggaaccaaatagaaagttcttgtaaaaaaatgagttacactatttgcagaccattctacaaagaaaatagaaaaatcactcaaatcgtgcataaacactttgcaatcaataataatattcttaaaataggataactagataagaggtttctattagcttgtaccaaaataagactatttgtttcaataaccactctactccatgctttctttttgatccaactcaaaaccttccgcacctccatcgactctgccatctcaggagatgtctaccattttgtgcaggaggaaataacctctaaaaccggacgtgaaacatctctagcaacaaaaaattgacaacagagaacaaagcaatgtccatatttactttaatcacattccttcttttgatttatagactgtcatcttattccaactcttccaataaactcctccattattatttgaagaataccttcaataatacttattggtcatcttctctatttctttacaagtctctaatggcgaaagaaatacattcatagcatagttgggcaaggattgagcaattgttttgagtaacaattcttttcctactattgaaagagatttcccctcttaatattgaatcttcttcctcattttctccttcaaaaaattcaaaatgacagacttatttcacccaagaatattgagcagacttttgcccagacttgaacatcaatattagcattaaaaaacacaggatttattcaaattcacttgttgttttgaagccatttgaaaacatagtaatagctgtagcacattatgagctcgctcctctattgcattgcagtataaataactatcatctgcaaagaacatgggagaaattaagcgcctctctccaccttacatcccttaatccttccacatctctcacaatctgaaatcaaagctaagaaaccttcagcataaaatataaagaatgttaactcataaattcgtcaacattgatcgaggcttaataattaatacttttgaatatatattattaattacacgcaatgaatttagttaccgagtaataaagaaaagatagagatttttaacgtaattttgtagttaactttatttataccacgaaacaatcttatttttgggattttatgaacatgaatactaggggtgggtatcatccaatccaatccaattgaactgaaccgatccaatccaatccaattacaaaaagttggatatccaattacaattggat

SEQ ID NO: 383265 - DNA, 945 bp, Cannabis indica
tttttaggatttatcaatcaatgaatttaggttgaggcggctaatgttgatagtaaaaaagtcaaatgatttgaattattattcattatcacatgtagtgtcccatatgactttcaattcatgtatataatacttatgtttatatttcaagtcgagatagaaatataaaataaatgaataaaaaaatatacagataagattgcaagaatggctagaaaaagaataaaattttaaaatttcaaggtggcgtgatcaatctttaagcacttgtttttgtggtcgattgtcaacgcacgtgttcgataatcatcgattgcttcaactgaaaagagaacctaatctattaagttttctaacattttttattagatcgcatcccatttaatacttaattacattaattgtagcatgataccgagctatttactcaccgcaaccaaaaatttgtcccaatcaattaaagagcaaaggacaaaggagatatatgttatatccaaattaattaatgaacaaaggacaaaagagatatcgatatatataaagattattgttattggacactaattaataatgtctccttttgacatgttaccttataattaattaaatattttcttaaaattattacattaaactctgtaggagctgatacttattgaaccaataataaaattgacacataaaagagtatattagacgctactagtacattttaacatttttcatatataaagtaggaatgatatattttttctttttcttctttcaaagcaatctgttttggggaatattaagtcggtattagaatggagagtaagagagataaaaagaatatatgttctccttcatgttgtttggtattagaaatatatatggaagaataaaaagtaaaataaatattaaaattactattttattatttttaatacaattataaataaaaaa

SEQ ID NO: 383266 - DNA, 3456 bp, Cannabis indica
aaaaaaaagagatgacattttgactttgtgacacgcctttttcccataattgaagtttcaagaacacaccaagaagacacacaaagaagatgaacagtacctcagaatggttgagtgtttgacttaactaggaagaaataaaaatgtaaagtagaaaaagaaaataaaaaccacaatggtaacttcaaatatttattaacagtagaagacaatgacaaaaattccctttggcccatttaagaaaatattgaagtccattaacactaaaaaaagggcaacaatctcaagatcaaaacacaaaaaacaccacgaaaaaataatagcaatggtggaatcaaatgtggtaaaatattatgtgaaaaaaaaacctagaatgagcaacctaaaattactgatagagaaaggaaacactagacactagacattaatgctcaattgaacccaaagaaagacacattgacaccaaacacaacataatgcaaaagagcaaggaaagtcagtcaatagaagttggactaaactaccaacaagatcacatatatattgtcaacgagaatccaaatagagatgtgaacagtaatgtcaccataagtgtgtgatgtgtcttcatgtgagacaccaagaaactaatcaaggtaactcactcatctctcttaagaaaatcatttgattattttgaacatatgtcttttgatgattactacacacaatgactttttccaaccaggtgcagttttcacgcttccatagagatgtagccgtcaccctatggatttttctcaaagagtaacaagaaaaaggaccaaacttttcaagtcacgcaatggtacaaggttagctcttcccaatacattcatggacggtagcattttcaactaggacaacatactgttcataattaaaataaaaaatctaataatagaatatattaaacctatcaaccaaaaagaccaacaatcattgacaaataaacttctgacttgagcacgattgtgaagatgtctagaggtaactttcacaaggtcagatggtccacacaccaatagaatgtctaagatgagaaagtgtgagcatctaatgcctttgtgaacagatcagcatgttgggcacctgtggacacatgagtaatagttaaaagcttagattctaccgtttgcctaataaaatgataccatatgtcaatttgttttgtacgagagtgttgtactggattttttgaaatattaatagcacttgtactatcaccaaatagtaccaaagagtcttacggaaatccacaatcagttaccattttgttgagccaaataagttgagtacaatagctcccagctgctatagactcatcttcgacagtggaaatggatatggaattttgtttcttactcaactacgagacaagattatttttgagataaaaaccctccaatggtacttttacgatcatctaaactcccagcccaatctgaatcactaaaaccaataatagacatgttggtgtctctcgagtcccataagccaaattcaaaagtcccagacaagtatttgaatatgcattttacaaaagataaatgggactgtttaggatttgcttggtaccgagcataaaaactaacactaaaacaaatatctagatgattggttgttaggtaaagaagactccctatcatgcccctatacaaggttggatcaacaaactcaccagacttgtctttactcaatttagttgtggtacttaaaggggtaggggcatgtttagtgtggtctaagccaagcttttcaagcatctttttgatatatttggactgagaaatgaaaattctctggccagtttgtttgacttgtagtccaagaaagaaactaagatcccctataagactcattttaaattcactagtcatgagattaacaaacttgacaaccttcctatcacaagtagtcccaacaataatgtcatcaacataaatacctggttgcaaatgcttgataaataaagtattatcagcagtgcctcttacaaactcatgagaaagaaggaaagaagttaacctgtcataccatgctataggagcttgcttaaggccatataaggccttcttgagtttatacacatgatcaggatacttgggatcctcaaaaccttggggctattttacatacaccccttcttgaagaaaaacattaagaaaagcacttttcacatctatttttggcagtttgaactttaagaagcatgtcacgacaagtagtaatcgaatagattcaagtcaagccactgatgcaaatgtttccttaaaatccactccctcaacttgattatattcctgagcaacacgcctagccttgttcctgataatagtgccaaattcatcagatttattcttaaaaatgcacttactaccaatgatatttacgccatctggtttagggactaagctccatactttgttcctcttgaactgccccatctcatcttgcatagtattattccagaatccatctagaagagccttagtgacattgtgaggttccactagagagacataacaagcaaatgcgatgacatttagagccttattacatgtcaccattttggcatttggatccccaatcatgattgtaggtggatgagctttttgaatctaggttggatgtcctttcttatataaccgagtatgggaagaattattaggatccctactggttatttgattatctgaagagaccttagtagctagtgcgtctgctgaagtgctagcagtattcttagatgacactgcacgtctttagatgagaaaggccttgatgtttcagttgtcttgaacattagacactaaaggcatcattgatatatgtggactaaaaggttcatcagtagggactgagtctaaaacttccagatcatcaaatttcacattcattgactccatcactgtggaagttcttttattatacacacgatatgcacaactatttatagaatatctgagaaaattctttcgtcacttcgaacattgaattttcagagatgatctcattcattaaaatgtgcaaatgattcaaattaggagtcttatctttccacagctcatagtcagtttgagtagtgcctgtacccaaatgaactcagttacaaatataacatgttgtattaactgcctgatgagtccgtatttatctaataaatatgactaatttatgtattaatattcctaaattgattctttaaattattgattagtgtgattataatttttgtatgatattttaaagactaatcatgcatttagagtcatttggagggatgtaagttttggtagaaaatagtggaagtcggcgagctcggttttataaggtagaactaaattgcaaatttttacaactttaaatgcaaatctggacttggatcgcagcatgaaagttttatatcttgttcttagatttccagaacatcttgaa

SEQ ID NO: 383267 - DNA, 2636 bp, Cannabis indica
gcctgaaccacgtaaaaatctcatgtttgttatttattccgttatttctttcttaagctctaaaaatatttagttgccaaaaatctcggtaaacatgtagttctttagatactcaaactacgtgatggtcttgttcataatagtagccatccttgtagtacccatctttgatatacccatcatcttcctcctcatttttcagcatctcagtcttcttcgatgcagctgtgcttcttgtttaggttactctctcggttgtcagcattgaatgcatctcctcctctcacatcgctcgactgagcatgctctagtggcacaaggtttacatcctccatgatagggtcgaggctaccttgaggagtcttcatagtaactattttttgagtaaacaccattgttacaataggaccatggatttaggtctttctacagctctcagtgaaagcaccaaaatatttaccgacattttcaaaaattaatataataagagcttaagaaatagtaaaatgcaataataaaggagatggagatttttacatggatcaagctttaatgattactagtccacgagtcagtctattagccgttaaaagcgtatttgatgtttttacaattatacaagaaatactaactatgtactctttgtttctcttgaagaagaggaaagcttagagtaatattaccagagcttcgactatcttcattttttatcccccttcgtatggaaatagaagggtatttttaggctaaagggcaggcatggacatgcccaagacccacctaaggtttctgtaaaaagcccaataatgggataaaatacatgcaaagagacctcactattgggccccttcgaaggatttgtgcttgtgtgttgaagaaactagacaataggggaccaccatttgtagaggagtgtccaaaggtttaaccttgaaaaataaatacctagaataaccgtctggtaaaaaaacaaatggggtgcgcgcactaccatgttctgccatagggaataagatctaatcctgtattagaaaaagcataatcatcattgggtgatctgggtttatcctcaaggtagacgtctgcatctcttttgggtggtcagcgtctatgataggccctttgagtacccgttcgggtatcacttgggcaagctttgagtctaggccactccaaatcctagaatggtggcaaaccttccgtgttcaggagggcataatgaagctaagtgaatctttgtgtacccttcggccttgatctgtttctagattcgcggagcctttccgtgatttggcttcatggaagatacttatttgatgactgtatgaactagtacttctcttctcatggcacgtgtttctttggcttggaacggggataacaacatacattagcgtcgttttaatttttattgttattatccttacaaaaaattattattattattattattaaaattaacaccatttaatattgataatgatttttttataagtgatatatgtttgtaatttttaattttatacagaatattacactttagtataaaatttgaattgaatgacaaaaattgaacaaaataattatcacaatagtgctcatataaattgtgttttgctttattgatatttataaattattgtccatacttctatcttttaattattttatacacttaagaattttagatattttttaaataaaaattaaaataatcgaaaatttaatttgatagaaattaaaaaatttaagaatatatgttgcattaattttgcacaaattaaagtaaaagaagtgtctttaagtgaacaccacatccatttctaaataatatttttttaaaatgactcaataaagagtgaaattactaatattttaaaaaataaataaaaaattttaaaaataagaaaaagaaaataaattaaaatgaaactcataaaaaatgacacattactactctaaaaatttgtcactaatattctcttgtatgaatatgaattcaatggattcaaccctctaagtataacctcatatggagcgttattgtcattatgaaaatggttgttctctaacggcctaaccaatctaatttaaagaagcgttatcttgaaacaaataaataacttggatgaaaaacagcctaattagaaatgtaaacaaattgaagagttctttcataagtacaatttactaacaaataaaatgatatgctgaacatgtcaaaaaaaaatgatatgctgaaattaattttttattataatattttagtcaattttcacatttaaaattgcatgaatattttttttaatttattttttatagtattattttttatagttaaaataatatttctataatttttaaatttttttgaaatatttataatattaaaaatagaattcgtaatttatcacgtattaaaaaaaaaactattaataatattataaatatttaataaattaactaaataattgtaataaaaattacaataacactcttcaacttataaatattttgggataattctacaatataccccttaaaagggatgtactgatgtaccctctaatagtttcggcattcaaaaaaaaattagtaattttttttttcatatttatgtacgttatagctattta

SEQ ID NO: 383268 - DNA, 1146 bp, Cannabis indica
tacaacacaagcaagaagctaacaaaggtcaaactcattacccccgagtctactgcaattggcctgccaatgcgatcaagctctgcattaagctcatctatggttttatttattaaagaaatgatacttggtatgcgctgcctgatgacattctccaaatgctaacaaaggagcaaaaagaaaaggactaataagaaagagtggtaggaggaagacaaatttttcgaaaaagtatttacggtaaataatatagaagtatttatttaagataaagacagcatggatagaatatgaccttagacaaaagtttggcaagatactcagatcccatcttatgtgccaagtgtccatactcgggactagtttgaaagtattcacgttctttcctacgagcagccatcatatcaacattcttgttaatgtcagcctgcgaacggttcacaattccaacccatggatgctgcagtctgtatgaccttccttcaagaaccttaaacacatacaataaaaagtaagaaccttatagaccttccaatcagatgaatgagaaaaacaaaaagaatatcttcaacttcgttagaattcagatagagaagcccagaaagaatagaagcagaatatgaactagtcatttgaaaggttaattttttactaggttgaagttcttgtctaatttaattctgcattcaagatgctaatacttacatcaactgcattggttcctttatccataagatcaagttttgttagcactccaaatgttctttcacctgaaacataagttataatggagaaaaattatttcttagcctatacaagaaaaccgatgaacgtaaaataagacacggaagtatcaaactacctgaaggatcaacttctcttgcaagttttattgcgtctgatgtggcaatatcttgatttgcaggagatatagccaatatgatagagttaggctacaaaatggagaatatgaataagtacgaggaagagcaaaagaagactattgttgaaattatgattatgaagaaaaaaaaaattcaattcttctttatatgatcaacagagtggtttaattcctttgaataaaatatatttataagagccaccttcttcaaattcaaactaacaaaatttaaaaagagggag

SEQ ID NO: 383269 - DNA, 1821 bp, Cannabis indica
aatcaaatgcataattaaaactgataatataaataaataatatattttaaaagaagcgctagttacaactttttattgcaaaatctttcttaatctttgtatttgaaaatagatgtcaaaatattttttctaaaataagatagttacaacatcaaactcctataaaattttaaaaaatttcgaataattcaccgtatctaaaaacatgtttgaaatttttaaatatgagtaatgtaaataggagattgttaatgctgctttctacctttaataatttttatttattttttcttaaaaataaaatttaccaaaataataataaaaaaatcatcctattagaaggtctttatttttaaaaaaacagtatttttctaaatttatagttttcaaccaaactaaagaaaaagcaaatgaaatagaaatcatttttccttcccctataatggatggttattaaaagtttttggtttcacataattctatcaaagataaagttagcaaaaagaatggagctttcatttccaatctgggggaaattttgacttagtaaaagaagaaaagaaaaatagtttaggaagagaaactcaaatttataaatgaatgactttctttctttttatagcaacaaaaaaaaaaaaaaccagatagcattaaatgagacactttttataactctcttgcatagattaatttaagagttatatttgaatggtgagttagaacaatgggtgagaagagaagaatgaccaatatcaaaaattatttaaaatttttatttcaaattaggactttcattttgtaaatgtccaagatgatgtgacaaattaatgcataagagataattgaaaagattatcaattatattttcctttacaggccattatatatacatgtacattattattatttgttttaattatatagtccaaggaacatatggaggtggattgctgagacatgtacccactacctcttgacaaattgccattgtgaatgctacaaaatcaatcgttatagtgctctgctctatatgggtgtgtgttataaacagttggtaatcaattatatatataattatgcaataactatgacttgcaaatatatatatatatatatggccttgaaattagataaaagacaatacacaagtcaaatttgtgatcatcgtcataagaatcacttcttgtaatagtagttttataaatactgaagatgaaaaaggtactttcgttttattttttagaatgtacaatattatgaacatgaaaatcgaagagattcgaacatcagaattatactttattatgtttccccttgtcattgattcataaccaaactatatgcttaacaattttagtcgtttgatatttgttcactagtagaatttagcattgcggaatgaaaagaggagggaaaggattgtaattattctgattgaatgaatgaaaatgaatacagagtacaccagtacatataccaacataaactaagctaactagagttagttgaacacactagagttaaaataaactctaactaaaataacagaaaagtaaagaccaactgcctatataatcaagcaggaccaactaacttaacggactaacaaccataactgaaagaggagaaagaaattcttgatacccccctcaagatggactatatatgtcgtatatgaaaaaccgtgtttttgcaaatgtcaattatatataagaaaatataaaacagtatgcgtctgcagaagcagaaactaattctgctacagcaaaacagaacaggcagaatataaactattcgcagaaaaataaataacttgacaca

SEQ ID NO: 383270 - DNA, 1668 bp, Cannabis indica
aactgctctgctcaagaggtcttgaaattcttggttgtttctaaagaagaaaatacatatttcagcaaaggacataatagtgttctatgctgtttttctcgagtgactattttttttttccaattttgttttgcctaatgttgatacttacaatatctttagtactaattactgctaatagaaatgctaaacgctttcttttacatttttccatctcactacatgactttgtactttgtatatgcatccatgtgacatatgtcaattctccgtaaggccaaagattcggtatggcaatctttagtgccagttgcatctcatgcatgcgcctgttcagcatgagtgtccgatgtttaaacctttgggacgaaactattttgcagtcttctgctccataacagcaggatgtttggtggcggatctggttgttttcatggattggctggtgcgagttagtgctcgggttagttaaagctagctgtgtgagattgccatggtttgttggtctgtgctagttttgagtaataacagtacacaggtagatgatatatttaaagataccttaaccaacagaaaaaattcgaatgttgcagcagtaacttacatttgtcgtcttatatcatggcaaatggtgttgattttcgggttaagcctcaattgctagaactcaagataaatgttgatagagcgttgtttgaagctcaagggcaagaaaggtttggctgggttgtaacggaccgttatgggcgtcttgtggtggctcatgcctgctttcaggaaggtgctattgatccagtagtgcctgaggccatcgagatccgagaagcccttagcttgatcaaaatgcgacggtggagttcgtttgtgcttgagaccgattgcctttgtttgtcttcaaacaaatcattttagtttttctatgctttctgcatttaggtgagtattgatgattgtaaaaaactactacattcaaactattcatattagttttgaatttgaatgggagtgaagtttccactaagttaaactgtaaaattgtatggataccattttgtccatcttgatcaattacgctattttttatgagcattattttgaggcatcaaaataagtttgaagaattttcaaaaaagaaaagagagaaaggataaaatttcaagtgtaagtgaactcttttgaagaactagaaaacgccgtgcaagtttgccacgtgtcgtgaaactgcggcagccaatggttttatcatacagtcaacggtggttcatgctacacgtgattctgactcttttgtacctatccacaaaattggcagttaagacgggtagaaattttttgtcagaaattttttttttctattgatgaaaataattataaaattgttaaaaagtattattggtatctagtactattcttaatatcatattgatattagtctaattaattagcaggttacatataattttaaaaaatatcactatttaattatagagtataaaaagtaatggatactactgatgctcaataacaatactcttagtataatataatatataaatttctacaatatcttttaaaataagtgtactgatacgtttttatttaaaacttcttataaaattttaaaaaattcaaaaaaaaaactaaagcgtgtttactaaactgtaattg

SEQ ID NO: 383271 - DNA, 1609 bp, Cannabis indica
ttatacatgtattataatttggattaaaattattagttttacttaaataaatttataaaataaatatatgtatatattttgttaagatgtaattatatttatataggtatactttgttatacggtttttaaaatgtatataattaattacaattttagaggttatttgtatgaataacccaacttgaaacttaatattttataacaaattaaaaattattcttaaataacaattttactctattgattaggcagtagggtttataaatatatgatccgggtctatatattggtaaaagaaaatagtatttgtatgacatcatctgaatctaaacaacatccaccaaggcattaaatgattggacaagattttacgggaatatatattttaatcacgaacaagttgacttgtctcgactttagaaacatttcaagagaaataatgcattgctcaaagtgtgtgttgctttctaaatttctaatataccgccctgcgtgagtttagttctaattaaatttgaccctactagtgcatataatgcaaattcttggactactgtgttaaattgaaatattaatttcattgtttagagcgttgatattatttataacatataattttctcaaacaaaaagtactggtataatttataatttcactcctcaattttaacctttaatttcacttttctctctttgttttcagtaaaacctgatatttaaatatttaattgaaaaacaccaatgaaattaactgctataagaaaaaaaaatagttacagaaaaagatttaaaacaaaaaaaaaattggttttttttttacagctgaacaaaaatggactctttctttttttcctttttcttttttacaataccaattgtgtaaaataaaaataacaaaaaaaaaaatcattgtactatatatctgattgttcaaggaaacaaaatccataagcaattacgaaaacaaaatactatttgttgattgttgtagacgttaagcatattcgaagtctattaatgctaacagatgactagatcaatggttccttaatttgttaaatgtgactagctagacagagtactttaggacaagataataggacagattatctgaatccccaattacacaaaataacaaaaacaaatcaacaaatatatatatgcaagagtcttttgttaattaccaactcaaaaaagttccatcattaaatatccttattagggatataaccacaacagattttgattataaaatctatactaaaaaacaaaaaacgaaaaaaggggaaagaaaaagaaaagggaaaaggaaaaaacataaaacaaacaaacaaaagaaaaagaaaaaggaaaagaaaaattacaacgcatgagagctacacgctagtataccatattgcacaagctcctttctcagaattattaggtccaatatttactctttgcaccatatatgttaatttttaattaagcatggccgtatgaaggtgtagcatttggcggcgttggagctgaagcaatacgccggccacgctcggacctgctgttttcagcaaacttgatgctgttttgatgcaaattcttggacttttcctcctcagtccactc

SEQ ID NO: 383272 - DNA, 1413 bp, Cannabis indica
ctaagaagaatatgcaaaaagaaatatcgtattgcaatattaagataagaaataaagaaaaagatacacatgcaattcgacggagcctgggacctcccaagagagctccaactctatttactaattttcacctgtctacccaccccttcactatttattccctcctcctcctcctcaatgcatctgtactagaatattcctaacagactctagaatcatccctatcatgattatctatgctaacaaactacattgccacctgtcctctaacaatacagccagctttccaacccagtcctaacaggccacagcaaagctaatttgaattgcaactccttatgctgaaacacaacttaaggtttcaattaactaacaagtttacaaattgtctaaaaaaattgtttataagacacattaattagttttattcactgtgtgacaagatattatatatatatatatattatacattttttaatgtcaagactgatggggagagaaaaagtagaagcgaattcagatacttaaacagtgtaaccaacccagaaaaagcaggaacattacataagtggtaggacaacaaaaagaatcacatttgacaaacaagagttgtctcaataatacttgcgaacttctataaaataaaatataaatataataaatgctagacaaaatattcaatttctatcaattaccaggtgcactttgtcagttttggatcctgtagacttacgacgccctccagcttttccccctgaatcagcaggtttggggactgttgcagagaaaagagtctctatctctgatacatcaaattctggagcactaaaacaaaaggaagcaatattactgattaagaagggtagaatttaaacaaacaaggtaaggccggtggatacattggtacttctcaaaggaaaaaaaaaatagaaatatattactaattcataataatagaacgataggacagcaacaggagttgatatacatttgaggatccccatatctttgcaactcttcccacaagcttccttgcaatgctcttgtcaccttgctccagtgcagtggctttaatgaagatcttcgaggtgcagtggcagtagcccccatccccataggacgtggaagcccacgccccctccctaaagataggcctcttgcatcgggaattgctcctttggtgccaggaggaggtggaggaggtgccccacctggaggtctcggtggaggtggaggccctggagcccgacctcctgggggaggaggtggaggtggtgctccacgcattggaggtggcggaggaggtgggcctccactaaatggaggtggtggtggtggtggagccccgcgcattggaggtggtggcggcggtggagccccgcgcattggaggtggtggcggcggtggagcccc

SEQ ID NO: 383273 - DNA, 2037 bp, Cannabis indica
aaaccaatttaatctcctttacattctatcatagcatgctgagaaatagacacataactaatttactatcatttttgtagagttgtgtcacgatcgaaactattaccactagcaaattattctcctaaaattttagacaaggcaggaacatatataatttagtaactgtaagagtgaataattaaagagcacgattacatagtggctagctatattaatgcagtaaagtaaaaagttgatttgtgatctagaagaagatatttatttgactatataaaccttatatatccaagcaagatatgtcaattaattcactctcctcttaaaaatattaatataataataataataattaaggtggaggaacgtctagtaccagtagaggacttgcttgatgcggatgaagcattttgcaccggaactgctgtgactgtcaaccctatcggtactctaacatatcagggtcaaaggtatatatatatactcatttatatacgtatacatatatatctataatattaatgcatcttcccatttttattttattttttagtagtcattaaaatttaaaactataccagttttaattatattagttcatgatcagggttgaatacagaacaggaaaaggagcattaggtcagaaactgtatgaaaggcttgcaggaattcaaactggttttgttgaagacaatatgggatggaccctcaagctcaactgaaataataaaggaatatttgagataatgtgctagatatttcaattttagtttaagcttaaacaaaaataaataaatgaatcattgtgctatatatatatatatatcgaactaataattagtaagtttcgatagcttgtaacagtgaaagaataagcaaagggtattacctacgcttctgaagacctaactaaattattacgtttatgagtctctctatctctatttttttttttttgcgaggaacatttttctattttaattaaagaagaagatcaaaatgtggtattttaatcattacttattatgtatactgtggaagattttaaacatttggttagttagtttaactaacttacctgtcacataccatctaccagttagaaatattggtcattcgatttgacagttaattagtttagtcatttagctcggttcttaattcccactcttttggagacctcactatgtctacataaggtctcgttgcacactcttttaggggacaatctatagagaaaattagataaaaatactatgagtgacgagagggttgttcaagattttggcatgtgtgtttaattgcctactctcattggtgagctattttgtaggtgcaaaacaccattgtttgctcgatctttgtgctcaactgagctactccattgttaaataaagattagccataagatagttggatcctccagagaatattaggtctttaatcaccttaattaacttgtgattgaacctcattacatctttgtctatttgttacagtttgctttttcattttgtcatgttatttttttctgtttaaattgtttgtcatgttatcttggtactactattatttatcaatatataaaagcaaattagttattatttaataaaatcttatccgaaagtatcgaatgtatgtatataatttcaaagtataagatatttttatatgagtattattgatgattgcacatttatacactcattttggtcattaattagatgaattattgttcgtttcttatattttgtatagatttgatatgttttctgtagtgggcaatgttgagcttaaagtgatgaaattataacaaatttggcgtaaactatacatatacgagcataatgctaaaactggaatgcaaacaagttgagaatcataaaaaatgagaaaaaaagtacatatggcgttgtaacactgtgattgaggcgttgtagcactgtgattgagtcccacttggggctagctcaagtggccataggtgggtgtgtgagtgttggaggtcttgggttcgagtcccaggtaaaacatgat

SEQ ID NO: 383274 - DNA, 4856 bp, Cannabis indica
ggagctttaaatttcctattagttgcatcaaatatcatctaattctctatttaatttataaaaaaaaaaccaataaagttagttttctctttttaaaatttcttgtttggtttttagcttcaaaaggtttccactttatgtttttctcatcacaaaaagatatagagatgatgttattgttgctcaactcatgctcaaccctccactaattctactatctgaattttttgtttgttattgttgtttatattgtctttcaaagaaaaaagatatatagatctttcttcttcaaaatatatagtttgaaagttgaaagtactatatatcactttttcttttatttttttaaccaaatcacacacacccagaaaaaagagttgagtaattagttgttgtttttctatataaattcttatgatgataatgattattattaatataaagtcatgacttttttccttttttattttatatataatttttcagggtattggagtggttaataataataataataataataataataataaacccagaatggaattaggttcaaacaacaacaacagctcgaatgatattattattaagagtaatagtaataataatatgttaggatcatcagatcagagaagaaatattacaaggccacaaaaagatcaagctgtgaattgtccaaggtgcaattcaaccaacacaaaattctgttactacaacaattacagcttaactcaaccaagatacttttgcaaaacttgtagaaggtattggactgaaggtggttctttgagaaatgttccagtgggtggaggttcacgcaagaacaaaagatcctcatcatcatcatcaccatcaccattaacaacatcatcaccaccttcttcttcttcttctttacaaacaaaaaaacttcatcatcatcatcatcatcatgatttattaccattaccatttactttccctaatataattactcatcaacaacaacaacaacaacaacaacaacaaaaccccaaaaataaccaaggtcaagatcttaacctcactttcccacctcaaccgtccgatcatcattatcatcatcatcatcatcatgatataaacacgctctcaagatttgtccacgtggatcaaaaccctaatattgacacaacaacaacgacgacaacaacaacaacaacaacgagttcatcagtacaacaacaactctcggctatggagcttttgaagactggtatggcttcaagaggattaatgagctccttcatggccatgccaccggctaataattctgatcataatcataataatgggttttctttgggaggtgagttcaaacctaataataataataataataataattcttcatctcttggttttgatctggatcacgggtacgggcaagaacatcatcaaaccgggttcgggtcgggtcaagatcatatcaatggtgctaggcttttgtttccaaacaatcatcaagatatgaagcaagtttcagcaactacaagtggtagaggagaaagagataataatcaagatcatagtaataataataattctaatggatattggaatggaatgttaggtggtggatcttggtgaaaacgacaacgttttgatggtaactaaatattattgctttgaatcttctctccttctagctcttgaaaaaagaaaaaaactaacaacttaggatacattatgggttctttgtacttttgtttttaatattttgtatttgttttttttttttagttgaattaatgtgtatgtttttgaagctttatttttaggttagcttcaagggtatgtatgtgtgagtgtgtgtggtacttattatttctcaaattttatgatgatgatatatagtttttaatttatttatttatttggtttgatgttaattttgacttaattacagggatctgtgaatggaaattatagagattgttattttcgtaattatatagatgttatttatttatttgatttggaaaaatgaaatgatgaatgatgggtttgaatgcttttagaacaaaagtttgctctttctttttttgctttctttttgagttgcatacaggtcagaagtgtcgggtcttttcagcaccgttttggtctttcagattcttccaccccattaaagcaacctttcatcaaatcaccaaaaacaaataccttatagcatgtgtaaacaaaacaacacactaggtatgacacattcattcttaattctatttaaattaaaatcattattattgagtattagtagtgtctaacaccttctagatatattcttttgtaattagctagtggtattctttaaaaattattacattaagtcatatatggaacttgatatttagttagatcgatagcgatattgatatgtaggagggtgttctaactagtgtcttttagcaatacttctcttaaattaattacacactacaattatatattcttccccctcttctgttttttcttcttcacctcactttttctaatttaagtttcccaaacaccaaaatgaaaaaagagataataaggctagaagatatcaaatttcatgataattaagtatagggtgcttttatggtgtaccctcaattttctttatataatagtgtgcattctctaaagttttgaataaaaataattatgggtatgcaatatttgactgtttaagatttattttacgctgaataaattattttgaaatttttaaaaatttagaagatatcttatatatttacaatattcattgtcatataatgaaataaattaactctaaatatgattaaaacactaaagaagtgcatccatatatttattttcatcatcataggttgccccatatatatagaacaaatatagtataatgtatagtgagttgttgccaaaatgtatttgattttttatatatttgttaacacttactacaccgtataatcaactatatatatatattatcaaatttctttcactaattaaattagtacttttggttatctcaattattcaatagtttacaaaataagttgtatgcagcaatgcataatcatatatttgtatatttgtgatggcatacattaattttaaatttctttttcttagtttggctataaatatctagagttaatatatataattacacccattaatatatatatagtagactagacaacctacaaaaattgttctgccgacgaaaatagtgagatcctattacaaaatatggttccattttattcaataattaccatctccataatcagctgagctccattatattcttttcttatttcataatattaaaaaataaaatagaaaaaaaaatacactctagcttagctactacacttgagtggcattcctttattttcttttttgtctttgaaatgggacccatgcaaacattctcctcgataaccatgctctacactatatatatacattaataataataataataatgagaaaatattctagctccactctcccaaaatattacactcctaacattttttattatattgttttcttgtacgacaatatcttagaaacctagattatctctttaattaattatctttctttatctattaatgttttttttttgtgtgaaaataaaaaatatatattaatttgtctaattagttgtttagcactagctagggttcttcttcttcatctctttctttcaacatagtaataggatgagttcattgatttagcccatatctactaacacatcctttgattgatctctcttcatttttttgtctttttttcctttgctcatacaaattttcaatgattcaatacatatacatatatatataatgtcaaaattgtcaatgatgtgaattatgacgctgaaaaattggaactttaattttatacatatatatataatggtagtgggtattgtgtgttattaaataattctttgggatgcgtggaattgatcaaaggcaaaatatatctattgtcaaaatttacctcattgttatgaaagcaccatatatagctattatatatatttacatagagatagtagctagctagtatataatatatatagcttgctttgatatatacacgtacatatgtacacttatttccccaagatttcttacaattatatactaccaatcataacattcattaaaaaaaatcataacattcattaggcattcattaattagaatattttatctattttatttttatatatatttatagagtttaggggactaggctatagctaattcaaagtgcaaaggaaaaagaaaatcgataattaaaaaaattgttagaagaaataagttgtattaatatttgaaataaatagggtattttgcccaaaaatttgatcactaataggattgtaccttttgaattactattgggaatgttaatttatgagatttatgttagatttcctttaagttctgagtaattagtaattttactccaacaattatgattataaggaacgaaggtagaaagtatatatgagagagagggcaaaatgcaaaaaataaaataaaatttgagggggcattaaataaattttttattacaattttctaattaaaaaaattaaaaataaaaatatttgtgaccccgtgcatatattttaggtaccctttgataaataaaatatgatatagtggttatagtttagatatgaattattaattattacatttaaagttgaattaatggcaatatttaatatcgataatagttgaagggagcatatttttttgaataattagcttttttagtccctgtacttatgacactatactatgatgccccttaatttataagtgtagtta

SEQ ID NO: 383275 - DNA, 2269 bp, Cannabis indica
aaacttcttggcatgttgttagtacttgatatttaaccgatcgactcatgtatattagagataataaaaagatatttaatattttgtaatatattttttttgttgattataaaaatatctctaataaatattttcaaacgctccataatatcaaaaactcaattttagtacgaatcaagattctatgttaaaaagttgtgttatacattgataaattaatttaagtttgacacataaattaattttttatttattaaaaaattaaccatctatatataccgttttttttttaaaatgctgaaattaattgatgtgtcacaatgagattgatttaatacactgtaaaacacaatttttaacaaaatatcttgatccattttcgtacattacattattcaaaatcttcaaacatttgtacatttgaattggccgttcaggcgctttatttttctcaaacgtaatcggcaaatataaaatgacaaataattgcctttaaattatcaataaataaatcaattaattaattcgtcatgtctgtgtgtctaactgtatatgattagttatgagagagggcacaggtgtgaacaaattatcagaaaaatataagttataggtctctaatttcttgaggttgacctagctgtctcaatttgtctagtagtgattacaattaaacaaacatctttctacacatatatatttgaagattcatatatatccatcttctttctttatataaatatatatatataagataaatacaacgcacaacaaaaattcttgctatttttattactattaaagaaagacatagatattcgaatgtttttttttcaaaaacaattgttgagtttagaatagaactatttgctatagttaggagtaagaggacgtttcctagtacgagactcgagaggaccggccggaaagtaatcatttttctgaaatatgatgtctacaaattgattaacaaagcttaattaattattgtacttgtacgtatgtaaccatccaattttaatgtgttctactaaaatttaagtttttgaatctattgaaacagttagcttatattatacaatacatgcatgtaacaaagattacatatatataataaaaaaaaaaaaaaaatacaagacttcactagataagcttacggtcatggtcatatatatcttatggggtggtgtcccagattaattagcactaggtaactaaccaaattaaaaattaaagtggcttaaaaaagtctttattattctaaataaaatatattttttaactagattttctatttattcttcccttgcttttaaaaaagggtccgcactcatacctgctttactttttatgattcacgattattatttttttttggttaaattaaaggtacacttggttgtgtagccatatgttttaaatcacgtaatatatatccaatctatctttaacttttataatatattaaattattaagattaattccaaataataataataaaattgattttttataaaaaggaaaatatactgcttgaaaaaaattaaaatgtgaatatgtaccttttttgttggagacaaccatataaagtacttatgtagaacttaattgataaatgttcaattaaaaattaataatgtatctttcatatatgacaagaagagagacaactttgataaattaagaaagtgtagtacatagagatgagaatatattcagactacattattaatgtcagtggtataactaatttaataatttgaaactagattaatttttttttttaatttgtttgctgagacaaagggtaaccatcaagacaatgaatcttgggagacagaacataatggcccttcgttcatgtatgatgtatccaccaaaatatctaggaggaaatattggtaagattatatttaagattttgtttagaaaaatattaaattttgaatttctgtctcttcaaatgttggatattatcttattaattattattggggccggcggccatgctagcagcctctgattggaatatgatttttttcaaatagaaaatctacaattggaatatgatttaaataagtcacttaaataagtcactttatatctttggctagactttgattagatataagtcgttttgtttgtagtgattcatattttgactctgtatatttttggttaaacaattagtttgttgacaagaaattcttctgcaccgataattatcagtgtgatttagatcatcactctctcaaaaaaaaaaaaaaa

SEQ ID NO: 383276 - DNA, 738 bp, Cannabis indica
atatatatatatatatatgtaaaggcaaccctttaagtacaacccttagtatagttaattatatacaatatataccttaaactcatcatatagctttaagtacaattataaatctcctttttgtttaaagtaattaatcaataatactctctccccttcttttttatatcccactttgtcttccatgtactttggagcttaattgagtgtggtttaccattgcaaagacatatatttgagcatattttgctttcaaatgagaaaaaaaagatatataattaaaagctcttttggcatttatgactttaatttgttttttctaattaattaaaatagttgtggggcggtgtaccctattattattattactaaccaaaaaaaaaggttggcatatcattatttacttatatattttagtgtttaaacaaaatatactagattagcatatcactaatttgtatgtcgttgaagtcaaagtattaaaaaaataataataataataaaaaaaagaaatgtgaaattgatatacctaattaaaggttactttcatttagtcgattcattcgtacgtagaatcattacctttctactcaattagtatggactgtactttagtctataaaacattttcttagttcgaattaatgacacttctttatagcaaataactattgttttgatgaagatgtgtgtatgaaattaatatatatatatatatatatatatatacttaactta

SEQ ID NO: 383277 - DNA, 2547 bp, Cannabis indica
gagcaaaaaacaagtatacatgtaggggtaaatataactatgcgattgattcatgatgataaattacaacattgtcaaaggtgctcaaactactattgagagacattgcacattcatgttcatattcatggtgatgaaaaaaggaaattggaaagtaaacctgagctacatcacgcacaaacttaagggaaagattacttttacaagagagatcaaagctccaatcgcagccttggtagttcgtttcattagttttctgttggtgagaaaaatccttgtagagaacatctaaataaaaagtaaaacatgtcttaagccagtaatcaacataaggagaagaaaccttactaaatgaagaggattaaatggttacctctagctttcttgccaatgtcaaagtataaaccggggcagtagctcattttgtttaaaactaatcaactaatctgttatttttttatcagtcttgattggtattaagtaaactaaaaaatatttataagacaatggtatgaaaaaaccaaagaggaagtttccttgtgtacaaacaaagggagcatagtagaaaaatgaaacttccaacaccctttttgaggttttagttttggtgatgcaaacatataatagtacagccactcctgtcaacagtttatatgtattgcttcacaaaacagcatattccttaacaaagaaagcatcaatggagtttgtgctaaaagagtttttatagagttttgattaagtcataatcattgagtaaaacttcattaatgtggtaataaataatagtcaattctcttaatggtacggtattgaatctggaatctacaagagatgtaatgtaactactattgggtattactatagatgactttgtttaacaaactagttacaaagtcataatgttaacactttaacacaatttagctagacacaagggctttggaacctttggtcacttatttgtataatcaactgaatattttctcaagaggggtcaaaagtcagaccaagtttcctgaagttaacttgttgttgatggggctacttgatcagcttctttgatcagtttcaaaatctcttccttcttggccaccaaggcctgaatcttagtttcgatcttttcgagcttttgtttgagtttggcgccatccttgttgtcttcaggattctttttcttcttctccttcttatctttcttcttcttctcttctccttcctcgtgtttctctttcttctcttctactttctcatgtttctctttcttctcttctagtattttctcatgtttctcttctttttctttatgttctttctcaacttcaactttctcttcatgtactttttcagcagagtctcccattttcgaaactttgtacctgtttttgagttataatttagattttctctgcaaaaaagaaaaaaataggttaagtaatttagaagaaagagctacatgaacatgtactaacaaataaggatacaaatactactattgtctaggattgttgtacatattaattttgtcatgaacagtaatacaatgtttgtttttgtttttgtttttcagcttcatttttaacaattattacatctaactttggtttttataggagtaaatttctcattcactaagtgccaatttcttttttattcgtcaaagtaatatttttacaattttcagagtagtaatactaataaatctaaaataaaaaattaatgaataagcgtaagtgtaaaaaaattggaagtgaaattaatagtttatcatgtgaaaaaatgcatatattaataataacagaaataaaagaaagaatagaagaaaagagaagagaaataatacctggaatgttgtagtgggaatgaaatgattcgatgaggaagagtagagaaccctttcttataatcactaattgactattatcactattggatatcatacaattaccaaccgaaaaacatgtttatcctcatcttattctctacaaactcaactacttcatatctacctttcaaattctttctaatttaaaaaattaattagaagccacataaattgatttggaataaaaaaaaaacaccaattaaggacatttggacaaagtaacttatactttttttaatagtttgattattcttttttacgcatatatatggagaaattcttaacgttatatttatttatttattgaagtaaaaagttcgaaaatatgcggtgttgatcttatgctcctaattctatttaaatatgtttaagtggacatttaagatgggtgccttcactcctaaaacatttttgtttagcaaaatttatgtttttttactgtatttatgctttaataataattgaccatcaacttaattaaaatatatactttttgttttgcatagaaatggtttcaaatgggttaggcttttttttttttttttttttgtcgtcttagaactttcaaattggtaggttaatgttctggattggctagttttaagtgtgtgtttgtgtttttcttcgaaacctaagaggttgtttggcttaataacttaaaa

SEQ ID NO: 383278 - DNA, 917 bp, Cannabis indica
gtgaaataatcccattaaataatcgagtgagattatatttgttaaattttcggagatgttctctttatttcttatttgaaaactaatagaattctcttgtacacaccttctttagcattttatttattcaaaaagaaaaacaagtacatatacaaatttcacttcgatacatttgaagacaacaaaagacacaagttaggcacaccacacatggaggagaaagaggagaaagaaaaaaaaataaagaaaatgatattttataggaaaaaaaaaaggaatataaaaagagaaacaaaaatggcataatatcatctctaaatgagaacaattaaatattaatgaaatatatattttgtagtattgatacaaaatcaaggaattactgatgaagtatgtgtagttgtaagtttgggtttggaatgtagtttgaggatggacaagaccgtaataactagcaacaaaataaggccaatgaaggaagcaatgagggcaccttctccacgctcacaatatgtcccaaatttgtcacaaattttgttccaccttgcatgagaatttccgtttttacctaactctgccatgaaggtagctgcaccgtctcccgcggctgctaatgccactatcaactgtacccataatcatatgccatgaattattaaataatgaattacacattttattaaggcaaattaagatttttttcctcacgaacttttacattctattgagattgttagatttaaggatttttgtttaacttcattcaattacggtttcggtaattgtttatgtgctaaaccatgctctccagacttttatatctaccaaatatgtccctctaactttgatatgtactaaatcatgcctcttaaatttttatccatgttagaatttttttactaaaattggataaaagt

SEQ ID NO: 383279 - DNA, 2634 bp, Cannabis indica
cagaataagaacattccagcttggaataagctactctccaagatttctctctcttcgattgcgaatggaaacaagaaccgaagtacctatgctctctcatggagaagagccttccgaatatatcaagatgctgcagaagcctgtaacaaccatggaggatctcctactcaaagcctcaaatctaacagtgttagatgaagatggctgggaaatcaacaaggatggaggagccgttgctgggggacactgtgcaaaggcaaggctttgctcaaatcggccgatgagtcgtaatctgctgaagacgatcctaggtcgtgtttggggaattgctgataacaaatggggagtggaaattaaatacagcactaaagattcaagtttcttggtctattctttcaaatcctctcaagatttgaatagaattttaagtaaaaacccctggtttcttaatcatgggacattgattcttgcaaggatggagtctttgcctcaagattggggacaggagctgctgagatttccaataagtgggtgtgttcttcatttgccttctcgatctattactcaaagaaatttagttcgtttggcaagtctagcaggggaagtcattgagatccaggcagcagatattccacgaattatcaccagagacttcttcactttcaaagtatggtgtgacatatcaaaaccactttttcccggcctgcttttcccttcggaaggaaggaaaatttggcttccattcaggtatgatcgtctccctttcatgtgttttaattgtggttttttagggcatgatactcgggtttgtgcagaaactcccaaaatgtcagatgatggtcttggaaattggaagcaaagctttggtccatggctcaaagtggatgatagaaatgagccaagatctaccgaaatctaatgtccctaaaattcctataatgaaggcgaatctccctgttcatttggaaaatttggtctctacttctggtttaccagaattctgggttggagtctaagtaataatcttagattccaacgatgaataatggaaactctgtgaacgatgagatggaattggtgtctggatcgattaagactaataaagatactctgaatgttggaatgggacaagaggaagggaaacaatgaaggctgggtatataagtggtaaaagagatggctcttggagggaagtgagtgatcctttgaatggttctaccaatattagattcggcaactgattttaatatgctacagatggagagaggaaaaactggttctgagctaaataatgttaccttagtggatgttcctataagttatgtcgatagcttggacaagtttggtaaggccgaaggttcttcaaaaaggagaagggtgattccgaagagaacaaaaactaaagggaaagctggacagattgagactactcaagtagatatggtgaaggaaaatgagggtacttcttcaaggagaatttctactgaaatggatttgatccttgacactactatggaagcggcgaacctagttgaactaggtcgccgagagccatgatagtcatgttttggaatgtccaaggtcttgggaacccttggacattaaacacattgaaatcccatgtcaaagatcatcatcccgggatgatatttttgtccgaaactcgtctcaacagcagtggtatggagtttattcgtgttcaattggggtttgctggttgttttacggtcgatgctcgcggtaagagtggggggttggcccttctttggtccaatgaattttcggtccaaattaaatcttttactatctctcacattgatgcattggttgagaatgaattgggttttatttggcggttcactggattttatgggagcccggatccaggtggaagattggagagttggaaattattgtctcgtctcaagaatatgttcacctatgcgtggatttgtgggggcgatttcaacgaaattttgaataaaaggaaaaaagggaggaggtccgaaggctgaataccttatgaagaattttagacaagccatttcgcaatgtcaacttcgggaaatagtttctcctgggaatgaattcacttggtgcaatgggaggaactctaatctgatttttgagaaacttgaccgtgttatgtgtaattcgggatggatgaagaaattcaagtctaataaggtcactcctctcaaatggtggaactctgatcacaggccgattcttttagaagctcatcttgaagagaaggggagtctatttaggaagaaatggggctctagattccattatgagcatgcgtgggctgatatcgaagattgtcaaaatatagtgaatgaagtttgggggaataaactggttgggagaccgatcgatacactcactagtttaatctctaattgtgggaaaaggttcaatgaatggaatatcaaatacaagaaagacctttttgcaagatctaaagaattaaaagataagattgacttcctttctaattcaacaaatatggtggattggatggttcgtcaaactttggaaaaagatcttaatggtgtagaagaaaaacgagagatgtattggagacaacgaagtcgagctctttggttgaaacatggtgatcgaaatacg

SEQ ID NO: 383280 - DNA, 1996 bp, Cannabis indica
gaagaaaatgattacataaattatctcattaactgaattggtttttcaactctaaaaaagatagattaaaaacaacagaagaagttgtcacttctttttttgtttcttttcaaaaaataataatatatataatgcattattcctatttccaaaggattatactacatatattgcttctactaatccaaaaggttcacagtacaacatccatacactacgtagtctctctaccatttcttttcttaccaagacttggaataaactatatatgcagctttcttattctttaatttcaaagctttaatttgaaaagaaaaacagctttctctaatattttcctttttctttttaaacattaaaagctgtcttagtgatccaactctcaaaaagcctaattaaatggtatgtatatattttcctgttggctcataaatataacatttctttatttataacaaattaatccaacaatacggccttaaagtgacacgtgtcattaatttgataagatatcaaaagataaagatactttggacaaaaaaaaataaattaaagataacaataatattgtttggttataatatttaaatcaaactcacaaaactttcttataattgatgattaagcttttttagggtgacaactcactcccaagcaataaataaagcctggttggcaagtccatccccctgtggctttgccggatgttttccggcaactaattgagtctgtctttgactctcaataccaatactactctcctctttcgaaccacttacattaaaatacaacttaacaaatccacgtctctcttctaaaccctaccctttcatatccctatattacacatcaaatccttgtttggtgcttgtaattattaagtgaatatccctatcaatatatagctaggttttatttgggtcacaagctatatgtgacacacttgggcccacatcagattttggtgaatcaaaaaaatttcgtttgagatagtgactaccataattatttttcatggcaagtgatatatgtatttatgggttttggagtggagacaatactaaattttattggatgaggctatatttgcactaagttatagtatatgtagtggcttggattaatagtttttagtctagtttatggccggttagctccgataacaagtttaaatatggctagctatatttgatgttgattataaaatgactaaattgtttaattaagagtatagttcctataaccttgatatgcgtatatgcataaatatatatatatatatatatatatacaaatatacataatacatatttatacgttcttgctacatttgtccaactatagtatattaagataaaatttacaaagttagccttaattagtatgaacactttataggacacctttatataatctacatgataatgttcaacatatatgttttaaaattgtgtcatacctatttatctattataaggctacgcaattgtgtgcgttaatttagatgaaattcatatgaatttttatttttttttttattttttttatgaataaagtgaatttcagtgctcaaaacacacacatttatacaaccaaatatcattctccaagtagaagaatctaaaaaacaataaactttacaaactttacaatgcttctaataaccattctttatcactaattgacgctttctttggcagtgtacaaaatattttcctctttcacacatttttaactttgcacactatactatccactacaacaaattaatttattaggggcgacaaaagtcgcccctaaaacaactataaatcgcccctaatgtattttagaggcgacatgtcgcccctaataagtcgcctctgaaagtttgcgcctaaaagtaccattaggggcgacaaaaaagtcgcctgacaattggggcgacactgtcgcccctaacgagaaaacacgaattcctgtttttgacttttagaggcgacaatgtcgcccctaa

SEQ ID NO: 383281 - DNA, 5113 bp, Cannabis indica
tatcatagatgccaacatgaaagaattggcaacaactgggtttatgtcgaatcggggagacaggtaaccttgatggtttgcaagattctaattagaagactaatagtgcaaagttttatgtagcctgacgagcattaaaaaatgattagaaattttatgcagattgtgtgttcctttcttgttcgagatatgggaattgattggcgaatgggagctgaatggtttgagacatgccttttggattatgatccatgctctaattatggaaattggacctatggggcaggtatgtaccttaacttcacatatatttctgttgagaaaattctttgttcatatttttgaatcattcatgtgtgtctgcaaaagtactagattgggttcctgaatatatggggggatctttttcatgaatatgtttttatgaatgctcgcctaacatcatacaacgttagttgaaacttgaaattgtctacactttttatttcaaagaacaaacatgttttgttttaagatgaggcatactaaaatgtcaaaaaagctctccattaaatgtcaaatacaaatctacattgttgttgagaaactcagaatctttttacttcatatttctttgataaagacaatcgtccaacttaattatcaagcgcaatccataatataaccttggaaagttccaaacatttatactgcattttctcatggtgtacttttgtaacataattgaatgcatattctaaaacatgcattttaattttaggagttggaaatgatcccagagaagatcgttacttcagcatccccaaacaagtaagtctcttatgctttagttttgaaataataattggtgtgcttttagcatttgaaaagataagctagaaaatgaaatttgtggcttaattaaatgagaagagattgaaacatcttttactcttaatttatgtttaggcgcagacatatgatcctgaaggtgagtatgcagcgtattggttgccacaattgcaatcactcccaaaagataaaagaaactttcctggaaaattatacattgagcaaattgtacctctcaagtttgggagtactgctactaccaggaaccaaggtcgatacatggcctcagcaagaaaagggaatttgggacatagaggacagagaagataaattttgaaggatcaataattatattgctattttttattttattttttcattacttgatttatcataacactctgagtttctatttatattaggtcacatattcatgtatgtaatgctaaatctcagaaacactgaattagggtgtgtttagtaccccgagctggatcatcttttatctttagagggacatgatattttcctatttaggattgcaccttgataaagttgtaaaaaacagagaaataggactacaatattctgtcaatgtattactgcattttaatccaatttcattaacagaactgttgaatgattattagttagttctttaattatattaaataattagctaatttgtggttaaagtaccagttgttttgttattatagcacttaagtaccaaactttttttgatagaagtcccaaacttttaatataaaataaataaataaattaaaaaaaaaaaaagaagtattttttctaccacttctctctcctttctttgaggtgagtgttggtagttgttttttccatttgtttcttctcttcatcttcttcaatggatcaagaggatggggatgatatcccccatatgcaattgaaactcatcgaccaaatggaaggtgcggaaagtgtggtgaaaaccttagttaggtaagttttgacttccaagtgcacaagatcatttggtcgcaatggttaacatgttttggaaacaaaaatgtggggaaaattcagaatttattctgatttggtgtgagtcgaaaaacaagactggtgtttccagctagtctgtggcttattaataacaatattactcttattgcaaaaccggttggtattggggatttcaaaaaacttgagtttgaaatagcctttctttggcttcaattccataatctacccatttttttgtatgcccaagtattatggccataagattggaggcttgattggaattgttgagcactatcttgagctcatccgatatgaatcaagaacacagttacaaaatgtatacagtaagatacagactggttatcttagagtagtgagcatatctcttccacacagtgatacactctcaaaaattctctttctctacaacaacagtatgtggcatccaatattgattgtatcgacaacagtgtgaatagaaaattaagatgtactaatagcaacactctttatggtgatatacacaaattacaaattatacataaatttgagtgtgtgcatgaatcattactcatactcttaatactttgatatttacattaataatataaccctcaaaattgtttctaggtctaatgttttgaatagtatatgagaaattaagctttattaaattgtaatcgaaacgggtataattgtatttctttatttttcattggttttttagaatgaaaatgataatttcactagaatacaaagggtatccaatatagtttatgtcagatattgctgctagctaacaataacttgaagatttttagatgataaaagagaaaaagaacaatgcaatgaaaagggggattgaaactttgtccaacatttctcattcgttatatttgtttattatgtttgggatcttatcaaaataaggcatctgtttatctattgaagcttaatggttataagcgaagatggatatggttgtttaaaccgatacaatgtatctaaatgtcttcgttatcagcacagatgtcatttaagaaactcctgatgcattctcgccgttgcagggcactttgttacagcgacaaactggtcgaccagaagcttcccagccattgaagccacgttcaagaaccatgacattttttataccagcatcatccttcacgtcctccaaataattcactaacttcctagcacaacttgggccacgaacctacaacattaccaacaaactctaggtaagaatgattgttggtcagtcaaaatcaattatttcatataactttccaaaatgcttgatggtttgccttttgggattatttcaaaaaaaaaacacaacaacaaatacggtagtatgaaattttaaatattttacggtcctttaatatattttatgctattttgttgttagttttttgttatttgcatattattttttttatattgttttgatactgttagaatgttattatcctattattttcatatggtttttttgttatttttatgaatacggtagaaatgtaacaaaaaaactttaaacttgaatgtgtaagaaatttaccaaaaatagtagtttatataaatttcccgttgcctttcgacaccttatagaacaagttagacatggatttagatcgaattattataagaaactttgaaatatatcaatctaaagtataaccactaattatgaggcttaggatacgacagaatactatagcagctagtctatgatctgattacttttagtatatcaagcacaatcatcacataaatatattagagttttctaccaaagcaacttacataactttgatctttgaatccaggacatcccgggtttgataaccattcaggaaaaattcagtcataaacaatcaagatttataccataatacagcatattgcaacttgacttttccaataaaggggctctaacaacacagttagccctttgtccaaaggcagtttgaaccacacattcttttctcacatacacttagcctaaccagtctagtagcctcaagtagccaattcatgaaaatttgacaattctttcagatgttatgagagaatgaggcttttgatttcaatgtgtcaacggctaatgcctaagaatagagtttgataaaaaataattgcaaactattgaactcttgtccaaaacttattagaatatcaacccctatatttttttcacgaagggtagttcaattacaagtagatcaattagaaattgaattgaaatagtaactttttgggacatattgaactctatatgaaaagcaaagaaccaattttgatgactaatcattaactaagataaaaggatgaattgaaaactctagagttcaatcaaacaaaggaatacccattagattaaaatcaacgaataaaaagaaaaacctggcttagagcacaatggaagacaagggtatctttgcctttgacttgctgaacgagattggagatcttatcagaaaaggagtcactggcgtagtggagagacccagctatatggccatcgtaacttctttcatcatccctaaattacagactaaaatcaattatttgataaatttacaaaatatatatatgaagtatatgtatatataaggcttaccggacatctatgatggctatgtttgggcgacgtttgagtgagagaagctgggagcctgttatgtatgagatgctcctagccattcttcttgttcttgcccttctcttctctcagcctatcagattatataaatttatattataggaaaattctttttaagagaaaatttgataaaccatgctaaacaattaattatgtgtttaattaaactcaaatattacacatagtaaatttgaattttcttctaaagttacttttttttttttaattctctcattttctctcccctctttctctctcccattttctcagttctttcttctcaccaccgcaccaaacccaccctctaggatcggtgaccactcgaaccacccctttcatttgaaccactcgacccacggtgacacttgacccacggcaacactcgacccaggagaccatctcgacccacagtgacaaatgagacccaagcaacaaacgagacccacaagactcacttgaaccccaacgacccacgagacctactcaaactagcctctgatcgctgtccccgccacggtccactacacccactcgaacaatgtttgtttttttttaaaaaaaaaatctttaatttctcctttaaattcacaatctgtgatt

SEQ ID NO: 383282 - DNA, 1563 bp, Cannabis indica
atttatttttattttttattggatcatctttttaaatctagatcaaagttacgcagaacccacatagaggataaacaataaaaagaaaatctttgaatgaatcagagagtaatcaaatacaaaagaaaaagctatgaaactatcaactttcataaacccaatgcaaaagatatttttccagcatctaagttcttctctctccttgttcaatcccaaacaaacaaataattccataaaggggagaggcagagaactgagatagaagaaacccagttcagattaactcaaaagtcaaaattaatcaactgaaattctaaaactcgctgcaaactatcaaaattcaaccaaagaaacaaactaataagaacataaaactgcagaacattcatcaccatcaatcaaaaccgagaacaatacctaaaaatataaagagaaaagaagaaaacccatttaaactatcaatcaataaaggaagaaacgaatccaaaacagaacaacagctggaaacaatctaagttctccataaacaagcgattataaattcagcataatattactaaaatggtaaaccaaaagaaagaagataatatgaaaaagtgaaattgagtggtgtacctaccccgcgaagtgaagagaggagaatggtgtgaataaaaggtagcttggatttcagagaagttccatggatgcaaatcattgaattgagagcggtgtatgaatttcagagaagagagagagagaagcacagaactttccaacttttattattttaatttattaatttaaagaagaaagagaataagaattggccactcttccatgcaaaagaggcatatatcagtatcactgagtctgcgtggactgtggaccctactttttacttctacatgttagtttccgtacgcgtgtgtgctacgcgcttcatctctttgtttaagaaaagattcttacatatcagtctgaggagttctcaaatggttactggtgttagcaagagaaactgttatttgacggctgagctgatctgtcacttcaacgtattatttatttatttccaatcttttaattttatgacaagtgttagtaatcgattatcgtggtatatgatccatttcaatatcatgttttatactttttaatatttaataaataataggataaatagttataattataaggagacgattttgtcacggaatgtattttgtggtacattagatgagtcttagggtacattagatgggtccaatagtacattagatgggtcttagatgggtcttacggtacgttactattttttaaccttaattatccctagatcaaccccagccctcaaatcaaataactcccccatctaacggttatcgtacatcacggaatacattccgtgaaagtacattacgggacaaaatcgtgtccctataattatataagaaccaaaattttaagtttataaataatgtaaatttaatatttatttagtattagttaatttcaaacgttcttttgataaatttaaaatgaaatttataccgacaaaattagaaaaaaattatagtttta

SEQ ID NO: 383283 - DNA, 3130 bp, Cannabis indica
atttaaacccttttattaagcatgtaggggttggagatcgtgtgccacactttagtgatcacgtgacccccctaagtgcatcttctccttcattctacacttcatcatctttgacgttgcatggttccatgcatggaattgatcttgttggtttcaatgccaaggttggtgaacgaccaccaattctgggagttaagcagtgagttttgccaagtttagtgaaaaaataaggggtagtttcagtgaagaataagcatgataagactttgtagataggtcagtttttggaggtgatagtcaatggtcgagggagcaaaaaaaatttgggctttgatggttttgctcctacttcctcggctatgaaggtggtgaagagcagggggatgggggatgtttgtatgaggttttgagtaatgttgatgttgttatatagcccaaaactaatgtcaaaactccaattgataatgagggtagtgatgccaacgagatgaagaatggttttatggtgagttctagtggcttggaggtgtctggattactgggccgccaatcattatgaatgtgttggcttggaacattcaagatgtgagtaatgataggatgttccagactctctgcactaatgtttagaagttaaacttgacatttttttttatcgataaccattggtagtgttgagaaatgaagcttatttggattcatttggggtttgtgggaaagttggtggttgggaaagttgaaagaagtggtggacgttgtcttctttggatggataacatcgatgtaatgctcttaaactttttgggaggtcatattgatgtgttaattcgaatcttaggctatattcctggacattttacgagcgtctatggtcaacctgacttctctcttcatcactttttttgggctcttctttgtcaaattgctcataacaattcgtatcccttgggtttgtcaaggagattgaaataaaattttgtctcatttggggaaagaaggtggctcgttgcgatatcaatatttgataaataattttaggaaagttgaaagattgtttttgactgacatggggttcgagggaccttagtttatttggagtaataaacactgtgatttgacttttgtcctagaatagttggaccgttttgtgtgcaatgactcttagatgaatttttttccagtatcgtcagttactcatcttacttttactgggtccgatcataggcctatatggctctctacttctcaaaaacctgatgggaacatggtaaaattccatttgagattccactttgaaaataattgggctgttaaaagtgattgtgaagctattattgagcatggatggaagccaaaaagtggggatcctctttgtaatgttcaacttaatactagaacagtggctaggaagttgaaaagctagaacaagaaaatttattgaagacataagcttgctatttataaaaagttaaaagaactcaatatacttgatgcaaattttgaccaagtgtcttgtggaaagcttagaaaattaaaaaagagcttgatgttctttatgaaaaagatgaaaaatattggacttctcgctctaaagaaagttagttaaagcttggtgacaagaacagtgcttattttcacaagtatgcctcgggtaggaagactataaatggtatttccatgatgtttgattactgatattttcaaaaaataaattataataaactagaactgaagaaagaaataaaacatgcataaggtttttacgtggttggagcgttaacacgccttattccatgagtcgattttattgtgtatttgaggtagaaaatcctttgagaatacaatgagcatacattctcagttttttcccgagtacatgttgcaagagaatttaacccctaatctaaaggatttaatgggtatttatagtattataattatacttagtttccccttgttctctctaatgaggagtttacatgaaaatacataaggttgggttgtcctcgtgaagcccaacccataggaggatagatgtgctaactagattgataggatatggttaaggtgtcaaaattgtgtcctataatggtgggcaattaaatatgaattaattgcttggtcttcatttaggtagtttccctttttagcttaatgatcttttgtcgagatttgaggaatatttaattccttattctgtgtgcttgaataaaaagggaaatcagaccagtcttccaggaacatgcagtttggctctccgacatcacggtaatagaagtgcttccagatacaggttgtccttggcagaagctcatttggtcatggagcatagctactttcctgggaggtcttgtctaacttgggcttgacccaattatcttctttgagcccactagtgggctttagatgctaacttagaatccacgtgtcccttaccgaaaatacaaataacatttattcctaagcttctgcatatggtggaagcttaccctaatccatatgagtggacacgtggaggtttaaaagtaatactgattacattctaggtgttaattgatcatggaaggtatacttccgttttcaatatttgtaggttaacgtggctatcatctattggtggaagaacacgtttgctggggaattacaaagaattttatgaattttagcaagtttttggaaggaattacaaagcaagatcaagggcttccattcaacaaccgatatttccactcaggtcggccgatatacttgattacgaaactaaggtaaaattagtataaaaagatatacatatgtgcatgtagtatacatgttagtgttaggctttatgccctaaataaaactctatttcaatgtattctctatcatttaaatatcaataaagagacagaagtattttcatcacttatttaatgtgtcattcggttcatgttatcatttatatgtttatttgatttataaattcatccaaatccttatcacatttacgttcttgattattgtttcgtcaacacagtggaaagtaatcaagattgtgtgattaaatatatattcctagatttatcagtacactgtgtttaactgatatgataatctacaacatagtttacttgcaccttggacaagtgct

SEQ ID NO: 383284 - DNA, 1804 bp, Cannabis indica
attaattccgaaaataaatttaaaaagaaatgattatcattacattgaatattattaattttaaaactatgataataaaaaaaaactaaaaactaaaatagaattaacatacgtgacaagtcacgtaacatctatctaatatatatatacatacaatttttctctttgatgtttctaaataatgtaacgtattatatcatgctgccgtgacactatgacaacattaatattggttattatgtgtaattctcattgattaacactaaacttaattagttatcaattactaatatacaataatattaaaggggaactagttatattttcctcacggtataattaacatcatgacttattaattagctcaaaaaaataagaaacaacttttgtaagaaccacaaaaaaaatttaaaatcttaataatttaataataattgtgacaaactttaactgtacacataattgtctataaaatgacgtgtaattaattttaatcacataattaaaattgatttgattaattatcatatatttatctataataaaaattgaaaaagtgtgtaaaattatatctttaatattactcgagatttattaagatatgaagtccaaactataagattcttcctccattattcggactattaaaatggcgttgagaaatcgatgtatatatgctttaggtaaaacactttaatggaattttaatttgttacacagaaaaacaaaagaaaaaaaaactagtggatttaattaagacaataaggaataattaatctcaccattacaaattatatatacatatatatatttttaatgtactgcccattaatttaatttagtaaatttagttgtacgctggaaattaagacaatacagaaactcaaattttaatgcatataaatataaatatacaactataaaaataaacgagatgtatttattaatctccgagtaatagttgaaaaaaaaaatgttcagattgtaataaaatgtcaaatattccatatatatttatatagagtgagtgatggcatcaacttataacagcttactagaataacgtctctagaagcatatggaaaagacaaagacaatataccagatattgaaactctatgaataagattaagaagttagtggggaggacttccttttggtaggtgaccaaatgaccaacgcaagaaaaagaatgccaaggaaaattgtggactttaatttatatctattttaatagaggaaacaaattgcgttttgcgtgcgattgtattattttttagtgataattaaattataaaattatattaaattttaatattttttaaatgggatattggcggctaaactacctgaaaatttacagtttgtaacagttaaccacaaaaactgaaattttggcgatataactacttaaatcctggtttcgttttgctctgcacctgtaaagaccgcttagcttatatttgaaaattagtagataattagggtttaattatgaaaattagttattaattctaaattattaatttatgatgatttatttgaattcagaatgcattttatatgttatatgtagaaattttataattttatatgttttgtgcccgacaacattggaacgcggtgtatggcttagtataatcatatcttagtattttagtatagcgggtggtatagttagacattgggaatgtcgagagtagtcgggattttagaatttcccaaattaccccttagtgatctttagtggctattagtatggaagggcaaaaattgtcattttgccaagccttagtttgtcttt

SEQ ID NO: 383285 - DNA, 3452 bp, Cannabis indica
atttttctgaaaagggcttttgagctgtaaagagagatttgttgcggtaattccaaattaatggtccacataataccgaaaaaatacaggcaaatcatccttatttaacaattcaaaccttcttaaaagaaattccttggtgtgacaacgtttattcttattgtaaaagctaaaaaacctagtgttctttaaacacttaccagctctggaacactcaaggagtgaatgagagttagagtcaatcttatgagcacaaagagagcaatagggattatcaagcaccttcttatagaaatgattgtgacttgaaggaagaaggtgattaaaggccttccaaaaaaaatgcttgatctttgggggaattttcaatgaccaaacagctgtccatcaaggtttaaggaggtttggattgaaagaactaggagaaaattgaagagagttttccaggtgataagctgaacaacggtaagaataccaaaaggatgatgtccccagatgagataatccttcttagtcgggtcaatagggactttaagcacagaattaaccacatcatcagtaaaaaaaatgagttataagcttacttaaatcccaacttccatcctccctgttaaagtaagagacaatattcataggaggagacgtgtcatttttgaaagagagaaatttatggcaaggaatccatttagggctaaggatctggatagactcgccatcccccactttcgagacaaaacccttacaaagaaggtccctagcccagagaagggttctccatgaaaaggaatgataatgacctaaagatgcacgaagaaagtcattgttttggaaatattgggctagctttatgtagataagcaacaagggaatcagagttagtaaaaatccaccaagcttgtttagcaagcatagcttagttatggtgagcaataactcgaaaatctagaccccaaaaaaattttgatttgcacaaaagagtctattttttccaatgaattctatactagttgtttctcataaacatccactagaaattagccataagcttttcaaagtgtttacaatatagataaaggaagcctagtaagacataacatatgaaggaataacttggataaccgctttaaggaaaatctctttaccaactctagagaaaagcttactgttccaaacaaataacttactgctagctttttgaagcagaaaaagacaggaatcttttttggaatgaagaggcactaaagaacacctaggtatttattaatgaaaggtttatattcatggcctaagacctgaagaaaagaggctttatcctaagagctagtattaggagaaaaccaacagaagacttagaaaagttgatagattagccagggctttattatagattctaaggatatcctgatgcccattaatagaagtgaaaagtaaagctatcatatgcaaaaagaagatggaaaatggaaagagtagaacgataaatagagatacccttgaaatcatttatatgagtttcagtatgaatgacagtatagagaccttcaactactagcagaaagaggtaaggagataaatgatcaccttgcttaatgcctctactagactcttaatacgatttttaaaattattcttattattactccaagtcctcatgaactgaatataaatgaacattgccattaacactactataagtagtccaactatctttaatgagtttggaaaagtcaggctccgtaagccaataattctcgaagaaaaatctattattatgaccattaatatggtgattagtattatagacaagcttaatagccttatgattcttaccaagaaagagagatgaaataaattggcagcaagaaacatgtcattccatgccttattaagaatactccagtcaagtctttcaagaacattaccatacttcaaagtcaaatgattatcgtcaaaaggtaagggagacaaattaaatttattaaaaaaaatttaaaaattatagatagcataagaaaggggaaaactagtactattatgatcattaaagcccaaataaacattaaaatcccttataattaaccaatggaaaatgggagcaacatgaaataagtgattcaataaaatccaagagttactttaactactaagataaggggaaccataaaaatacaataagtggtagattacataatcattaatagagacataaagttaatatgatacatagagtacgataagatattagcattaatatcatcatttcaaaaaagaaataaatcattccctaaactatttctaggaacctcaaaagcattatcaaaagacaatctagccttaaacatactactagaattagcagtcagcttggtccccattacaaaaattatttgaggttgatgttgcttaaccagaagggagtggttacggaatgcttagggactacctaacatacaagcattccagctgatgatgttcattttgcctaacgaggttgttgaacaacactcgactggtcatcagaatcagacaaagagcaaaccaaagaaaactcatagttggagcttaagctcttttcagcgtacgtctatagaagagcccacttgacaatttttcctagagaaagatctctcggttctagaaatagtcccagaagtagtttaagtatgggacttggacctacagtgagatgaaattttaggcacctcagtatgcatgagacctttacctttacatgtagaggaaacaacagctgaaaccatgataggactggaatcaacagaacaaggaatggatctcataataggcaagttagaaccaggaaagttattggttaaagaggcttggggaggggtagtactcgactgtaatgcccgtatttaaaaactttttaaactgaaaaatttattttattatctttatatagtcttatgggttgagatcctgaattttaaaacacagttgaattacacttactaatacaaaatctcatagtatattatttttctttacaaacgacatgcaactataaaatataactcaaaatgttgaaagaccaaaaccctccaagctgcactgccacgatatgtataatcactgccaagctccaactcactgctcatccagcttagctttccccttaccaacacgaggtaacaaactgataagtggacagactcaataagatatgcttaaatatatgaaagcaatgtattccgactttatgcttaagtcgtcccaagcccaaacaccgagctcaccaattagttaagaacgttcttaatggaagttcgaccctataccatatgccctaaagtaccaactccatactcgtattggtagggtctttattgtacttccgggagttacgaagtgttgtaccacatgcacaacgtaccccctggtactcgtgttggtaacactgtaactaccctaaaatcctacactgtactaac

SEQ ID NO: 383286 - DNA, 771 bp, Cannabis indica
gttgaatagcaagagattacagcactaatttatactgatcctaaacttagactaacagttagagagtaaaagactcattactaattagattagcaaccacttaactaagattaacccaacttgcttagccagctaactcactaatcttgcttcagttaccattgttgtattgtattgatgtatattgtttcttgcactgtgtactgaaacttgatccggaaattggctagtattgcacaagttctttaatgtatagcttactcactacacatccaaactaaatagcatataactttagtacattaagagcttcaatatcatgaattttaatgaggaagcaaagaacatacataatggaataaataaccaacaatccagacacagataattgatcatcatcaaaagacatacaatttatttgttaactgatccattctccttcacttccttatccaatgctccattaccacatttacatttcacatcttctttaccagatttgggatcactttcttcttccaacttttcttcctctgcagcttgtaactttgcttcatcctcagccttttttcttatagcttcctccttagcattctcaagagcttcaatcaaattcttcaagcacttatcagcatcttcctcatcggatttcggcatcaaattctcagcaacatcagcaggagtagtatcaatttcacccaacaaacgttcaattttcgaaaacaaatcatgtgactcaacatctaagtagttcttggcaagaaccttaaa

SEQ ID NO: 383287 - DNA, 2473 bp, Cannabis indica
tatatatatatataattaataacaaaatgtcctatataaaaatatatatttatacaggcatggtttgaagcaatttcgcaatgggtgggcagatggaccagcatacataacacaatgtccaatcaagacaggtcacagctacacctatgatatcaatgttacagatcaacgtggtacattatggtggcatgcacatattttgtggcttagagctaccgtttatggtgccattgttgtaatgcctaaacaaggagcttcatttccttttcctcaacccaaccaagaagctaatattatcttaggttggtaatgaactaacatattacatactttaactaaacatcatcattaactaaactagctcataatacatgcaggagagtggtggaacacagatgttgaaacaagtgtgaaccaagcaaacaaattggggttgccaccaccacaatctgatgctcataccattaatggaaaaccagggccactctttccttgttcagaaaagcgtaaacttcatctcattgttttgattgatcatcatattttgctcaaaaattaaagacgaagacttattcatttttattcttgatttcgatttcatcagatacttatgccatggaagttgagaggggaaaaacatacctcttgagaataatcaatgctgcacttaatgacgaactattcttcgccatagcaggacacaacatgaccgtggttgaaatagatgcagtctacacaaagcccttcacaacaaaatcaatactaattgcaccaggccaaacgacaaacgtacttgttaaggctgaccaacctccaaacaggtatttcatggcagccaggccattcatggacgcaccagtaccagtagacaacaagacagtcacagccattttacaatacaaaggtgtaccaaacacagtcttaccaatcttaccacaactcccacgtccaaacgatactaatgtagcattcaactacaacaaccagctcaagagtttgaacacaccacagttccctgctaaagtccctaccaaagtggaccgtcacttattttacaccattggtttgggccaaaactcatgtccaacttgtctaaatgggactcagtttgcagcatctttgaacaacattacctttgtaatgcctcaagtggggctgttgcaggctcattacttcaacatttcaggtgttttcagggctaacttccctgacaaacctccagttccattcaactatactggtgccccactgaccgccaatctcggttcttctttagggacaaggctaagtaaggtggcctacaatgcaagtgttgagctggttttgcaagataccaatcttctgactgttgagtcccacccttttcatcttcatggatataatttctttgtgattgggagtggggttgggaattttgaccctgataaagatcctgcaaaatataaccttgttgaccctcctgagagaaacactgttggtgtccctactggtggttggactgcaataaggttcagagctgataatcctggtaggtttatatgttacatttattactatatccatgtttagcaatttaatttaatcttcaagagttcttttagtttgtttatttccattaagtgtttttagtgttcagagtatgatagtaattaactcctagctatttaagtttattcagcaaaaattttatacttttctatatattgtacagcttcccataaaaaattacacatcactacattagattagaaaaataaaatctaaatatctaattttaaaattaagaattttgtgaaaaaaataaaactataaagaatttaattgatacagtttatagaatttaaggatttgattccgttagttttttcctaatgattaattatatttatggtgtataactaggtgtgtggtttatgcattgtcaccttgagttgcacaccatgtggggtttgaaaatggcttttgttgttgagaatgggaagttgccaagccaatcaatcttgccaccaccaaaagatcttccaccctgctaaccaaaacaaacgacacgtcgttcgatggagctcttacttaattcattttatttgttctgatttcattcattgtcgttttttctttcttcctttcttttgtagcaattcattgtcattttcaaatatatctgtttctttgttcttttagaaacaacatacatcatgtcattgacttcacaattgtataattatgaaactatagctgagatttgtatgagattgcttcgtgtacgtataattaatggaatcaataatcattgagataattcttttcaattagtttttagggtaaattgcatcataaatacttcatgtttcagattctatacacttaaacacataatgtttatttttgaaggcaaaaatacataatgttacaattctcttacaccgttactaccacttccgttattaactcataaatatagacacgtgaaggg

SEQ ID NO: 383288 - DNA, 2301 bp, Cannabis indica
caataaaaaaattagaagattatttttagaaaatgtaaaaatattgccattgtaattttatgaaaatatttatggaaatttagataattttatagatatttcaaaaattgatctaaaattaatgatggaaaatagaattatatgtttgacaaagtgtgtgggttgttgatttgtctgatttattatgcattagaatttgtagactttttgtgattaatcacagtttaaacatggcattgccaagtacaaaaattgaagctgatttggatgttttaacacattttcctatcaactctgaatcgaattgaagcagttggttttctctctttgaatttgagtaccacttctaaatataaaccataagtctttcttagtttgcttttttcttttcatttattattgatggagaaaatatgaaccaccattttatattttatttttgttcctaaaagtgcatattatgttgactttaaaccatatacactaaactataactttttttttcaaaaaaaaagacctcattcaaatctcaaaagtaaaaataccatataataacactaaactataaatattaaagcatgcatactctattagattttttttgtcttttatccttagtgacgcttctgtgtatgcttcctctaactagggctcatcagccgttcttggcatggacgtggctttggtgagacattaatgatggccacacttctaaaatttccacgactcaacattctcttcgattttatgagttttgttctcttttgtcaatagttttctttgttgtcatggggttgttgagattgtttgggtggccagcagttggcttcattccctccgaatgacttttggctttgaggtatttacttttttcgagatctggtttcgagatggggagtggtttttatgggtcgatttggttatgttgttggatctattagatagtttcgacgttcttgttgtggggcattgtggttggatcttcttccagatcttggatggtggtatctcgaggattcaagatggttgataggtcggtatggtgaatctggtgtcgactctattagttttatagtactaaattaagtacgcagtggaagaattgtaatttgattatcattgtacaatagccccaagaattatataaatattaaatctaaaacataaattacatgaaagaaataaatacctctagatggctatcaggaaatcctcgatacttcttatacaaggagtagcgtataatttgttcttgttaaattctcaacatatgagcaagaacagtttgagaaagggagaaaaataatttttctttttctttgtgaattttaaaaattacagtgtagaaaaatatcatcattcttaattaattatttaaataaatatttataaccgaaattggttactgatatttctaatgagggaatatctcaaccacttgagagattatctcaactaactttgaaaatatttatctaattaaattaattaattagcctaaaaagacaaaacagacaccctactatagggtaccttgtcttaattaagacaatgatggtatcttctgtcatgacaaattttatcttaacaacttttgtcctaaaaaattttcttaaccacttttgtcttttttctgatataattaatttgaaaaaataaattatttattataaaagtaaataattactatttttcctatttaaaatagatttttccgaacaacattatacaactctttatccgtactattgacagtgtttgaaggtagcgatttaggtaccatggacctataattctgaactccaataaactagattacttattgagtctcatcaaccaaataatcatgtttattaatttcatgattactctattataaatatggaattgaactcttagtaattatagaattatatttattgagttttattatagtgtccattaatataatcaattccagtaattagccttcattgtgttaattcgtaattagttttggttaaattactgttttatcctcctaattacttcgttatcgtttagtaccattaattcactcgtggaagtataatttagatcccatctaaattttcacgtaactttctaattaaattacacataaagggaactaacattcgatccattagaaaagtcaggattccatcattgtagataatgttcccagccattcacattattagattcccaaaacgaaagttgtaagaatcttcttctctaaaaaaaactttagcgagtgaatgaaagaaactaataacatgaacaggagttcatgattactca

SEQ ID NO: 383289 - DNA, 858 bp, Cannabis indica
aaaaaagtggaaatcgtaatactgagtaaaaaaaatgcaaaaaaaaaaaaatgaacaaagcaaaaatctaataatagattcataagaaatttgagtttaaacaaaataaaattccactagcaaatgtagcaaaaatctggctattaacataaccaaaaagcttcaaaattaatcctaacacagactgaaataaaataaatagaaaaaacgacaatcaaaaccgatgagaccgaaacgccaacggcagtgagttcaggcgaaggaaacgaagtcgccgccgccacgaatgctgctggtgctgctatcacttagatcgctgtctcatctttcggcgcttcctcttcaatctcctcatacgcttcttcttccactgtcaaaatccatagcatttcgtcagaaatacattcatattggaatatatatatcatagtataaagaaattgataaaattaaaaataaaaggagaatagagtacactagttgataggtttcaggtaatttttaccttggctctcatggtgaggctacgacaagctaaaccctaatcctctctcccttgggaaactgcgtcttggcgaagcagatgagaatggcggtctacctggggttcgtggatgtatagcagcatatataagcgaaccctagttttggatttagactgggcccaattacatgggctttccgaactttatttgttatccttattgggtttttatttgggatttttaccaaaacaaaaagggtaagttgaaaaatacctctttttttgtattcattaatcaaaaatacccttatattgtttttttattaaaatatacccactttttttgagtaaattgcctaatatatcctcactct

SEQ ID NO: 383290 - DNA, 2016 bp, Cannabis indica
ggtcttgttccgaaggactttatatttcatgtctaagatttgaattgatggagcgatgcctaatcagaaattacccgccagaagaagaatgttaaaaatctagagaaatttgagaaggatctaaagaccgataatgagcatcttcgcgagactaaccaactagcccaaaagaaccttgaggggaataataagaagcatgaagacgccaaggtggatgctcatgagagagttaccttgatggacaagtgttctattttacaaggcctagatagagaatccaaacatggatttaggctttttgggtaaggcagtcgacgtaatgcttgcatattttgaaccaaccaataaggaggaaggtggcgactctggagaggttgagatcgcagcataataagaagaagaagagccctctaagtctcctacaatgtagacttagtttttaaataatttatgaacaatggtcatttgtttgagacaatcatttggccctttgtgggttttatgtaactaatttcattttgcgttgttggatggccaacttcgcttcaattatatttcttattttcctatcactttaacttatatatatttcctctttaacgagaagatttcatttgaattatgaatattttgaatacattatgtattttttgctcataaataaactttatttacataactttgacacaatacttttcttaaatttaaacttagagtaaatggaaaacttaaatatccttgtacaattgaatgtttctgaacacttttttattgcttgtgtgtgagtagttcatagcaatttaagagcagactttaaatatttggaacagtactctaaactgttttgaatatttcttgattgcttgtgtgaacagttaattttctattcacactttaacttgcgtactatttatcaagacacacttgggtatctcgtttataatacatgctatgttatgtgagccgttatttatttagattgcacttaacttgatgttgattacaagacttaaaagtctcgcttactagtgctattttcatttctgctttaagaaagttttaaattatttgacttccggactagccttagtcaaacacctttctttttgcaaatattttattttctaggtattattggacctggttatttctaggtaacaacgagcctagttatttactatgtattttctaggcaaaacctagttatttctaggcattagggagctcagttgtttctagaaattagcaagcctagttattattgagaatatatttctaggcaaaacttagttagtgtatattcatatgccccaagtaattttatagaaattagaactttataattacttgaaatataatatatttttattaaaataaagatcttctttacattataaaaataaatgaaatacaacaaaacatgctactggtaatacgaccttaaatgtttattgttcgaagtatgttttatcagcgagccattgagccatgctaatttataaactcttgttctcacaacagttttaataatataacgaccttcccagttcaggttaaatactcctgttggaggatctcgcgtattagcaaacacgcgtcttaacaccaaattgcctactttgaagagtctttttcgaactcttttcttaaagtatcttgtgattcaatgttgataagcaacatttgtgacttgcaattcaatgtgctttcatcgagcagatctaaggacatactgagtagttcctagttttgttcctagtcgtagaattcatgcctgtgtgtcgcaatgttcactttcattggtaacattacttttgagccaaatgccagtaaaactggagtatgtcctgtcgcagtttatattgttgttctatgggtccaaagcacctatggtagctcatcaactcatcttccttttactgcgtctgattcttttttatagtgtcttccaaggttttattaacagcctcgactttgtccattatgctgtagcctagatactgacgagaagctctt

SEQ ID NO: 383291 - DNA, 1090 bp, Cannabis indica
aaataaaaaaaaattaaaatcccatagtgtatttaattttttttttttttttcaatgagaagtagggccaactagacaaggtgacttccatccttaacgaggaaattcccaaaatggaagttggacccactcaaggatgccactgttcttccaaaaatagagtccaaaatgacgtagtaagtatctgtgggtcccacttaattcaccagtagccattggatctccaccaaaagcttcctggtcccctctctccctctttattattctcctttcctctctttctcttttacgtctcaacttaaaccactatactacagtactatactacttagctatcgtaccataaacatatatataaaaatgtattattatatatgagactgtgacttcatttcctctgttcataccagttctggactatgttgggttttcttatttaggtaacgatgaaatacggctggaacacattaatattgagacaaggcttataaaacaatatgttatataaaaataaatgtactatatggtaagaatatatatatatatatatatccaaaagtctttagtgtttgactagtggaattattttgataataatttacacctaaaatataataactaattataagcataaagcatcttaattttccacgtgaaaatcactttcttgcattgcatgctaaaatcgcatatgaaaatgaagaccatatatcatgttaatgttatattatattatagctacaaataattaatgattaatgcatgtacaaattatattatattacgatcctcttcatttagggtagtaacttgtatttcggtagtatatatctcaacaggatataattaggtagattttgtaaaggccacttaacctgtctgaagtgaaatttttatttatatgctgtcttattttttggaaaattactatatatactgtttttttaatttttcttttaaatttacggtttgtatttttaaagtggttacaacgctagtaattacaatatgagtttctatacgcttttttgttacaatttagattgcagcgctagttgcaataagagtttctgtgtagaattttataaaa

SEQ ID NO: 383292 - DNA, 1112 bp, Cannabis indica
aaataaataaataaaaaaggaactaacttcagtgaaacgattaccagtggtaccccattcacactcttcccaatactgataatcagagaaaaggcaaaaaataaaatattatcagtaccattgtcctgaaaagcccctatcttaatatcaaacaaccacattgcttgtttcttcatacataccatcaatatgccatctataaagaaaaagaaaacaataatctaatacaaaatcaattcatggattacctgtaaattctagatatgttgctacatcttttcccaaacgccttaattgcaacctcaagctcagaattagtcatgtacccttcagctacatcaacactatcaaaccaatttaaagcaataaattcaatataagataattcacaatgaagtttttgtttgtttgtttatttatttcttttcaataaataccttttattaatctgttttttctcaaataaacgccttgcatggccattataagtggtatttccaaaaatttctgtaatcaaacaaaacatcaaaattaattgtaatccggcatagaattctaaaacatataagtaattcttcgaattttttgtattatgatcaggagatgtagaataacaagctcttctggataagtacgataaagaatattctcagctaaaaagaatttgagtgattatcaaatcaagacaagtgaatgaagaaagagaagcttaccgggaggagaaaatgagtcgtaactttgaaggccgcctctggcgaaagcatagtgaagaaaagagcagaaactgagagaaagagatattgataatgtagagagatgaagctccatggtatgggatcatgggagggagcttcagggatcagattggaattgattaaagaagaaaaaggaagaagaagatgaagatcacagttcagatctcatctcttgtgatttcaagcccaacccgaactgaccacaattgggttgggctgaacaaccaagccctaaacactataaatacccaaaaacaacatcgaatcaaaaaagaaagtgaaaattacaccatgggattctacaaaaaagtttgaaaaatatggcttttttaagtttaccacccttatatggcattt

SEQ ID NO: 383293 - DNA, 1155 bp, Cannabis indica
ttttcatgctttggttgggttgctccttcgctcgggcttactggaatcgatctattattgatgttactagctggtgtgaagttaattttgtagctggataatgtctatagcaaagagttggtaatggtattgatgcttcgattgaagctgcaatggtgtcatgggaaatttggagggctcgaaatgaatccatttggcagtagaaaaaagaactacagctgcatctgttgtctcctcggtaagaagttttctttatcaatatatttttgcacgttcaaagataagtctatccttgtctattccagttgttggtttgagtgttaacgtgtattggagtactctggttttaagtcaagttaaagtcacatcattgaggctttgtttgatggtgttggtaggttcgagatggggtgtattgcaagagatttgaaaaactgagttcttgcaaatattaataaatattacacaaatataataaatacaaaactgtaaacgtctgcagcagcagaatgtactgcagaaactagttttgtagaaacaaaccagaacaaccgaatataaaaataattgtagaaaattaaatcacttgacacaagagatttgtacgtggtatcagtgttctttcaaacaatactagtccacgggtcacgcccagagaatgaaatcaattagtaaagtatcaaagtttacaaaagcaattgccttaaacaaatttagactccctctagttgccgcaaccatttgtaatccctcttgctaatctgatctctgaaacacaccaagtagtgaactcccttcagttattgatgtttgcttactttctcccaaagtaaggcttaaacaaatcttcccccgaagatatatatatatgctcacttcctcccgaaatgagacttgaaaaagtcttctcccgaggacccacgcttgttcaaagcttttcttcaatctattctaagaatagtatgagatcataataagaaaaccaaaacctagttgaacactctaggtttttacaaatgaaacactcttctcacaaaaaagatatgaaaatatgagactagaagagatgaaatcgtttggctgctctctaggtcctatttatagaacatagaaaccctaaagacaaccacaaaaatgatttcccagctgtacaaa

SEQ ID NO: 383294 - DNA, 3023 bp, Cannabis indica
ataataataataataatcaaagtcttgggactggtcaatatcatgaattttgtacataataaatataaaaccatattaatttttatatttaaattattatcaataccattattggaacttgtgttaacatatatatatgcatgctcacctcttttaatatgttataatattttggttttcatcagaattgatttttgtttgtataatatatatataagactaaattgaatttgttgacctagctaattgtgtaggtaattaaattgtcaaaatttcttagagtccgtgaactttttgtttgaataattagtcctcttaattaaatagagatatggtgatatctataaattagacaataaaaaatagaataaaaataatttctcacataaatattaaaattttttaattgtagataaatatctaatttaatttttaatgataataatatttaaattatttttttttgaaacttttcataagtacaagactgttaagtataagtcaatgaccacatgatataatttttgattgatcctgttcattaaatttttatttttatttaaaaaattaactatatataccaataaaaaagtaacaagtaagattataacttgatagttaacagtctccaaaagttattatcattcctgaaaagttgttgtctcccggaagtatgttcctagaaggctttcttgtccttccgagaagtatcctcagtgaagcaaggcttcctggaaagaagttccgtatagtcgactccagctagctctttcctattcgggaagctccttcagcaagtactttggtccgtgatcccggaagctcatatatgttcctggatgcacttatacttaagctgacgtggagatctcactcaaagaagagtttgctaattaaatttgttaagtcctaactaacttaatcacttattttcttacagtcaccgactttaagatcttaatcctaagtctataaataccaccaactcttatcttttttgagacacgacgatcaaattgagtttcatggttgagagagaaaagattgagaggcagagagagaaaaagtacagagaaaaaagagagattggaattgagtttttatgaaaaatcttctatagatgaagagagatcttctcaactgtattgtacttgttcttgctcaatcaataaagagaatttggtggtgttccagaactacagtagagccatatatagatcacatcgatttatcaaatttgaaccaatatatgtgttggtgttgattttatcattttactactttaatcgtttctagttttacatactctgtacatccctattttttttaataattgtttgtgatttgttatttttgtcattactaattatttagtgattaaattataaattaatttgattctacactttagttttaatttttccacactaaattatgtattattatcgtaaaaaattaagcttaaatatttatctctgactaaaaattaaagttaagtatttatatgataaattattcaattcaaaaattaacatcatatatataataatgccaagaacaatataattgcctagaattaaaatcaggacacatataaaggttctggatatgaaattttagagattagaaagtacatgcaaaaagctaattagctagtgcctagtggtatatagactaatatatatagtacttaattatattttatgtaatacatatgaaaagaaaattatgtaactttgattatcatgcaattagatttatatatattatttcctaattattcccactacattggatttatatgattttaataattttgagtggacacaatgtgtaggcgtgggatatgttttattattattattattattatatatactatttaattagtattttttaaattgtaaatgggaaactttttttttttcttttccaaggttttatattaaaaaaaaatatttaacactatatcttactaggaaagccacagtagtactatttgtatatagtgtgatttagaatatttaagttagtagaaagagacaagcaaataaagttattttaatattctcagataaacaaacagtggttatgtaaatttgtgtgagtgaatattcacatacaatatttgattctttctattgtgttttcttcaagaaaaagtacatctaaaatagaaccacatgactcctaagtttaatatattcgtgttatgtttagattcgtgttatattttgctcaaatcagtttcctttcttttcattttttaatataaaccaactttattttatacgaatttcgaattttatcttacattaatgagttaattattaactaaattacatttttttaaaaaaattttaattatttttttttatataatttatagttttaattacattttctaataatttaagttatcgaagtataaattattgatattatatttaagttttattatgttaaaattaaatataattattattattattattattattattattattattattattattattattgttattgttattacacttttaacattgaacttgtctattcgtacttatgtattgtatgtcaacctcgaactgaatccatattttttcatattgtgttatgttcatgtcccttaaattcgtaccaatttatagtatcgtgtcgattggttcgacctacatttacaatactagccttaggtatagactatttagactgattatgtctaacaatcaaagtgaaaagagatcaaaattttaggaaaacatcaatttttcttaaagccacattttctgttttggaaaaaaaaaattacaatttcatacaaaaatattatgttatgtattgagcccctgcttattaaaattttcacatgttattatctttgttatttttttatctttatttctcaagagttttttgttttggatttataatatagtgcttacctaataatcaaaatcccgttgaaaaagatattttaaatttgtcaactaattaaaaaaaaaaagaaaatt

SEQ ID NO: 383295 - DNA, 1542 bp, Cannabis indica
aacaataacatacctcatgcccaatgtaattccacattttattcaagggatcacatgatggattagaacttatgtatcctttattttttagagacactatggcactgcttaaaccagcatcaaaatacttttcatcataaggcaaactcaagggatgttcaagagcagcacagaccaaatgctgttcaagaacctgctagcactaaaataataacattaatatgcgtaatctttatcaatttgtcccaaataggcaacagcgaaagttaaggtttaaagagcagaacctgctggtttcgagcatcaatgtgacagcattcaattgggctcccaaaaaacttttttggatttttcataaaatattgatcgagaggaccaccatatgcaacatatacagcaagagaatctctttctcttctccccgccctgccagcttgttgccacatgctaaaaatataatcataacagagttagacatgaaaataaaattgaccagaacaaaaaaaaaaccacagaatggtgacagataagagtcacaacctacctagcaatgctaccaggaaaacctagatgcagagttacatcaatatgcccaacatcaatacccaactcgagggcatttgtagcagcaacccgcaaagagccccactaaaaaatttctctctatagtcctcctatcctggattgtttgtcagccacagtgccagaacaaataagaacatatttggttccatatatgaggcaatcttgaactaataactcaagaaaatgatgcagatgagcataatggacgtattaagaatacaagcaagctgatatagcgtgttgacactttaatttagtacctcagaatttatagtttgttagtgtttcagagtttattttactgaacttatgagttctatagttttgagggagtcattggacaaagcaaaagagagtcaagaagaatagagaaagaaataaatttaatgcaaattagctgtccgcgtggcaacggctatctttaatgtcacagcgccaatggagtctgtgaagtcagtagctagcgcagcgacagccagtgttagtatcgcaacacagaacgaacattttcaaaaacagaaaactggcttatttgcttactttcttgcaaatttcaacttaggctataaaagagattgaggagaacgacataggggagacttttagagatagaaacaatttcctaaagcctagagtgagaaggagaggcaggagaatcaaaaccttgaagataggaggagtttctacctagagttttcatactttactttctaattgttatgctttcttggaactccgtgatgatgcacttagttatgatattttgcatggtttacactagttttagcactgtagagtatagtgaatagaattgtatgttgtatttcataaaatagtatatatttatatacaaagttaggaaattaaatgagaaactgctaaatataatttaccctaattttttacaactaatattctaacactacccctcaaactgcagcatagatgttaatcatg

SEQ ID NO: 383296 - DNA, 877 bp, Cannabis indica
ctcccgtcgagggttcataaccattcatgcctcttccattctgaggcatctagcaacccgtacccccccccccaatgataggtgttggcaagttaggccttgaggcgatcagttaatggccatcaagttgcacctccacctcttggctacgataagaatgtctcggcatcttctcaacaattttaggtaaagaaaccacgttgcttttgcatgttgcttcctatagaaagtgccaaattattgacagtaagaattcaccaacaaaataacaagaactcaagatgatgtttcacgacttaatagaagaatactcaaagtaaatattactctcttcactatttagaaaaactactatttcattaatattttttctcccagagagtcccctttacaatgagcttcaaggctttatttatagtaagctcttcatcgtttataacctcatcagatccctaagcatgaggatgtcaagtcgctttcacactagataacctagtattttaggtaacatgatgtcacagacatcctaaattataccaaaacttcctcttttacttgtacctcggatgaaatgaactttttcttctactccaatacttattgtgtcgtcactatcttgcctacgactctgggcttaaatagctctagccttaatgtcttcaccttacttccatttccatgaggagactaggtacgtgggagtcggggggctacaggtgtgcaggctggggagcctccctatgcacgaagtagctcccaacgtggagcctccctgtgcatggagcagctcgttgatttgtgtgggcacgtggagcttgactcgtgcctttgctcctcctcgtaccaacacatctccttgggtgcattttagaattta

SEQ ID NO: 383297 - DNA, 1015 bp, Cannabis indica
gcctttgtttttgtacccaaagataactggtacattgcaaaggtaagtttcggctacctttagctttattggctttctcatcatacaagagaagatttctagatataagtctattagtaaaatcaattagctcagagttctagttcactattcagttttctcctgataatcacttcactagttactcgtctcaactgcctaaaaatcaatttcgatcggtggaaaaaaaaataataaagttttgttcatatgctgtgttactcttgttaattatacacgtaacagctgacttagcttataaatgatattttcagattccactggttcaatatctaccaacttggagaggaagtgttatagatgcagagatggaaatgaatccatctcgggtagttggaatgtctctatccgtgaatgcagagggtggaatgcctggtgccagaactgggccaggtgatttcaaaattgagatagattggatcaagggcttaagaacacagtgattagtgaagtgaaaaatgtagctgtatcaaagcttttaattgttttacatgaataaatcttatccgatctctctgtacagtaccaaatgatgttgtaaactacaaaccatcaacttgcactggttggaattcactaggttgattccaacccatctaagtttttgtggggtttagaatttccttttagaccataaaagttggcaagattttgagagaatatatcttttggatatgtggttgatgtgttccatgagtttgattcattatctgaccagctttggtttctttctcatgaaatatctgaggcaattgaaaccactaacagacaattgatgtgaaagggtgcttgtctttttggttgataaatagatttgatgtgtgtgtgtgtgtgtgagagagagagagagaagggttaataactaataagaggtcttttcatgtaggtgaaaactaaagaaagactgtgaccatcctttagttttgacgtggtttggtttcaagagagggccgct

SEQ ID NO: 383298 - DNA, 3496 bp, Cannabis indica
attttttaatctatacatagcgtaatactaaaaaaactttaaacttatttcaggtacaataaactatttagaaaatttttacaaaaaatattaataggaataatgttgtattaccattagaatttttttttaaaaaaatatattctaacatatatttttaaatataaaaaattaactaaaaaattataatatatataaatttgatgatagcaccatgttccaaattattcatacccaagttatatcatgctttgtctggaattaacgtagttattttgtagatataactaatgatagatgccactttcattattagttaatatatatctcttgattatgagttttagttttttctttttgtaggtaattggcaagtcaatctgattaatatttttaattgtggtattatgttacaacactgaaagagaataagaaatgatgtactaataaacaatatatgttatgcctatgatatgattgtaatattctttgaaacagctctacatgtaattttaatttaagaattattataagggaaattattctggccttgaaaagagtagacattgtgaatgtggcagaatgtatatttataaacctgctaagacagcagctatgtaagtggctcttggactttgtacaaagtttttgtgcagacaggttagctgcagcagcctagttcttcctaattataacaactaatatttaggaaagcccaaaaagatattcctttatacaacaacaagtatttgaataattaataaaaatatagtaaacaaatagttcaaaagtcaaagctaagaattcttcattcaaagctcatagttcaagaaaaatttaccagtaaaatcacatgggggccatattagccactgcctaacaacaccggtgcaccctacccaaaaatgtaggccattgatctcaatttctctcatgtacatctactccttttgttttttatcttactatattagtttggatatgtatatatataatagggttttaaatttaataccccatgttcctatgtgttaggacaatgttctctgtgtgattaatttcccaagaaatagactacactcccttctacatgttcttacccctttcatgtggacgaatttcatatagtaagaatattttcctcatcagtggatatgttagaattggtgaaaaaccacctttcttcttcctattattattattatttattttaaatatatttatcatcagaagaaggtcaagattataattagaaccctttgatccttttaaagaataataatatatatatgtatgtatgttattatttgtcatacaatatcattcattagattaattaggattattattatgaccaactgggtactactacattacatatttcaacatatattgactaagatactatcatgtgacatgttaacaatgtctaaagacatattattactcagttgtctcctaaaggacttatattgcacgaaatttaagattaaatcaattaactttgtttatcttctacacaaagcaatgcacactttattattataataataggcggtgatatgagtactatattattatttattattttaatatcccaatattagtatataacatttaagcatcatcatctatcatccaagtaaagaaatctaattgagtggaattttcatgtgaaaaatcaatggaggagaatggctctcaatctcaattattctcattcccaaattagatacacctatatatattgtagtacttaattagcttttaactataaacataaattgtacatttttttagccttagtggcatgccgaaagatggaggctgcttgtccaatattgaaactctaaccattgctaggctaccaattccatgcaaaattggattaatttatacatatatgtatatatatatatatattatatactaccaataaaattaggcagtactactatatacaactagctacaataagtaaaaattttggtaaccaataaattaatcaatattattatattaagaagcatttgtattgatcccaacttagaaaatatataaaagcaacttttgaccaactacaagtcttgaacgtccataaagtcatcgttttacacattaaccaaagattaattagtttagtttactaacatgatcataattattgataagtggaaacatagtccttaaattcatagtctacaccattagacaaactattcatcactgaatactaagccgaaacaatgttgaattactatactaattaaaacacgtatatggtgctatgtgacttcatcttgatcatcgatcacatggatttctaccaataataatatttcatatatattattggagcattgttattaagcaccaattgattaacgatattttttaaattatatgagacttaatacttaattatagcaatatgacaaaaaagagaatgataaaattatatacttgtcttttcgcatttctcatattattattgctatcactttctctctctacatatatatcagtctctcgatatacattaatatgcatctcccctatattaataaatgcatttttttttttgaaaaagtgtatttataaatagaattgaaataagacatcatggtcattaaaaaagatattatatggtatagtagataactctaccgtacccgtaacattgttggaaaacgcccatttgaccatattatgagccgcgtagttacagtttctaggaatacaagaaaaattacaataagctagtcataaaagtagataggagcttgcaatgtcgcacatagttctcaatcccccaaatagagtcatcctcctttaggttcttgataacaagctctgaatcactctccaccaaaataaaaggatgatgcaatgagacagccgtctccatggctaaaagataggtcgcagcttctccggtgagagggtcaaagaagtgtagcctttgagtcgctacccacagaactgattcctatgatccctcgcaatcgccacagcacacatagtgtcaacaccaactttgacatcgtagttgattttaacccaatcttctggcggtggagagcaggcaggagtcccaacagactgtggaggggaaagaaggctggagccataatcgcgtaacaaaaagaaatagagtcaatatagtgtttaatgttacccattgatttattatgtaccttgtcgttgcgggccctccaaatcgtatcaaccacaattgaggcatagaggaacagttcaacagtatcaactcctctgaatttaagattccatagaaaagtaacccagtcccacatgcgggctcctgaatctagaacaagcataacccccaaggtgatgaccgccaaaggtggaaggcaaagttgcagtacaagaacaagtgctctgtggtctcctcagcctccccacaaatagggaaggaaacctcctcaaatcccattctcttagcaagaagggctcttaagggtagagcattgga

SEQ ID NO: 383299 - DNA, 1665 bp, Cannabis indica
tttgccactttattttaactaataaaattaaactgacttttctaattttaccacttatcccatctaattatttaaatatcaattttattttaataattataaataattatctataaaatataatttaaatatatttattaattagacccacaaagagtattaattaggcccgaatttggcgctgctcctagttgaaagcaaggactcttttttccttatattgtcatattcaaagttaaatatcttgaggtaaaacttatctgttgcatccaaatgagcacgtatttcttccaacaacgggaaaaggcaggctggtatcacaatattggaatgaggaagtggtggaagactcgtcttatctctaggaaactaggctgaaggagcctaaactggttgtgatggcagaggctgagagttggtagtctctttgctggaatgggtactccacctatgtggcttgttgcttccctgaacatatgctcctcttcgccacaaagattctgaaccatgctttctggtagcagctagttgttgaagcttttctttagcttcaacccttaatcttttactatctccacccaggttagagcaatatcttttcctttgaaggaacacgaaccctttgccttcctcctcctcctcatcgtccacgatgataggcctctactggagaggaagtattgccaaagcagtgttatttaaccctttctaggaaaaataatccaccactgccaaggaagttgggatggacaataacttctaaagctgtagccatggaaatagctccatgacctttggccagaagtgctggctttctacctccagcattagaagatttcccaactatttttttgcctcggccacccttggcaacttccctaacttcatttgatctctggacgatggtgcccaagaatttttctaccaagcccatttgtaatgtgaatggttactctgcaaaagataaagcaaattcaaacgttaaacatgagatcatcataacaatatcatgaaaagcaatatacaagtgagattcaaaccatttattttagcattttgggattccttctagaagactgaatagtatcttctctgcctaagagacttccatactggaagaaccttggatacaacatcttgctaaaaatatctaccctgacatcatgtgtaggtataataaaatagtttggactcctaacgatatcatctactctatccacataatcattgacaggatatttatgatgatctaagagtaaaaagtaagggtcaaacccaccttggttgatacggtctaagtttgccaaagatagagccctaactagacaaaacgatgtcttaccacttccaaaagcactcgttccaggagtaccctctcctttcagaatctgtctttaaaatgaatagcgagctcttcaaccttgcttaacttctttggatattagcagtactagtttcccaaccaaatttgatcagttttagcagccttcaaggcctccttcacttctgcaggatcaccgtggtgaagatccctgatgggatccttatagttgtgtgaactttcaattatgtgtttcacattttgtgaatttttacatttgttttcgtcttcaaagtaaagtacaatgtcagctacgttagtaacataccacggtggggatggtg

SEQ ID NO: 383300 - DNA, 1335 bp, Cannabis indica
  modified_base (418)..(418): a, c, t, g, unknown or other
tagacatattttcaaagataccgttttcctcctaagttatcatgtgcaaattgcaatacaacaaaatgtaatctacatttttaagggaaaaatgtttctttgagaaaattggtaactaatcattgttgtgtcctttccatactaaaaaaaacactcaaaatttattatatcttgttttaaggtattttattcctttgtaggctggtaaacattatcaccttgaaaattaaagggaatcttatgagtataagttactttatcatattttatgtgttgacaaaagtagtaactagttaccatttcaaaaacaaacaaactgataactaattaatatgtatcatgtttttgagattttcaaaaactagtaaaccaatttccattggaaagtggaagcttaaaaaattggtaactagttagnctattgtatcatgtttttttttttaaatattgacttttgacataccactgaaccagtaactagttattactatagaaatttaaaaatgaattatgttgtattttcttgatattagcaataaatactaaatcaacctcttaaatactactaaaaactaagaagaagaaactccaatataaaaaaaaaaaaagcaactacagtgtggatcattctaatgatttaatattaataaaaccttacaagaagattattaatgatgaaaggtgcagtgataagttgataacccacctaagtcccccacaccacacaagtgttcaactttctaaatggagctactacaagcaaggccatattgtatgcaatagaaaggcttaatggaatctacaatcatgtccagtttgtcacaatttccatatttgccaatagcagcatcaattccaaatatgattgtaaaattgaatttcacaacaaattgtagtcgacttttttttttttcttgaaagacaaattgtagtcgacttgatcatttacatatgatgaaaaatcaaacaaattgatcatgacttgaagcttcttattccataataaatatttaaattccttagtaataactaatacttaaatgagtaacattttatcttagtgaaaaaataagttactcatttaatatttctataagtcgtaaatatctcctactacttgctttagtcacaagcaatactctttatctcataaaagctgaaacaagataaatatatatatatatggtatgacctaacaaaagtttcctatcggtagagaactttttttttacttttattataggactgcttatatataattaaaactttatacatattataataatatatttgttgtggcttacgacacgcaccaacaacacacttttatattac

SEQ ID NO: 383301 - DNA, 1131 bp, Cannabis indica
agagtataatttcttctaaaaataatataaagaaaaatatttatctgtttaaaggaacgaagggagggttgttgggttgagagagttgagtgaagagaaagagaagagaaaagaaaccgttgtagtgtaaaactgcagacactcgtctaaacacaaagttgtctaactttacacatgctctctgcgtacaattacatttgtaatgttgttatgtccttactattactcacactttttatttaatttattatttattttttaattcattttcaaaacccaagtgtgtacactactactacatccactgcactttggaaatttcgttaatttggcgaattaatatacactgttttgctttgaaattaaaaaaaaaaaagaaaaaaaaaacaatgggctatactcatcccaaaacgcccatggtatcacatcaactttaatttcctatgttactcatattctctctctctctctcttcactcccagctaaggggtactttattagagttaataattaaagaggagcaaaatatgctatatatattttccatatctcaacaaagttgggggacataataaatttcatttcctatattggagaacaaaatcttcaagattagttaaatatggatgtattcattcctgaagagtatgtaatgaggagaagagtggagagaaaagcagctttatcatcaggcaaagggaatggaatgaagagtacaagctcaaagaaggcagatgatgatgatcataataattataataatagtcatgaggtggaggagaatatcatggtgatgatgatgcagaacaggaacaggaacaagagcaagaagaatattatgatgaagaaacctcatcctcatcattctcttggtgttagtactgataataattttgtgtttactttcttctctgcctagcctagcatcaattatgtatgtactctacaactaatgtatacagcttttctctttccctcttaccttatgttttgtaaccttttaattaataaataatagttacatcctctctctctttagatatatatatataaatatatatatatatatatatatatatgtaggctaattcactattggagtaggtaattaagaagagaaagatgcatat

SEQ ID NO: 383302 - DNA, 2658 bp, Cannabis indica
ggttacttgattggccgcacattccccaaaatgcccaccatggtttcggtggtggaggaccctcttcctcctcctgtccacgttatcaggtccgacaaccaaatcccagtcgaagaacccatcaatgaggacgagtcagttcctggtgggtcagcacagactcgagactattactctgattcatcctctcgtcggcggcgaagtctcgatcgatcaaactcgataaggaagacggccgctgctgtggtggccgagatggacgagataaagtcaacttctaattcaaaggtatctccggccaccgttgattacttccctgggccgaagcttggagttcccgatagagattctagagattccaactctaattctttgagggacgactgctccgaaacttttgatatggggttccgggattctgcctcggttatcggtaatggggatagaaaaggtcccaagaagtcccgccggtggagcaaggcgtggaacatttgggggtttattcacaggcgaggtggtaacaaagatgaagatgaagaccggtacagcagagccaatggggtggagcgttcttactcagaatcatggccggagctcagaggagaccgaaatggcgatgttcgtggcggtttcaatccgaagatgcttaggagcaatagcagcgttagctggagaaactctcagggctttggcggaggaggatcgttcggtagcatgaggaagagcaacccctcctccgtggcctctgccacggccgccgcaaccgccgaaactaatgggaatggtaggaagaagaaagatgaagttgttttggagcgaaaccgtagtgcaaggtattccccgaacaacattgataatggactattaaggttttatttaactccgatgaggagtagtcggaggagtgctaatgggaaaagtaggtacaatcaagcacattccatagccagaagtgtacttcgattgtactaaaagaagattttccaaaacaaattattagtacttgaaaatgaattaaggtccataagctgttcttttgggttattaatttattattgtctttaattttgctgcttttgttgtgtaaaactacacatgcctttgtattcttcttaatggttggttggttggttggttggattattgaaaaaaaaaaaaaaattcctaaaaatttgtttctttcttgtgattagcatggttatcttatactataataacaaaaatttcagtgtttttttttcctttctgttttgtctctaatcgtacttttgttaaattggcctatatatatattttttaaattttattttcatgtcatttcagtcactacccagataaaaaagtaactagggagagataaaaatctgaactttatgaggaaacttcacacagaatagcagagtttatgttttgtgggctcattgttctctaatcttctcttatctcacctgagtttttgctacttaaagtctcaaattgattcatacaaaagacagagaagagtaagggtttttgtttttttgatacctcgtccttgttttaaaaacaattttttttttggtccatatacgacactatagtacagtaggaagtagtttttcattcattcccttgtatcacttgaaaaaagataataataataataataataataactgtttgtgcatcatgtcaaagcagctactattattcttagttgccatggaatatgtcaagaccaggctattgttgcagaaataagagtcagtttatatttataattcttatataccccacttgaagagtatcagaacagaaagaaacacccttaatcatattttgaactattggaactttgtatgtatttttcttttctttcttctgcttgacttgttttggctctgactgttttttttttctctagttttctttgagtttcaatataggtatggagagctttattgggtcaaaacttgataggtctgtttcctaatctattactaagaatagtaaagctgatactgatagttagatcttcttctgtgctttttgtcttatgtgtattcttatttagttgctaaattggttatggattaatggttattctttaccaataaatttactgcattaatcttgttattcacttatttattacctttttctttagtccattatcctttttttactaaatcaattagaggtgtattttaatctctagtgttttgaattcaattttaatgaaatcatatatgttgttttttctgagctttctttagtcgatgaagaaatattttatgtcaacaggaaaaagggagtaggctgtttgtttgtttgtttgtcttatactcattaagcattacttgttttaaaatgatcattgattgacttgatgaaatagcttaatgacattatcttcattaggtggatatagctattatcaatcaaaatatggaatgtaaattctctctatatatttgatcaaaattgtaaagtgaaaattaggaagaaaagaggagagaaaaggaaaagttttctttaaatcattcaaaaagggtagaaaaagaaaagaaaaatggataaaaggtatgaaatctttgtcacaatttatattgaattaagatagagatgaaattgagaattcacaatgaagtaagtttcatgaaacaaaaaaaaaaaaaa

SEQ ID NO: 383303 - DNA, 3052 bp, Cannabis indica
acggttattttataaaaatacacgatttttgtaaaaaattctatgtaactgtaaaattgtaaacttttaccaaaaatttaatatttttgtaaaacttttttttttatcattaacaaatgaatgtaaaccttttatattctaagagagattcttatgagttgatatatttatcctgtcatgcctacataatcttatatacaatgaaaaatatatttaatttattaagtattttacaaaataaactcttatgttttttggtagtaattgacaaaaataaactctaaggacacataaattaatgctctcgtcttatgaaaaacttgtaagttgaaaatgagtataaccttttcaattaatcacacctaattaagatgagactttcataacttaaaaaaaatataatttttgtgcctattttatatttacatgtcattacgttttgtgtgtaactattatttttctttttcttaactcttaaaacaacttgatgtgcaaaatactttttctatgaagaagtttgtgaatcctttaagtaagttctctatagtttaaaaatgattttctactattgaattagggatgccataactcaattgttgatagtttcatcacttatattaatgtttgattgtttaaaaaaatggtaaatatgtttgttacaagagaatatttttatgtgataagtaataataacatgaattggaagttacaaatttggttattgatttgtaactcttcaatgctcactcataaatggtaaaaacaattatcatgcaatttgcatttgattaaatgttttgcatatagctaaacttgattttgttagttatggattgataatatgtattacaaaatcatatggcaacaatttgcaacctttggagtgttaaaaactttgagggagaacataaattagacaagttcacatatttatatatgtatatattatgatggaataaaatgggaggagggggttaccagtttggctcccgtctctggacgttatccaaagagttctgatcttgccctagagtattcgctaagacccaattcgtgtggtccctctcacctacaatatatgttaccaaaatttcaccgaacaactagtagtgaatgtctttcctgaagtagagagtttgagaaattgactcgcactaaaagttcacatttaaaatttcttaaaatttcatcccacaaggatccacccatatttactgatacttgtttaagctttgggtaattcttatttcttctctttgtaagaatttgtgttgtattattttgcataaagtttgtatttttttctcctttatgttaacctttttttttttttttaattattattattattattttttttttttaatgatttgattgtaatcgttctcttatcaagttgtaatatttccaacattatttttatcattcaatcagtgtaatttttcttgttattctaagtgaaaagttataagttttatatcttaaacagtaaatattattttagactttatgttttacaaaagttatcgattaaattttttattttgttaataaataataatttagactttgtattttttttaaaaaaaaaatagtacaaaataatacgttgaactcaatttttatcaaaacaaaatttaataatataatttgatccggatatgttatgacaaaactagtaacatcttttacatcagttcatgctagaaattaactttagattgattatattttaaaaaaaattgacgaaaattaagctcaaggtaccattttagaccatttcaaaaaatacaaggttcgatttgttatttaataaaatagagggtccaatcaataacttttacaaaatataaaatctaaaataatatttaccctttttttttttaaatcaaataactttatttctcagaaaatttctaccaaaacaacagaaaccaccttaataggtacaaagctcaccaccaaaatacaaccaacaaagtcccgtgaagctcgaactaataagtgagcaatacaattcgcggactgttttacaaaaggcaaagacacattagagaaataagaatcaatcaaagttttaaaagtttcaataagaattccaaacacaagctgcattttatttttgctatgcacaatttgaatcaccaccaagttatgaagctcaaaaactacatgttgccatgaaagattcttaacctagccgagcacatttccttgaatcctatttcttcagctacatccgacccaacaacaccatcacgacatgtcggcaccagcactgagcctccacaaacgcaccggaactaagttattctaagaaagaaaattaaagagaaagaaaatataagaagaaaaaaaattagaaggaaacaaatcaaaatatgtttctttcttaattgtttggtgtaggaaggaaataaaatttgtagaatgtaaaattactataatatgatttcaattattaatataatactttataaatataatttagtcatttttttgaaacacaattcttcattcaataggtacaattacaaaggatcaggcaagtcccgccaaagaacacggctcgcacaagggagattaatcccaatctacatatcattaattttattaatcaaaacataattaactaatacatgagctaccctattaacttctcgatacacaaacgaaatatcatattaacattagcataagacaacaaatgttgaatatggtttagtactcaatatttcatttacttcggcatccacattcatttcacttgtgtgagacttttttttttaactttttttccctaatttcagaagaaaaaaattagcgggtcccaaactatatttttcttctactttttattctcacatttttaaagatttccctaataaagattaagataattatgattttgcccctgaacgttgacatgtaccaaatcatgcccctgaacttttagggtcgttaaaaatactcccttaactattgagattgttagatttaaggacttttgtctaatttcatttaattttactatttcagtgattgtttatgt

SEQ ID NO: 383304 - DNA, 1819 bp, Cannabis indica
taaaaatttataattttttttaactattaatattatgttattttttaaaataaatatataattatatattattataatatgtataaagtattaattgtatataaaagtcttatcgtaagagtatacaccttaaattttaaggaccacatgatttaaaatcaatagtcgaaaaagcttctctacatgtagagaatttatgcttagtcctactataattttatcctataattaggttaatgcacgtatatatataattagtttttatttttatgttattcaataaataatattattttttattaaaaaatatttaatttaagtgctatttataaaaaaaaatatataataatatttaaaattattgttaattataattttagttaatactttttctttttagaaatatcatatattttattgaaagataggttttttttgtaaacgttaaaaaaatatttatttacctaaaagataaaagaaatataaagaaatatgtattgtgatttaaatttaaattgtaatatatatattttaaaaagcaacaatttctgttatataatctttatataaacagatttaatataacatacatataaaatatgttaaaatatataaaaacatgtattagtttttaaaagatttttttggttgagtgggggcagctgcaccctctacccccgagggtataggtccgccactgttgcactaatttgagtagaaatatgaattaattattaaattcaaagtgtaaaaaaattgaaattacattataattatatacgtacctttgtctttcttgtcataatactcaaaaactcatcaagatcaatagtaccattctcatcacagttcacctcattcatcatgtcccgaatttcatcttttgtgggttgttcatctaatgaatctataatcccaaccagctcttccattgtcactaatcctaaatatatatttatatatccaacaccaatatttaacatttacaaaataaaatatagaattaataatacacttaatgcaaacaaaacaaaaatcacgcaccatctgaatccttgtcgagcaaagaaaatgcttcccgaaaccctgcgatttggttatctgtcaatgccatgtcaagtataaattgtaattacaattttcccaggaaccaaacagaaataaagatacacaaaaccagtttcgaagagatatgtatgaagttaataattgaagtactactgattaattttgagaatatatgtgagaggctattatgtattcagaaaaacgtttttttattgaattatatatttacatatatatgagaatagtcaaacacgcttgtaaagaatttggagtcttgtgaccttttctaaagcaagaaagaaagttttcaatgactttttgtattattctctttatgaaaatgtcaacatggccctgacttttggttctctttttttgtgtgtctaaatatatgaatataatgttttcatcaaagtcacgtaaattataatctcaacatacttttcatttttttggtcacattagtgatgggaacgtaaattatacatattttgtaatatgaacacatgtacaaacacgtactacctgtagttttaagtagctgtatataatgtatatagcctataggctccatattccataaatatatactgtgatatgattttgtcccgttattatactttcacggattgtaatctgtgatgtacgttagccgtcagataagggagttatttgatctgacggctgagattgatctaggggtaattaggattaaaaagtagaaacgtacgtatcctgacactcatttaat

SEQ ID NO: 383305 - DNA, 2301 bp, Cannabis indica
ttttttaaaaaaaaaattagtttgtgtttcattggttattttttcttttgtttgtgttttattgggactttttctgaactttgttaaaattttatattggaccttttcttaaacttagctgaataaacattaattcagctaaaaatatcctaaaatttttatatttctaccgcctcagccattttcggccacctcacacagctgaggcgtacgcctctcctactcctacctttgtcaaggcgggatgcctttgggaaaaacttttcctcaaagttaggcgctcctcaaggcgtcaatgttaaatattgcattatatcacttgtaatatgttctaaatacgtgtgcagataaatagggagattgtgaagatccaaagagtgactgcccctgccggccaaatgcagttgaagaacctgattgaagcccatgttgtaagtgaccaaatctttacaatgtgcatacaagttaaatgcatacccattctcacatgtcattaaatatttctgtttaaacgagtgttagtgattccaacacgtgatataggttaattgctttgagaattgagtttttaattcatcttcgttgctctttctcatcattccgtcattttaaaacactaatttgaaaacctgcgttatttgatgaaggaaaaaactggtagcggcaaaggctctacgattttgaaggaatgggagacatacctaccactcttttggcagcttgttccacccagtgaagaagacaccccggaggctagcttggactatgagaaaacagctgcagggtcggtgactttgcaatccgcctagagtagcagtcaagccatatagctagagaggctggcaggatttctgaatacaaaagctctccaaacccactatatgtacatgtgaagatataaggagatccgtgagattgacttttgcatggaacatctgcatcaggtatcaatgttaatcacaatcactgccacaattaagttgagaaaaccagaagctacaaaacaagagaagatttaacttgatctcgacatctaggtcctgcatttaaagctgttgcatagtgctctgtggcataaatgtaaataggagcttgtttataatcttcttaaaaaaccccgttgctcttgatgatttcaaagctagttcagattagtcaactcttgctataagattgagtccagtgttaaaatgccattttcggccattaccttcagctatttaaataaaactcaggatgagctaaattcttgttggaatgaacaaaaaacgttcccacattattattagataaaattgttctttctacttattattggaatgaacaaaaaacattcccacattattattagataaaattgttctttctacttattggaatgaacaagaaacattcccacattattattttcttcaataggataacccactcagaaaaagctcaggattgcaaaggagatatgtatgaccgtaggcatcaacttgaataatagtgtcaatacaatggagatggtcaggcaaaagaaagagctagtttagctacagaatgagctacattattgacctttcttagacaacgattgaaattaacgttaaattcattactaataacaatgatatctctaatacttatattgaaataagaatgaacaacacaacacgctgaagagcttggatcccaaactgtttttcagacgtaaaagtattctgaatagcaaaagattacgctacaacggctgatagttagcaatgagatatgagaggctacactgccttgaagaattgttattataccatatatttatagaaaatagaaagtgaaaataagaatagtggttttttaagggctaggatacaatagttaaaagcagatgaccagaacactaatttttttagtcaatgtgctaatatgaggagacgaaataattttattccaggttgattatgtactacttatttgtatggtcaattcctaataatatttggatgataggataagaatactctttagtctttactgagccgtgctcagggctctttctctagtggttacaaacaaattatcttttccaaaatttcttagttagttcgtgttttttaggcactttgagcaagattattatatttgaagacagtatagttcttggtttttttttttaacgctaattaagatttttgcctcctgaactttcacatgtactaaatcatgttttttgaacttgtaaggtcgttaaaaatgccccctaaactattgagattgttggatttaaggatttttttctaattttagtaaaaaaatcta

SEQ ID NO: 383306 - DNA, 2192 bp, Cannabis indica
gtccttgtttttctttttattttcattagctaggatataaatacaaatgccgtttttattcaatttgtttgatttcttacgtttaatgtttgcagtccgagagtgctcaaggagaagccgctgcaagcgccatgggtagagggcgtggaggagctgctttccgcggtggtcggggacgtggaatgcgtaggcgatagggatttaatttttggaagttaggaaacttgcatttttgggagtatgagaaaatgggcaaggttttgttttgttttattgtttatgtttttgctcaagtctttgtgattggttatgttgtgtgttgttgtgcttagttattacactgaaatttattatgaattcattggaatatatcttttgagtgacccaatttagagttgaaattgaacacacaacacactttgttatttttgtttagattgggtatctctttactttgtttatatatctcttttaactacaaaaattgaatgaaaaaaatgatagttttaattataaaatttatcctaactttaccgattgaacaaaatgatatttttttcattatttttaggccaaagattaaagaaagatattgacttgtttattgtatttagtacataactaagtgttcaaggttttatatttaaataaaaatgtatctaagttttagtgacttgttaaaaatgtgggatggattaaaagaagttttataagtaaactagtatatgatatttcatgtaattttaatgacttgtggatttggtaataaatttgtgagaaattttcactacattaaacaaagcatattagaaactttctatactgtagtagtgattgctttaatcaatacatattagttcatcttcaagttttaaataactttgatgcaaaaaaaaattatgttatatttaatctactatttacaattatgctctaatgcataagatgtaaaataagtaaaaataaataattaattatattgaatcatatgatattttataaagaatatattttttaaataatgataatatgtaattaacaaatgtcataaaagtttataaattataataattagtgtaataaaaaagtaatatttaattatttattgtagtttaaatttgatacaatctatattttatattaaatttaacatgatttttagcatgacaaaattgaccctgtattttctaaaatagtaaaaataggatcctgaactcaatttttgataattttattttttaataaaaccaactttgagacaatttataacacgaacagatacaaaaaatgtaaccagttttaccaaaatatttctagatcaaattattattaagttttattttgacaaaaaaatagttcagggttctatttgtaccattttagaaaatacagggtccattttatcatttaacaaaatagatggtctaattgataacttttataaaacacggggttcaaaatagtatttagcctaaaattaaagtgttacacgtgctacaaattatttgaactgtgttaaattttttagaatttttcaaaaaattcagaaatttgcacaacacaactaaattagacttaattttttttttttatatgccaaagtaaatagatgtcggtattaggattgttcatacaatccacaattcgtgattttaaactccaattagtttagatcaaacaatttgagacaagaccaaataaatatggcgttaataatttggtcaatctagaacatttatagttttttagttcgttcacgatttaaaaattctcgcccactgatcaaaccaaactaaattgcctaattttttttatatatacttaatataatttttttattgaatattaatatttaggaacaaacttagacataatatttataattattttaatattgttttaataatatatttttctattgttatttacgtattataagttttttaaattaaaagaatttagtaaaaataaaaattaaaacatttacaaaggataaacggtggtttcgaaccaaattactccattgttaagttaagtaggttggtttgagcatttaattagtttggttctatgaacaaatgttgtagttagtgtatccattttatattgagcattactataggcaggaccgaccttgaaatttaggaggctataggaaaaaaaatatttttgggctctcatttagaaaaaaa

SEQ ID NO: 383307 - DNA, 584 bp, Cannabis indica
aaagaaaaagaaaaaagaaatttgtgggtgcatattctaaaaagactgcaatatccttacctactacgcctatattatggcctatatgacccatatgggcaaatgtgtatgtatgaacgctggctttactaccacacaatataacaagtttaggcctttttcatgtcgaaacaaacgaccaaccttcttaccattaaataattaggaggattagcggccaccatgtttggtttttgacattattttaagaataataatcatactaataattttttttaaaaaaatcaacttgtaaaagtatggtagaaaggaagggtgggtgataattgaattttgtttgttttgaattgatatgtttataatttactcattaagtttgtgttttttatttatataaaaatgattagaaaaaaactggtgtaagaatatgtatttcattattattgtggttttattaagggttattttcaaaaatatgagaaaaattattaaggttattataaatatggcataaaaagtaaattattatgaaatattagtattatgtaatactataatttagagaaagaaaatagagaagagat

SEQ ID NO: 383308 - DNA, 859 bp, Cannabis indica
gagatgacatagaatatttatctccttttgaagatgtgattcaacaaattacatgtatgttgtttttgttccctaatgtttctttctagtatgtctctcaagagatactattgtaatagctcataatctggcaaaaagatcattaggggtagacaatgaactagagtttggaatggtggtattccaaattttattctattgtgttgattttttttccaagtttttcactttaaaattgataatacaatcattcccttaataaattgttttctctcattaaaattcgtgacctcaaaaactaggataatgactgttttaccctaagaagaaacaatctattatctaagaaaaggtaatagtcacgagaatcgatttattgaattttgtgtattaattaaacgttcacgtcaagtcaagtgaagtcaaggtttaataactgaaaatatttcgtagggtagagcggcgccgctgctgcgttactttattaactcactctcactcacctccctactcaaactacatttattgatcaaacactaaaatgggccaaattgattccacaggcccatataatacattgggctcattctgaaactgatatttataggaaacttacaaaaatattagaatttgatataatttttacaaaaatactcatatggaaattttttcaaaaataatgtatttttataaaacactagtagaacataaaacagaacaactcaaaacaacagtagaacaactaaaaaacaccagtagaacaatagtgaaaacttaacacagtatactgcagtattatgaaacttataaaaaaacacagtaaaaaagtaaaaaataccgcctgacagtatttttgtaa

SEQ ID NO: 383309 - DNA, 2104 bp, Cannabis indica
atctctctctttacggtcgttaaacataaaaatgactcttaccctttggaggtttcttagatttgtatcacataagacaaactctttaactttccactttcaactttggttacattcattcgtacatgaacaataatacatatttgtatattatataaatgaacctattatctatactatattattgtatgtgtaattactccattatgtaattgctatgtatgaaaattacaacaaatcttatcatcataataaaaaaaatgttctagaggtagagtcgtagacataaataagtaaataaataatagaagatatattatgtatagtgaaaggtattgtcaaacaccacagcaggtgacaaacactgcaagaaaggtcgtatagatttgtcagatcaaatctatgtatatatattttttttttttgtgaaaaataaatttgttttcttctacaacttaaattcattcatgttttttccattttaaagtttgaccttttttaattattgaaaattcaactgttcaaaaaaatggagagaataatggagtataatgggggtatgcatagtcaattttgttgatattaattgaaaatggaataatgttttttaaggactaattgttgccacaaagatagatatagatggtccaagttgtgtcttaattgatttgcacacaatatattattattattattattattattattattattattatattaatcactaataaaatcaatcacattaagtaactagattataggaattaagttaaagaaagtataaaatatgatctggataagctatacgtgtgtatatatttgtcatagaataaaaaaaatgaaatataataatttagtattgctgatataattgaaagctactattaaatatatgaaataaaaaaacttgccatgaatcatgcaccaacttatttaacatgaatatatatatgaacaaatagtggctcctattcaaagtttgtgtactcgaaaaacaattaaagtctataataatcaatgtctttacaaaacaaattgggtggaattattctctgtataaaaatgccaactttaagaagttaacttaaatttttagtacatcatgtcacaagaaaagcatattaaaattattcaataaacattaaatacttagtgactttttattattgaaaatattgcgtgatttatggacgacatattcgaaattgatagttcctaaaaaaaattaatagtaataattataatatataaatatttttagaaaaaataacattttcttaagagaaggagggggaggaacatacctacttttctgtatgtgaggatccaaataaatatataatttggtttaaataaagaaatgaatacgagaagacactattatcaacatgaatacaatttattttctttaagaagttatatatattattataacattaaatatagctaacaacccaaagaaataaatggtagagagcatttaatattttctatttcataagttatattattatatatatgtttttatttttatgagatgaattagggcggtggtggtggtggcaactgtgtcagaggtgagtatatgaaaactacgaaaactagtatgaaagcaacatggcttaattagtagtaataatatgtatttctaatatatgaagcaatagttgtagtgacttctcaatttcaatttcaagactcactgtcatacccactactaaccacatgccatcattaaactacatatatagatttagttacaaatttatggagggaaagctctacatttatacatatagtcataatatttattgaatatgaggacgtaagtagtaggggtgtgattcgatccaatcttaattgatcgatccaatctcaatcgatttaatagaattggatatccaatcataattggatcggatcggatgcaaatttaaaaatccaattgaatcggatcggatgttggatgagacatccgatccaatggataaccaaaccgatccaatccaatatcatccaatgtcacccagatccaatcatatttaatatttataatttttatatatttaattattttgtttttaaaaaatatattaattat

SEQ ID NO: 383310 - DNA, 902 bp, Cannabis indica
gctagctggcaatctagaagcatcacaatgaaaggacaagataaagattatataatttacataccaggaaaatgaaaaaagttcaaaagccaaaccttttctggatcatgtaaagcaatccatatgcttgtagctatctcaacatcttgaggaagagatcgaccagctacagcaggaatgcatttaatggcattcaggcatgccattctcacatgaatatctttagcataaactccatacagagcctgtaaaaacgtatattaagataaatatgtccagtgaaataacttgagatgcaaagtttaaggagcatacaggtgccacttcatctggttgcagacctagacacaactcatttagcgcagagccaatagaagcttgataagctggggcgacactaagaacgtgataaaggacctatattgcaagaaatgagtagaagaacaagaaacaatggagaataagcacatccccaaggtaaatagaaatacaaaaatgaatagtgtaagtagcactgaaaagttagaatctttactgatagcattctgagcctaggaagtgggagtaagggatccatatgcatgtaaagaatacgaagaacatcattgtggagacccgtcttcttagaggacaacagaattctctccattatctgatgtaaagtataacaaaatattaggaaaaggaagccccgatgaacattattttagtccaaaagaagcaaaataacttactgggaaaacaaaagtaaaagaatactacaggaagaggtccgatatttagaagatgcagaaaggccagtaacaattctctcgaaaagacccaaagaaggtactgccttttgttctccttcaataactgaaggaatcaaatccaactgaacctgaatctcatcagttgtt

SEQ ID NO: 383311 - DNA, 1580 bp, Cannabis indica
tatataaaaaaaaaatgaaattataattaattgaaagtttcattcacatgcatgccattttttctttgtcatgccccaaaaaaacatcgatatccactctctcttaccaaatatggcaaaacaaaacaatgccctagaacaaacaccattccattaagcaaataaaaaagtatatatatatttatatatatatatataatatattgaagtactactatacgtacgcactataatttttattaatacatatacaataatattctttagtgaacttcccaaaatataggctcttattgcatcatgcctagggctttcccatactcatttcctttctttttcccatcaaaatacatttgcatagatttagtaaaatattaattaatagtacaattttatttaatacagagactttttttgattattacaacttcgaaaacaattaataatattatatatattatatgatgtcttcccaacaatccatgatccttgaatacacatgcctatcagtgcaattatataatcatgaaacttttggagaagatacacattccagtttccatgtaaagtttttgaaaaaggtctatatatatatacagctatatatatttatatgtacaagtaccatagctatatggagctacatagagcaacatgcttccccaattttgtgttcatgcatgtcaccatttaagaccatgaaattgcaccgtttttctgaatataaatatattagtttgtacaatatattttgtagtttgcatataatattatataaatatataaaaacatatatgcatgcatggaccatacaaaaggaatgtcaataaatttcacgtaaatatgtatgcgttttccaactttcaagaataatcatgtgatatgtataggctttagtgattatagtgatttatcatcacctaaacgttatagctctaagaataataaatcaactattaatttctgcaacaaaagtgtcaccatattaaatgtgtcaagttatgtatatctacacacacgcacttaatgtggtgtatgaaatggtaataataatagtaataagaattgattacaatatgtttataagtttgttatttaggaatgaatattgtaatttgaattatttgtattattgtgtttgatttgctgtaatagagtgtgatgtaataaaaagtgtactgttaattatttggtataaattagttatgcaagggtattaaagttattttgttttattttatataataattactttttagttaaaatgtattaatttattaaaagcaaacactatagattacatgacaattacaaatttacaacatctaatatgataggcattacattgtaattccatcacaacaacaaaaatgaagcaaaaatagtaatggggattttgatttcattatcactacaatattcaacatcactagcatcggaggggtttaccgctaataacctcaattatcactgctaaagactattagcggggtatccggccactaatcactatttgttaaagattttattattataataaaaaataaatcaaaatatatatatacaactcaattataaaa

SEQ ID NO: 383312 - DNA, 881 bp, Cannabis indica
ttatgtgggtaggatgacttcaattaattcagttgcgctggctctgcctatttactcgatgtccacctttttaattcccacaaatcttagtagacgtttagatgccatgatttggaggttttggtggattagaggcgtggagaaggtataaagatatcaacaaagctctgattgcaaaacttgcttgggaaatggcaagcagtactgataaattttgtgtcttttaaggagaaatattattcttggatctccttttggtgtgttcatcctaaggccattgattctctagtgtgaaaaggcatcctggaagttaggaaagtaatttcggaaggctcttatatgcttttagcgaatgggagggatgtggagatttagtggcaactgtccgtggttgggttatgagaagttcagggaggtgatagagagagtgagaagtaaggcccctagtcttagaagagtggctgatctgttggatttttctctttaaaaattggaataagagctatgtcttgtttttatttggccaggaggttggtgagaagattttattgatagcaattctgagtaatcaggataaggatttgttggtgtggaaagactcttggaatgagctttttagtgtgaaaggggcgtactagtctgatcaagaagctcattttggtcaagcgcattctgcctggaagcttatttggtcctgtaagctgcacctgagacagtgtgatgctttggaggatctgttctgggttgcaccgacaaaagataaatatattttcgataacaatagacactacaagaaatgtcacttttgccagcacatttttatgctagcaaaagttggtattgcgctggtaaaatagaatttacttgtgatgtgttggcaa

SEQ ID NO: 383313 - DNA, 2420 bp, Cannabis indica
ttttttttttttgtaaaactaatgtattccattctctaattacaaaggtaaaagaatggccttttggtttttgataatggttctcttttttctttcctatacttggtttatttttgctctgctgctgaataaatcaaagctataatgaattagtttagtcttctcgtcaatagcttttccttagttcttgatgtattgtaataaatgggaattgttttgaattatcctaagagagttaatctaatgtatttatttaaatctgatgaccctaacatatatatattatataatgagtgagggtattcgaagatggaacctgctgttcaacggcacacttctcaatatttgttcagcaaaaacgatgacgttgtaaaagtaaaaaactagaaataaatatgtaaagagtaaagacaagtaacgtaactagaaatagggcatggagtaaatagtgaaatagtgttattaaaaaatagataactgtattggaagtattgtctttggtagtttgtgaagaagaagttgtcacacacacatgtagtgtttgtggtgatacagataacataattggggttgggatattctctcctctgagtgcgccacctcctcttctgcctaatcaaatacctcttatttttacccaccaggccaccgccgatccacatttcattttgtcacacctctaatactaggatttctcaaattttcaaagtacgtattaaatcatgactattaaattattgagattgttgtatttatgaattttcgtttaaatttgttcaattttactaatgagtgcctaacgtggacggaagtttaggggtacgatttagtacatagacaagcactacgttaagcttccgctagtaaaattgaacaaaattggatgaaagaccttaaatctaattatctcaatagctcggggataatttttaacaacctgaaaagttcgagagttacaatttaatacatgttaaaattgggatcttaattagccttttctaaatagatacaaaaagtaaaatattggccttgagtttctctttcaaaaggccaacaacacaattcataaatagttgaggtattggggtatcaacccaagtaccacattgaaagaataagcaagatttggcttaaatataagtgttccacctactctattagtattcagccttttggaaaagtgcccaaaaataaaactatgagagcttagacccaaaatggacaatatcatactaatgtaggagaaggtgaggtgtcagtccaataaagtggaagaacggagcctaacaagtggtatcagagctagatcctaaaatcagccatgtgaatgaatcctagaaatgccaaacaaaggagatgagcctcggtaatctcatgataggatctgtggatgtgttctagtagacaggtggtgtgctttggaggagtttgcttaagaaaagagcaagaagtctcgaggtagagttgacggatggaagatcgtttaagcggagccaaggtggtcctttgttttaggcaggattgttaggtgtgcaatcaaagttccacattggatagaaatggaaaagatcatgggtatataaggatgaacaatatctttattggtatgaggcattttgggaaggtgcccaaaaataaatcagtgaggacttaggtccaaagcgaacaatattataccaatgtaaagatatatagtgtccgacctcataactagaagtaatatttaattatcaaaatattttatttaaaatcaaaattaagttaaatatatttttatgaatatttatagtaaaatattcatttttttctaataaaaatacattatatcatatgtttttacagttaagtatgtctactacgtgatgatgacaaaaaaagtactcaataaaagagatttttgtagtcaagttacccaattaaaagaatatttctgttgaaagtactaaaattattattttatttgcgttgaaagtatttaaattatgaagatgtgaagaatgctctctgtcaaacggacccttctaaaagttcaagtaataatggtatgcctacatgtttttatcaaaagaattgagatattattggcgatgatgtgaccgcagctgctctagcctttctgaatggcacttctactcttaaaggtactaacaagactctcatttgtcttatccctaaagttgattctcctaccaagcttgctgactttcttcctattagtcttagtaatgtcatttgtaaaattatcactaaaacaataattaataggatgtgagatgttttgtctagtgtgatttctgagaaacaaagtacttttttatctggtcgattaatcattgataatgttcttattggttttgagtgtattaatactttgaataaaagaaaaaaaaaaaaagaaaagaaaagagttagtgctccag

SEQ ID NO: 383314 - DNA, 3130 bp, Cannabis indica
aaaaacaagaagaacaagttaaaagagccaaaaatctaaaacatgataaacaacataatatctattcagacctctaagatcaaaacaactatcgctggtttccagcccaatatcataatatgcactatgtgccgatgtattcacataagacaacacctattagctcagaaaccatccttaagagcttgacactacaaaattattgtagaactccaatttcacacaaacatacaccaaaaaagcaactcttgcagccatgcaaagtggtttcatctggtaatctaaagaagaacaaaacagttaatgcaacagagcagatcaagtaatatataagtgcaaaaattgggaaataaacacaaaaaaaatagcaaagcacatcaagaacagctatttcactagaaattaaaccctcacctcttcttccccatcttcaaactctccgtcttcttcctctacgggctgctcttcctctccagtctctccattatcatcctcatctgcgccatcctccccttgctcatggccgtcaatctcaccttcggtgctcgttatccgtcctgtactctcaggctcggcaatatcggcctcgtcattatccacctcttcttcatcctcatcgtcgtcgtcatcatcgtcatcctcatcatattcaatcccatcttcctcatcactatcttcaatctcatgaacttcaacaacatcatcttcctccccttcatcttcatcaatttcatcttccccagattcattatcctcttcatcttccccatcttcctcatcatcatcaccatcttctccaaccacgggagcaacacgaaacccattcgcctggtgattattatgcccattaaccctcctggccgtctcagtctcctcctcatcagcatcactctcttcgtcctcatcaacatcaacaactccttcaaccacctcgctatggccgttattcatcctaaaaggccgatcctcaccatcaatttctccacttccaggatcatcttcatcttcctcttcttcctcatcctcgtcatcagactcaggtcgctcattctcatcagcatccatcttatccaaatacttaagcgattttatcaacccaaagaccctagatcgataatctttgactcttgtaaccggacacttgtacagatcaagggaaacaagcttaagctgagcaagcggagcaagatcttcaatatattgaatccggttgttcgaaaggtcaaggtcacgaagcgagtcgagaccggcttcaacaagaaactcaagaccaccagcgatccgattgtcggtgaggttaagcttttccaggttcggaagacgtggaaactgctcaagcgaagaagcaccaatattagcaatagaaaggtgctgaaggttctggaacttctctagaagactcggtggtggtaacttcccctgtatgcactttgctgcaccgtctagagtcagcgttcgagccgaaccgtagtcagtttggccgtctagagctgtttcaacagctctctcccaaatctcatccatcaaatttcaaactttcccttctactttatctcatacaaatcaacacacaaaaaactatatctacacacctacaccgaatctatcgatataaccaaagaacaggaatcgattcaaagcaggaaccagtaccaatttctcttgaacaactttccaagaaaataaataacctttaaatcaaactctccttatcctttcgtaaccctaacctgaaaaagatcaacacacaccccagtcaaaattcttaatcccctttctgtaaaaccctaggtttttttttcttgtttatttttttaattggaaatgtttcagagaagaaaataaaaattagacctaaatttctcttctttctttttttctctctcttgtatttggttagagagagtgaccggttgtgataaacctcacaatagaaaagaactcacaggagcgtggcaaagccgcgtggtattagatttaaggccccgtttggcttatgccttgtttggtatgatggatggaaaatagtaaggatggaaaaagtagcggtgttcatcaaaccacccacaccgcacaaactgcctgtactgtacctcactgcaccgcactacggttgcaatttgcatgcactgcactatatatattacaaaattattaatttttacaatataatttttattcttttttcatataagaacaaacatatgtatatatattacatttttttagagacagtttaatatattgacttaatgattagtatatatgttatgatgttaaaattttaataaaattttttttggattattaactttatagattatattataatgttcgataatgatagtagtgtaaactgctcaaatcgcactgtactatactgtattttcgtaatgtgatatttgcggttttaagatcttgcggtgcgattgcagtttgagaaattacaaaaactgtatatctagtttggtttgaaagaaaaaaaattacaactcacaccacccatacagtaaacacccctaacaaaaatagaggatgagtttgatgaaaagcactctcatcaccatctttactctcttcttcaaaatatattactaattttttataattattttaccttatacttacgttatacatgtgtttctttatattttatctatattattaaactaatatattttaaatacattaataaatatattatattatttgagctaaaatatatatagagtaaagcatgtgatggagacctatttttactactttaaaatttagctggataagccaaatacatcatattcaatccctccatcctcgaacacctcctaccaaacatactattagcttctatgagatatttttttttagcatttttagagttaaaaaattattttttggataaaaattaaaaaatttaagtaataaactacaaatattattttcaaaattaaaacaatttacatcatttctaatttactcccaaaatatctttttttaataatatttaaaattatttttcatttaaaaaataacttcatataatatttatctaaaggataaaaataagggaaattttcatgggccaccttattttggcaattattttaaaaaatgacattatttttgttat

SEQ ID NO: 383315 - DNA, 2909 bp, Cannabis indica
cattgtcagcaagattcatgatgatagctgatcttgcttgcttcattatggtttcaacttcacctttcttagttgtatctccttcctctcagatttttcaatcctatctttccaatgcataatccaatttctggtagattagaattgccatcatcttttctttccaaagactgaaatcccctgagccataaaacctttctaagtcgaatctgattgatgaagatgccattgatgagcctttcttgattcttggcaaccttggtgttgagtcttggattctttaagaaccttgctctgataccactgttgtaaattcctacaacacaaactcaacacacacacatgcacaataatgctcataaaccagatacaaaatcagagaggaattaaacataaaccagacaagaattaatgcagaaaatagagaaaaataaaggatgagacaaggattttatcctggttcggatctcaatgtgagtcctattccagctctcccccaaggagtatctccactattaaatattgattacaaacaccaattctttgatcttcaatcagagtagctaacagaaagaaatctactctcaaacttccatgattgacaggttagaacaccatgaataccatggttcataaccttcaagagcagcagtcatttactctctctctctctctctcaatacagatctctaatcctcactttctctttttttttagttctcagtcttaattttacatccattacaattggtgtttatataggttagataaaagctcacaaactgagcctttgaccaaaaaagagacaggactaactaacttaactgccttctaaccaactttaattaactttccacttcttgtaagttaaaagcaagatgggttttctatgaattacaccacactagcgaaaaagggtaaaccactataaaaaaatatatatcttcatttattatctttctctctacgttattactattattttatcactttattgtcattggttatttctgagacaataattatgactccagaagtataaaaacactatataattttttggagcaactataatagaggtgtcactttttgtccaaagaatatttatgctttcgataattagagaaattatggcttaaatttttttatatgatggtctacattatagttagtaaatattttacccgtctttgaaaaattcttaccaatttataatactaaaaacaaagtttaaaataattgattgcatatgtataagaaaaatataagcacgtgtcgaaattgtaaattattttatattttgtgaaggtagaagaaaagtaattataatttgttcgagtgctgcaaataaatatatttatgctgatagagataagaaaaagtagtagtggccttgctatagaattttttttctaatttttattttaaaaatgttactcttgacttaccctttgatattttgatattttattgcaagtctttttttttccccttttaagttgaaattgaaacccatttagcatggagcttatttgtaactttttaagaattggatatacttccactttaagaagcaacaaaacatttttagctttgtgatttgtatgatatgaatatcataattaaaagggttggtggtggagagggtaatagttagtgggccaaggctaggagcgtcgtactagtatagtactacactacccttctttctttgtaaagtagttattaacttattaagtataagccctatccaattgattcccttttttctctgtaattgtaattaatggttacttttcaagggcaaggcctacatccttattacaattattatctcatcacttcttcaaccaaacataaaactatctctatttcccttttttttttattattataataataatagttagagtaatggcatataaactcaaaatatgaattctatcacttttttgaaaggatgaatattattgggtgagtttatagtgaaacctcttaaaataatattttggtagatttcttatttgttcttaggattattttttaatctatataatttattaagattacttgtaaattgttaaattttttttgaataatttacaatatcgaaaataagatttaaatattttattatactcatgattattttttcttatgtgtgtagtaaataactgtttaaactttattttttacactgtaaattatttaaattttttttaaaattcataaattattctaaatagttacaacgtaagcaataaaaacataaaagaagtctatcaaaacgtaaattaaaactgtgacatcattatgtataatatttgagtgcatattttgatttttaaatgcaaatatctacaattcagtttaatttaattttcgtggttcacgtgacttggacatctactcttttttattatttgccactttttcctattaggatttgtttatggctttctgttttgggggcccacataattaggagcgtctaaaaggccgagaaatgggctagccgtgtcttttggagcagcataatgggctcctcttgatagtgactattcctccctcagtttgggccctacactttttaaattaatacacctcatccaccaccacatttcaacatcaatcaatgctctttctcttctctcttacacttccacaacaactattcttttctacttaactatttcttctcttcttttaccttttcaaggtgactagataaataagtgccactctttttcaatttatttattttatcagggtaaatattattttggataatgtattttacaaaaattatcaattagactctctattttgtcaagtgataaaattgaccttgtattttttaaaacagtaaaaattttaatttttgacaacttttttttatataactaact

SEQ ID NO: 383316 - DNA, 3426 bp, Cannabis indica
tttttacgtttaatgaattttttttacttttttataattttctgtaaaaattacacgaaaacaacaagaaaactacataaaagtaacatgaaattaacatttaaataacatcaagaaaaaaaaacatacatataatataaaatcatcaacaaattaacatgcatacaacttaaaaataccgtattttttataaaaaaatattaaaaattctgtgaaatcgtaattttataatttttttttttgttgtctcgttgtatttgtaaaattatcccaagaaagaaattggtccaacgaaaattggaacataagaaggattaagtcataattggtgaaatcagtaaccggggcgcgccaaacatcaccagcagacgacctaatcaacataatcaataataataacaggataagaaaaaagaagaagaagaagaaagaagaagaagaagtgaagaacaaaaaaccagtttccactactcacttcactttactctccattcttcttcttcttcaacttctcacctccctccccccactctaatggccgcaacagtaagcaactgttgcttctctctcctcaactccaccgttaagcttcctccttgttctgtttctactcgacccaccaccttctctacactgcaaactcccatttcctcactaactcccagtaatcagggcaacagactttatcgctcaaccaaagccaaagcctcatcctcatcttcatcttctcctcattttggcagagaggtaaaccccctactttttccacttgattttcttctttttagattgtgtaaatgtaattttggtttggaaagcgcagaaggaatctgtttctgggaaagaatttcgaggaaggagagatgaaaggaggtcgtctatttacgtagatgggtctaaaagtggcggaaaagctcaaacagcagcttttaaatcatttggaacacagaggaaggacaagaaagataaagaaaaagagtctgtgttcgatagaaaagaccagcaggtatggtgtttctcagtgtatacacacacatatattgatatgatgtgtataaaattatatatatttagaacagaatgtgttactgggcatttgctatagtttaattatgtgaagtagaaaaagggtcatgtgggagaatacagtgaagaaagaaaacttttgttggagcaagtttgcagagtgtttggttttctccaatgttgtcttgatcagagaattgttcttaatttcttcaggttgaagcgggaaatcttcaagatgcaacctttcttaatgctgttgttaaggtagaatattcacccccttttagatttagaccttggatatatcataattacgtccaaggaggaatgctttaactaatttgatatgctatgtgaacctgtttaacatctgagctgactttatgggcatactaattattactggactgttattattatgaatgccagcatctaaatgtttaagtcatgctgattatatatttctctgtgcaatctctgattttttatttttttttgtaaaggtttactgcacccatactgagcctgactactctcttccttggcaaaaacaaaggcaatttacaagtactggaaggtatgtttgtaatattattctttttacttaacgaagttgaatagtgaaataataacttattaggtgaaactacatttttgtttatgcagtgcctttatgatcggtgatggaaaactgttgacaaatgcacattgtgttgaacatgaaacacaggtaaatgcactacattgtattgttgttatagctaacaagatattgtcattgtaaaataacgtttttacaacaaaggttacagaaattggttttaactaaacacctttgagttgatgaacttgtctaaccattctctcaactaaaaaaattgtcagtgttatatgacttttctctgcccctttagagacattgatcacatacgccatagggaaattatatttttgtttttatttatcagattgataaatcagattcggtaatatatatctttggtttttgtcagtaactattgcctgagccttagataatttggatattctcattttgcggtttgagaaagcgtttagttagcaaatcaagttgctggacctggtattgttttggtaaatttgaacagcaatgtgcgctactgccaactaatttttcttttatctttgaaatgatttcaggtcaaggtgaaaagaaggggcgatgacaccaaatatgttgccagggtatttcatttcatttttttatgattgtgttatccaatttgaatgacccaagttgttacttgcagcttaccttccactttgtaaactaactccaggttttagccagaggtgtcgattgtgatatagctttactctcagtagatagcaaggaattttgggaaggagctgaaccccttgaattgggacgtttgccccatcttcaggtttagatttcatttactttctttccttagtgggatggtgttatattaattaaatgtcaatgattctttgtttagttggtaatatctgtatcatcatcattattagtgtacgcctattccgaagagctaataaatgatcagtaatagacttgattgaaatattagtataagcaagataaattttccgaatagctataggtttattaaaatataaccaaattttatactaacataaggattctcattttgtatctcacactaaatcttaattctttacacgattatctcaataacacttatttctttgttttgatatcagtgtagtttttgtacctgtacaattttaccaaatgtagctatacttcaattaataaatgtcatagaactgtctaatcatttgatattgtgtcattgtgtgtatttaagcattttgtcattcttactgagcaggatgcagtaactgttgtaggatacccccttggaggagacaccatctctgtgacaaagggtgttgtatcacgtatagaggtatgatctcttacctaagtgcgatcatatgcagtaatgcttatttgataatgtcattcataaccagtttgatgtatcctggtattgtctcttgttatgctggttttggagtttaatttctaatgtttacatttatatcaggttacatcttatgcacatggatcatctgatttattaggcatacaaattgatgcagcaataaatcctggtgcgttgtatatgcaatttacgatttttttgtattattgctttgtcaatttagttactttctatcacaattattcagctgcctcaaacctttttagccatatcttatgcttccttagtattttaggtaatagtggtggtcctgcattcaatgaccagggagagtgcgattggggtggcagttttcaggtaatcttctggtcatgctgtctaaagtttttctttttgtcccttt

SEQ ID NO: 383317 - DNA, 2717 bp, Cannabis indica
tcacctgctttaaactcatgttctattgctgcaaagtgcaaaggaaagatattagcatgggcaaatgaatatgaaacagaacactcacttagtacaaacctagaaagaataccttttgtaattgtgtgttcagaatgaatttggttgataacagataaactaaacaaagcatttctacagcactcatgaggcacggttacaggatcagcaacatctagatatactgataaataatccacgttgttgccttcaggaaaaacaagaatcctcctacaaaattttcaatttaaatatcttcaaattattaccaaaagggtcaaataattacaaacccgtgaacagtagtagcaaataaaactagtattttagtaccatttgaagtctcctacattgaatatatgagaatagagcctcttcactctaagtttagaaaaattgtaaatttcccatgtgaactgtactgatgaagaaccattcctcgaccgagactcaaccttcgtgttttttgctttaccttgttttgtttagaatttaacaattatacaatagtataaaacgaacaacaacaagaaaagtcataattcttgatatatttgtggaaaaaaaaaaatcaagaaatgaaaatcaagacaagactaaagaatgaatattccgtaacgatgacataaaaagcatgttatgatcataaaatgggtatgtatgtagattttttctatgaagacagaatgtaaggaagtaggaatgaagaatagatgaatgaattaatttatatattcagtcggttggggactagggctagctctactcaactgtgagtttgttgagtaagaacaggggttcaattaccgattaaatgatataataaataaacaaagtgatttaccttcgaatgcattagcatccatgaccatgatcaatgcaacaaaagttttctatggaagaaaacgatggcagtacggacacgttttgtctctttacaactatcttcagtttctcttctctatcttttaaaattgaacaatacaatattcttattttcaactatttaaattatgagtattcataaaatattcgatctaatcgtacgatccaatctaattcaattcactgcgtacggatatctgcacgtgttgttgattgacatataaaactaactacaatccaatccatacgtatttattaaaaaaattaaaaaattatatatacaattaaattgtgaaaaaaataataatttaaaaatctaatgcatataatacaactatatttcaaaacttaaaagatcacatgtatattctattgttatacataatttttttttaaaacatacaatttaaaataaaattaaatatttctttatacatacaatttttctttcattatttaaatttgttattagatacataaaataacaataatttattttattttattgttagttatgtaaaaaaaataaatttttttaataaatattaaaagtaatcaatctaaaataaccgatccaatccatacttttgccgattagattgaattagatttgaactattgcatggattggattggattggatccaaaatttaaaatccacacttagtgcaggatgtactatgagcaaaatagtgcgaattagattggatgaacactccttatataaacgtcataaatcgatctaatctaattatatcatctgatccaattacaaacgactaacaaattataataattaaactccacctaaaactaaaagaatatcacgcttgacttattgtatttttctaaacacgtgtataatcttaaatccctaaaacgtaatagctcattcattttcccgttttcaatatcaattaggttttgtgtaattttcttcatgtttttaaatttatataaaaaatttggtgtgtagttgaatttttatcacaaaatcgatccaatccaattaatatttagattagattagattttgaggtctaattaaatcggaacacatgattattttctaaatccaattactaattagattagatcgaatgagaggaaaaatattaaattagatcgaatgtccaaccttttacatatatttagaagaaaatcaaaactccaccctaataaaaagtaatagctctaaaaaaaaaaagaaaaatgcgaatatcattagaaattcatgtcatcaaccatgttgaattagtctgaatacaatttgtataacttgaccaccaaattttaccagttcccacaaataaaatatactcagcaagattgtgggcaacaacaactacgacaaaagaaattttttaacccattttttatacatgaaaaaataaaaagtaagatgaaaggtatcctgtaacttttaattccacttttacatttggaacaaggaccttgtttggcaaatagacaaaaacagtattgtaaggactattttttttatgtatttttcaaatgttgccttagtatttcatgtgtgaatttttatcccaatttttaaagtaagaatcgggataaaaagttccctatttttttttagtcttataatggtatcgttttgatgggcattttttttattgtcttttagtagtacaaatttgctgcgcatttttttttttatcaattatatattttaacttttgagacacacataaaagaaaattttagtttggagtttcattttattaggattattaatatagatcagaaataacatttaatgttgcatggtt

SEQ ID NO: 383318 - DNA, 4750 bp, Cannabis indica
tttttttgaaaaagagaaaggagatcttttgtcttatactggccccccacccgatatacatagatagccctcacttgtggtggaagaacaccgtggttacacgagttttagcacaatctgcactacaaccagcttcagccaaggaaaatacaaaaatcaacttatactaagtttttccaatctctacataaacctaagaaagaaaactcctcaaaaaaagtttagttttaaaaagtccatgcagctgtccaaaacttgactctttaccaaatgtcctctctgctgaactctctttcccctcaaaaatttctgatattcctttccattcaatctgcaaaaacaatagccatcaccgcagtcctccacaatcttactaatcttttgttcccaactggcttactcacaatcatatgagggaaagtataaggtaatacccatatcaaaatttaatcacacatgatttttctaaatcagttaatcaaatctcatcagggctcaaaataagaattaacgaccggaataatatacatagggtctaataaagcctaattctcatatgtttgatagctctagggtcttttgttcgactgtcgttctattgtgctaccacggtttccctccgccaaaagtgagattcccttgtacacttgtgaggatgtcaatatgacctctgtctctttttcagaaaaaagaaaaaagttggctaaacacaaataaccaaagaggaaaagggtaaaaagaataactaaaagaaagaacacttagtttccactaagtgtgtcataaatgtccaagcatcatacctgttgtttcaatgacaatgtgatcgaatttgtctcgtttgttcttaaccaactctaacagaagcttaactaaatctccccgtacagtacaacaaagacaaccgttgttaaccattacaatttcttcatttgcagaagaatgactagcaaccaaagatccgtcaatatcaacctccccaaactgcatcaatatccaacaggattactataataaactttaagcaattttaaaggagcatgcactctggaggcataaagctcgttattattttaaatgagcatgcactctgtatttgcttgccataagctcatcatcaataagtgggaaataattagcatcttgtatgtttaatcaccattaaagggaaatatataagaaactactttttactctaagttccttttaatactaaatggataggtcatagactacattataactatatagaaattgctacaaactacaaagtcaattgtttcctttttttcattacaaaacaaaaaacacaaaagcttcagcagtagtacaggcaagttgttagtgatacaatgagtaagaaacaactcagtaaaacaaattcaaataattttctttgtaatgtctttgtatgtatatttatatagagttgtatatgtccatcacattatcgttcatactactacaaaaaacaccatttatttcaggactttatgtaggaacgccaattctacttcatcttcatggagtaattatttttgaaaaaagagatgaatggagggacctcctccagaatttattaataaacctcacttatggtagagaaaaaccctggtaacaaccataagaactagaggttacagaaatatagttagtgttagaccctatgattggcagtaggtgatggcacgtagaagagaaaaggggtatttggttcattgtatggcagggtagttcttgagtgagaaatgagatagtatatataggagggtagtgagggagaagggcatgctgagattagtgaaattaattcacagcatcatggactagtcccaggctctcgaattcctatggaacttgtgactcttgacattttctgccattaaatattattttaacttctcttcttcttctacaactaattcaatacttctgttactgccctaccgctattcttctatgattcagctattgttctattgggtttacttagctgccaggttcgggtcttatcaattagcagcctaacactatagaagggtctattttcagtccgataagtatttcaacttgtctcagcaattactaatatatagactgtataattcttttctatgtcaatgcaaaaacgaaatccaacataaacatgaaaaagtggatttgattacaatgtgattctgtgaatgagaaatattgttcattagactgaactcccctttctgatggtgacctttttcattgctaaaaaatattgttcaatgcatatcacaaaaaaaaaaaaaatcagagataagtttaacaacaaattatttccaaagatccatctgaaacatagctaacgttcacaatatacaacaaaagatccccatcattgcttacaagcgcataatagtccgaataaaaaacataaaaatatatggacagtagaagaataaaaattgaacatcaacaataagtagttagggtaacagaaaatctcatacctcattttcaatgacagcaattcgcttaccatgctgggacgtaagaatatgattgagtagagttgtctgcattgcaagttataagtcatatcaaaacattgatattaaaataaggaggagtcagttgaaaaataatgagaaggaggaaagaaaaacctttccagaaccgagaaaaccggtaatgatagtggcgggaacacggtggtcgagggacaatgaggtcatgggtctggaatatgagggaccaagtttcgaaaaactagaggaaaaggattgacaaagctttgtgagggattgggaaaccatggaagaattgtagggaataagctggaagaggtttctggctgatgatactcttgaaattaggaaccttgtagccattttcgcgtaaggcaagaagatttgagaactcaagaaccaagtaagagagacttcaggtcgtgagaggagaagaaaagttgagttattaaaaaccctcacagggtttagtgaatagttgaggttttttctctctttttttttttaatctaatcttcattaattacatgttctttacaaactttaaattcaatttgtccctcttagacaacttcctctcatgaaaaaaacatacccttactttgatactctccttaactatgttatttatacaatatggagctatacatttatgttcaaacacacataagtttcggttcaactaaatgctataggttgctccagccatagttggatagaaaacatcagccactaaactttttttgatcctactattcaaccattgaacccaatcatcataagtactcagccaaaggttgctgtccaaccatctcccaataagttgcatgactcgtcatgaataagaacaagagaaaaataaatgtgaatgactctccaagtccagttcgcaaaatgtgcaaagagttgactcagtaggtatattccttttaatgagattgtccccggtgagaagatggggatgcatgattacacctaacaaccctctcaaacaatacatgattttcttatttaagaatttttcatacattttaattttattcatcttgaatttatttgctactaacaacttcttggatatctcctgcagagaagacctccctaagccttatgagttctctccaataccaactcacatctaatttaagctcatgagaccacacatcttggcatcttaagtaaatacagttgactcatttcacacataagctaccttgtttcaaggatacttgacccaaagataattagcaagagatgccttgttccatctagtaccatcacgaaagccaaagcccccgaactttctcggtttacaaacagtttctcaagacgcataatgtaacttactcgtggtacctttctctccccataagaagttcatacacattcaatctattttctcggtaactttttgaggcagcaagaatatactcatccaataatttcttataccaatcagaacaaagttgataagaagggaccgcccaggaaatgacaaatgtctgctagcccaattgtggagtttcatcctcaacttcttcaaaatgacttcacaatcaaaaaatttccatttcataggtctaagcttcaaacccaaatatttcaacaggaaagaaccttcttgaaacgacattaaatctaggatagcaagcttcactctctgttggaccccaacaatcctaaaaagcagttgcaatatactcgattgaagctacatatcccttgcaaaaagaattaagtcatcagcaaagcaaagacttaccaatttaaggcttttacacatcgaatggaagttgaactctttatgttagcgtgcatcttgagaaggcaagagaaactgtattatcctgaaaatctaattatgattaattagagcatattttataaaatatggagtaatatgtgtgttaaggctataatgagtcagattatgatcttactaagctaattctatgggaattagggaattttgttaattgaataaataagcataatttattaattacaaaaattttactgaaatatgtgagtatcacatgctatttataaaataaaaatattttgaggtccggcaactgtggggacctgattggtggccaaaaatatcacagcggtaataattcgtggtattggtggtattgggaaggtaagttgatattgagtttaccggaattaacggtaatggaattgtattattttatgttgggttttgtgccctaaataaaaaccatttcaatataatcagattt

SEQ ID NO: 383319 - DNA, 1088 bp, Cannabis indica
aaaataaaattttgaaaacaacacatttataatttaatgtaatatctaattagcatatttaattaaaacaaataaaaaaaaaagaaaaaaacaattaaaagaattgtaccacaaaataaacattaacttattaatttatatttgattatcaaactttgaaataaaaatttcagaagaaatctaatatttttctctctatcccaaacgatgagaaatagcattgtacatatttattgggaaagtgaatttattttatttctttttattcacttcgctacttttgaaacaaagtttgaggtttgctaaaaaaactcttttaaaacaaagttaatctcccttatcatatcaatatcaaatagtccaaacaatacatgtaaatacaaatgattaaaaaaaaagtgatttattttcaaagacaaaaaaaaagatagaagaggacaaaattaagtagttattaaaaataattattttctgtgataatccttattgtttactactaattaaacacaagtcatgaaattttcaagcgtttaaattttaaacaataaaattatttttttggtcaaattttcgattaaataaaagagttattaaatatttacatataactacttttttttttttgaaatcataataaatatatattgttttttttttttttgtctgaatgcttttcttttatttttagcgtgcaaaagaggaaggcgggcaatgagaagaagaaggctttgggcattgtcttgaatgaggtaaggcgaataggtgggggccatggagaggagaggttttattagaattgggtagaagtgggaccagaggcagaagaagagtgaagaaggtgctatgggagtgggtcccacgcccactattcgcagtggtgtttgggtcttgggccccacctcgtccgccccaacttgagggtaggccacacaaacataaatgggccactaccactggaaagaaatggggtatggctaagaagaaaaacaagtgtggtcccatcttaccttttatttgagggaacttggtatgtggtgggggacctctttttttatttacaaaaaattaaaaataaataaccataataa

SEQ ID NO: 383320 - DNA, 893 bp, Cannabis indica
gttccgacataatgagtctcttcttactcgcgccaatcttgtcaggtgccttctatctctattcacattaccttttttttttatatttatacacctaccatactcgtgaacacaactcaagtttataataactcttgttaaaatcttattagtctttggcccctaatcttgtccattcatatgctccccctccttttatttttttgtcaggtgactaggcgtgtgtttaaggtgacccccttgtgatagagttatagttggtgttctgtcattacacttggtcagcgggaattggcgtccagattcacttttcttgaacaatacttctaccttgtcctcttttccactcttttttttatggaaaaccacaaaccatccttcattctcgagggagtttcccccattgagctctcatcaaattcaaacggggacgtggttgaccattgggcacggtatcaccagttgatgtctgagcgttgggaatgtttagaagaaatttgtgagttttaggagcatctgtctaggcttgaggaggagattgagttcttggggggtcaggatcatgctaatatggatgcatgtctatccctcctcaaacgattataaggtgacatagcggagaaacttactcacttagagcacattttccctcctgagtcgtctcacccttactcagctcccatgcctttggctgtgaagccaactgtctatcagctaggcaaaggtggtagttccacctactaccactcaccatatgttgttgcttagggtcacccaagtgacgatgcctttgttgagcctagattgagtcagaaggctcctactccccgaatgaagaacatgaagtgtgtcgtttctcgttctaactcattttatgattttgtagatatgga

SEQ ID NO: 383321 - DNA, 2039 bp, Cannabis indica
agggtttctttcttcactcacactcacacacacacatctaaaataatatataaaacaaaacaaatataaaaaaatgaaaaatatatgatatgtatatgtcttccaaataataataggaagacaaataataaaaattaaaaaaaaaaatataaaaagccgagataatatgtattttggtttggcaaatccacaaggtgacacgtgtggcagtgggactaagccgcggatggagctttaacacgtggcacaccaccagcccctgatagtgcttccaaaaaggcttgaagattcacttgctctgtcgttattgttccatttggaggtaattctactccaggtgttgtcgttttcttgtagtccaacgactcgtcgttgtatatgtcccaccatttcttcactaacatttttatatcttctctatccatgttctcttcctccccagtatacctccatggtttagatccctatttataaaattaaaaacaatttcaaattttagaatattatatatattttttaaaaaagtatattatttatatagaaatatatataagaaaaagaataattaggtattgtagcaaatcatatccctgaatttttttacccgttaaaaattttgcctgaactattgagattattagatttaaggaattttgtctaatttcattcaattttactcttttaatgattgtttatgtattaaatcatgctcgccaaattttgatatctactaaattatgcccctatttgatatgtactaaatcatgcccataaactttcgtccatataaaatttttttcttaaaattagacaaagtccttaaatctaacaatcttaatagtttaacagctaaaaaaattcaaagaacataatttagtacatattaaagtttgagaaaaaaaaaattaataattaacctaaaaaaaatatataaaaaaaaatggtatttatctaaatatatataatacttacagcagcacaatagtgaacgactttgacttggtcaagatcaatattctcagggtgacgccacaacatggctaaaacaagattataaactggtggaataggcttgtatttgtccctgaagaacatattcaaaaaatcctgttccaaaaaaattaaaaaaattattaattaattaatatagattcattattatatcattttttaatgattaaataaaaataaaaagtggtgtacctgttcagcaaaaagagttggaggggtctctttgactgttttgagtagatcatagtaagtgggcaaactgggctcaaaaacgaacattccagcgttgaagtaaagaggtggttttgggcccaactctttgggccactggactctatcggggcattgctgacaatacccaatctggtattgtgggctattactccatgttttctcgcaaaaacagtccattacggcgtaaaagtaggagtctggctggtcaaacagatggtcaatgttcccaaaaacttgaatatctccatccaagtatatcatcttgctatactccacaaactgaaattttttattcaattaacaaaaaaactattagatagaaaattaatgaagaactaatgaataatattgatgatatataatataactactttttctattataggttggtgaaaatgaaacaaaaaagagtactatatagaactagtgggatttttgtgatttttttcttttttacaaacctcaataatccaaaagttccaattatgattccgacaaaaaagacacacccaaataacttttaactttatccactaattataatattatttttaatttgtattttgtaaaaattactgatcagattttttatttattttgtttaatgataaaataattttatatttttcaaaatagtaaaaataagacaatcaactgattttttatcaaaataaaatttaattaaaatctaatctaaatatgtgatgacaaaattatttacattttctacatatgttcgtattaagaattatcttcaaatttgttatattaaaaaaattatcgaaaattaagtt

SEQ ID NO: 383322 - DNA, 1535 bp, Cannabis indica
actagagtgggttgattactcaatcactaagaacactatggccgaaattgagaatgatagaaagagagagtttgaaatagagagagagcatttgtggttttttattcaagtgaatgattaaactaatacaaagtcttgtctctttccttatgtagtactcagagtaggtttatgtttagaataaatggaccaaacaaaagataaataagctggaaaaactccttatgattgaaatcactatggagacccatagtttgatttttatcattttatttcaatcaaacattgattaaaataattttatatttttccaattttactattactttataatctaaactatttaaatattaattttaatttaataattatcaatttgacccataaagtgttataattaacaaataaaatctaatttatcctctcttctcaattttgcctaaccttagtgaaaattctcaaattagacatagtcaattttcgaatttcaatggattgagtcatcaagatgatatattcgaagtaatgtggggaccatgtgcattaatcactatatgaacatgtaaaccaaacaatagataatagtgaaaaaatgatctctgatcatttattaataagtaaataagattaatattgaaattaaatttttatttggggtataaaatcccaacaaatccaatacgcctgaaaccttacacactcgactaaatgtttagccctacttgcagatctcaaattttgaatgtaggagatcgagacacccaaggctgaccttaagtaataatgggcctaagaaatttttaagtgtgtgttttatctaaagtgaaacgtgagtattattgggcttctttttacaatttttcaaaaatactattttttccaatacaaaaaatatactacataaaaattttggactctgagtttgagtgggctctaagcatgagcctaacccgccttagcgatggtcgggcctagagataccccatgaaattagattttaaatggtttcatatattttttagtatattttaatattattgttaaattaatttatattttctattatttaaatacaatgtttcttttattttaatcttagagcggaatttagttaacttttgtaaaaagtaaaagttaattaaatttttcactttactaattaaataaatattttaatatattcttaatatgatatttacacaaaaattccaattaaccaaagtaaaataaaaacaccaaaaggcactgatagtggctagcatcacttaaatatgttatatcattattagtataattaagtatcgggtttcacataatttaatttaataattattataggatatcattaactaattacaagaaactaattctgggtggtgtaaggggtgtgcatgaatcgattcaatctaatgagaaacgacctccaaacattggatatctaattgtgatcggatcagattggatgttatttttaaatatccatttggataggatcggatgttagatgtggtgtctaaaaatccaatacatccaac

SEQ ID NO: 383323 - DNA, 2837 bp, Cannabis indica
tagaaaagtaaaaacaaaaaaatacatagttggtcttactcgaaattatgtctcgaaatatttcagtttcaaaaacacctaaattcaataattcccacatccgaaaatgtatatagagtggatgagaattgtctcctaaagtgagagctaaaacaaaaaaatgaaaaaggagctatttattctactttaacactatatgaaagttgcacatattttctcaccaaaaatctggtgttgacaggagtcttaacatcataaaaggatgaagcatattgtaaagatcataacacttttggtaaccatttctgctttatggattggtctgttacaggcagctattcttcctcgtagctatacttggttggtgagtttatgttattacatttattaatcaatccctttcacttgttagtgttaattaatttaatgcttagacttaaactgttaatttaatttcattttattcccagccacctatctatttcattgtctctttgggatgctatggtctgttaatggttggagttggtcttatgcaatttccaacttgtcctcaagaggctttactactccagcaggtattgaacttcttatactgtttaacttgtcctatagcaagtttctatacaagtcatcattttgttttaagtaaatgatttatgtatatatatttgtatgtaaggtaaatagcagtttaaataccgaaagttttgagtttgtaagaggcataaatccaatgattttttttagcggcataaatactccatgtttgtaaaattgtaatttttctaagtagggcacatataagtctcagattttagatcattgggtttggacggaaacatatagtattaattacttccaaatcttcttttaataaatttaaaacggagtttgtattaacgaaacttgatgaaaattacagttttataaatattgggtatttatgtcttgtataaattatgctattttatattttgtttgattttttatttaatattttgtgtcttgttgttataggacatagttgaggccaaggagtttctgaagcaaagaaatgttgatgtgggtgattctgaatgacttcattgagaacttcaatttttgttttaccaattttgtacaaaccaaaatgatccaaaagaaataaggcatattcttttataactttactagtttacaagagaaaagatgtttatgggataattgacaagtcttttgatttattgtgattagtacaagggagtttttgtaattttgtaattttatagtaattagttttgttttgctgaaaaattatatgaattagtttggtttgtatctgtttatttattttatagattcaaatcattcaagattacatcaaatttttttgaagtgataacacaattaattaatttttactaattaatggctaattaaacttaattattaatgtaaaaaatttgataacatgtattaatcaatggccacgtgagtcaaactttagagagatatttttattaatcaatcgttcaagaaactaataccgtaaaaatttaaatttagttatttattttgatagttaaatttaagtgttaatgtcgcaaattatttttttagtgttttattagaattggcattagacactacttgtgttagcaccatttataagtagcaaattattaaattatattatgtgagatttagtacttatttatattaataatagtgatatgaaatatctaaatagagaaacaccattaatattttttagcatttctttacaaaaagaaatgagattgttctttttttttttctaactttttaaagtttatgatacattgttatcatgaggtagtgatatttgctcatgataactatctcttattattataattgattgaaatgttatgatgatggtaagttgataactttgagatcaaatgatgaaatgagagtgagagcctctattcatagttttcagcttctttatacaaaattttctcacctttcttacgcaagtaaagtaatatatcatgtaatttaatgcaatggggtcattatttctttattagtactcagcccaactgccgacaaattgcatacatgcattaatttcagcacaatttaacacaagagtgttgaaaaatactcattgctatgtgaattttataatttattaagaaaataaacacatatgagtccttaagatgtttaacaccattaaacattttcgaaaggtaatcaacgggcacactcctgaagggtagctatcgctcaggcgcgtcccaaggcttaggtaggttagctctatgtctagaggccacctagtccaggagcccaaaaaaaattttcttttaaaagtatacataattttttttactaatttttaaaataacacatttctttctaaataaagatttttttttttctatggctcgctaaaatttaggatcgaccttgccattggtatatcccgatggggatggcatcaagagcataccgaagcagtggatccatttccctagctgcgtgctctgatagcggttatggatggtaccaagtccataggtcaatgtcaaacgcatgagtccaagacatcccaaatgcacgagtataagacccgagagtgttcacccatcaagtgtatgtgcaccttttgagcggataaaccaaatctgtgttactatgattatgttaaaaatgtcccgtatcatttattatttattttttatattttttcttttatttttgaaattttagtttcaaatttaaaattttaaggttccgtttggtaatgcttttttaatcagttttttgtttttaaaattgaaaaagtgaaaatattttcaaaa

SEQ ID NO: 383324 - DNA, 790 bp, Cannabis indica
tttaatatttaaaattaattatagtactattataaattattttaaaaaatataacaaatcaatcaaatttaaaaaaaaattaaacacaaaaacttttaccggtgcaaaattatatcggcaaaattaactaacctaaccatcaataaaatatggctagtaagccttttgacggtgcataagtgtgctggtataactatttcccgcataatcctattagcgggtaactattttgtcagcatagaaaaatcctcgagctttttactggcgcatatctgcgtcgataaaattcattgtacctgcctacagatagatttaaccatcttttaacaccatcttttcaatttttgtcggcgcataaactcgtccataaaaatcaataaaaaaccattttaccgactgagtattgtaggcaagttttaccgcacagttatgcgccgacaaaagtgtgtcgacgtgttgtgcctaattttgccagagcaaatttagtgagtgtttgtccatggtctgggaaattctgagatttttattggtctcatgatttatagtgtgatagtttattacgattattatagttatggtttttgtttgattaatttatttgattctaaatttaatagtagggttgttattaccaatttttattggaagatctttagctaatagtcattgataggtgtgatttgtcacatgttcattcacattagagatctagtattctttgcgcttctttgatgtttcatcttgacttattaatcttttagttgaaggtgctattagtagtttttttttt

SEQ ID NO: 383325 - DNA, 1649 bp, Cannabis indica
gattccgtattgcaggtttcagtggattctctagtgaagagtgcttatgaaaattggcatgaagttatagaatatgatggaaaggtcctaaactcacaaaccaataccagaaaaggtaaggtagcagcactaccacctgtggctagccacaactatgcctcagctcaccttagtgaaaccactcagaacaggcaacagttagtccctgaatgcagccaccagttccaacccgaaaacaatcaaccatcaaatcctcagccgatcgaatttcactttgcgaggtctgatcaaactgcactcatgaaacaacaacaacaacaaccatcaaacagtattgcccagcaacatggattacatgtcgggtagtactagtgccgcagttgggtgttcgtatttcccaggagactggttgcggccaagggatgggcagggattggaggacatagtggctgaggaaatccggctcaggagttcggagatgctggagggtgatgatatgcagagacttctgaagacatttaatattggagttggaatggggactggagtttttggtcatgctgatcagacttgctatagttatggagtacaatataatcctcagatggatcagccatttgggcaggagcgcgaaaagagttctggtaaagctgttgttgggtggcttaagctcaaagctgctttaaggtggggaatatttgtaaggagaagagctgcagagagaagagcacagttgactgagcttgactgacttgaaaactcattgctactgatctcattgatgctcactattaaaacacaaggaaaaacaaaaggaatggtgcttgaaaagtagttcattggggttgaagcatgatctcctatatcttcaatatctacaactcaaccaagaatcagctgtgaaatgttgtttacttgtacatttacttgataacacaaaacaaataacagtttccaaattcctttatttgtttcttttcttttttcctttcagtgcttgtaagcagtttccagtttccactcctttcttctcccattcaagttcagaaatttttgttatttgtttctttaaaagaataataatattcagaagtattcttttagtttagcaatttttgatggtaagatggaccaatatacatcggatatatatttggcaaaaaaaaaaaaatgagtaatattaagtgctctaatattaattgtgcttcaatatatttagtacaaattaacttgaaaagttattaaaattattaatttttattgaaattatataaaaggtcttaaataaataaataaaaagttgaaaaactttaaattaatacaaacgatttggcagtagagtaataaaaaatatgttatttattgtagtgtaaattaaatttatgttatactagttaacgtaaccacgtctcacgcggttattataataattaattgaaacataatttaatttataagtatttaagtttttttataaatagaaatacccatttactttaaaatatttataaatatatagtattacctgggtaaaattagaaaattttgagtttttatgtttaatttttttatctaattaaaaaaatctctcatttttttatcatatgaactgagattgttccatcggtaaaaaaaaaaacttaaaaaaa

SEQ ID NO: 383326 - DNA, 1474 bp, Cannabis indica
taaaaaagataatacattatgtaatcaaaattaacaaaggatctacataaaaaaaaaaataataataaaagagaaaaattaacaaaggaaaaaagaaaataatagcgaggctggacgacgatattagcccgcttatctttctttttctataaatagtatgtgcataattttcaatgcctgaaagatatggttcttcttcttcatactcatccaatacacaatagtactaatattttttaaaaggagagatttatatcatttatcttcagaataaaataaagatttataagaaagaaaaaggtgtaaaaggaaggaatatgtctccatctgtttaaatctttattttaaattttaattttgttggtcttaaaagaagagaatgcaatggacatgaaatgacccccttcaatttaaaaaagaaggcaaagcatctcatctttcacactctctctaatgtatgttattatgtctatttaatctcatcttttaattaatcaattttttatttgtaattaaaataataattgtttattccaggtcagattcggctcactcagggggcccaattcacaatcacaagagtgaagtcggtatggttactgtttacggtcaaaggtaagatgacgtgggaggaagagagtagtgtgttgtgtctttttcacgcacacccaaaaaccagacttttttagtagttttgggtttggagtctagcactagcagtgggacctcacactactcaacagactgaaatgcaatgggacccacttttgttattaccaattatcatccattagaccaagtccaacgctctctatgtatatgtattgtagctacttcatcaatattcaattggatctaatccaatttaattacaaaaaaaaaataaaatatttaaaattaaattgaatattaaaaactaaattataagaaaattagattggttattaaaattcaatctaatctaatctaattacatttatatatctattaaaaatattatttatatataataaaaatattaaaaaagtaaaaaaatatatatttttagtgactacttactttttctttgaatttgtattttttattgtttttattctattttattacttctagttattttaaatttttagctgtattaaatttgtaatgataatatatatatggagtattaaacttattaagtttttaggttttttttttatatttttaaattattattaaaatttaagtgtgtaactagatttttaattaaaaaactaatctttttttttttttgacgcggtgatcaaaatcacacatgattaaacaaagtagcaatccacaatcgggagagacatctcctcgaaccaggatagctcatcgtctaaccgaagggcatgctttgccaaaccatgtgctgcagaattttaacccgagccacatgggacaaagttgcccccgaaaatttagacaatcaagctatgtcttcaaaata

SEQ ID NO: 383327 - DNA, 1906 bp, Cannabis indica
gttatcataaattaaaaggataaattatttataataacaaagtatataagtagaatattgtctaatcctagagtatatttagccaaattgtggtaaactaaattagttatacgctcgacaagaacaacagtcacactaaaaaaaagatagaagactaaaaattacatctgaatgatccaattcaaactatggaatattacttttgctcccatttcgtgtgatacaaaattaccaacaatgaactttgagaggacagcaactaccttaccatactcatctcgaacacagcttcaattccaattatattacaatttgcatttaaagttgcatcgacattaatttaaagtcacccatagtcggcggcttccacagcatgggcacagggattgggaaagatagcctcagaatagcactaaatgatttttaacttttacaagtcaatcgtatctagataaatatttagccattttgtttgtttgaatcataatttagccattttaaattatttagaagaattaaaaatttacaaaaatgatatgtacttatatttttaactaaaatactaaaattacctgccaatggtgactaaaaacgatcacaacctaacaattgaccttctctttgccatcgctattttgtgtgctataaattttctctacgtgaattacttttcttagttactgtaaagaaattctaacatgcaatggtgaaaaggatttgagctgtgttatctctttcattatgaaaacttactcaagacaagagccagccagttacatgactcgcccacatttacattaattgaagaaatggaacacaacccctataggctataacctaacctatgaacgaacacaatttaatcactactcgagtatagccattctcaacaatcccatttaaatcatcatcaagattacaaaccctaaccctaacctattttcacatgaccatattaaaagtatctcctccataattactaggcaaattcataaccaactatagatttcaaaggaagaaaatctgtgaaacgaacaccacccctcaacacaaacaccaaatccaatgacataaattttaacacacaatcagtataaagcagcagctaagccatgtcaccaatcaatcaatagatgaatgtagacactaagatcaaattcatgtcatctgaaatgtattaaatactaggaagaaaatttaaggaattaaaagttaaaatcaaatgagcaaatagttccacaaggtcctcagtttaatcatcaaacattaaatatcccaaccacatccagtcttgcaatctggagaaatcaaaggtagtatgttccctcagggaccatttatgcagtaaaatcttcaaagggtttgaagataaaaggtatacatataaatggaattttgaagtatgtgttattaaagggaaggaagaagaaaaaaaaaagagaaaaaagacaggaacataataatatattgccatcagtgacaaagcaaacctagcggcacgagcaccagcatccagcaaaggccacccacccccattcagtatgcagacaactcctgaaaatgcttttcttccaacactctcacaaaatcacatgtttctcccctaaaattggagagtatggccccaaagattctaaaaaaccggctgaggggcggtaaggggaacaggtatcaaaaattccccccaactaagcagtaaaaagcatatgccaccatggaagttcaaagataataataataaaaaaaatttaaaaaatttaaaaaaaaaaaaaaaacctaaagaaagaaagaaaacaaccccaactacaaaaaacaattacaataatacccataaaactacaatgccactaaattagtacataaaagaagtactaattttttttacttttttttttttacttttctt

SEQ ID NO: 383328 - DNA, 1230 bp, Cannabis indica
tgaattaaatttcaaactgaaaatacattcatacaagtcaaagatcatagaacaaggccgtatgaatctcaaatactcagattgtcgtaaccaatacagtttacaaaaatacattccagggtcagctactaaacttgctttactagtactatgtacttaaacgttgccggagatgaatcaaaaacatctagggaaattcagaatccagccactttttgatattacagggaaacatacataagctatgatttgttgatcgttctgctttttatttttattcgaattttgggagcaacagaagtagtgccttgtgttgaggcgtcaggcttattctcaacccttactgctgctgggataactaatttggatccactagatacaattggttttgcttcaacagttgatgatttgatcttaagttcctctttcttatttatctgttctactacagaggataccttggcctggtcgtgcaaagaagaggacttggccatctccttttccttcttcttcttctcctttttcagccgcttcttttccaaatactcaggatcgtccttgtgccctttatggtcttcccgcttccgtttcttgtctttgtctttcttcttctttttctccttttcttttccatgaccatgccttgaatctgacagagcttgaagacttgcaaacttttgtgcaccggcatctacattattgtcctggatgaagctagatgatgatgggtcatctggttgacctagcccggaaaccttgcttgaatcagctgtgcattggagttccttgcccacatcatcagcatcactcacaagtttcgcactgcctatactagcagtcatcctggacccacgatcatagcatgagttgacttcttcaagattttgagtactaatactcacagcttctgcaaaagttctgtggggcgcatcaacagacattgaactgctggccccgcgatcaatttcgtaatgtccgccctgggatctttcaagattaagattatcaaactctgttgctctacttgtagcagtagatcttttcattctgattttaacaactggcctcttccgtccatgactcgtagaaattgtatcagcttccttagaaagctcgggaattgccaaaccatccttggaagcttcagaaacatccctggaaggttctggagccgcagatccatctttcaaaggctctggagcagccaatccatctttcaaaggctctgga

SEQ ID NO: 383329 - DNA, 2142 bp, Cannabis indica
gctaaaatattttgttgatcttattaagactttaaatatcaaatagtctacttaataatatattctcaaaacgtatttttcaaaaataatagtctaacctcatgactgtgttgtgtagtaggtaataatgggtagtatttttcttctttcttcaaaccaattgaagcttcaaaagtaatactaacaagaataattatataataatgatcctttcataaagaagaaattaattagtgatcctttaataaatatcattgaaagaagcatcaacaaaaacatatatatcgaagtctataaatacaaaaaatcaacaaaatcattcaaaaatctgttctacaagaagagtgtcctcaaattatagtatcactatttgcaactatatatatatatatatatttctttcaaacattttatcaaacatatttcctacacaataattttaagagcaaaagtaatcaaagagcttggacttccacgtctttagatcctattaatctaacattctcatgaatttaattttataaaaattatactcctaaaataactaataaaaggtagggctaacaatacaaaaatcaagcaaagatccaaaataacataaacagagaaaagtgattaatctaaactagaaaaatattgtgaaaaacttccttgttcacctaagaagaaaaaaaaaaacaaccccaagacactcttattcatccctaggtccccgcatcaattccttccattatccctaacctaacactatgttcaatcctaagacaagtaaatttgaccaaaaataaaacaaacaaattagctaaagaaaaaaaaatataccagtccccatcatccgtcattgttcgtccccattgtttgtgatccccagcgccctccaccatcgcacgaagaacagctcgctgttacgaaaattatgctagacaagtgtacgtatcaaatagtactcacacaggtttggtcgaacccagatgaattgaaattgattaccccaaaactagatttgtgtttctatttaaaaataattttgaaagagaacaagataaattgacaaaaaattaaagaaagcgataaaagttgttcaaatatgaatgagagattaaggatatgaatcaagttgtttcaattaaccaattgataatactatttactattcttctttctttaagtgatgacagactataaaaaatgacctaaacactcttcagacgataaaggtcctagactatatgtcatttattgcatttgtgagatagaataacatataatttacattaataaataatctaagggtcatgtgtgaatactatcgtttcatattagaacctatatttattcatttagagtattctcaatactcaatttttcaactttcgtattgagatcatagatcattcataaggtggccaataaaacacatgtaataagtacaaagatgaataaatcaaacagccaagaaagaaaaaatagcaaatcatattaacttttggaataaaatcatccaacattcctcaaatccctaaattaggaaattagttcataatctcaacatattcaaatccatgattaaaataaaaacaaaataaaacataataaattaaagagaagagaaaaaaattagatggagaactagatcgaattgtcatgctcgctccaagagttttcttctcttgttttttagggttcttttctgaatttccctataaaaatttaaaacccccattttaaaacttaaaattgagtaaacacgaaaatctccttgagccatacggagtcatcgttgcgactgtaatagccttgttacggtgactataggaggtcaaaatcatcgattctgcctaggctccttgattgcgaccacaacatttcttgccacgataaaaattagttgtggccaaaaatggtctctccgtgacgagctttaaaaattcagcatgatttttctcatcatttccttccccgtcttgtcctttcggtagtaaacaaatttggcagtttaaaactcgggaacctaaaataaaggaaaataagcataaaattgtccaaaaagtaacaacataaaaagaaaataactctaaaaagttatccaaaagtaggctataaatagcctaactgtaacgccctaatgctaaggcacgctac

SEQ ID NO: 383330 - DNA, 1684 bp, Cannabis indica
cctggacatagctaagtagagataaagcttttctccgttttactggtttgtccagtagaggtggttgctcttggtgttccttgagttttttgaaagatctttcgcattctttgctccagaaaaactgcttgttccccttcagcacatcaaagaatgtgagacatttttcagctaagcacgaaataaacctgttaaaggcagccattctcctcgttaggcattgcactaccttctaattttgttgtggatccatatctatcaaggcttgtattttctctcggttctcctctatccccctcttgttgaccataaagcccaaaaacttccccaacgacactccaaaaacaaatttagcagggttaagcttcatcctgtattttctcaaggttgtgaatgttttatctaagttattgatcaagtttcctgccttcttggtctttacaagcatttcatcaacgtaaacctccatgttatgccctatcttgtcagcgaaaaacttgttgacaagcctctggtaggtggcagccgcatttaagtccaagtggcatgactcggtattagtaaagccccttgtctgtgatgaaataagtgtgttccttgtttgtcgggttcatgggaatttgattatatactcagtaggcatccatgaagcacaataactcatgccctgtcgtggcatatatttaactggtctatttgaaggagcgggaatctatcctttacgcatgcttaagttggtgaaatcaacgcagaccctccattttcaatttggctttgggaaaaaaatggggttcgacacccacactgggtaaaaagcttctcaaatgaactgaattacgctgaccctatccactgcttctttcaatgtcatgtatcttacagaatcaagagctgatctcttttgtgtcatgggtcttgcctggggatggtgagacatcaccgcgggacttattcttaccatatctccatgcccccatgcaaaacaatctatcatcctcttgaggtaatgtttcaactcattttttagggcttcgtggagtcctcttccgatcttgagtattttcaaagggtgctttgaaatcaccacttcttcaatttcttcatctcactctgtgcgggcttcttccttcaccctctcgtctatgtttgcatctaccctttatggtgagggtactccaatcgcacatgatcatctccatagactcacatggttgcgtggaaatcttgagggatgtgctgtagcattcccttgcttccttctgctctcctttcatcgtagtcactccacctagagtagggaatttcatggctaagtgattggtagacataatggctttcaagcggttgagtgatggtctcccgagtatcgcattgaaggctgttgaacagtctaccactatgaatgtggcattattgtcaccttttgagggtgctcccccatagtgagtggtagctcgatcatccctaggtgtggatggaatccccagtgaattcgtatatggacgtcgtgcatggcttcaggtcttttaagctcaacccatttgctcgagtgtgctccaatagaggatgtcaactgaactgtaattgtccactagtactcgatgcacacgagtattatctagttgtatcgctaacacaagagggtcattatggcgaaagtggaatcctgttgggttttatgccc

SEQ ID NO: 383331 - DNA, 930 bp, Cannabis indica
aaatttacggtttgagtttttgaagtggttgtatgtaataggagtttttatacgatttttttgttacaatttaagttttaatgtaaaattccataaaaatatatatatatatataaaattattttggattgtaagaataaaaaagccccatatatattcgaatgcttttatgttattctcttttctatttattgatttgaatatgtgtaatcatatgtgctatatattgaaagaatacgtttttatgtattctgtaattgtattcaatttaaataaaatttaattcattaaaccatctagaaatagaaagtttttttttttcaagaaatggagagggttttgcaacataaatgatgcaaatcaaaaccctaatttaaaaaaattaataaaattaaaataatatatcgatagatagattgatcattgatatttttttaacataattttataaatttcaagattatatgattttatttgagtattctttcatcagaatttataaacttcctccatcaatgtatctcttagcaagtttatttaactttgggtacatataatataaataataataataataatatttatgaagctatatagatacagttgtctaatcataaatataaaaacaaatatggaggaagagaaggagagaaaagagagacaaacaaaaattaatattataatagtatttcactttggtggtgactcgatattggaatcgaaaagtacatagctcctgaatagtatatacagttggaattttatgccttatgatatacatagtccctgaacagtatattttattttatgaaatttggtgaaaaactctttggaacgcctttgacaaacctcaaaagtaaaaaacgaaatgacaaaaagatgatgagaattatgagaggtaaaaatgacgttaagaaaaaaaaaacgaag

SEQ ID NO: 383332 - DNA, 1214 bp, Cannabis indica
tcttttgatgaatttttagatccctttcatcactgtaattgaaaaaaaaatctttatttaaatataataaaaaaataattaaaaattatttatatattattaaaattattttaaaatttattaaattttaaacaaaactatatattaataactaactgattaaaaaagaaataccagagaaaacctaaccctttcatcgtagtcatgatcattcgcatcccatccaatataaatactatgaaaattttatacaatcaaaatatgttcaaaaaatcaatatttctaaattcaacctaatcaacaaaaatattatacaatttaatatttgatgatgttggctttgaatatgtatttgaagaaaagaaagatgcgcttgatagatgtttttgtttacctatgagttcattctcattttttttttgctctatgtcttttctagtgtatgcaaagctaataatggagaagaaggaagaatgagattagagtggagaggattagggtttcaaaggagaaaccaaaacaaaagaggagaagaagaagaggatgaggaagaagataaaataaaaaataatatattttttattttttatttttaaattatttttaattttaaattgatttaaaatattttttaatacttaatattatgtggtctactaaaaagttgtcacgtgtatacttgtgtaccctgtggcatgtcaattgttgcacttaacatagtctttttggacgaaagtgtaaatagctaacaaaaagtaggtttgagtagttttgtcatcaaaaaattgattcgggtagttaattgttaaaaaatataaagtaggtcgttttgccaccaatatcttccttttttttacattttaaagttattttaataatatatataatttaaatatatttttattaaatttaaaaaattgatattaggtggacaaataaaaacttgtcacatatatattagtatacacagtggcagttcacatttgcacttaacagacgagagttgaaggaaaagttgagaccaaaacagaaccaaagtatggagagtttagccccaaaaaaattagtaaagaggttaatcgtaccaaaccttaatgttcagatagtttagtcgcaaattacccttattattattattattaattaacaatactaagtttgtattaggatttttcgttcttaaatttatagctacataagattttttttttttt

SEQ ID NO: 383333 - DNA, 1971 bp, Cannabis indica
gcgactgaacaatgggagaaaaatatctctttttcactctgaaaaattatacgatatgtacattctattatgttacatatttatattttcgagcagtagttggttttaggtgtagtatttcgacggtactctatcgtgcagtaaagttccgatacaacgacaacctacgctgacacaattggaaacttcaacaaggaaggcacaaaatcaaggatagatcatacaacgatagcttacgccgacacaaggtgaaacctcaacaagaaaggcacaaaatcaacaccacaaaggatagattatagcgtgataatcaccattattacaaacaaaataataataatagaagaaaaaaaaaaaagcacggcctgtataaaaggggaaagccacaaacaaccaaaaataaaagaacttgacaatgaacaccactaaagaggaaccaccacgtataggagattaaacaacatgagggtgcaatgtcctcggggacaaagctacattgttcctattctgattgcaatcttcatagagtgtctaagtttggaaatcccagaatggaacccaatagggccaataccaaatcattgattaagatcgaggaaggtggaaaactccaaaaagcaagccacaaccaaacatttccactaaacccaatgcaaagggtgaaaaaattgaattctggggtgaagaaaagagaatttaagttcttcaactaaggcataagcacttgtaataggtactttgaagtttttctatttcaataatattgatctgtggattagagtttattaacactcgaatcacgtaaaaatcttaatctcttcttctttattttacttctttcttaagtttatttattttataatcgaatttcaaaattcctcataaaatgttctagtttttatatgtttatatatctttatatgttataatgaatatataacataatttaatattcaaatgaaagcaatctctaataattaaattaattaactaattaaataattatttttataattttaaaataataaatctttagactaattaattaattaattttctagcaacattcttttagtttctttttcggattcgattgatatggttggatatcatcacaacaactttcgtcattacagcatgctcaaccaatcttctcatatccatagatgatggtgccaccgacatcacatccgttacaaccattgtatacatcacaactactacagccatcgtagacatcacagtgccagccaccacttcttccagagttcaatgaaagcaagagatcagatgactttatttctcagttatagaaccaagaactaaaatttaatttgtcttagtaactaatattatatttgtaagaactatttacttttattatgctattgtgttactttgttaacatgaaaaagtttatattttatattaatatttattttatttattattataatcattttttataaattaaatattaatacttttaatattgcaaaaaaaaaaatatatatttttttaattacaaacctctaggggcgactatgttacctttaaaagtcaaaaactgaattctaacacatctttttaggggcgacattttccaggcgaatttttgtcatccttaatacaacttttaagcgcaaattataagagctggcttttatgggacactttattgactctaatactgatttggggcaaatttctatcgttttaggggcaacttgttcactctaatactcataaatgttgtagtgaggtagagagatagattaatatatacttatgaaattactttattatccatataaatatttttttaatcattttttgataatggtgcatatgtaattttgaaatgaattagaatagagagtaaaaatccttcttccatttgtggagggattcaaaatggtaggcctatataaatttttaagggataatatcacaaatacacaaaaataataa

SEQ ID NO: 383334 - DNA, 2366 bp, Cannabis indica
ttgtatttattcgtgttaggaataatcttttcaagtgtacaaccaataaacttatttttattattgattcctttagtggttgatgataataagcttattagctatacacttttttttttttttgcttaaacaaacgagatttagatagtgcacatcttatctctagttctttcagctaataataatctttaaattcatcgattgagatttatatagggtccttaaaatggttatcagttgaaaccgttcccataaaatacctattgcttccaaatgagtaccactgcataagactacacaattcctttttgaaaaggagataaattctctttgtatataatataaactttaataataattaattaagcaagataaaaactttacatcacattactattattaatataataatgagaaatgtttaactgctcaaaacacttcttcacactaataataatttattaataagggacaatccccgatatacacgtttgactagattgtataaaatccaattaaaacttgtatttttggaggatgaaatgaaagtggagtggagattatacaaatatcttacattattaacttcttaattgattttcctaactatctataatcttatgactcactcttccactttaattttctttggggtcaatctttagaatccgtacaccatttcttacatcattcatttaattaacttttaaataaattaattaaattcccttaatatatgtttgagtaaagctgcttttccaaatttgaaaaacaaccaaaactttatgtataattcagagtaaggagaaattaatccagaaattaaggtttgtatattgggatcaaaaatttagaaaatattcaaatgtaaaaattataatctcaacactattatgaatttgatgtaaaattaatctataaacagatagcaatagagactaatattataacaaaatatttatacagtaatttttgccgctaaaaataaataataaaaaaaattataaccaaaaaatttatataaatatctaagtgtacaaaatgaataatataaagatttttacaaaaaaaaaaattacataaaaatttaactgcaacaaagtgaaatatataaatatttatgcctcaagtgacaagtctttcaataatatttatattatttatgtgacttgggttagacaactcactaataagcatattagttagttatagtgtaataaataactaggcatctaattatcacaggcaatctttcgaaaattcccatgtataaattttgatatgaaataattataataataaacaaatattggctataattatattgaccaagaacaactagtaaacatgggatgtctgaactccacgggatacaatttgacttggttgtttatttatttataccatacacatgtttttgttttttgttatttttggttaaatcctaaattattttatgttctctattaatttaggctctcaaaataataataataataataataataatatatctacatcaaagttataattatcttcaataatgataatttaataaccgattaaaatgaactatactaattaataaaagtagaataatttatggtataaatacttaaatttaattttcgattacaaatacatatttaaatttttaatttttgaaataatacttaaattataattttgaaatttctataaagactttaagtgtcaagtaaattgttacgtgacaatatttgattggtctaaattattaaatttttattttttatttatatactttaaatataccaataagataataatacgtggatattactctaaatataacttaaatattattaatgtcaaaaaattaaacttaaatatctataccgcaaatgtggttatagcatagccttatggttccacagttctcctcacaaacaggaggcccttaattcgaatctttcccttccccaatataaaaaaaatatctatactccaaattactctaaaaaaattacattttaatataaccttatgtacctggcacattaatgcagtaggaatattagcggtacggattaagttaattttttaaactaaaccgcatatgtagtttttacgctttctcaaaccgcaatgcaagaccttaaaatcgaaaaacctgcaccgtaaaaataaagtgcggtttaaacgatttacactatatattaaatattaaaataaaaaaataattaaattattgtattgaaatatctcttaaaaattatataacatacatgtatataatatattacatatctattctatataaagtgtgcctatataactaaattcttggtttatgataaatttatgggtatgactttttatttata

SEQ ID NO: 383335 - DNA, 2654 bp, Cannabis indica
tagatatatacatataatttcaatttccactgtaaataataaatatagccctagcaatgggggaccatagtgagtagttaaaaagtactggtctctattcatgtacagctactatactgccaaattatataagagagagagagagagatgagagataataatgatgactacaatgcttcaccatcactacacatgaattttgttttggctaaacaaaaaggggctcacactttggttgcagatgaaaataataatgggacttttgcttattatcatattgatattcataatatttaaaaattaaattcaatattgaatcttgataatagaatccccatcgtgttggtaatgaatcacatagaattagattcaagaaatattttgaatttatccctctttaattttattaccacttttaagtcatgtccttttcctactaatacaaatctccactgtctatatttacggaatgaattttgaatttatatgtatatatttagtacatatttaatttttttttttgaataaaaacttattaaaattaaaaaattaaacacactttatattaatactcataatgctattttttatttttttctattctaatttcacttatccatgacgataatagttcgatagtggcccgatactacctattttttcttgtttttatatataaaaaaatgatagcatcaagctgctatcggactaccatcgaattatattctgcatttatagatgttaagcttcattaattaaactagttagaaatgcatcaggtcaccatcagacttatactatcagatcatatcctacatttataggtagcatcagggtattatcggacattcgtctttaacctttactcattttaacaataggaaggcatcaggtcactattggaccttcatctaacctttactcattttaacaacaggaagacatcacaccattggcaaaaaaaaaccaattttctctccaaaactcaaatccgaccgttttctatcttaaatctaacatcaactcacagataacaaacattaattatacaatttattcatttgacaacattgttgatggagaagtcattgggtccgtgggtcattaggtctggtatggtcattgggtctgtggccacgctggtcgcggagagaagagaccgagattgtgagtggtggattgtggatcgagtccttgtggtgagttcagagagagagagagagaagagagaaagagatcaagagggtcaagtgtttgaaatgggagggatggaattgagttttatgaaatgttagcctattctactaatataaattaacttaagtttaagaataaaattttaatccaataaaaacataaaaaaatcaaatttcccgtctatttattcagtcctatataactaataacaaattgcttatatagcattttattgatgttaatgtggcaattagcgctacttgtataaatttaattaaaattaaataatactaaattactaaattcaaataagtttttaaaaaatagataaataaaaatattcaattaaattatatacactatgaacaaaatgtagtataagcacttatcaaaaaaaaaaatgtagtatataagcatttgttaggacaaacaaacataagagtcataattcaataaaatgagtagttcaagcagatttttaataaatagcaaacatcgagactatatacttaaaaggaaataaatcttatttattctataaatcttaataattttcgttgataatgtccgacatctcaaaaagtgcaccaatttggttcaaagtgctaaaatagtgtgaaatatttgctccattatatgcaccaaaatgttgggagaacaattcactaaaaaaaaagcaaaatattatattttgtgtcattttaagaattgtaataaataaccaccaaaaatgatggagatctctacacaaaattggtattaaaaaaattacaccaaaatggtgtaaatccttggagattatctgatacataatgtatatctcatgggcatgaatgttaatgcattaattaatacctaaacttttgacccaaaaaaacaatatacctactaattggctatatttattagtgaaggtgaaataccaaattaataggagtattcatcattttaggagaaataataatttagatgtgtttaacacgaatatgcaattattatctctgtttagttttttaatggtgagttcaaatttacatatccaacaatgatttgaaattaggtatattggaaaagtatattttatgcctgaagtataatttgatctattttgtaaaaagcaatgttggaattatcatttaatagaacgtgaattaatactaatcatttatttgtggtaaacatatagccaaattaattattatttaaggcagtgaataattcagttttgtgtccatttactttgaaggttgtgactgatgttagcaaatggttagggagattaaactggccgaagagctccaaagattagtatgattggttttccaaatccctcaagagcttgcacgaaaaattgttcaatgttgtttgcttggctattgtctattatatttgggttaataaaaataattatatttttgaacttaattgcaaatgtgtctcttgtattagcatggata

SEQ ID NO: 383336 - DNA, 2029 bp, Cannabis indica
gtcttttgattcatatgatcacaatcacattccactgtgttgacgatactgtaattgtgaataaacatatgatctggatttaactgattttgagtgtaaatgtaataaacatattaaaccattagcatgtaaaattcatgcaaacataaatcacttcaaatttcttgtattgataactaatcagattgtaaaaagttttatttagagcacaaaacccaacacaaaagtactcaaagaaaatgtaacgtttcaagtttgaaaatctatgatctacagatgaagaatgtaagaccataattcaaaatagttggatgaatgaagaaacaactccccttctagcaatcattcagaatatacatcaatgtgcatttaacccgtcaacatggcatccgagtaaatataattcactttttaaagaaattaaagaggttcaatcgaaagttgtatttttatacaatttgcaaagtgaaagaattgcaagtgaagagtcagttacaactagaaaagaaactcaattaattacttttgaagaaagatggcttttgaagaaagatgtcttttggaagcacaggacatgtgtacattgattacaagtaggtgatcaaaatattaaatattttcattaaaaagcgagtgcaaaaagaaaaaaaaaagaataatacaataagaggtatgctatattgtaatttaaattaggttatgtaataattcaatttagtgagttctaattatttattttcaacacgtttagttgtttgatcagtagaggtttatttgatatgaggagtcttttaatctggtaatattatctattattagtgtctaatgtttaatctagttgtatattttttaggggtaatgtgatattttctaaattgtaattaaaaattttatatatcggagaaaataaaataaggacgactatgtttatttattaaagtaatacttatttagttcatagtgaattttggcttagaaagaaaatgatgaatttaagttatcatagactagtagtgattggttagttggttttaaatagatctggtactttaatattagaatctaaaatatttctttggtttgtgttctaggcttttctttgtagtgatattttgtgtttattataaaatattttactaagcggatgattgttggttaaattgtccaaataggtttgctaaatgaagagaatatacaatgtacaaataataatgagatggagaatataacaaaaagatactatacttctctcttcacatctattttgccttcagatgagagtattgacgaattgtatttacaagcagtaggacaagtggttactgatgagatgaataaaacactgataaatgcatttttattagaggaaattgaagaagcgacgtttagtatgtcgggaaatgaagtcctggtctagatgggatgagtgccttattttatcggaagtattgggatattgttggtctggcccgtcagcatccaaaacagtccttgattgtttaacaggagtagctgatgtgatttcgatttcatcttatgaacaatgtgtaatggtttgaatatgattgtgtataaatgatatattcaattaataaactatatgaatattattattacttttcttgttgagtcattgtgactcacaagtgctatgtggtgctgctaagggcaaggaaaagttagagcaaccatgaggtgactaccttctccagcaatgtacatattgaccccactagcctgtgtgctgagttgccatgagttgttttggactggttgtatctgctgtattttgaattgctattgtctatagtcttttagttaaatctttttataacagggatccccggaacatctttttactgccgttacaatgtctatttttagtctaattttttaatattctcacatttttttataattaattaatatactagtgttaatctagtttataatatcacacacgtgacgttcctatggagtagggccttacaactttgtatcagagcagccatagttttaaaggtcctga

SEQ ID NO: 383337 - DNA, 1264 bp, Cannabis indica
aaaagaaaaagaaaaattgtataaaaaagaatatgagtatttttaatggttaagttttaaaaaatatttattcagatgaatttagttgacaaaatataaaagtgttatattattgaaaaaaaaaattgtatacaatcattatttttaatagactatacaatagtgttgatgcatgttatttcttaaaaaaaagtatatataaataaacatagtaaataaatttgtataccacagtgttaaaggttgatgttattataaaaaaaacactaattacacttacaacagaaagagagagagagagaagtaataaagatgatgggattgaaccaataaaatgaaatctgaaaccaatttgaagggttgtaataaagaataggcagagaaatgtgagaaaataatacataccttttaagttttaagtggagcaaaatcaataaagcacaaaacactgagcatgggcggtagtttccagaattgaacctggtaatatggtaatgaaaatggggaagggaaagtgagtagctaacatgtgtggttcatatttaatatgggaaaaacgtgtgctattaaaatctcctactttgcggcccacaatgcgagttcactcaaaacttaattgcatcactaccacataatattacatgaccataaaatttaatttaatttaatttaatttatacttataaacgtttattttcaaaaacaaaaaaacaaataaaaatctcccaatttgttgtctgttcatgcaacaattaactcatgtttcgtctattttaattttatatttttttaaacaaaaaataaacgcaattaaatcgtgttgttttggtaaaaatacaataccatggcacccaccgtcctctaaaaacaattgttaaagaatgtgtactttattaaaaatttacattcaaggtaaagtttatatgttcgaaaacttcaagtttacttttaacattgtaaattatttaaaaattttaaaaaaaatacagaattaatgttatgcaatgattgtacatttaaacttgaaacttaatggcagattaatggtttaataattattaattatgattgtgcatgttttagtagaaatgtaacttattctcataaataagtgtttgagaaaataatttcttaatagagatttttttgagttctaagtgtgataagcatgttatatagaaattattgttataaatattaataattatgtggatgtccaaattttttatttattactatgaattgtaatgaacattcctctttt

SEQ ID NO: 383338 - DNA, 2011 bp, Cannabis indica
tttccacgggcggaggtgagtgcaaagcgttagagcatcatgaagagagttggaattgtgaaaggcagctcgcactgcagatgtgggatttcaccgagacaactcgaggagaaatagagtctaaaaggatcatcttaaagagttgaactcgcaatggtgagattgcactgttaatttgcttagctttttcatttgggtttatcaaactctcatgaagcctttggaagaggaaaagagaagtctttaagactaggggtgttcataaaatagccgatccaatccaatccgcacgatccaatccaatcattatcgatcatctgtgttctctttctagccattttctttccttagtgacaagaaaccataatttttttgtatttgaattaaaaaaaagggtaatatacaaattaattaagatattctctgatgaaaattacttgatcatataaataattcaaatatgaacatttgttgaaataataataataataataataataataataataataataaccaaaatttagtttatatgtgatttttaatattaataaaaatgtagatttggggataacaatataacaaatctttcatctgattatgtaattatttaaattattctcttaattaacagttttgtgtacttttgagatcgaatatttgtttaattttttgagtctaaaatatatgttattaattttcagttcatatctccaataatgttgtcaattgttgcaccactatctaatgtcatcatcccatccttaccaaacgaattggcattgaacatcttagctcgaataccaaccaagtactatgcggttttgttagttgtatccaaatccattagatctgccatatgttcttcgcagttattcgcagaaagaatttgcctcaacctcaccaaacaactcctctacttcaaaatatcctccccatacctagactccaccaaatgattagccatctcggatcaaaacccaataggcaacaagaagaggcttctccaagccgttgagctacgatcaaaccaacctaaatgtaaggctgttgcccatgttgttgtagaccacaacatttatgtcatcggcggcattagttatgatgatcttggtaataaacattgttccaatgatgtgtggatactcaattgtcttttgaacaaatggtatcagggcccaaacacacaaacgtcgtatgctgttgctgacacttttgtagcgaacaacaagatttatgtggttggaggttcgtatgaaaatcaatttaaacaaccacttatggaagtattggatccggtggttggacattggaaaaaaattcatttctttgatcacttggaattaataagaagaagtaagtttaccctagatgtatctaatgataaaagaagagagtgtgttgtcgatggggtgacttatcgccctattttagaaggtggcactacacaattaattgggaaaatcgaatggtatgataagagtgaaagtgagtggaaattgcttggagatgtgatgaaatgggagaaaaggtatgccatgcgtattaaattggttaatttgaaagagagattggttgcgatatgggtagagaggtgtttttttgatgagtcgatttttgaggtatggtgtggagaaattgaagtgagtaaaaatgttgatgaaaatggtcatttattggggaaaatgctttataagttttgtttgcttgaaaaaggacatcctccttcgaatctacatcgtattttctttgacaattcactattttttacagcagaaatttctgttacaatctaagtttttaggacattatatatttgtgaaactttgctcttttggtgtattatcattttcatattttgttgctctattatatcgatgagtacctttttttttaatttattattaaagtgttttatattatatttttgagttacatatttgatattcgatgaatactttttatatatccgagtactttttatttttatatgatcccttgagttagtttc

SEQ ID NO: 383339 - DNA, 3807 bp, Cannabis indica
caaaagaggcccgagtttattttcctttgtgagactaagtgtgctaagagcagggtggattgggtggcaagatatgtgggctttgagggagtgttttgtgttgaggcccagggaagaggtggtggtctagctttcctttggaaaaatcaagatgatggttacatacatggtttttcgaaaaatcatgttgactttgttgttactactgggacacgagatcattggcgaattactggaatttatggggaaccgagaaggcatttgcgttggcaaacgtggaacttgttacgtgaacttaataaccaaatgaaccatccttggtgcattattggtgatttgaacaatattgtttgtcaagaggataaaagtggtggtaatagatatccaagagctcttattgaaggatttgtgcaagctttgaatgattatgatttaaatgatatggaaattattggtcatccttttacttgggagaagaatagaggagatgctagttgggtggaggtgcggttggatagagcgttgctaaactcgagatggttacaaaaattcccgaatgccaaattgtataatctacatcactcaacctgatcatagtccaatttttttggaacccgaaactgtagttcatttgggagggaataaaagtttcaagtttgagaatgcatggctcaaagagccaatgtgttatgagattgttcggagctgctgggaaggaaatattggtgaagatttatggtctaaacagaagctttgtgtgagtaagttggaagaatgggggaaaacaattactggcaacttcaagcagcgtatcaatgcatgtaaaagagagctcgatttgttaaaaaacagaagggacatggcttcggttcaaagatataaggaggttaagaagcaactcttaaaagttattgatcaaaaagaggctttttggaagcaaagagctaaacaattttggcttaaagagggggatcaaaacaccaagttttttcatgtcgcggcaagtacaaggaggaaaacgaataccattcagcaactgaaaaacgatcaaggtgtggaggtcaattggaatttaggtttggattgtgtgattactgattattttgctaatttatttagctcttcatatacaaatacacaacctgttattgactgtgtggaaagcaaggttacacccgaaatgaatgagtcattcatgcttactgttacggaggatgaagtgcgtcaagcgatctttggaatgcaccccgacaagagcccaggtccggacgggttaaccccggctttttaccaaacaaactggacaacagtcggcttggatgtagtaaatgttgtacagcgtttcttcactactaggcagtttgagaatgatgttaacaaggccaatgtggtactcataccgaagacaagaaatccggaacgaatgacggacttaaggcctattgctttgtgtaatgttttatacaaaactattaccaaagtaatggctaatcgactaaaaccagtcatggataatattgtctctcactatcaaagtgcgttcatcccggggagactcattacggataacattatggtgtcattcgaagtgcttcattatttgaaacgaaagaggcaaggaaaggaaggctttatggcactaaagttagatatgagtaaggcttatgataggattgaatggtgttatttggaagctattctaatgaggttgggttttgctaacgaatggactaagctgttaatggagtgtgttcggtcagcctcttatcacattgttcatggtggtaaaaagatgggtcctattttccctcaaagaggcattcgacaaggagaccctttatcgccatacatcttcatcttgtgtgcggaaggcttctcggctttgattaggaaatatgaattgaggggttggcttcatggatgcaaagtggcaaatggcgctcctcgggtgtcacacatgctttttgcggatgatagctatctctattgtaaagccacaatggaggaagcttccaaggttcgggaattgcttactatatttgaacatgcttcgggacaacaagtcaattttgggaagtccttttttttcagcaacaacaccaataggactactcaaaatcgaatctgtgcttttcttcgtatggtgatggcggatgaaaatagcaagtatcttgggttgccaagcactatgggaaggaacaaaaatgctgtgttgggttatctcaaggaaagagtccgaaagagagttcagaactgggattccaagttcttgtctaaagcgggaaaagaagttttaattaaaacggtggctcaagctttgccaagctacgcaatgagtgtcttcttgcttccggtagatatcagtcatgatatggagcaacatatggcgaagttttggtggaaacttcaaatactaaagacaaggggatccattggatgtcatgggataagctatgtcaacataaaagtgtaggaggaatgagctttcgaaacttaagagaccataacattgctttgttgggaaagcaaggttggaggttactttccaatccgaactctttggtctcaagaattttcaaagctcgctactacccgaatggtaattatctcacggcaactattggtaataatccgagctttatttggcgtagtatcttcgaagctcagaatgtagttcggatggggactcgatggaaggttgctgtagatagtaatgtgcctgtcaagggtgagccgtggttgataggagaagagaacccgtacgttacttcaacgcatccagctttggacacagcagtggtgagtaacttaatggagattgagggaggaatttgggacatggaactgctgcatgacttgtgtaacagcagagacgttgcagcaatcattgctgtaccaattttgcaaaatattgcagcagacgcacgggtgtggcaccacgaactgagtggttcttactccgtcaaaagcgcgtacaacctgatccaaaaaacaaaaggggcctggaatgaagtcgaagcttcagccttttggaatgaactttggcggttaaaaatacctcccaaagttaaaaatttaatttggagagggggtaccaattgtctctcaacaaaagtccaattgattactaaaagagttgatatcaatagcctttgtccagtgtgtggtatgcacaacgaaacaattatgcatgcccttgcttattgtcctattgcggcacaatgttgggaaaaggctaatatagcgacaccagttcagcaggaaaccagttttagggactggtgtgtggctgtttttcgcacagcagggactgaaaaaaggcgcctcttttgtgttttatgttgggctatatggggtgcaaggaatgacaaagtttggaagactaaaaactctaatgcctcatatatttttgcattctccacatgctatcttgatcaatggaattcggctcaagctccttatttggagacatcacggacaagtttaatggccggggatggtttagaccgatggtgtgcacctaatgctaatgaaatcaaggttaacgtggatgcatcgatatttgagagtagtagtgactttggttatggaatggtggctagagatgaacatggttttttggttgaaggtgtctcaaggatttgtcatggacatgtacggccggagttagctgaggctattggagttcgtgaggctctaagctggatcaaaaataagcaatggactcaggtgacccttgagacagactgtttggtggtggtacaagcaattcgtaatccaactcgtatgatctctttatttggtgat

SEQ ID NO: 383340 - DNA, 1001 bp, Cannabis indica
tataataatattatatataatattcaaacaataaacaccgtcaatgaaattggaaagagtttggatatggtttggtctacactctacgactttgaaacatttcgactatgaagcaatagaatgaatatataaataataaatgtagatatttatgtattacaccaaatcaatgtgggaaaggaattattaaataaagctctatctgggtgggtgtgtgtctgtgtaaaatgtaaatatataatgttcactttttaatatggatatatatatatatatatatatttatagatgtggacttagatataccaaaaggaagtaattattatgtgtgaaagcttattaattattaaatagttcagtgtttgttatcaaattagctccggcagggatgtcgatcacctagttgctaactataagtcggtgttggacctataaattttggaaaaaagacaaaattatatttgcctattcgaccgacaaaaaaaaaacaaaaaaaaagagagagaatacattggacctagtttttgattagtactatgaatccaaatttcagtatatatatttaattccataaaataggcttgtataaaataaatctaattccacaaacggaatatttataagtcgaatattatttaattactttttcttagggttaatattatttaattgctttcacggaatggaaacacatgtaaaaatatgggacataaatttttttttccttctttttttaaatgtaggacagaaagtttcaatccgccaaacacattatagaacccaattgtttataatttctttgtccatagtttaattggctgatttacaaattttgattggctttggccaagaattttgtgcaaattttgaatacttttcaaataactaactagctcgcttaataaacaaattatcagagtgaaatactaacatttttaacgatacataaaattggtatattattttacttcatgacataccaaattatacatcaaattcta

SEQ ID NO: 383341 - DNA, 3096 bp, Cannabis indica
caacaacaacaacaacaacaactttattactaattatcgtcaataatctctttccaaattctttgtgcttctcccatttggctgaactctgaaaactcaaccaacttaacgcggcttccatcaatttcttcaaagcttctaattttttcatgccaactcttcctcttcactttactctcatcattctctgatctgggttatctttacttctcattcagatcctaattctcacaaagattttcttatcttggcttctgttgcttcactttggaactagaaagaagccaatttggttcttgggttattcatggttttcattattagagtgttcagtctatgtgaaatctgcttttaaggttagttttatatctattttctgtttctgtttttgggtttgataactattcgattggaagttggataagcatattttctattgatttggtattcaagaaaagtatatattatgtttgttttgtgaaagttttgttctcaaattgtgggttcctcttgatcttgaacctgaggaatggaagtaatctattttcttcagaatcaagagtagttccgcttagatttgattaaaatactactatatcaatctagagtgaatcagcttaacacataaaattttgggttcaactctgtttattagatattttaagaatccaaacttgagattcatcactacggattcacactgttattgtctgaggtgaagctgcaatgagatcgtatttgttttgaatgaaaagataattcgtgttcttgttttctgcatagttcatcttgagtcaatatctttgtataatacttttggaatccattttaatccatgttctttctttccatgccataatctttggttccaatttatatatttcgtgtttgatttagcatgcttagtattgattttagatttgggaatgtacgttatcaaatattcaagataaaaagagattgaaaaatgattcagtgctttcatttcattataaaaatacatttttatcttggcttgtgctcctgttagttttgattgaatttgattaaatgcccaaacccttaaaattgtatattatatttaggttacatatctctagttgtgtcatttcttctatggtaaaatgatgttgttctcactatatcctcattaggcattgaatatggtttgtgttgaattttctgtgtcttgttataaactatgcagttcctatattgatctagttcattaaattagctgatattgatttggcatctaaagatcaccttttttctatatgcagaagttttcattagttttgaaagttgaaggaaaatcttagaactttgacaatgggcagaggtagaggtaaagggaaaaagaacactgttacagttgttcgagaagatcctgaaagtggagaagaaaaggttccagcttatcggagaagaggaagaccgcagaaaccattgaacgaagatgttcaaagagaggaagaaactgagaaaataggagaagatagtgaagaagcaaagactttgttatatcagggtgcctcagagaatggtaggaaaagacaaaggtctactccggtgaaagaaatatggattcagtaaagatgagaatggcattgaaacaaagtccgcaccagatgaaacagcaaagtttgttagtttccgccacattagcagtaggcggaaaaacaagcctcaccgggctgcggaagctggagttgagtgcaattgacgagtgagtatagttcacctcctgaaaatggttgcttaccttcttattaattgttgcataaatagtaactatctaagcaaggcaagccaatttcagtttaaacatctgctgtactttttgttttttcaccttacaattttttggtcccattcctcaagaattgggtgattttggttaaaagacttaaaaatgtactccttttttcatttcctttttgaggtaattgatgagaagccttcatagagaaacatttttctcactacattcattcatttttcttactacatcgttacttctttgcttggcaatgatcttaatatatatatacacacacatatatggaggtaaactcaggaagaaaggtttggaaagcatttgtgttcatgttaggaaaacttgctgcccctttgataggtcaattttttgagttgaaatggaaatggagtgcatggtactacattagccactaatgactttaatgataaacccttttatactttagcattacagaaagaaagaaagaagcccatacttacaaaaacatcattatatttgcacttgaagcattgatttgatttggtggtactatatcgtgtattgcttctgttccaatcattaggtaacataataaaggtacatggtaaagttatcagctaatgaaaaactaatcattcttaaatttggaatctttatatgaaaacaaactattgtatttagagtggttttagtagacggatgaggtgtgtgtggtagctgatagttgagtagtagtagataatgttaaatttacatggacagaagtctactttggtataggttgtttcagatgaattggtcactgaagtgggaagtgggaactggaccaactacttatattgttctggtttctattataatagcaaatatgtctaagtattttgtgtagaaaaagaattataaaacaattgaaaatggaaagattagaagccaaggcttctcgataccatttaagtagcaaagcattttagaccaaaggaaagagaacattggtggtgcaaggtcagaatagaaggggcgttatggaattatttgcctctttttcttcaattccattgttattattattattttccattcgcttggggcacctacctaggtgtgtggtctagaatatgaattttttttagaaatgggtccatctgtgcattgaaattatcaacaacatttaaggggaattttcataaatatataaagagaaatgctaaagggtaccagtggtgcctaacacctttctatgtgtcaatatcgctattggtacaactaagtatcgagtcccatataatttaatataatagtttttagggagtatcgctagtcaatcgcaacgcgac

SEQ ID NO: 383342 - DNA, 735 bp, Cannabis indica
cctattagatattaagtttagttggttgtttattcggttaattccgttattttgtatgtcggttatgttagacataacaacttcaattatatatatagctatcctgtttgtattgcttcattcgaattcaatcaataaaactattctcctttttttctgttttctctgtctttagtctttacccactattaccatccttaagatcaactcttggagattcaagatcattattaaaattaagagattgtgtaaaacgagaaatagacttactactaagcttaatttccataagaaaaataatgtgggggacattgttgttgaatgtgcaatcaaaaatgtttgaacgcgaatttttaattaggatacaatttcttttctcttttataaattacacttaaattatattttttattaaaaataatgatatttattgaataacatcaaaaaaaaaaaaaaaaactaaatgatacaattaaaagtacaaattaaaaatataactaaatatttataggtaaaataaacttactatattttcaaatggtagtagtctttgtcctaaacggtggtggtgatgctgtttttgtttctctctttttgtgaagagatgacactttttttaatgttgctggtgaagttgtagtaaactgggaaattataaattaaattggatagggaaactcaattaggaagagagtgtaaaagagagtgcaaaagagagtttccctagcactcctc

SEQ ID NO: 383343 - DNA, 2264 bp, Cannabis indica
tttttttttctgtatttttcaaaccaagaaaaccaaactaattcacatcattcctatgggaaattaactctaatctcagtacattacatttaaaaagttccttggaaaatatatatacacatggatggatacacataaacatttaaatagatttgtaaattgatcactaatttaagttaatattgctgtgtttttgcttaatttgtatttaattgaatatctcttaaaatcatcaaatctaactagtttttattaaaacagagacacgataataatcacaaaatccagagacacttactttacttttcgagggagagatcccagaagaagaaccagacttttcgagagagatactgaagaaggagagatcccagaagaaaatactttcactcttcgagagagagatcccagaagaagaaccagacttttcgagagagatactgaagaaggagatactttcactcttcgagatgaagagatcccagaagaagaaaacggctattttttcgagagggagagagagaggtatttagatcagcccaacggtcaaattttcaaatacctaaggaaattaatttactttttaattaattaaaaaagaaaagattggagtgaggaagaagagactaccggcttgagagagaatgagggagctgagaagttcccttggtcaagccattcactctctcagtctcatatggtcctcgcagctcagctcagacacgaaggtctcaactttcttgggctttttattggcccagatccttcgtcttcggcccaattttttttttaacttttctaagttaatttatttaagaatattttaaaataccattattcttaccttcttgtaagttttaacagaaatatgaccgagcaattgatttttccaaaagtcgacttcagataaaaaaaaatcattttattttttagttttctttttgtccatgttagttggtgtaagatttcacctcacaaagagttcgaggtcaaccaaataaaaatttaaaataattttataataatgtttaattatttattttcgtggatcaatccaacatgacatttaatagttaaatttggataaaaagtgtaaattgctaatggtattgtagtttggccaccaaaatttaggttttgcggttagttgctagtaatctaaaacttttggggggattttgctacaatttactcaaaatataaaatataaatcattttaatataatataatacaatacgactgaacacggcttactaaacgaatccttagagtcatctcgagttgaagatgccacattagagcaactcttcactcaaaaaccctcaatgtaatttgaggcgccctaacatcctcgaagaacttgggagaaaacttagctgaaaatcctttgctctggtttttaagagttaaaatggctaaaaggatcaacaaaagttcctagtcctttataagcaatctgaaaaattaattaatcatttcaaaattcaaatttttgggttcccccaaaagtaggcgttaagcactcattgtagggagtacaactgtcaagtgtgcttagatattgaaccgtaattcgaggtatagctatcaataagcattaaatggtcaaatatcaaagagacccctagtcagagtcacatcggatcagtatctatcgtcgaagacacacgtcacctattcagacaagactccaggctgagttaagtccacgtgcgaccaggaaggtcccacatagacttgggggcaatgttatcctttttttcttttttgctccttaacgtgacaatgagaatggatgatacgtgtctcacacttccgaaacctgggcggaggaaagtattcctagtagcccattaatggttacttaacatctgtaacactcggatgttcaagcatgatggtcgagaggatgtccgaccaagatgcagacatgcttatgtcgaacgaagcgtgtaagttggcaattcgagagatcaatctcgttgtttccaagacatgaagacaatccctataattgtgagattgagtcagagaatagaggtaacacactttagttttatattctttacattgcaattatagaattaatgtagtttcctattatattcattataaacaaaggaaaaccattcttcatgtattaagtctgtaatgccctcatgctaaggcacgctacagtgcttttaaaattacagtgcaatctttgctaatcaaagaattttctcaaaaatcgtatcaaataaaaacttttatattaattaat

SEQ ID NO: 383344 - DNA, 1236 bp, Cannabis indica
aaaaaaaaaaaaagaaacatatacaccaaaaatcacaaaatccccacccaaacaaagttattgggctgtttaacccgctggtccgctttccctgcgtcttagcccaagaaagggaccatacaatccatggtttctttggtaaaatccaagtctccccctacctatatatatggtcctcttatgctataacccaacttgatcttagagtgagatggacttgattgattttggacacttgaaacctacctcggtaagtttacaaggtcaaggcctataaagataaataaataaacaaatatatatatatttatatattatatagtgtggggcttcaacgtacgtttagaccttttcttttgaagaaagagtcttaagagacttaatggcatggcatgtctgtgttagcttgcttaactaattaaaaaggaataagcaaaagcacattgttttgggatgcatgtgggttcaacataccaattatttagccgtataactaatatttctaagaaataagtgagatcacagctccacacgtgttcacgccaatattttctcatttacgcctaaatttcttccaatactaccaaaactcgcacaataaaactagtattttaattttctaatcttaacaagagaagagaagagaagtgaagtgaagtcaatcataattaaacaaaagatctctttaaacttttacttttctttttgctgaataaaagtcaattttctaacaacgttcttctctttcttaagtagctttgaccttttaaacccactaaagcagggtctttgtacttgactttgaataattctgatatttttacagtcatgtgagttgttattaatgtgaaacctagaaaagattaccattctcgtgcctatttttatgcccttgctttgtttttattagctttttgcttgccggtggtatcgtataacatattcctttcatggccaaaactttgtctcatgtgcttctactgtatactaatttaaaaaaactttttacatatatctgagtatttaagacatagactaccaaaacttaagttagtattgttcgaacaaaaaaaacaacgtagtagaattaattaattaaatagttacacaagttggtgaaaggatttcgtctggtattataaccttagtttcttctttttgagcaaaagagtattttcttttatctttctaacaatattattaagggtttttttttattattttatttttatactt

SEQ ID NO: 383345 - DNA, 1565 bp, Cannabis indica
cttactttgctttaaagctttcagagtaatcattccttctaggccttaaaaaacaaatttaaagtatagtaggagtaagatatcaacttttccctatacttattctccttctcttcttaataaaattaactccttaaaagttatcttccaataaaattttagcaacaaacaagactgtttgtaaatgaagtaaacatacctagaaacaaattcatcttgaaaagacaagacttttaaccagttgactaatcttccaaaagaaaaaacaaaatgacagaagaagattccttcacgtatgtacatgtgttcattgggatgaaacgaaaccacctctgaatcttatggtgtgggaaacaagtgagatttcaatttgacagaaattgaatatagaatatctacatatgcaggctaaaaaaagaaagaaaatttgagacttacacttgaagaattgagtaatggaactgcaggcatcagttggattagagaaatcaatttttttctaaactcagccttattgtacaactcttttcctttgaaatcatcacttccccataacattatcatacagttcaagtaatggaacaacaagaagttttaacttctctgtctgtttcagataagtaaacaagaaaaagcttcttacactcctacataatcaaaattaaggacaataaatatcaacataatcaatcacaaaagaaaaaaattagggataggggaggcaaagcatgagacaacaaaaaggaatgtagaaatatcccattagtgatcttcaaaaggaacttaccttagattttgttatatgaggatggcagtatgctttaaattttatttttcctctttttttaggtgaatgtgtgaatttattagaagcatttactgctttcttcttgaggttacaaaattagtaaaacaccttgtgtcatcttcagagagagttttcaaaatcttatcttctatctttaataatatcttcatgagtactcatttccttctaggccttacagagcaaattaaagtatagtaggagtaggatatcaacttttttcaatacttattcttcttttcattttcagtaccaaaaatcttaatgcataatgaatattatttgtgtagatgagatgctagttcccagtagaatagcttataagttagcagacatagcctcaaaagaatcatcaggtaatgaattaaatttctatagcaagttatgcaaaagaaaattgcaatatcactttcctgttgttgttcattgcttacataaaatgaaaaattatcacctctctcactatccatatcaattttttatatttttcaacagctaagaacataagaagtaagacatgtagaataaacaatttgaatcgaattggaattttgggtgtggagaaagagctcacaatcaattgagagtgggagtggagtgagagatcctggtctaggtaggtaaggcctttggaaactaatcgcaaggttataaagaatggaggaggccattgttgctgtagtcattctccaattttgatttcttcaaaaaaaagagaggatcgatcgattgggatttt

SEQ ID NO: 383346 - DNA, 1504 bp, Cannabis indica
agtaatgaaaacacaaattaaataaacatatatagtgtactaatgatgattgcacatgttgaagataatgagaaattgttgttaattagggcattggaagccagaagggacttccttgttacacttgttgagaagcaattcctatgtaagtggaacattaagattgatgcctaaaatattagctttgatggcagtgcaaaggcagatagcagcttggagattagctatacccccaataagtgtgcaacaaggagtcttggatggatccccaataattacaagatgcaacagatttgcacactcccaacttaagagtgtccaaaggacatttggctttagaattaggaggaggaggaggagttgtataggaagagctaaccatggtgaagaacaccaaattaaggaacataaggaaaacagttgaactacccatatgtataatgttttaaaacaaaaaattaatgctataagaactcaaagagataatttagcttcaaatgatttgttaaagttgatggaattaatgttgagactgagttgtgcttttatagaaaataataactcttgctttttggagaaaataataattttagtacgtaataattagatattatatgatattttattaaggctaattaggattttgtcccttgaactttgacatgtactaaattatactctccgaacttttaaggtcgttaaaaatgcatcctgaactattgatattattagatttaaagacttttttttaattttaataaaaaagtctaacatggatgaaagttcaggggctataatttagtccatatcaaagttcgagtggtatgatttggtagatatcaaagtctggggagcatgatttagtacataaacaattactgaaatagtaaaattgaatgaaattagacaaaagtctttaaatctaacaatctcaatagttcaggggacatttttaacgaccttaaaagtttaaggagcatgtttggtacatgtcaaagttcaaggaacaaaaattctaattaaccttttattaatgaactagtagtactattttggtatctttggaaggattagggaatagtactggaaccgcaacattggagctaaaatattaaatgattgtgatgtcattgactattatatatattcttccatatttatcaatttttgtgtacataattgagagattttgtgtacatcactacaatctatttttacgggaaaatgtaggactagaataaaatatcattaacttaaaaaattgttactaagtctcatttatttttctattcaacaaggaaacaggtccgcgtttcgcgtgtgatggttaaataattatataaatactaattgaataataaaaattaatatcaaataattttaaatttatttttatgtatatttttttaaaaatatatatatgtttatttaaaaagaataataaatctttattaaaaaactctaaaaaaaattttaaaaaattatcatacaattttttatataa

SEQ ID NO: 383347 - DNA, 1734 bp, Cannabis indica
tatatgttataacatcaacatacaattacaataatgtatataaagaaaattgaaagactattttttctaattgacaaaaaattaaaaattttgttttcaattagcaaatggcatgcgaatattaagtaggagtatcacttttgcttctattataaaagtattaatctcatttggatacttaaataaattattatttttttatatgacaacacacattattatatcgagtccccatcgaacactattaaaaatttacgagcagatagtgacaaaaaataacaaaaaaatgcaataaaacccaaatcttattttttttttttcaagaaattaagcaaaacaatttacgagtaagaaagagagggaaggaatgagttagggggtttgtgactgagctttcgattttgggtcttggttgtgtgtttaagcttccgttttctaggttcatagtcgattttaggtctctcggtgcagtcaaatttggtagcctcgatctcttatgcgtgcaaaaacgagagaggaagatagagaggttgcaagagaaaatgagttaaaggaaaaatagtgttttcaaatggcgtgaacaattttggagtcaatgcaaagataggcatggatttgttagggtgtccaactttgagtcaatttttaattaacactcacttttaagcataattatctaaattttcctacttatatgtgcatatataaatcacatacaaatttaacacacaagtcacttttaataagtgaaacattctaaataaaaatagttaattaaaattacttgtcacaaaagtatgtcaaatttaggtgtacacatataattaccaaaataggttgtcttcttccccttatatagagtctcattaggggtggcattggcaattcgtgttcgtgtcaagacttatatattacaagcaaatgtgaaactcgacccatctattaattgcctcaaaaactaaaactcaaacctaaacagattgacctgaaccgacttgtttaactcgttatataaagaatcatatttaattttggtaacttatcaactcattaacatattctaacaagtttaagacacttacaatcttattatgacacatttataaacaatttaacatatttatctcctatttaaccaaaacatataattcacatataataaatttaagactctatactcttactcatacataagtcattatcatgtcattttcagattcaaaaaataatccatttaacaaacaagcaggcctaacccaagacatagacaagctaggcttgtgcatacaacccacataaaggcccaaatattttccccttttgtaaacacacattatttttagagatatttacgcacagagaccatttttgaattttattcccacgattaccgctacatattttattaatgaaaagtagcggtacttttcaattttttttggacacgtgtatacgtggggtatttggcgtgttctacacgattttttactgtctttcatttcaaacttttttcagtttgattcatattcttatgttctcagtttctttctttctctctttttttctctttcactagcattgttagggtttcattttctctgctagggtttacattgtgtgtggatatttgttcggaggagatggtgcttacaaggagttcgatgtcgccgtcgccgtcgccagaggcttctaatgtaaagaaaaaaaatagaaaaaacagaggagagtaattaa

SEQ ID NO: 383348 - DNA, 3346 bp, Cannabis indica
gtggagtgacacagtcacaataaatcattttatatatatatatgtgatttggttattctcgatcgtcagctactttggaattggcatttccctttccattcgctcttacatatctcttatctaaattaagttggaactttaatttgtcaatttcaagtcaaagagatagacttcgtatccgattctcgaactcactttctttttcttacttttgtaataactttatattatatttgatatatataatatttatattatttgtggggatgacgaagcgcattgtcgtctaccgtaactatacatagtgtggtatatatgccaaaaaaattctaaaatgaaaaatatcaaacatatgtgcattatcaattatggcatatgacgttatctcaaaaaaaaaaaaaaacaaaaaaataatggcatatgacgctgatgggtgccgctataggctatagctttttcgttttttttttccttgtttaattttgttatcatcatcaactaataagttggtatgagttatttattttaatatatcataatcaactctatgtattaatttaccattataataattttattggagaaagacagagcgtagcgtacccgcactacagagatagaaataaccaaaactataatgtatatatttttaataataagctgatatcatgactaaaacaaatacgggaagacatatattaagattcaataaataagagctaaaatgaatggtcgtgatcaaagagttgggttatgatgatcttggttgggttggagtgaagagttgtttagatcatgtatggatctatattcggttgtatcaacaacatttttgtcagcagtggcgatcaacgtgtcttggacattttgagttgtattgtttgccgagtcccaagctgtgtctatagtttccgaagccaactcccccatcttttccgctattttcgtcgctcctatagctccttctcttgctttatctgcaacaaatcccgtaacgccactctcatcctcaatcttgtgctcactgtttcttccaccaacgacgtcgttttcggtgtgataagtcgtcgattcgctctgatcacctcttcctcctattttctttatataacataaaaatgaaattaaaaagagacatataaataaaatttcacttattataatacaatattacgttttttcttttgtacacttaactgaaaaggactaactagtatttatttatttagttattacttaataggtacatacttaagttacaaatttaagttatatattatagagtaagataattattagctatattgctacaaatatatatatgatgcatgtatagaaagagagagagatgtaacacctgtgcgcgttcataagccgtggaaagtgaaaccctggttattctggaaaaacccacagtacaattgtgtggtttaaacagaagcttagaaaaagtgaacaaagaactactctttcttagtatgtccatatgtaatgtaatgtatagataattaattaagtagctatattttctgctttcaaaaatcctgtccggttacaggcccacctcgatttacttatagctctctaattctatacaaacaataccattaatattgcatgaactgtgtcccaacaaaatataatgtgacacgtgtccgtgtctacgataacacgtcgtcaaagaaacgacacgttggggcctattcggtgacacgctcactaattagttgtctgccaaggaggtagataataggattaattgattaaaatacaaaatggataatgtggctaatggaacggatcatatttgggtgcgtacgtgtgaatgaatatatgaataaaaattacgtacgtacgtagtcgaactacagtgtcggcacctcactgaccaacgtgttattgtctacttaagtattaagtgaagagtatagcatgtatatgtgtcttcgatttaaggaacacaatctatattatatatttttttattcatggaagcattaataaactccaataaattgatattttaattgactgaccctaggcccgtataaaaaatttcattttccttatcaattatcattattcggtgataagaacgaacaatgcacacacttacagattcgtcaacccaaaatttttgttcaactatttatcgtccggcatggtaattctgaagcatacttttgttttggaatacttttgttatatattgcaaaattgagcaattaattaggtcccgtgagtaccacttttgtagaagaagaacgagtcacataaaagttcaccagaacagaacatcacatatgccgccatctcaccaagcaaagctagttagtattgtgtacacttttttcttttgaagaaaaacttattttttaaaaacttattttatttaattaactgtttttagatgtatgtaattaataattagtaaattaaaacattttctcctcaattttttagagcgaacaaaaagacattccatttttttcatcaagttttacattcgtatttttgtattaatattttcaagcattaatatttgagggtatttttcttaaaaaaaaaatatttattaaattattattttatttaattaattttttaaaacgtatttaattaattgagaaactcagaattcaactttttaatagattagattatctctcgaatcgcttgttaaaaagttaacaagtggagtctcctaaaactgtattaaactaatataagtttgacattcaattaattttttatttattaaaaaattaaacttttttaatttcgatctgcattctatttggtttatattctacagataagatcacttacctgcaaggaatatagttctgatacaatgttgagaatcatggaattccatttcaaaactaattggtaatgagtgaagtaacctatttttaatatataactcaattctctactatttattatacgtgagacaatatccgatcaacagtaatatttatttgaaggtgcattaattcaatagttttctacaaatcttcagcaatgtcgccattagcctatataaagataattagataactgtatataattgttattgaatgacaccattgttataactataggtttggcccaacctatattgagcctaaacatctaattttcctttattaggtatatctagcccatcgttcctaaattcttctcttgttgctcgtgtgattgtggagaatatttcggaagtatctcaacttcaactattcgaagtatgttcctattattagtagaccccaaatcatacattaaaagcttgtttggaacgccgtattagaccgtattattagaatatttctaattaaggaaa

SEQ ID NO: 383349 - DNA, 2806 bp, Cannabis indica
atgaaaaatcccatcttagcaaagtttgtagcatcttcagtcaatgagattggatataatccaacatcattattcatctccttccatgcttcatttattaaaaacttaacatgttcacgagcttcttcttcagatacatttttttcttgcatgtaacattgaattgatgtcggagcatcacctcttttcaattcctcctatacatacaatacataaaaaaatgaattacttagttgtttgtttaaagaaggattgtgtttttgcatcgatcattgaaaaataggttccataattttcaaaaatttactcttttcataactcttgtagttgaaaaaggattatttgatccaatttcggttaacatatttgaatacaaataaattttaaaaaatttactattagcgctttaaaaagaagtttaagaatctagagagaccggcctaattaattaaaattacatacgagttcaaacatgtaataatatgtaaaatacaaggtgcaaaaaagtataaatattgtaataaaatattaaagtaataatatattatatatgctctaaataaaatataaattcatatgcgtagttggttattattagcttaccgatgatgttgctaggtcatttgtaaatcgtaatattatggcactgtgacgaataatggcaggataataaccatattccaagcattcgaaaatctctttagtatttgtaattgtacgattattatttgcgtgaaaaaaataagcatgcacaagaataactggtgctcctactgaaatccaaccattttcaatatattcttccattgttggtgtgtatccactatagtaccattttgcctcttgcaagaaacttttacacatatcgacccactacacaatgaatatcattatatgtaattagattcgatccataattagtattataattttttagtacatatatatttaattaatataattatagtacgtattatttgaagttgttctatcgttattattataatttagtaatattttgtatgagtgtcgttggtcgacactaaatgaaacatccccgcttgaagtatttctagcgatgtgttttgtcttcattcacatattttttagaaaaacttatcagaaggtcagaaaacaagatgcatgtaccttgctaatataggtaacaccaatcaatatatttaagtcatttgacatttcccaaacaatgtggaattaattgcacatgcaacttacttaatatttctccttacgaatcatgagattactaactatcacactaaagatatgagtatcgagcacctcattattgaggagtcgatcgatccagcatgtctggtgctgaacaacaacactcatacattatagctagattaattataggatggtacctaattaaaatgtttttctatgtgtcatttataataataagaaataaataataaacggtaccgttttcttaaggtattgaatgttgatggagattccttggtctcttaacacctcaaagaccatatcatttatggtattgtgtaaaacaagataaggcatcttcatgtattctggtaactcatttatcattttcacatcccatctgcatgtatgtcccaataattaaaattatacaagctcaaattgtacacacttattatattacatagttatgtgtatgtaaatataatcatttatatttaatattttattaacaaaattatttatatatatatatatactaacctctcaacagctttggtgaaaagctctaattcatccaatgttccataaacatcatatatatcatctataaatgttactagctcaaataatttggcagtttttgttctaaaatagctgaattttgactcaaatcttattccaatattccataagaaacattccatcaatcgatctcttgcaaaattcaatttctctccaagtttagtatgtctccaccacctaattaattatatatttttacatatataataaattatttaatcagtataaataaatttaattaaaaaaaacttataatatcatcatcatcacctgaatatatgttttagatcttcatgatgtgttgattgtactatgttgaaatcgagtttggctaactcaagcaacataggattcatgtcttgttttttcgcatatgcgtcaatgaaccactttgcttctgttcttgtggtcctccgatgaagtgggagctctaaggcatgattcactacttcgatatcataatcataatcattatcaatcattaactttttttgctctgatatcattatagtgtagtttttgagacatttagttgtgaaaattctagcttcctttaaaatactttcgtcttttttctcataaaagaagcttcgtataaggctaatattcccatgatatcattaccatttatgttttctttgattttttctatctcgtccttcaactgattaaaaatttctgcaaagaacacacgatcgagcaattattaattattttataaaagtttaattctcggcttggaataatttggttaattagttagattaatcaaataattttttaattattttagacaaaatgtataagtctcaataagcgctatgaatgattaattcccaaatcttttgaaaattccaattcattatttgaagtacattgcattttttttttctttttgtcaattatatactaattaaactaaatagaggtattagtacacaaaaaagagaaagaaattaataaaataccaaattaatgtatcaaatatcaaatgtacacaataataataataaaaaaaaattaatac

SEQ ID NO: 383350 - DNA, 1207 bp, Cannabis indica
ctatatgtaatttaatatgaatgataataataatactaaaaataagctgtttttctaaataccattatggtaaatatcaatgctaataacattattgcaaaattttataaaaattacaaaaactaatggcaatttttataatttttctatacatatataattttgaaagtaataataataattatataatgagaatgttgaatgaatgaaatttgaatgaattacctgatgagatagagtagaaagagcttgaaagtcttggttagggatttcccagccaaagagttgaatgttttctttgattgtgtttgtatctgagtttgggattattacacttgttcctctttgaagggcccatttcgcaagtacttgggctgggcttttgttcagcttctttgctaccctctccactattggatcattttctgaccccaatgctgagtaagcctgtctcaatcaataatatttttttttatttatttaataagattaattaacaaaatattcatttattccttcaaaaaacaaaatattcatttatattgataggtaaatattattttaaattttatgtttttttaaaagttatttgtaaaaattattaatcaaaactttataaaaaaatattttattgggtactaacaatgctcaatattttttttttttaaaatagcgtcttattattagttagtgatattttttaaaaattattacattaaaatatatgtgactcgatatttaattgccctaataataatatgttatttaaaaaatagtaagcaccaaatactttttatcattcatcttttcaaaataataaaaaatagtaattgagctcaattttttttaatataactatttaaagctagtttctagatatataactagtctaatatcatctttaggttaatttattattaaattttgaagaaaattgaactaaaaattattttatactattttaaaaaatataatataagatttaaaatagtatttgagattgaatgttgtaaggaattacttacagtgacatgaataccattatttttgcaagcttcgagcattttgtcatttctccaacctggatgcattttccatctgcccacacaaaaatgcataaattgattttcaaacatgatgaaccaacatttctaaatcaaacaaaaaaaaaaaaaaaaaaaaaatagaagatcctaatgcatataaa

SEQ ID NO: 383351 - DNA, 2009 bp, Cannabis indica
gtttattttttttatctcatagttaatttaaagtttttttttaatttaataatacgaataaataaatagtaataaaaataattatttactataaattctcgttacttattactaaatactacctttaactctttatataatctctactaaacaaaaaaaaagaaaaaaaaaaaaaaaactctttatataaatcagaaaatgtaaaaaaatatgaaacctaaccgaatcagtaccctaaaaattgatgttgggagaaagggccaaatggtttgatgagggacacatgtcccttggttaggacactgtctgaccaaaaacatttgctttcattgaagaagagattaaataagaaaagaaaaagtgagtaaccgacagaaaatagtactaaaaatatcattgcctcggtaaaagctttgaatgcgaattttgggggtgtacggacagatcgactataatcccttcgtcccaccttgggccgtacacgcgtccttgtccttatccgtttcctcaaagccacgtcttccattcccttacacgtggcaacatcacctttatcctcttatcctcgagatcctcgtgattttgactcttcttctttttcttttttattatatatttctgttttaatttgtttttcttggctgtcttggtatcatcgactgtggatgagatttgagagtgagaaagattggggtgtttttattgtggactgatgtatactaaatgtggtaggaaaagtatttttttttaaaaaaaaatgtggtaggaaaagttaatttagacagatatatcgtatgagacaaagtttttatagttaagacatttattatcatatgattttttatttaataacaatgaatttacattaaattctaccacaaaaagaatacaaacgttcataaaaaatatctataaatatcaaacgacaatcttaaaagaaaaaagttatgaaacgacacgaaacttttacgttgctcagcgatttttttctttccttttttttttttttttttcccaagcagtgcctaaattcttaccattaatcctattttagtatctataataagatgtttaagccaaaaaaaaaaaaaggaagaacaaaaaattaatgaaaatttaaaagaatatggtttcaatttaaacaaaataaacactggtaacatatgaatctgggaaatatgaataaacactagtgtaccatatgaataaagttttttatgtagtagcaaacatatatagcagttggcctaattaagagggttactaatactatgtatatacaataattttatatagttaaataaattactaaatcagaccgcatatttgcatgaatatatgaagcagagtaatataataagtatcattttgtattggtacgaatgaatttatgactaacatttgaataatgttattgttagatatcatttcgtgttaaatatttttgggagtttctcctcactcgatttgataaaatgttacttatagaaactctaggcaatcctgttttttttttatttttcatttcgcaaagtcaggcaatcttatttattgcagttttttttttctagattttttcttttcccaataatttttttcattaaaaacatggaaaataattttagaacatttctaaatatcatctgatgatattttttatttttttaaaatagttagaaagttaaaatagagatacacttttattattattgcttcaattatactttctattttaatttatatttaattatttaaataatattttataatttaaattgtaaaaaaaataatagttttaaagttttttttttgtattattattatagagagtcatttttttgtgtacagttataacttatttttccaagttttactctatatttaaactgaaaaatgtgtttcaagaatatgttaggaatactgtaaaacttaatataacactaattaattcatgagaattaaacaataagattaaagaatagcggaagcgtaccggagtccatagaatc

SEQ ID NO: 383352 - DNA, 949 bp, Cannabis indica
ttgtatggaattttaaatatttaataatttttaatattttatttacttaaaatacgggtttttgatatatttttatattgtactcatgttattttgttcttaattttttattatttgtatattagttttttatgttgttgttatcttgttatttttcatataattttcttattatttattttggtgttgttaaaaatttaaaaatatatatatctttaattgtaaatgtgtaaaaaatttgtctgaattttttttttttttatatttttcagtgggtccgcccatgaatcctacaagtgtagaataatatattggatcataatgttcaacaaattaattatgaaaaacagatataatgatgggtcaaaaacgatcgattggtttgagagagtcatgaaattaaatatttataatggaacacaaaggtgagtactgagtacaacgtgaatttgttccatccagtcatcgatcgagaatccaagaatacattatcatccattcaagtgtccccacttttgcactttcctactttggttttctctgttgctttgtctgaccaaaattatcacttcttctatgcctgcctgaccttattggtggtttttatttctccctcttttttttttcaattgagaaaaattgttttgatttccttagcaagtaaacataaaatttgggtcgaaagttcaaaaacttttaagaaaaaagtgaaagtacagtttttgttttgtactccttaacgtgatgcatacaaggaggtcatatagccaggttatatatggtgctagcaccattttatctagattagtataatttaatatgaaattgctattatgcaacaaatgtataggagaattttatttacaatttaatctgaaaaatttatttacaaaaatatatttgtaaaattttaaaattaagtaaatacattttttttacaaaaaaaaaa

SEQ ID NO: 383353 - DNA, 3525 bp, Cannabis indica
ctctctctctctctcgttttcggattaaaacagccacagtaatgtgttgcatattttgatgatatgtgtcaactatttcgtgcatgcaagacatgaaatgatatcacatgctttacttaatggctaattaattttcatttgaaaaactgcaacaatttttgattaacaataataaaagcttaaaattttatttatgtaagtgttaaactcttaaacactaaaccaagcagataatagaaagtcaagagacttcaacttattcttacgagaccatggagcatgtcagaacatggccgatagatacacgcaccagttatttatatatatgtctttatatctatatcgtaatatatatgagtgacagaagagagggagcatatatgtatattttatagtgcaagagtatttgtctcatgatctaaaatggagatgcttgtaagtagaactgcccagatacttgggcctttgctggtcatcgaactctgacctattaaactgttgagtttctttcgaggttttagcgtctccataagactcaactgagcttttcctgcgtctctcattatgtccagccaaacgcctccggcagcttctttttgcatcatcaaactcagatatttcatggaacctgctacttgactatatcaattactatacagtccaattaaaaccaataaatgtttctatatatattgaagttgaagtgtcctaaacacatgtagttagatgatcatactacgcataggcaacggatattgaaatattaagcctgatataaaattaaacaatcgtagcatatataattcctagacattattaaatggtgcaaaaatatatagacagtaactacagacagaaagaaaaaaaaatgctggaaagggatcataacaatattatatttttagacatgaatattcagtcatttgaacaatttaggatattaagttaacgagcattgttattggatactaagggtgcctaggaggatccgctacttagtcacactaatagcagttttgctagacaataataccttttagcaattctctaatttaatatatacttaacattttatgaccatcatgtggaatttgagagaaaaatattagccgccttggtcataaacaaaataaacatagctgttaatagttttataacaaaaatcattatatagagagagatattttttataaaaatacttttaacaaaaaatgacacttgttacaattggagttttagagtgtgtgcgagtgtgggaaacgatttaattattaaataataatataaaaataaatttacgaaaagaaagttcttcaactaaacgccaaatgaaatctataacacacttgggttataggtaataaattaatgatttggagtttgataactttgattttcacggcattgacatatacatatagcatctgcaaataaagccttctaggatggtcatattcacacacgtacacttaattccaccaagctatctaaaacttccagttccacaacaacaattgctgctttagttatatataattacatataagggttattgtggttataatactaaattttttcaattgttatatattttagttttagtcgttaataatataaaacattaatattttgttacaattaattataaatggttaaatttttttgttgtcaaataataacgtaacaacacttaaagtaacacaaaaaaatatttaaaattataaaattaatttaaagaaatagaattaaatatatgctagcatgtcattgttttaataccaaaaattaactaacgaaaagtgtaacattaaaaagactattaattaatttaaggccaaaactttttctcggtacaatgatcatatgaaatcaaaatttaatgtatacgtttcatcaagatttacaaatttactaccctattcatataaatatatgtacagatatttctttatttctaaatttaaattggccgaagaattctcatcgcactattactccttattgtcttttaattttcttcctattgttactatacaaaatggtcatttaagttggtcaatagctaaacgccgaaattataaatatttgaatgcagtgtagattaattgtattttttttttttttttattgaaagtagattaattgattgaatatgagatattacactttagaaaatagtacttttccatatatatatatgcataaaatttaatgaatcagtaccatattgattgtaccaatctctcaaacatagcatatatatataattaagtgcaatatatagtttttcatttataaatgtaatatattacgaatgcaataataataataaaacttaaagaactaagcaagaacgctagtaacagtacgtataaagaaaaggaagagggagagagagagatgacctgctacattgctggcaaaagcgctgttgaagtccggaaacgaatactattgatgccttggaatgaaactcacagaccttatggcggcggtgataacgtttggcatcacttagatcagctccacacctctctgcctgacaccttgctggcgagacatcaccaccaccgccacctcccgacgcccttgatgatgatgatgatgatgaatatggtgcccctgctcctctcttcctcttatccttgtcatgattcataatcaagctgccgctcgattcacctgattcgcccccgagtaccacttcttcatcctcattattgttcatacctattaattaatacctctctctctctatatttagtacctacctatagtactatatattgtccaattttttctccaagttttcctgatcagttgatcatatatattatatagttcgtaggcttcgcttccatgaaaaattgaaaataagaaggatatatattgatcccaattaagaaagttagaaaagtttataggtttatatagaatctgtttggagcttggagaccacttattgtgaaagccaactggctagttttacttggggaaaggtcgtgaaaaaagttggagagcaagaaaaggaccacactctatacctccaattatttatagtgttggggaattgcatgtatatattatgtagaataatcgcaaatgacaatatatattttaagaatatataaaattagtcgtcacttttttagatttttttttgtctatgttatatttttttatgcctgcatcatacatatgtggtctcgtctttttctcacacgattaaggatgattacgtacgtacgaagtgttttctttttcttttatatatgtacgtattcactatataaatacaacttttaactcaccaaaaaaataatatatatataattataaaatatctccaaaatcaatatatataagtgattattcaatggttacatttttattgtaaccttctttaacctgtaatagcaggttagtagactttttttttttaaattaattaattataattaattattttcttaaaataattaattaaatagtaggcattccttttttagaattatttaattataa

SEQ ID NO: 383354 - DNA, 3161 bp, Cannabis indica
tttttgaacaaattcaccattaaaaatttggaaaacaacaaaaatacattaggataaacattttactatagtactaatgtaatttttttttggattatacttgagttggattgtttgggaactccagttcaactttttgaaatatgtctttcatggatctaaaaattgaagtcgggacattagttttatgcaaattaaactggatttccggttgaattttagtttcgtagtagtttttatatactttttttatgaattcgaaacagcccctgttttgattaattctggtcatcttctcaagtgaagtcaccagaattaatggtggttctttttctagttaaattttcgtttcgattgtgttgggttgctgcgtagttgcacaatagttgcccaggaagcatggatcctaaggtaaaggtgtgtgtaagtggtatctgtgtaattttttctatttaggttgtatatttgtttatttggccagctggaagtatttttgtaatactgttacttttttttggttaaaactgaaaagagcccttatcttattaacccaagcaacaatgtaccctaattttaacatcatggcttgtaaaaaaacaccattcaacacggtcacacgcctttgccatatccagtttcaatgccacttttgaactattttgaaatctattctttcgcattacatgtaagctctcataaccaacaatgacattatcatgaatgagtctttctttgacaaaagcactttaagaatctgatataaccaaacgcaaagactgtcaaagtcgattagcaagacatttcgacactatcttgtaaatcacattacatagactaatcggtcaaaattcctctatacacttaggcttgtcaattttcggaatcaaggcaatcaccatatcattaatacaactcagatcaaccctatgatttagcatacttaagcatatctcaatgacatctttcctcagctttgaccagaatttctgatagaataaggtcgagagaccatccactcctgtggctttagtctaattcatctccttgatcgctttaaccacttcttcttattgaatttttacctccaaatctgcattcatagcatctgaaaccttaggttgaaccacatccaagaccccatctaaaatcacatcacgcgtctcagtagctgtaaataacttcccaaaataatccttcataatagcctgaaccaacactttatcatcttgccaaacacccatatgatctcgtagccctttgatgtcattcttcttgagtctcgttgtggctttataatagaaatacttagtattagtatctcccattgcagtcataaagctctactcctctgtcacaaatacatctcatccttctccaataaatcatttagccaaccttccatccttttcacttccactcacaccccaagctgctgcttcaaggtcaactcgtgaagattcttctttactttatcaatctcaattgttaaatttctctttatctttttattccatttttgtaatgcattcccacatctattaatcttttcacgaaaagctacagtagtacctcaaccactatgatcattccactatctccttacactcctccttctcacaccaagcttcttaaaaatgaaaccggctattacgcttaacgcaaccacacttatcccctactcttgagtcggtatactaaccactaaagcttgatgatttgactcccaccaatctgaaagactaagatccgccccatcaaactgactaacccactccaccgtacataatcctctatccaaccgctccataacattattatgttcatgcttattacaccaagttaattcgtgcttcaacgagttgaaatccatcaatttgcagtcatcaataacctctttgaattcttccatagctctcgcagaacgatcacgtccacccaccttctcagcaaggccaataatctcattaaagcctccaacacataaccacactcctctaatctctgaacataaattctgtaacaactgctaagagaatctctattggctagcatcgggattaccataaaagcaagtcaacgtccaaggtgcaaaccctttacccacaacaatagccaaaatatggccaggaaaacttgataaaacctgaatttgcatctcatcacgccacatcaaaagcaacccacccgctcaaccccactctgtcaactgtccaaaggttctcaaaatgcaacacactactcacccgctcagcttgagtacgagtcaatttactttatgctagaaaaataatactcaacccaatatcacgaacatgggattgtgatgctcgtaatgtccagaaattcccaattccttagacgttccacctaatcattttcattgtgctcagtggccttgatccacaaggctcgccgcttcattagttacaaaaagagatgacaaatccatattagaagaaatactcacctcaacattgatattgtttcttaactccattttctccattgcatcagtagctccagcaatcatttcaccttcttccagtggccttatagtcccgtctaccccaccgtaattttccttccttcattctcctatcctctcacaacctgagaccctgacatcccattcttggccgcatttcttgctttattcttaatcgagatttttttcctttatttttgcttagccaactcccctggtaattttgcaaaattggctccctgttacttatttgctaagatctctctcataggattgtcttaaatatagtctctcaaagttttgactcatcaaagtttgaaagtttttatgttttaaaaagctttaaagtagaatacacctaaagagattaatctatgcattcataataatatgcagtcacttcttatgtgtattgtttctcgaagtgacaattacacaataagactgatatatgatcttaattggtgtactacatgcttcttggtttaatggctgctattatattttaatgtctcctagtctaaattatgtgtagtatacatatcttatcgatatgatatcatacataatttatttgactgcatattgcatgatggaaattaatagggtatttgttgatttatttgtccaaatgagagagatattagaatcttgtatggactaatataatcacaaa

SEQ ID NO: 383355 - DNA, 2472 bp, Cannabis indica
ttgtgatgttaatttttttttttttagtttttttctgttcccatctcatactattgttggagctctttgggtggatccttcaaagttttggttgcatccttagtttatgctcctaaattaagtaattggctttcgatgactacacagtacaagatctctgtgtggacagatacgggtcaaacatataagccacttggacgtgcaagattatattctgcaattagatgtgaatttaagaaataatatacatagctccttccttttttgttcctaaatttcccttgagttgaactggttgactatagttgtgccattagagcaaatagtagtttacttaaatagacttatgttttgtttttcttgctagaagatgttaagagacttctctttaatccagatcatgatgagttcttgttttttagttgtaaaatttaaatgtctttccccaaaaatttgtacattttttttcttaaagtaagtttttaaattttcttttctattttatgtaagaaaattccttatggaaataacttggcttacctgtctattttcattgaatgattttgtcatttttattgttgattctgtcaaaaatatggttcttaatcctgtaacagtaagtcatttgtcttgttattctaggttatttgttacctctttctcatcgtatagtttggtgaaatgtcaattagttctcactcaaactgtctattaagaatctaattcttcccaaaaaagtatggctcttaatcctatggtttgtttcatcttttaagggttttttctaacaaagatataagggagaggtatcattgggaatgggggaagaagaaacagagtgatttagagagtacgtctaccaaagtaaaatctgtttaaaggaccacaatatgtgtaggtaaataagtatatgcatcctcttgctgaaccttagaatgtatggaagttaggaaagcctaactggaatcaaatcccatatctcacgggagtaaaccatgggtgtaaccactaggcctaagtcttttgtgtcaaagttaagtcaccgtaaaaatcaaatgctcttcaaatataacttaaatcaaagaaatttaaagtctatgtctaactaaaagcagttaaatcacaggaagaaaaacataatacaatgcctaagtctttgattatttcagataatcttttccatgtacgtaaaacatatttattacatagatactgtatagaaacaaaaaaaaaaaaaaaacttcctaatttctaagaacctctcgaactaaaggttgactaattaattaatttgaataattcaatactccctttcaaatattatacaattgaagcttttctaacaattttttgaacatacacatgtaatgcctttgtgagaaggtcaacaacttgttgagtagtaggaatttaagactttaacaaatgcctaaatcaatctttttaataaaataaaatgacgatcaacttcaacatactttgtaaaatcatgagatggagtttaacaaataattcggtactcactttcaaatattatacaattatagcttttctaacaatcttttgaacataatcagccgtaaccttcaccggctaccacaaagctccgcttccatttcgttcacccgaagcatcaatgccaccatcctcatctccatccatcttcacgagaaacaccagacgcaccaccactgccactttccccaaatcgccatcctcatctccgaccatctccatcaccaacagacgaaacaccatcatcaatctttgtcaccactgccgatctctgcacctctactctgtccacatccgaagccactcacagtggatggacctcaacacagcagcaccttgaggtattgtatgagtcgtgagcaatgtttaaagttatttggttgaagtgaatatcaagtgattagtgttttggttgtgcattctgaaaattgtgtggtggaaagttacttggtattatcttaatctttgaaattgttgtttcgcactttcgctgtgagtttggattattggtgtgggtttgcactgtattgggataaaatttggtggctgaatattgttgaatcaaaggagaaaatgtcgaaaatcaagaagtgtgcgcataaaaccaaacacaagagtgcgttagaggcaagaacgaggcgttcaaaaaacgcctcgaggcgcgccttggaatgaggcgttcaaaaaacgcctatgaggcttagcctcagtcactgtccatgaggcttacgcctcggccttgtgaggcgtacgccttgaggcttaagcctccgaggagtgtgaggcttacgcctcaactaattgagtttttttgggcctttttaaaagagtttgattggaatttttttaaagaatttcattggagtttttttaaagagtttcagagtgcctttttaaaagagtttaagtgagctttttttaaacttttcttgggctattttgagttttattttgtaa

SEQ ID NO: 383356 - DNA, 1397 bp, Cannabis indica
attttttctatttttgctctttaattttactacttactcatctagcaaactagactttgccgcctttcattaatatacaaaacttcattttatgtcccaattttattttattttccttagtagcaaaattaattagctcattgaaaattaatctattttcacaatagctttgttcaacaaaagattaacctcacccaatgtcaactccctaacggtgacaaaagtagatctcgaccccagacaagaaagtggcttaccagtgctcgaaagaaccaccactttgagcatcctggtacatccacatataattaatggcccaaggactaaccatagtatctgtcaaaaacttgtgatcatgaacaaaagtataacacctttgccaaataggccaaagtaaaaaactactccaaatcctttttgctccaaatatgcatgtaacccaatagaagctcataaaagcaagaagcaatttttagagaatcaagacctttaacaactcattcaaaacaaattaacttaagcgaagaacataactaaagcgcatgaatggtagtctcattgttctgaaaataaataggacaaaccttgcaaacatgaagaccatgacaggtcaaattgtcataggtcgataagaaatttaaactttctttctaaaatttttttttttaatttttggtggaagattgaggccccaaacaaaacaaactcataacataagtagaaattgcttggatgatatatttttaaaggacctcctgcccccagaggagaaaagcttagacttccacccaaaagcttgttccatatcttatactttatcgattgaaaatgaccactcttgctttttcccgtaaaataatgcgaaccaagctatttatcatgtcaggaaacatgagggacccccaaaatacgagccaaaaaattacaaaaatccattggcatactagcagagaagcaaaccgctaaattatgcaaatctattagctaacccaaagcattttcatcatcaaaagaatttctataaaacgagtacaactaaccattgaagcttcaaggaagaaaaaattatcattcgcaaataaaagatgagaaatcataggactcctcctttcgcacgagagccctgaaatagtgcccagaccaactaggggtgttcataaaatagccgatccaatccaattcacatgatccaatccaatccaatccgcaaagtgcggataccctcacttgtgcggattggatgttgattgacatgtaaaagtaaccgatacaatccaatccacacatatttataacaaaattaaaaaattatatatacaaataacattttaatgtaaagaaaatagtaatttaaaagtctaatacatataatacattgcaaaacttaatagataaaa

SEQ ID NO: 383357 - DNA, 1825 bp, Cannabis indica
atgtaatggaaattatttaattatctccattaattacatatcattataatctagttaaacaaatacatgtagcttaataattaccacatgatttcttaagagcattctaaataagtaaaggaccaaaattgatcatcaaaaagataagtttcaccgattaatctctctttcttacaatcacatcacaaagactaccaatcagctagagccacgtcagcaattagatatcataatcacagtcaacttcttcttcttcctcctcctgctggtctttctcacaagtatcgtaaatggagtacttgatttgataatcacgatcgaaaagatccaaaatggcggtggcagaaaacccagaaagcaaatccttataaaccaaaacggtgtcgtttgatttaagcttacgtgtccctttagtcttgtcctttgctttccacgatggccgcaagtgacacccgttacacggaggctgaccgcaacacttgcatgtcagcttgggcctggtcggggacacccaagtgaacgatccggatgggttaacgggttgtgacccgacccgattcacgtttctggtttcggatataggatgggtccgattagcccgaaccaactcatgttggtaaccttgttccttgtcccatttcatgttttgggtaaattgattattgtgtggcctttgggatttgagatgaccctggctgaagagtgtaatatggctttgtttctatatttataatatcataatttgtaaaaagttttgagaataattataatatgagcttgggaggcaaggcatagacgtgttgaccaagctagctatagtgtcatgaaaagacaaataagaatgttgacttcattatatggaaattaaagatattagtggtgttagagggtatcaaatcatgtaccaaatcaatgtaaaaaaagaaacttgtatttatcacattatcaaaaataggggtctacaattatactcgaaactcgcaatttactcagcctgaaacttgaaaacctcacaatcacaaatattggatttcaattttagtataccgagttcgggtgtaacccggttatgtactgggtcgggtttgggtttcaaaatctaaaatctacccgaaagccaacattttttttcatttttttatttttaatttttatgtatatatattatataattatattatatatatgttaattttttaattgtaaatttgtgagtgtgtgttaaattgttaatgtgttagtttatgtaatatgtatatataatgaagatatattgtataattgtattattttgtaattttttttattgaaaaaatgatatttaaaaaaaaataagagcctagcttaacctgaaactcgacccgtcccaacccacctggacccgaaaatctagatttcatacggctgagttcagtcccaaaatttcaaaacccaaactcgaaaatttgaaacccgttaaaacccacctgatgtgcacccctaatcaaaatgctagttagtaaccctgattacttttaataaaatgtaataaatctatatgtgtttggacttaattggctatttacacaatatttgttataccaactaaattaaatagcaaaattatagttttaatgattaataaaaaacatggaaagtaaatttaggaaaaatatgtgattttgttttttttgaaaaaacacaaataaaaattggtacttttatttaagtgaaaattacatgaaatataggatttcataacaaagttagaaaaatatggcatttttaagtttgccactcttttatggcatttttttacatttaagattttttatggtatttgata

SEQ ID NO: 383358 - DNA, 1819 bp, Cannabis indica
tgaaaatatttttaaaaaacatgtttcataaaactgttcattttaattttttaaaataagaatcaaaactttgaaataaaaaataagttactttttaaaatttatttcaacagtttttttagttatagtttatattgtctttctctttcgtcaatattcactgtattttctctccactttctcttactttactttctccctcacttaaataaaaaaataaaaaataaaagttacctacacattttttatttttgcttttaaaaattaaaaaaaaaaagttacctacacattttttatttttgcttttaaaataaaataaaaaaaacaattatcaaccacatttttatttttcaaaagtaaaatttttatcaaacacacccttagtaaattggcttcctggttgcattcttgaagttggacaaatggaaaatttattggctgacgctgttcttacctcagtgattttttttttctggtagggcagggattttttttaatttaaatccatctcttatgcaacatcttttcttatctttgtcaaccatcttaatttcagaaaggaatgcttgtttttgacatagctcagtttgatgggatcctcaagaagattacagagcttaacagtgctctacactctgatcaggcaggttctttatgtgatctaatattgtcctttttcctttcattgttttctttaatagtgtatcttgtaattatatattgtcgtttaatgctcgttaacatttgattacttaatgaagtgaaatgttaaactttcttcttttgattagagaaagtaggcttctttatctatcatgtcttgatcagtattttaactaatgatatattgctttgatcttttatgcttaaacgttcttgtgtacctggcattaatagtttgtctaatttatagttttctaaaaaacaaaattctattcttttgaaggaaaagaagcacttggctttatcggagcttgagatttccagattgggtgctttagttaaagttttgaaggacacttcacattatcattctagtaaattagcagattctgatattgctgtgttgctgagcgccataaaatcatggccaactacgatgatatttccaggttggaattcaagacttgttacatttttgtatgcacagaagttttaatagtgctttgttgctgactgcagtgtcaggaaatcgtgttatgttacttgattttacatgtttcctggttaaaagagaaaaatattatcttacatcatataatttatctgaattgaagctgtgctttgttttataacaacttactgctggtccatgctttcttgagaaagacgttcttttcctactctaggggtggtctataataacactatcgtttgacagctacgagtgcttgtgcttgtactttttcaagtgtttctcttgttgcttgttgaagaatatgtgggtgttgaaatcatcaccaggctgataagagtggctttgtggtcatgatcaacctatgaaagaaaaagtctccaagtttccctgtgatgtgatttttcctgtcttccaattcattgtattaagtaggggtgcacatgggttgagttggctaagttagaggtgttttaataggccaacccaatgactgcggtttggagaagcaataaaccattcaattttttttattgtacaacccaacctacttggtacaacaatatgattgggttgggttcattgggttgagatgaatattttaagctttaatatttatgttacaaacatgataaaataatttaacctagtgcatactaaaaaaacaatacatgtaaatatata

SEQ ID NO: 383359 - DNA, 6069 bp, Cannabis indica
ttagttcggtttttattttatttgaagctatcttggccacgtgtaatacagttagtgcttgcgggttttaacactctctctctcctctcctaaaggcagtggaggcgtgtgaggtgaggtgagttccacacgagagaaatgccaatatcagaatcaattctttcatcgtcaacacggcttaccgccattccttctctatctcttgcaactccacagacacaaaaattggtaatctcctacatttcttatttatttatttttgattaaatgttctgtacttatttttaatatttagtttatggaagtgtaggttgggaataagtgcagacatttgagagtgaagtgtaattatggaagtttgggtggaggaacaggggcaagttttatggggtctaaggaaaatgtgaaagttgtaagcaattgggtaaaggggggtgacattgacaatgcttcagtggagttggatgttccatttcctcaagactactctgagcttctccaacaagtaaagtagtagtaactctctttaatttattccatcttaatatcactattttttgattaatttgttttattctgttcagcttatgttcaattatttgttatgattaagaaattaaacttgtattaatagaagaaattacaatttgaaagtccaccaccaggaatccattaactttctacattgtcctcaaaccctaacaaggtgataaaacattcatcttccacagagttttttcttgttcccggaaattggtgtcgaatttaggcatcgcctgtttcaaactgaattctatcagcactttatgccacaactactatgagacactttcatgtgaaaataaattctctgttgaattctcattgccttttatttattgaattctctaagcccttttatttacttctgtttcttaattgttaggccaaaaaagcaactgcattggctttgaaagacaacagacaattgatggtgagttatggagccctgctggtataaaattgagtagttacggtatattgcatagtttttgacttcggagtacatattacattacaggagattgaattcccaactgccgggcttgaatctgtaccaggttgtccacaggaatagggatgcctaatacttatggtatgatttgcattagagacaatctcaaatttctttattactcttgtatcaggggatggtgaaggtggaatagagatgacggagagtatggtgttaattcgtgacttctgtgatcgttttgttgatacagtgaaagctgtgcgaactagaatagtgagcttcttgatatatgacaacaaatttatctaatctttctctattatgttatggctaccaagctaatattctggcagtctcagagagactataataaattgttggtggatagattaggaagcatgtcttaagaaatagattcaaatggttatttagtacaaggaaaacactgataaagtttcaaatgtttaaaatgctagaaggaagagtagtggagaaagtgtaaataaaatacttgtgtgtttaaatatctctttgatctgtatatgatagttgaataatcttcagtgtgctctcctattttgttataatatcaacatgtgatgtcctatataataatttattgccttccttagaactattttataaaactagcttggaatggaactttcagttttttcctgaggccaatgaagtaacttttgcaagaaattcagtctttggaggagcctccttcaaattggattatttgacaaaaccatcattttttgaagattttggttttgttgaaaaagtaaaaatgaaggaccgtgtgaagccagaagatgaactattccttgtcgcttatccatattttaatgtcaacggtaactcacacagtcctgtctaatagtgaataacttagtattgaacaagtaacttcagtatcttatattatccagttcttcagaaatgctcgttgttgaagagctttacatagaagctgtcaagaacaccaaccgaaaattgattatatttaacggagaacttgaccgcataagatctggctgtatcctcttctcattagctgactcttatccatgaactcatttgttcatttgctcatctagatcatgctaagtatatctattttaataattaatcaaataaactgccattagcacagcatacacacttgtacctgttttgttaatagatatcttcgagtttgttaagtatgcataactagtatttattattttgtacttgtgctaattttgctcttgcagagaaattatagatattaatattacaaattgtaagggatagaacttttaagtatatgattgaggtactaaggtcattgcatttcgcatattatttttgggactccaataattaatgactgatatgaaatggtctggcaccttccccatatgtttgatgattgatttccttgagtgtgaaggaataaaattgattgttttgattactgtttaacctgtattaccaatgatcttcataatcaagtctgtattgtttttcttgaataccataagattatccaccatttttctatccgaaactggctgcactttcaaagaccctgtttccactgatggagactgtatattatatccacaactttaagggatccaaagggggaacccttttcaggtttgctgcctagaagattgattattttgatagttaatatttatatattcgattgcatactaagtacatttattacttgcaactctttcaaaacgtttaggagctatcccggtccttggaaagtccttcgaagagtagggaacaaatacatttgcattcatcaacaagaaactatgccttcactgaaggaagttgctttggatattcttccatcagcttgatataatctaactcatttggtaagatcatatttgtttccgtatataacttagacttttgtattataaatgttacttgcatatctttcttctttagtagtcaaaagagaaagtaaccttcagctcaactttcttcattttggtcccatgtgtgtcaaaatagttgaattgacgatgaagtactaattaaactatcaaatattcaacattttaatagttcagctttgtcctaggtagggttatttctagaagacagccttgtgaaaaaacttgttactttcagacaatgtatgtctccctttgttttctttgctttctataggtttctgtgtcgaaccttagtttacaaatcttaccaataatgcttaaaaattcattcattcattttttctatgcattattgaaggctttaagtctatttggaaatattgatcaaactccaattactaattaaattgtgtgctgcaaccaatttaactaatgctctaattaagttatattaatgattaaaatagcttactgtaatgcaagagcacccctgagtagttacagtaaatattcatattcataattgcatggatattgtggcatatatatataaatatattcgctgtgatttgatttagtctctatctccattatttacacattttagtttttcctttcagggttttgtacagagaagaaacttcaatgaactatgtatgtacatgtgctggtttcagattaattgtagatagttttatctgaacagactgaaactttaatttattttttcagtctgttacataagcattgacgcgctctgcagcataatataccaaaacatataacttcagagtgatttattggataatttatagggatttgaattgtaatctttagttttttatttcctgtttagccttgagtattactgttttatagtacatctagtagaattgtattcattttgagtgccttgggaaaatggtcatttgaccataagcagtagaatcgatgtcaaagatcctaatatcgagaaatgctaaaaagcaccagtaatggctagcatcatctagaagtgtcatattgttattagtataattaaatatcagctcacgaataatttaatttaataactatgagctattgctaaccatttataaagcgccatctcttggtgtgttggacaccactagtgcctaatagcaatgctctcttgatatctaacaaatacgagaaatgctaaaaggtaccactagtgcctagcatctttctcggtgtaatatctctattggtgtaattaagtattgagtctcatataacttaagaaaatagcttttagagaatatcgctaactaatcgtaagacaacacctatagaaggtgctaggtaccactgatgcgcattaacagctacaacaaaagaaaattagactttttttcaagagtaatgatatgtgtacacacaaattaaatacaaacttgatgctcgcttatgtgactgttaagcaaaaattttacattaaaatattaaaaataaatacaaaatataattttacttatgccaaatttatatcataggttttattaatttaagttcgacccattcaagatcataagaataacctcttaattacagtccttttattctaagaaaacactttttgactccaattacgatgatatttgtttaccaagattttcataaactaataaaatataagaaagctaaagaattaataatcatcgaagaatgaaatcagattttttacgtggttagagcattaacaaaccttagtccacgagtcactattattgctacaagacgggaaaagccttatgatttacacaagtgtttgaaccttagattttgcctaagctcaaggattgagattctaacttttatatgagtttccttatatttatagtgctaagattcttgcccactgatggggtaaataaagatagtataatgactttgggccaatttggtgaggctcagcccgtgagacgttgattgtttaattacgtggaggccacatctcgttgatagttgtcaaactgtatcatactattgtggataataaagacactttaatgcttgatcatcaattactatatttccatattgtgaagatgtcatcatcatatgagatcttgatagttaagtcctaatatcgcaggatctggtaattaatgaatataattatgagctagatgtctggatgctcacttattacttccccaaacgctctgactgaggtctttcgaatactcactatgatggagggttttctcgcctagacaagtcttcaatccagcatccggaggacatggctttgataatggatctggtgcattatcttagttgggccttaagtaattgagctgtaccgcttttgaaattacacatgtcctcatccactgtatggatttggcattcttttttgcaagcttgccttaagtcatagacgaaaaggatttaggccttggattttgaacatcttgcagaataggtgcatttgtgcacatattgtatgtagttttgattaggttctgtgaaattctacccttttccataaattttaattaaaatagctaaattttagcaacaggaatggctaaaactatctcctctgtttgggacccttatggttctcaatgatatatcataaattttaattaaaatagctaaatttgctggcaacagattgttctgcaggcaccgctggaaccatagcaaccagcacttgctgtggaggcactgcagaaggaccgtgctgtctcagcctcaaaatctcttcgttttgttggcaaatttgagcttgcatttctgcaaatctctgctcctaatccgaaggagcttgaggtgggttttcatgtttaccaccttgaaacttccacgcctctaccgcatccacggggattcaagggattttaacctcaatgatcacctttgatttcgaccctattaccttgactccttgtattttgatgggcgtccatttaataggacttagccggcgaacccataagtcaggcaggttagacaacaatcacataaactctatacagcacttatgaattttaaggcaatgcattaaaagtgggccccactttggtattttgcaattttgacaaattttatttctattttctcaaaaacgccaattcgtcaattcttaccatttaaatgcca

SEQ ID NO: 383360 - DNA, 2469 bp, Cannabis indica
ataatgtaagttatttgtgaaattaaaaaaattccaagttcggcgacactggagatccaattcgaggccaaaaatgtcacattagttttagttttattgatagaactattgagatatcaagaagaataacttcattaatcaagcaccaaacaaatacaaaacagccactaaggaactgaatcagttcctagtgaacaacaacaaacaaataaaaacctgttacatttgcaaattcaaaataaaagctctccttattctagtcattctcttattctttacacgttgtaatctattactgaactatgctatttacatcttcaacaattttgtttgctgaacaacccttaaatatacacatgtttctattagttcaaatgcagtagcaaacaattgctgaaatcacaacaagaatatgatgcacctaacttgacaagtcagaagacagccaactaatccaatctttgaagtccaaaggccaaaatcgattacccaaccaaaagaaaatcagatctaccactctcttggaaaggtaacaagaaaagaaaaggtgctcatgcgattcattctccttttcacaaactgggcagatgggagattctaattgaatttgcaacctggccatattgtctctagttaatagctgggagtcgaccacttgccatagcacaaaatggtgcttaggtaagtttagagagctccagactgctttgtggtaggggacctgttgttgcagcaatgaaatgttatataactggttttgaatttttcctgaggttccagccgacttgatatccatctctgagaatctcttccttaggtgacctaatttgcaccaataccagctagtgtcaggctttagaacatatgaccaaaaagaatctgattttagataaatggtattaatctatttaacccaaaaagatctttcttgctggctaaagcccacacaaacttagctaggttagcataattccatctcactcgaactttgaagcctaatccatcataggcttttgggagacagactttctcccaagaagccatgtggactttactttattgccattgagaccccaaaggaagcctctacataacctctcaaattctttagtcacactttgaggcagaacaaagatgctcatccagtagttttgaagaccaagtaaaactgagtgaatcaattgcattttaccagcataggacaggtgcctactagcccaattatgcaacatctgttttattttcttgatgatgatgccacaatcttcagctttccacttagtaggccttaagggtatcccaaggtacttcagaggaaaggaccctttagcaagcttaatatcagtaagaatattatgtttcactataggttcaacaccaccaaaataaatctaagattttttagaattaatgtgtaagcctgaggctttgctaaattcctcgagtacctgtttaagagaagatattgattggatggtacatttgctaactagagtaagatcgtcagcaaagcaaaggttaactatcctaagggatttacacataagatggaatctatagttggaattattggcagcctgctgaagtaactagtgagatattccattataagaacaaagagtaaagaggataaaagatcaccttgacgaagtcttttttcacatttgaagctcccttggactcttccattcatgataatggaataagatgtagatcttatgcaaatcatcacccattggacaaacttttgaggcatattatatgcattcagtaaggcttcaaggaaatctcaagttatcgtgtcataagccttgcttatgtctatcttgataacgcaccgagggaatatataattccttgtatagttcttcaacggatcgtgaagtatcatcacattatgggctatagatctaccttggataaaagctccctggttttgattaatcaggttaggaagcatccttgccagtcttgaatatagaagctttgaaacacacttatagaggattgaacaacatgcaatcgatttatagtttattgccttagatgggttgtcatgtttagggaatagagaaatcgttgcagagtgtaattcaggaggcatataacctgacacaaaaattagagtcagccttgaaaatttctttgccaatatcaacccacaatgacttgaaaaaaccagagctaaacccatctaggcctggggatttagtgtctaggatgctgaatatagtttttttttatctccttgatggagaaaggccgcaccggaagcagctgctggtctaaatcgtttaatagtctgctaaaaaaatgctagttcaggtcacttgagccttcattccttgttcccatatactctcaaaaatgtctcaaaaaatgggcagcaacctgaggaaaattatctataacaaccccttgttcattagtgtaaatagctattgtgctctctgttggaaattattttac

SEQ ID NO: 383361 - DNA, 2034 bp, Cannabis indica
ctgttcttctaactccaactgagacgaagaatcctcatcattgattccttgcaccttgttcttctgggcactttcgaacggtttagccagtgtcacgaactgcttcgagtttgcagaggttttaaggggtaaatatccaaccatctgaagcttttctttttcttgggccttgaagatgctcctggaccctgaaatcttctatgtctagtattgggttgagaagggttggctctctaaaatacttatcaacagtgagtgagcccatcattaattctctagcctttgggttagcccaacacttcgaattgggccaattcaccaattgggctggggttcccagaagtgagttgtattgtggtttaattgggcttcgaggaggggccctattggtgccaaggttattagggtgtcgatcctcctcctgttgagtttctcttgaattcaaactaccctcctcaaaatggctaggttccaattcatggttcccttcatcaccttctgtctcctccaaaaggggttgtgttccatctgtctcaatcagcgtcccttgtgcctctagtgttggcctgacctccgcggtactgttgttcattgtctctggcatgtcatctgtacatcgggcgagttgcagttccaggattgaaacagcttttgtattgtttccaaagggggcaacttctctaatacctggcagataaaccatggggagctgggtaataaccatcccgtcattctctgcctcatcgtcggagacaattcattttttcgtagggagctatcttcggcattcccgtagttcatctgagtcaccgtttttcaaggccttctgcactttcagctagttccgcagggttgggtcgttgattatcctcttctgaagcgcccaatcttggaaccatttggcaaggagagtcgagaatgtcgatttttcactggcatctttctttagccaaaccccaaacatcgggtaaaaattccctttttcatctttgattactgtgggcggtttgaagcatagactctgatcatgagttaaaagaccacatttgaagcacattttggggagtttttcatacttatactgcaaccataggtccttgagtcgttgtcgacggaggaaaaaaccaaagaagagaggcttgttaaggtcgatggtggctctaaatcgcagtgaactcattcccactgcatcttctatacccgaaggaagttcatacacaggagaggctttggatgctagttctttttaggttggataggttccagtagaatgggggaatgctgttgatgttcacctagatgggcgttttattgaaccgtacttcagcgcgtgatagccatgatgaccatggcataatgacgatgagagccccacagacgaaccaggggcggcgggcaagaacatttaaagcatcattacgatttgagaaggtgaattggataatgttatcctcaatttccttccatttccaccccttaatcgcattccatgagagtttgagggaaccctgaatcgcagctttccctagtttgtacctacttattattttccccagtaaaacttggttggcctcctcaggttcatccacttcgccagggttgagagcaaatgttatgtcgtcctgtgaaatctgaactgcatcctggagcatgttgctaacagttgcaggatccattaaatttgaataacaatccgaggtgatactagtcacttgtaagatgaagagcaagactctataaacttctacgaagttggctcctttgagagcatttcatacactaagttttatttgaatacactttgacatagtgattaggttcaagaacttcaacatagtagtgagagtacccatgttcaagttactgagaaagagatatcttaacatacactaagctctacatttacttttatataccctactctcttatcacttttatattcttaatctaggtacaataaaatgttctcatccataagcacaaaacaaatgtatattgtaacaccctaactaccttaggcgtattacgtgattt

SEQ ID NO: 383362 - DNA, 2005 bp, Cannabis indica
atacccattaagagcacacccttgaatatttaactaaaattcgagtaaattaatttttttgataaaaaaaaaataggagctttattgatcaaatagctttaaccattacaataaatgaaagatcaccaagagcattacttagtctcattgaatatacttactaatgatgaacgagagccatgaacaacatattgtgcagccttattcgtagaatgcttaacaaataaagtttaacaaaacttaaagaagctaggataagcttacaatcatgcactaagtgctcgtttggtaagtcgtataaaagtcttattgtgttaaataataacggtcactatgtttggataaaacattgtattatattaattattacgaccataaattttcaaacctcagcctctgccacttgttttcggacctcaactgaaacatcagctggacgtataggccaggcaaaatagacagccgaaagtggaggaagcacagtttggagctattgtctttgaccttcagatggttgggacctcgagcttatttttaaacccttagacttcgaggtgtctatgggatgagcttcaacattggctatgggttgagcttcaacaccctttgagtcactcctatcaaagctcatttgcgaatccttagacttcaaggtgcatgggttgagctttaactttgtctctcggttgagcttcaacatgcatcgagtatctcttatcttgggaagagctctgcctctcatcttccttccttgccctcctctcctcttctgtctccttcctccgtctggagtcttccttgcttgagcgttggtctgtctcggtgtcgggggtggtttctttcctggatttcttcgcctctctttccatgttagatgaaggatcaaattgcttcagggtctggacaacctcctttgggaagacaaacccttccccttcttcatctatcagaataggtgcatctgcaccaccagtggcttgtccgcaacatttggctcggtaggattggatgcagaaggaagagggtcatgttggaggggttgagtatttaaggcttctttagaagtgggccccctttttctagaacagtttcgttctccttaatcgtaaggactggactctcagccttcggtctggatgaccctatggccttgccttttcctttagttgtattagtgagtaattgagccgccgccttagccttaatctcagttatgatctcttcaatcttccccaaaaaattatccaagcggcccatctagagagttattgagtgttctgcaaaataaaaggcataaaggaaagttagaaacatatgcaaataggaaaaaacacaactaactcaaagttagtcaaaaacaacaacaagactcaaattcagaagctaccactgactttgctatattttgattttctctgagcaaatgaagcaacatcctccatgtccaaaaagctatcatactcctcaaaacttggttaggacatgaggaggaattggtgtatcctataagactgagatgattgttcgtgttcgaagctccttataattttgtctaccctatcgagatattcatctacgggatacctataatgatctacacttagaaaataatcattgaagcctccttgattgacgtggtccatctcatccagacgcgaagcataagcgagatggaaaggtattttttaccttttttagaagtactggctcccaaagtgccttcgttttagccactgcggaaaatcgatttgccagttcaacctcctcactgatgggatacgaatgtgctcattcccaatcagccaaccatgccttgcctagtgtcacgggctcaccttttcaggcagcggaacacccgtgcggcaccttgacttctctaagccaaggtcagccttccaaccatccgagtaacaatgggctcatttttcgcgcgaccgtgtgcctcgggcacactcccgtctctcgaacaactcccgccgagtcatgctcgcaagcatccatgagt

SEQ ID NO: 383363 - DNA, 2876 bp, Cannabis indica
accatgtcaaaagacaagacaggccagccctttttttgtattgttatgaacttaattaagttgtattgtagtaaaattaaagttcgggtccaaggtttgaggttgggattcggggtttggtttaagttcggggttcgaggggtcagggttagggtgggggttggggctggggttggggtcaaggtctggggccaaggtccaaggctgagtctacggtggggttccaaggggacggggccagagtcgaggtcagggtcagggtcaggatcggagtcagggtcaaagtttggggttgggactggagtcaagggttaaatatgatatagttgaaaatataacttttaaaaaagaaaaattaatgcaatactattgtgaaccaaatatagtattgtattaaaaaccatacaatacaaatacaatatagtgtaccaaatgatcttaagtcttattgaattttttttatttaattttatctttgtgaattaagcacattactataaattctgatcaccatgcattattgcatggtacatctgaaaaatgagtacaaatattatttgaaattattataagaggtactttgaggaatatatatttttataagaattagatttaatagcaatacaagccactaaggctagcttagtggtgagggagggatgggaaaaagggagagatcatgggtttgaacctaggaccttgaagctattaaattattaaaggattgtaaaataccattacgctacactcaaaaaaaaaaaagatttaatagcaatatattaggattgaacattaatttggcttcctctcaaaaaaaaaacattaatttgccaacttgctcggacctgacctgtaaaactcaaaaaataagaaactacacatttattatgggcgagtcggattgaacccgctcattacacagggcgggttatgggttggtattttcatgtacccatgggtcaagttgaacccagacctgcttgtgtacacattgtatagtatacatatatgtatatatattatagctaaagtcatgtgtttcccttccctattatgaagtcactctcatgccaccggattagagtcgctccattgttgtcgatgctcccctgtgttgcgtttgaatgccttaaataaaactcattttaatgtaattttatttattaattaataaaatataagaaattattttatgttgcttggttcacatgttactttcatgattatatgtttagtatataaatttggttaaattcaaaacatattattatccatgattatagtgttgtctacacagtgaaaaataatcatgataatatgattcaaactatttagttccatgatttatcagtatactagattacactgatatgataatcaacgatatggttacttacactcgggtaagtagaatgacttttccagaacattagcaaagcaaacttggattagttgtatcggctatacatcgaactggactgatattgtacagtaaaaataaaaaagatattataaacttaccattatatctatttctaagtcaatattacttattatttgatcttaggtcaaaattgatcatagttctgagatggttaaattctagttttattgtactataaaggttctttgacttgttcattactagcttacccgtaggaatatttcatacttacatcttgggaattcggtagtacaattgagtgggagcgttaatcatatatatagaatctatagcttctataattatttagaaatgaaacgatagttttcttagagcttggttaaacgggataaatgatagatcgcccatttcgtaattatattagttttctaaaacattatttacaaggagctaagtattttaagaataaaatacattagagggtaaaatggtaaatttatccttactagatgtaaaccatccatagagaatcaatgactattgagattgaaataatggataatcattgcatatctatatttggtatatagagcattctatgtaatcaggagtgtaattttaaatctatagtggagttaggaagaattaataagtgattaaatttcatatctacttattaagagcttgattacataggctcatgatcctcacattatatgggataatttttctttataaactcaattaattagtttggtaaatcaattaaaattctaaagaagactatattttatttatgaatttaactaaggaagggaaattttgagaagaaaagtaaagcgaaaggtctccttattaattaagacactaaatatattaaaatgataattttgtttgataaatatttatatattaaacagataaaattggtatttaaataaatagaatagaaaaatagcactttaggaaaaagatggaaagatttattgaatgaaataaaatggcaaaaatcaaactccttaagcatatagggaattttggccaacaagtgatttttagaggccattcagtttcctaaaatgcccattctatggttatcctaaatctctaagagaaaaactataaaaggagggttaaggctttgattcaagacacactctacagactttctagttccctaaacacaaaaaactgaatcagaaaagctctcttttctttagagatttcaaaatctctctctccctctcatacatattttgagtccaataatattaagatattgctcacacaattccaagagatactcaaatctttgtagaagactacgtagaaaaaactattcacttattaaaaaaaaaagattaaggttcaatacttggtgatacttgttggaattttatgccctaaataaaacgcattttattataatcagatttataaataaataaaagatcagaattcattttatgtt

SEQ ID NO: 383364 - DNA, 972 bp, Cannabis indica
attgttttttatttgttttttattttttatttttttaaaaaacaatggaatcgaagactacggaaaagcaaatcgaactgcccgaagaaaacgggcaggaaggaatgaggtgcccgggatgcccgaaagggttgtgggtgggttatataggcttttaggctaaaaaggggttttgagtgggtctgtgaggtgaggactgaggcccgaccgaggaggcgggcaactcgggcagcaatagaagtgggaaatttgagggcccttcgggcaggagagagaaataagggcgggacccactttaatggtgacgtgtgttggtccggtaggcggaagaaaacgcgcgcctcagattcatattatcttttccttccttatcattttcctcaaacattcattcatctaattattaattaattgatatatttttttttctaataagatatagtatttttttttcgaaagggaataagatatagtattcaagaacaagtattaatattttcttttacaaatagtttttttaggttcccttaataattatacttcacttttaatcaaaagaaaggaaaaacacattttgttatggttcacgtttggctttggatatctacttaaaatgagtatgatcaatatgattgtaattaataattcggaggaatctgaggttatcttaagttttctgacttcgtggttcagagaataattgtcaatgttcatcgtcttattattttattaagggaataaaaaaactgtatatatatatatattaagaatagggtaatatattagagtaaggcttactcatctaatagaattggacaaattatgattcattggagaaatgttaaatgatatttacggtgtactcttgtaaagtgtaatatttttatttaggttaattagtaattttttttctcaaattttgacatataccaaatcatacccctgaactattgagattgttaaatttatgga

SEQ ID NO: 383365 - DNA, 3766 bp, Cannabis indica
gaattcaagttcggctttacgagtaacgcacggactcgaacataacccgacatcattgtattccaagaagcttcatttctctcaaacatatcatcaaacacatatcgggcatatgttatgtgaccaaacttagagtacatattcaccaatgtattcccataaaatacaccaaatggcacaaaacccttcaagcacagcccatgtaaggctcttccagtgatctctttggttatttctgaaaaccccttttgagtaaagctcgaaatttcgtgatttggatggcaagagagccatttgacaccattttccgggacctcttctaggagtggaaatgagatagcttgagcttgtgagtggctccggcaacggaaaacgtgaaaagaagagaaggttgaggccggagggattctgcagtagcacccaaagacatgaacagaaaatagttttctgatattcattcccattcccattaccttccattgatcattgatcagtagcttagctaagtctctctctactttgtgttctctaagaatttatataaaaatgaactgatttcttagttaaagcttacttttttgtttttgaatgtttaaaaaaaaaaaaacagttattctcgttagcccatcacaataattatatattaaatagttaattaaaaaaacaattaattatttaattattttacaatttttacttactttttcattcattttggtaggagtgggatatataactaaaatatgtgatatttggactttgatggtttcaaaaatttaacaatttccttcagttttcaactgtctacaaaatttaagggcatttttttatttgttacatgtagaaacttagggcaaaattcttaattattctcccatgattttcttttctttttttttttgttgaaaaatcattcatattaaaggaaagaacttatagcacgattactaaattgtatgtaaaattaaaataatcaataaaaaaataaataggttgaaaatataaaataattagaaactatgttgtttactaaaatataaaaaaaaataagaatatatttatctttttaatttttaattaataaaataaaaataaagtaattaaaaaaggaaaaaatattctttataaaaataaatggaaaacatttcccttactatttttcttagtttaagtagctccactagcttctatttttcatagatttaagaacaaaaaaaacttattttttttttttctagagaaatgctgaaaggaaatagtggtacctaatacctttttatataatactatcattattggtctaattaagtatcgagtcatatatagtttaacgtaataacttgagagaatcgtgagcaaaataatatgtttagaggttctacataccgttagtaccaaataacaatactcttttatatactattatgtttaagtctccttactttttttagagtagttaagtcattattaagactaaacttgattgtataatcctcccaaacacaaacattattaaaacaattaatatgcaattaattattattatttttaaatgttattattattagttgtataatatttgtacagtaatactaacgttaacacttatataatatattaaattatgtactaatcattattaattattaattaattaattaataattcttttgaagctcagtttccttaacaaaaattccatgaaacccataaggaactcttctcggcaacttcacggaggagacgatctccagctccggcgacttcgcatccatcacaataaatctcgattctcccgaattctcatcatgcaaatacgacacaagatatccatcgtcttcttcatcatcatcaccaccatttttcgctacaaagaacggttctccaccatagcatcccggtccgtacatcctccgaccgacttcggcgtcatcggaacccttagacacatcaagcttcaccactccggagatcttaggcatcggatcacctacagccgcgtaaacgtacttgttcctctttccgacgaagttagggtttataactgcgaaatctagattgctcgccgacagtggctgcctggaaaccacacctgttttcaaatcaatccttactttctcaaccagcgcgtgaactaagtcgagcctttctagagtgtgttctacagagagtatattgggcgcaaccattacaatcgcatcttcatcttcttcgtcccacgcgttcaccgcgtgcataatgttgaatccaggtacatcgaaccacttcatctccgattcgtctttagcgtaacgaggaattattccaactctcgataccttcgatggatctgctcccacaggtgatcctccacctacaatcatctccatcggattcatccccaattgaatttcagtaaatatagcgtattttttagtaatcgcaaaatcgtgaagaaacgaaggactgttcatcgagaatataggtacatcttgttgtttttcgcctctagaatcaaatctaaagtaggttagaaaaggaggaattggtccgtaacgaaaggcgaaagtctcccctgtttctggatcgatcttcggatgtgcagtcatgttcatattaagcttaccattaaaatcatggcggccaacagttcgaacatctccatctttagtgactctcacctcataagggagatcagattcgccgagcgcgaagagtcgctgggcgaaaaaggctaagctagtattagctaagcctattccattagccggattgaattgtccggtgacaattctagcggcggagagagctcctctcgtggcggcagcggttaaaccgttgaaacccgaaaacacattagggattaaaggctgtcctgctctgcgttcaatatcgtatttgtatgtgttaacgtatctgctactgagtgtggctgatttgcctgattgagtaatgtgaagacaatggagcatgccgtctccgtcgaagagatggtacgggccgcgcgggaggaactgagggttcgggccgttgcgaatgtaggcgccgtctaggcaaggcggtaaggcggtgccctgctcgatgtggcatttggtgggcggaagctcgtctgagacgggggcgaaattggccgaaaggactaatttagggtcgactgaagggcggagcggggggtctatgaatgtgttgatgatgtcatcaaacacattgaatagtacccccgaaagtgtcggggacgaacgaggccgcagcctcgttcgtgttaccgaatagggagaaggagtaggtgaagaagtaatagtaggcttttttgttgttgttgtttttggtggttgttgttgtgttgtagtagtggtggtggtggtggtggtagtattgggcttgtcttcaattctaactgaagtgatgagatgagtaatatttggtttggtagtagttagaagagaagggtggttaatgacatggtttgaaaatggtgtggtggtggagacaaaggaggaggagaaggcatccatttttcagaccaagtaagtatactttgttaatttagtagtgttgtgttgttatatgtagggatatgttggtggagtggggatggggtacacaagaagatatatataatggtaaatagtgatacagtagaatctctatttaagaatacacttgggaccaagtaaattatattttaattgagaggttataactaaatagagttacactaaaaaaaattaaaaaacaaaaaatatcaatgtaacaataataacaataaataatcattaatactata

SEQ ID NO: 383366 - DNA, 4899 bp, Cannabis indica
ctctctctctctctctcctaatatctctcaccttgttatgtactgaatttcagcatgttctcttaaccattcaagcacctttgctccctctagaatctcttgcacctgcaaaatatgctaaccttagttaatagggctctttacatatgattgccaattcaaacattcttctttttttaagacagatgtggtggaaaaaatcattggttccgcgtgatgaacgagaatgggtggccattcctttcagaacaacccaggaaaacctcattcttaagctacttatctaatcaaactgttctgaagatatagctactctcagttcacaaattaaaagttcaaagtcattgtaacctggtcttttacacgctcctcgtcatattcttggttttgacgtttgaattcagctatagaattctcaacctccttgacaagatcatcagttgcaaactgtagaccaaagatatagtaaacacaaattatttaatcgaaaggttacttggtaagcagcttaaccgtgtgagaagattttaaattttccaaagggatgatgaaaagttgagaaactgtacctgcaagttctcacgtttaaatatatctccaacagccagattttgttttatcattcttgtaatattctccctgggtttcaaggtactcgtttacggtcttttgacttgatagagaagccaattgctcgtcgtttagtttcatttttgcctgttaaccagcaacttaccattgataaagttacttacacaatataattatataataaactgattagcgctttcatatactaacctgtatctctaaaaggtttgctccatagagttgtctaccttgttcttcaaacagggactccggaatatccacctccaccatctgaagtgacagaaattgattaaaattgtgtcactgatttccatttctagacatggtcaaccaaagcggccagtttcacgggtatgctttagatagaaattgttgtaaaaggtgaaacaatttcaatctgtcaaaagtataaccttactaatctggtcaagaatggcattatctgctgcttgttctttagcagtttgttccagttctaggcatctttgcagcaatgcttccttaacctgtaaatttaatcagaagcattgttaattcaaaacattaaaaaagtaaaataaactttaataatagcattatttaagtgcgttagctacttgatcaatggtggtgcacccaggtatgagctggtcagccagggaatcatccaactcaggcaactctctgtaaaatagttctttgcagtcgacctagagttgaaacagacaagccaaagagttataaactggacacaggctgggcatcaaggagaaggaagtagcgtttgtaaaataaaataaaccaaatactacgtcatttcatttcccgtcatcgacctaactgcaacatttctaattgaaattgctgaatattataacaataaggacttcttcaagggaagaaaacaagatccatataacaaggctttgttccaatgttggatctcaccaagaagaatttttttgagaaagaggacaaaattttctttaaatttcataagattctttcaatgtattgttctaacttttataaaattatattacgtgtaagttttattttttccaaagagaagatttcgctattttttgtttgaatccaaacacgaaagaaaatgaaatcctttagaattcatcgaaatccaagatccaaactaagggtaagtattagtattaccagtcactaacagatttcaacacaaatcagtgaatagatttgcaaattatatggacctgctgaaaataattacaaagcagcaaagtataatgatcttgctggaacttaaatgcttctctaaagtgataaaggttttacaaaatcagacaagaacttacagtgaattgagcatgaactcctcggagatgttcttgtctccatgattcaggaaatactagcggaaaggttctgctttcgccagactgaattccaactatagcgtcaaggaaaccaggcagtaccctatcaccgtcttccgtatcaaaatgaaagcctgcaaaggaaaattagagttgagaacattttcctgaagagatagtatagtgatacttcagaatattaaacacgtttaacggacctttactctcagcagatggaatattctgaccatttgattcaccttcacctgttgtagttgcagatatgtcaaggaccgctacatcaccaatctgcaagaatttcaggtaattatatttcaaaatacatgaactacaaaggacaaaaggtttattgtgcagcatctccatttttttcaaacatataaacacaaaagtaggtgtattaaaacagataaattacaggtgatgaaccagatggtattttaaaagtaagaagaaacaaaatcaaagtggaataagacttgagttacctgtagtcctctgtcggttacaattcgcaatgtaccaagggccttatgtcggcctgctagttcttgttcagaagttattctagcatcaatgtcactgtctacctccacaacaatcttcaaattcttgtatccgtcctcaggaatccatttgacctcaggtatcacatcaactatgatctcatatctggtcaaaaatacaaaaatgagaatgataataaaaaatgcattatacagaaatgagcaacttaccaattgggagataaaggataaggaactgcaaaaattgtggaatacatgagcaggaagaaagaatcatacagatgtgaagtactaaagtaacttgaagggttgtagatgacaaacctaagagaattgagagaagaatatgattgttccatatcagaaaatttggttacaatacgaattgagtcttgcaaaaccctgtcagtcacctaagaaataaggaaagatcaagagacagctggtatgtattttgacattaatataataacacagaaagctaaaatacttaaattgataagagcaattactatagaaagacctattatttcaatttacatacaaggaaatcaaatattagtcagtaagtagtcagtactcactgaatccatggcatgaggaagggttcttttcaaaatggattcaactgtagccttctgaacatttttcttcccaacgaaatttacaagaatactctccggaactctctttccagggcgaaatcccgggatctgtatatttttgtccaatagtacataatttaaatgcattcactaactaaaatcatgactacctaaagtagcaataaccaatattatcagtagctaataatcactgagtaaattatattagaagtatatatggtgaaacctaagcaaatacaatacaatcatattcacctttgatagcttcatgaactcgtttaggaccctattgtagcaatcatcacaaacagcaggaggaacttcaatggtcaacttaagctgcagagacagataaaatagtagctaatatggtcaaatcgtctagtaataatagtaaagggggtaaaagagaaaatggttgagcgtgaaagagcaagtcctggctgcaaacttgtgacgaattaacacatttagaaacttcacaaaggacagaaaaataaaaacaagtcttaagagaaataagttcaatctctttagaaaacactcacattgagtcactatcatgaaggagaaaaaatacacttgaaaccatgaaaataagcattttacacaaattgtctatgtaataagtaaaaataatagatacccagttgagaagactaaaataaacgttgagaccaaaacaaatggtacaaaattaaaaaagaaaaattatgactcactctggagttgggttctacagtctctgtaacgtctatagcagccgggagcttgtcttttcctggtccaggagcaacggaagaaggagaagaagaagagggggaagctaaagccacgaaatgacagaaatttccatgaaactgacagaaatttggttcagtaaattggcttcgacggagatgaaatggaagtttaagagaggtggaagctctatccttgaattgggtaaaaggttgtgataatgaaactgagtttgcaggagcgatggagtgagaaggaagagaataattgaggttgagaagaaccttagcggagctaaagatgggtctggtaccaatacagagctccattcttgggggctttgttttctttttttgaggttccgaagagataaagtgagactgagctaaaagtatttaaggatagaaaattaaaatgcaacatgcgtcttagaaaaaaaaaaaaaaacatgttgttgtgacatcctacgtgtcaaacagtaccggaagatggttgaactttgatgtctctaaatgatccatacaccaaatgtcaatgtcttagacacaaaaatttagattaaacttttaagacatactcgctcgctagattagcgagaataagaaaatagttaagtatatataagaaagacagtaaatttatggtagttcatttttttatcgcgataatctacgtctacttcgagtttctatttctcacgagatggtattacagaaataggctaagtatccaaagctccaatttctagagagaaaattagaaaaagaatctctaaccttgtggacaattttctgaatatgaaaaataagctaagggtgttttccttttataggtgaaggaagcccacaaaatgatgatctaacggtgaaaattagctcttgatggtgatggtcatttttcggagccaggtaggactcgctacgaataactcagagcttattttcgaaacactcttgggtgaaattttgtaacgctctgatacttaggcgtgctacagtaatttttcaattacagtgccatctttgctaatcaacgaaattt

SEQ ID NO: 383367 - DNA, 2526 bp, Cannabis indica
ggtttttgcagagtatgtatatcgcttatttttaatttggtctaaaatgaaagttccttttccgctttgtgtaacagagatgctttcttgtcagctagcctttcttctttgaattcatagagcttgactttctagtggatataactctactactctttctttttctggttgtgttttaagaattttaaatccttattatctgatcttattgagtgtatgtgtgattttgttgcattttactttattaaatgtataatacagataaaaaatgcaattacatagttggaaaaattttctttcttgtattatggtgaccaatatacttctcacacttttcatcaataaagattttggtcattaaattcaaaaaagaaattactacccaaagatttatataaagttgaataaaaaacaaactaaattaaaacaatacaatttatctattttagatttagacttgtatgtattttaatcctctgaagattctcgatctttttccaaatccaatccaatttttggttccatctacgaagatcaaaagcaatcgaatcatcatcatcaccatcatcaatgcgcttggcaatttcttccaaattcataattagtgaacaaaatctataaacaagatgagtaaattcacaagcaacggtcacactataaatagggtttacttttttaattttgatcaagtcattcaataccaacaacaccttatcaaccaccttaacattattatctagctctcttaattcttcatcaagaattagtttgaatagtccaaagacttggccaactctaattattgacacaccaatatcttgatcttcttcttctatgatcaagttgatgaaatccatcaacttgcgacatagattaaaatatgctaccataacacctaattcttcgtgatgatatttcttttgttgatgtccactactataactattaattatataattgctgcaaaaagagattacctttgatatatacattattaatttggtgcgacaaataataatgctgaaaacaatcatcattatatatatagaaattaataagatatcactactttggttaatttggttgagactttcaattaataagagacagtgttcaataaatataaccacaaatataattataatcctaatataagtatatgaagttcgaagtaattttttaggttgatatttaaagtatcttttcaccaaatataataacctatagcattatcacatatctatctttttttaatgaactataacatatctatttaatcgtataatatgataatatctaatcggtttgaattcaaatcacatttttttacaagaaattttgtaataaattaaagttctgattttgtatttattaattcaatatataaatataaatataacttaaacccctaaaatactacgtcaatctcatgaatcgtcaggtacttttcccctccgatcaagctcttcaaatttctgcgattggaatttcttctacacatccaatattgtgcaagctcaaatagaaatgtcattgcagtcaaattgttcaaatttctgtgattggaatttctttcagcctcaaattgaattgttgtgaggttggtcctattggagcagtcgatttcttcaatacaatggagcacgattggtccaattcgttcaaggttagtacgataagcagtcaattagacgaggcgagtgggtcgaactacaacaaagtcgttcggtaagattttaatttcagattgagcttcattgttcagtgtatggggtgttcttgataattaggttatagattggtctgaggaaatgcacgtacatgatgatgtcttcttgtttgggattaaaaaactatgctggctggccttatttccatgttaaaatgtctacctccatgctctgttctatctaattctcatcaattgtttgtagtctttatttcttttgatctttgctgacatgataaaatattcatcacttggctgcccttttatatgatgatttaaccctttcttttgggagcatatttgtataattctttgttgtgtctttagcaactggtccaccaggcaaagagctttttgaaagggggcagatggatcttcttgctgatctaaaagatattccaaagaaggcttagaaattggtaagtttcgtctctttattctcttaacttagcaattctcttaacaaagcatttgaagtttgagtgtttcatattaccatgataattagttgaatagtaaatttgttaattacctcttctaacattcatgatgctgtttgtataatataaatccctttttacacaactgcaacaacttgacaacatgctatttaaaaattaataatttgtaggatctctgaaaccaccacttgttgatgtcttcttgtttgtgattaaaaaatcatgctagctggccttattttcatggtaaaatgtctaaactgaaactctatttttagaagttattactggtgcaattttataaaaaatttacatattttattttgaattcgaaca

SEQ ID NO: 383368 - DNA, 1481 bp, Cannabis indica
attgacgtggatatgatgcatcacaatgtgccaagtccgacatggaagaaaaaattcatataataataactactattatttatttttcttcgaccttttaccgaccctataaattaataaatttacattattattattcatttttttatatataacaaaaatacaatatttacctttattcttttgtttttatttataaataataaatatttattagttttttttagagaataaataaatatttgttagttgggtaactaataatgacgctgtttaaaaaatatttagcttccttggctatgaggactcggtgtcttttgcagtttgctgagctaacacccccacctttctttttccttcttctcttcgttttcccacacactttcttttccttctcaattttcccgagaaactctaaccgaccactccagacagaaacctcgctttaccattttcaaattagccttttcccgattctccatcgctctaatttcaatgagcgcgaactgaggccgaataaccacagttagcatggagaacggcgtcgttggggacagactttgctctaccgagtctgttgatggaggtcgcgatgtctggagcggtaaggattctgattctgctgatcatctcgtcgtcatggtcaatggaattttgggaaggtttgatttttttttttttccttgtaatgagtttattttatttattaatcttatggttcaatttgatatcatttttatctatttgaagagctatttgaatgcccggttgattgttcctcttattgttttggttttttttggatagttttcgattgcttatttatggtttttctttgttgtttgtctaaacatgatcagaattgtaggtttgcagatattatactagtttgatactaccgtaggttgtaatccactttgcttctaaggtgaaaaataaaaataaactcatatgcgtctattttcgtgcttggattctccaaaacgtaaattagctgtttctttgaagttggttttcaacttttataggttaaaaggggtgtgttaaattcagttcaaatagaaacatttatttgtttccaaaagtttcggaattgtgagttatagttgattgacttttatctatttctcgaggagcaaattaaaatttacagctacagtttttctgttctatgtcaggagaggcttatgaaatttataattcgtgtctcctgtttcttagtgttgtttattttcattgttgtcccaaatgtagaataaatttgatttggaatattagtttcttttcatcattcccttcgtatcagaaacagaacagaacagaacataatgtcatattttaataaataaataaataaatgaaaaatttgtactttatttacttgtcttgattatttataatggttaatgattgattttgcagtgccacggattggaaatttgcagcagagcaatttgttaaaatgctccccgacaaagtgt

SEQ ID NO: 383369 - DNA, 3256 bp, Cannabis indica
ctataaagtaaggtttttttttttttgttttttttaaaaaatttaatggtaaactccgaccttggattgggacttgggctcgagacctcagtcttcggtcttgatctttgcactcagctttggaatcttgacctcgaacgaaccttagatcttaggacttagacttgaattccaaaaagagaataggtcggaaaaataaaaaatcatgttgtttttacttttattgaaagtaatgttgttttctacttttatcaacaaacttgctcagttgatgaggttattgtatcggcatctacaactcttttattggaggaaagtttaaggttaatcttctctattatttatgatccttggaaacatagataatcaaatttagctttgggcaaaactggctatagacaacatcaaaatcaatgtcgatgcaatcttatttgagaaagaaaattcatatgggtttggtattgtggctcatgaccatcttacttgccctatccacattaaagccaagtaccatggagggacttatttgaagtggtagaagcaatgagcatcaaaaaaacttttagttggatcaaaactaagcaatggaaaggtgttgagattgagagtgatagtatgctcgttgttcaagttattcgttctactcagttaatatcttctgtctttggtttggttgttaacgattgtagaacacttttgtcctctttttttaatgtaattacgttttgttagacgatcaacaaatcgaattgtccactatgttgctaggcatgcttgatatttaggtgatcgtagcattcttgggcttaatattccctttgatatttagactcttatgtattcggaatactaattgaataaaagtgtgatttcattttaaaaaaaaaataacatctcatatgttaaaagaactagtaaataattcgctttttgtggtggatatttaaattttttaaaattatatatatgaataactaaataataaatagattaatgagtaaatttacttcttgaacttatgtcactatcaacttgtgtcccttaaaatataagggctgtaagaaaatctccttaatatgtaactagtatattattatattccttcggttaagttttttaactgacacccatttatttgttgatgtggcataaaagtaaaggttaaaattgtaattgacaaagatttgaagggaaaaataacgggctccttttctttttgtatatttatttattttttttaaataacaaaatataaaaaagaaagaaattaattagaattgaccgttattaaataaaaaccaaaaaataaataaaaaattttattttcaaaatctcctcattaagaacaaacactcacagttaaggcaaaaattcttataaaaaaaatcttcgtcaaagactcttatggaaaaatttgtgaaaatcaattgggcaagaactttgaatggggaagaaagggatttcttcctcgaggaagaagagggggtacctgaggccgaggaatgatcgtttagggatcgatgtctccttttactgtaagcttccttggttattttcgtcttcttttttgttcttctttttgaaaaaatgtttgttctgtggttgaatgtttgaaacgatactaaaaattcaagaaaaatagatgcttttatcgaaatcccgtttgtactggtttttatacatgtaaaaaatagggttttagtcattttcttttgtttgtttagttatggttagagagcacatgggaggtattttgttaaagtgttttggaatcttgaatggggtcaacatggtttgtggggtatacttgtattgagttatggttgttcaatgctttaaatagtattgggtatattaaactaatattcctatatctatctattcactgtgcaagtccaacatcaaatgttttcaccctaaagtttcatcacaaaagaacattaatggatataggtaacaacccctcttacctagttgggaaaactcactatgtccatttttgtttattagaaaccattagtatgcatgaactgtttgagatagctagggatgtaggtcacaaaaatttaaaggtattgaagtttttctttaagtgggcagatagtgacactgttgaatgtgtacctagtaatggtgaattattggagaagattggggcatcaattaaaaagtctcataaggttcaatgctatgtggttgaggaagttgtgtcacctactaatgaaacaggaaatctcactcaagatggggttgattggggaaatggggctgtcacacaagatggccctgcttggttggtgggcctgatttgggtgggggaagttcaaacaagatgaagttgagttgggaaaaggggttgtcacacaatttggatggtcaaatcgataatggtgggcctgattgggtgagggtaaggtcacacaagatgggcctacgatggatgatgacttaggggttagaattgaagatattggtactggtttggaagctgaaaatgtagttggtttagaaggcaaaacaagagttgttagtggtgaatcaagaaggcctgcaaatgaggagattggtactggtttagaagctctacatgaaactgctttggaagatcgatctgcaataggtttggaggaaattctacctggtttagagggtgagacatgagctattattggtgaaccagtagagccaacaaatgaggagattgctattggtttaaattgtgagacaagggttgttaatggtaaacaagtagggcctgtaaatgaggagattggtactggtttggaagagattttacctagttttgaagtgaaataggggatgtcagaactgaagcagttacgcctggaaataaggagattagtggtgaacatgaagctaaaaaaattgcttgagatgatgactttgttgctgctgcaatggaaggatttaacacttttgagatggggaatggtgaagaaagtgattatgatgaagaattgaatgaaaataatgatgttcctgctgagaattccgaaacttttgaggcaaacgatggtgaagaagatgaagacaatgaagatgatggtgatccaaattacataatagatgttaaatgaaaatattatatattttatagtgaaaaatacaaaataaaattaatgttttataatattttcaagaaatacatgcaatatattattatgttgaaaatattttatttagatttaattttatctttgttcgtaaataataattggtatttatggcataatag

SEQ ID NO: 383370 - DNA, 894 bp, Cannabis indica
acaacatcattattaacattccacttaaaaaaaaaaaagttgtttacgataatcaaactcaacaactaatattcaacacattcaactaatacaatataacataccgagatagagagtagaaacaacatattcatcattagtacacacaactaaactaaaaataaaattgacattacaaacttgaattggaacaaacggccgacaacaattgaataatcaagttcagtgagagttttcttctcaaaaagtactcagtaaccacaacaactctattttgatgaggaaattagccaaatcttcttttcaaattcttctggtataacatccgaatccctatcagaaaaggaagagtaattagctgcaaccctattctctgatccacatccacaacaagctcggtcgcttgctcgccgagcaaccgccaaaccgagcttacacggcaacttgatgcagcaccacgcgatggctactgggcaaaggacacacagcatgcaaatactgcatagaaattccgttgccttacagcataaattagatgtttgatcagtaggactacctgagcgggatgcttttccttccttaccattgccttttttgcttctgtcatgattaaagtattgcaccttggttttctcttcaatgatgttctttttcttccctcgaaggaccaagtgcctttccatatggtgagactaacggtacttcaaaatcatgggaaataaaacaaagggattgaccgttgggtttgatttgagcactacagctgtggcgatggcacacttgtggatgagatgggaatgcttccaagttgatgcctttatctcttttaaaaacccatttaattacttgcctacctctctgaatttaattaatgattattattttatttctttt

SEQ ID NO: 383371 - DNA, 1397 bp, Cannabis indica
acaaacaatccatgttgttaacagtgatattaaatatagatatgagaaaggcattgatgattttgtactctttccagtgaaacatttctcaaagtatagccgccctagttataatactagagccgaaaattgccaaacttaacatgagcatgcattccctttgagatgaaatgattgtgtttagaaattgagcttttttttccaagttttggtccactcattcacctgctttaaccgaccattagccgcattaagttctgagaatcaattcatctataatgcctcaagtaaataagtgagttggctgtgattgattacacttagaaaaaaatttggttttgaaattgttattatctcaataatagcttatataccctttttaaagtataagatcctattggtactttactttcttaatcattgcagtatacactaagagaattagtatttacatatagttggatgcattataataagatttaagattgtatacatttgtcttatttaaataggaaacattaaaagagatttatttaagcccttgatctgaccacgcagtatttgcattaaacaaggttccattccacgtcaacctttcatgcaatcatttaagaaaaagaaacccaatacagagactttaaagttgaattgatttgaaaccctaagccaaagccaaatatcagtgtgtgtaaaacattttgggatggagaacagaggacactcttttcaccttgtggtcccctcaaaatatagtaaattacgaccctaaagttaaaaagaaattatcaaacccctaagctcacgtgtagggttcgaagcacttaataaccataataattgaaaaaaaatccatcattagccatgcaggcaattgatattattatgtgaaatcattagaaaaaaataaataataataataataaaaatggggcagtattaaaagcttttgtatatgttgatgaggtcatggtgttgagctggttaaaataaatcaccccaactcattacctgtgggtcacgtaaactaatgcccccaaccaattatatcacaaacttacccattgatgaaaaatggggtctaaaaattatgaaaatcttaaaccttcacgtgtcttccatcaaacgctgtcaaatcaaattctatgggggtgatgcaatcatataaatatttttaatatagaacaatatttatgtaaaaaatatatatatatcactttctttgagtaaatgaagggccattacctacatgggtggttctgcataattgtaattataggcaatgtacatgatgatgggtgttcatgaatgcctgtaatctgtggccatgcaaatctccttgaccactgccataacacatttatgaaaacaaacaacccctaacacctttaaatcattaa

SEQ ID NO: 383372 - DNA, 2048 bp, Cannabis indica
ggttaacaggttttacaggtcctatagaacaggttcactggataagtggcagggtttccaaaaaatccattttgtcgattcgtgttttttttttcaaagccttataagttttttgtttccttgataattaggttatggccaagttatttatcgatagtgaaactcgtagttgtgagtttaggttcctggattaagttttgacgtgttattttcccttttaatgtgacatagggcatccatccagcacgtgatttttccgttcaggtgggccatcacacttgaatttagaaacgaggtaagactagaataaaacgtattttatatgaatatgtgtatgtttgatatatacatacaatttgtgattcgtacactaccaacactagtacggtagcagtactgagtgtgttggtacagtgtattatgtttaaagagtacagtacgcactactacaaaaggcctcattagcgacggtcaacgtgtctcgctaaaatggttgatcgaggcaaaaaataagcagagattttatgcttcagagtataattgaagctaaaaagtaccaattagcgtcaactgctactccgacgccaaaagaagaaccgaggaaaaaaagtgaaaattttaagaaatttcttttacattttgcttcggtagaaaaacgacactaataagcttagcttcggttgaaaactggggttaaaaaatttgcaacatttatccaccgaagttaaaggattttaagttttttttttagattataaaggatttaagttttctaatacccaattttcacaaatattaaaactcagttcttctcttccccatttcaaaaccctagcacatagtcacctgatcttcttcttcttcccatttcgaaaggcctctgcccatcgtccctctctctctttctctgcattaccgccccaccttccctctctctttctctcatttgctctaccgtcattagcacagagcatgcctcccactctgccctcatcgttgactctgcctgcctcccactctaactcgcttggttttgaactccaaagcccctcgactccaccgacgacatctttctatcggtcgcatgttctccctctttctctcggtggtttcaaaccacccactggctcttctctcctccaatttctatcaggtaaatcttctcatttgatttttttagtgatatattctatttggttgccgaaaaaatacccatgaatatgatgcgagtgtttatttccttgtgcgactgactctattgtgtatttccttgtgcgactgactctattgggtttaaattattattattagtcacaattcgtttgacataagtttcctatgaaagttggaaaattttatttacttacagaaactgttagtctttattttttaattgagcttcgatagccatcaagtatataacttttattgttgtagatgtcatttacttataattctatttcaaaaatgggtgttcgccacaaaaggaaaagcaacaattttttttcttaggattgatgacttcttcaagaatcattcaggtggactatacttgacttctttaacaatttggttcactatcattctttattctacatattcttgtttgtacctgtgtaaaagaaaaataaaggaaaatgggggaatagaaatattgaactttgttgtttgtatgtgcaaaatttaagccacttagggctcgtttggtaagccgtataaggatcgtattgtattaaacaataattaacactatgaccaaatttttaaatacaatgtatgttgtattatttaatacataataaatggtctgtattagcttgtattgtaatatttacaaagaatttggggtcaacaccaatctccaacctggatttggacccggacccgaaccctggacccgggacccgggacctaggcacggacaaagaccccgaacccggacccagactcagaccccgaccccagacccggacctggaccccggacccggaccccgaacccaaaccccggatccggaccctggaccccagacccgggaccccgaactt

SEQ ID NO: 383373 - DNA, 2462 bp, Cannabis indica
aaaaaaaataaaaacaacataagtcacctcatattaactagttaactctggttaccataaggtacttagttacccttacttgtattttcttattattttcaacttattcttctaattttctaataaagttaatttttttaggaaaaagaaaaactataacaaaaaaaaaaaaatataaaaacccattatttatttatttaggtttttttcttcagaaaaaaattggactttacaattatgtatagtggtttaagcccatatatgtataaatatacacttcattattataatatgacaatattaactagaccacatatctagctatatcccatcaacacaacagcgccaatcaatggcaacaagtactacaacatcactactagcatttcccatcctttgttcaataatctcgatactcctcactcaacaagccacagctcagagcacaatttgtgttgatgacaaaggtaacttcactctcaatactacctaccataacaacctcaattacctcctctcaacacttgccaccccacaaaacaacaacaattacggcttttacaatctctcctacggcaactcatccaaccaagtttacgcaatcgcactatgccgcggtgacacaaccccgggcatctgccgaagctgtcttcgcgactctactagtgtcctcccaaagcgctgcccaaatcgaaaggaggcactcttatggtacgacttttgtatgctgcgctatgctaaccgccccttgtttggcctaatggaaactaggccaaacgtagtttatcacaacactgaaaatgttccttctgatattgtagaggaatatttcagagttattaggagattattagatgatcttaaaagaagtgctggtggtggtggtgatggtggttctcttagaaaatttgctgcagcaaatgctacagctccaagatttagaaccatatatggacttgtggagtgtacacctgacctgtctaaggaggattgtgattattgtttggaagatgcatttgggtatattccgggttgttgtgatggtaaaataggaggacaattacttggacccagttgtaaatttagatatgaggaatacctcttctataattctacagctcatgctcacaatatataatttagatatgtttttgttctatttgttgtgtttcttggtctgataatcatcttcatatccacttgtttgtttaagattatttgatcagatcaattagactttttatcttcatttttttgaaagctattccatttttttatctttcgtcaacgtcaaaataatcttttaatttagtatttgattttacaaagtcttgttcagccatgaatatgagcattgcaattaggtgcctagcaccttctcgacatgtcgcgatacgattgactagcgatactccctaaaagctattatattaaactatatgagacccaataattagttagaccaatagcgatattgacaagtaggaatgtgctagtcactattggtgccctttagcatttctccatgaatatcgatcaatacgatctattttctcagtcaacccataagttattgtcattttttgagagtttgtcttttccttttagtgagactgtttattgatcggtaattatttatttgtaaaatgtacctaacatatatgacctttctttctcatccgacccacaagatcttttttttttgttaaataaatattgatgagttttatgtcttgttttaatgggtaaatgtaagaatattattgtggactaatataattatagataattctataaccataattattaactataagtctaatatttgtcaataattataatgagatgatttacaataattaattgtattaaagaaacatgagaacactcttgtgactaaattggccattaaattatagtctaccattaattaaactatataagccctattagctcactcattaggattagaagggtgtgatatatatttgatataagagggtttaactaatagtaatgaaattgacataagggaattgctccacattggcctctcttcaagatttaccattgaactttttttctttttttggcattcatcacattgaaaagattagaagtatcaaatggctcatatggacaacatcccttaggaggcatgttttattgctcatctatgccctaaataaaatattagatcttcgttgatatttatgagcattgttgatgatagtaaattaatgatgttgtgtttaatgctcatatcttgttatatactttaacaattgttattaagagctagtaaatttgattttaggaattaaggacagtttggcacagttgtgctgtgagaaaaagcagctgtagatgtgctgtgagaaaaaacagctgtagttatgctgtgaaaaaaaaaaaactgctgagtgtttggtaaatatgattttaaaatagttgtgagttga

SEQ ID NO: 383374 - DNA, 2048 bp, Cannabis indica
atgataacaagctcacctgtatgaactggcctaagaaaagacgttatgaaataccgggccactcttcaaaaatattagcatgctacggtgcatctcatattctttttatgacatgacaataaaacatcctatattttaaaaagcacgacaaaatatgaaccaaactaacacaatacgaaacgtatttacagctctacctgcacccatggaatattatagagtttatcttcccaagttttgtttttggtttttcttttgttgacatttaaggaagggttcaaatttgaagttcaatttttgtgaagactgtacatgttgtcgatcatgtaagaaagtgataatgctttaaagtaaactgatagttaaattattatatataaatttaaaattacactatatattaattttggcatttatttgatatttgaattagtctttttatatattatttcttatagttccgaataaattaaataatatcctctacaaaaaaaaaaaaaaaaataagggagtaccatcaatctatacatttcaattcaatctataataggttactcttaattaataacaccaaccattccaaaaaaaaaaaataaaaataaataataataataataacaccaaataaaataaatgctgcaatgaatgaaacttgttttcacattttatacaaagaaacaattgtcacgagtttaactaacggtataaaggtttgtcttcatatacattattctcaaataaatataatcaaatgaaaacaatacatataaaactatatctttcgaaataatgttaagtacttacttaaattatacatagtattttcataataagtatttaattttaaccctatataatttaactagagatcaaattaattttacttgtattattgaaataaattacatatcttgaatatttgtgaattggagaattttctattaaaatgtgatttggctttttaaattttggttttttttttttattattgagagtgatgcaaattacaaagcttgttgtttacttcgctatttctaagaatttaaatggaaattccgatgtatattttccccataatttaattgatatattttagtcaaaatcgttaaaaatatttattttagtcctctaaatatgatttgatcaccaattatcataaataaattaggatgatactttaattttttttatattcgtgtatgagttatatttaagacatttcataatagtgtttaaatatcaagatatgtgctaaataattataacataatttttttttaatattttattaaaaaattaattcagataacaaaacacattagtagtattaaaggtgcattataaaattttccaacaaattaatatatacaatatagattaaataaagggaaagttttataccacagctgatttttctcgtgaaaagcttgttagttactcaaaaattattattattattataatttaatttcattatttttattattattacccatttttgtgaagtaagacttgagcgtcaagttatatatttagaacaagataacacatcctaattagggttttcttttaccctaggctatataaataaataaaatatacccacaaaaaatcaaaaaccaaattaaagaattagatactcgaaaagatcgaattttgagtgagggcttttcaaacatgaatcttcacgatcaagatagcaatggcgattgtggtggatctgccgccgtcaatgtgattactgatccgtcgtcggaagcttcaaccagcagcagcaacaacaacattattccgacaggtattccgatgggtctccccaacaatttggaatggacggacatgattcgtttcgcactctacaaaatcaacggcccatcacaaagtcaactcttaaaacccttgactgaattacagacagttttcgcagatcggataggcgatttcatcgatcaaccaattgagatggttaaaggtaatagatatggtcgccgcagtgctattgattatcttgaagaaagagataataagaagaagaagaagaagcaaaa

SEQ ID NO: 383375 - DNA, 3015 bp, Cannabis indica
gggagagtgtatggtgaagattacccagtcccgtgttgaactacaaaccctagctggccatctgaaacgagagctggccttggctggctaggcctacacctggctgctttgcttggccggccagacctgcattgggcagggtctggcaacccagtactcctccatggcttgccagacctgcaaagggcagggtctggccgctcgtgatgcttccatggccggccaaacctgcaaggggtagggtctagctgcacgtgactccacgggcaactaatgctagttgtgtgttgacagggggtagatcacaccaattgctagagtttggtggatctagatgtttgaagtgatcagtttcactcctcgaataaccgttttgggtgtttccacctactcccagtcctcatcagttgaagattgacctctggacacctcgctccccttggggaggaagtggtgtactctggctggccaaagggtactcttgctgatggctagccaaccaatggctgtataatgggggtgttgctgagccagagatctgtgaccattcccctgtgccactggttgttaggatctagttattttcttcgttcgacctttgaggcaaggtctgtcctccctctggcaagggaagatcggtcatagttcctgaggaacttggtagaagtcttccttgagcaaatctttaaggacatcttggcctcttctatcggttctctgtttgaaccatcttatcagatcgctagcctctcaattgtggcgatctaactctgcttggtgagatcgaaggatgtactcctggtcatccatccatctcaggaatttacgtctttgctgagcgaaaacatcacaaacagtggcgtgtgattcttcaattaggcctgcacgacctacagcttccctgagtctggccaactcaaggtcttttcctaagtctagatgaggctcgccaatcacaggctcacaaactccttggcctgtctctccaacgtagaatcggagtcgagatccaattgttgtcccaagggttgttgcccttggctccttccttcagtaggaggcgccaatggtgggtcttctcgtggaggcaggggcctgccacttggatccactgggatgcctgtatcaatttcacctactatagtggccagactagtggcgcctgttgtggtgacaggattcaccacatctgtagtgttcatggagattctagttgtgactggaacctgagtaactggatctgcaatttgtgggtcctaagggaaacctaaagatgcagatagtgcgataggagttcttcttgtgttcaccatggcgtttgatcagatacgatatccacgctctaaatgaaagcaccaaactgttgacctcaaaaagtgatcaaccgacaatggggtcgtatagatctgattcttgccacgtgtttgcacaaataagaataaaaaataataaacaacagatttgttatagagatttggcccccttgtgatagcgggtaacaatctactccccttttagttgtagtagtaccaagggttaatactatccagatcactataggtgggatctactatagcacccttaggagtacaaagtatgaaccaataatggcaaaatttaaatgttgagatgatgctagtgtaggggtgtgagagaggaagtgaggaagagagagattgtcagacttaggcttagagcttggacgcaagattcatgcttagattttacttaggtttctaggctagggttatgacctttatataggagcctaaaccttagattacagtttgaaaccctagatatttgcatagtttgttagataattacaaatgactaaattgccattgaatctagatattattctgtttagcttttatgtcccaatttgcagcccatgagttactgtccacatgtagaagtgcataggaaaccttgcagagcacctctttgtcggccaggccctagtggaggcaggctgcccggccatggttcattctcaaggctggcagtctatagggttagtcagctcctgtgagggagctggtctgtcacttgatgcccgtttgggtgccagagtctccgtttgcttaggtgctgacttggccttcttattggtgagttgtactgccacgtggcactaattttatccatgtaagtattccacgtcatcaagacaaaaattgggacaacacattagaagtgtgaacatttcccaaacaccaaacgacatgagatactcatgacccaaatttctagaaaaactaaaaaactatttgatttctcagaaataaacaatttttaaaatctaaattaagaacaaaatattttcaatcttcaaatgctctagaatttttgaagtaatttcttcgtgatggtattaaaagatataaatagaaaccaaaatatattctatattggaagacaagataaatcatttgtaaactttaaaagaaaacattagttaacgagccaaccataattattaactaaggaatttctcacaaacaaaattttcacataaagaagcaataaaatattgaaccaaaaggaaaattgattgttgtacttctaattgtatgaaatgggactttcttttattagttctttatggatatgcaatacacatcacaacactaccccatggaacctttcttggtcttatgatgcctttcaattattgttctagtttttataagggattatttcacaaaaacataaaaacaacaaaaaaattataaaaatacggtttcacggaattttaaacattttacgatttttttgattttatttacagaaaatacggccttttttatgttgtaatcttgttaatttgttgttgattttttgttattagtatgttattttttgttgttattttgatattattttgatgtagttttattgttgattttatgttgttttggtgttattttttggaaaactgtataaatgtaaaaaaatattctttaaacgtaaaaatgtaattattttacaaaaaatggtgccttatgtaat

SEQ ID NO: 383376 - DNA, 1538 bp, Cannabis indica
ttttaaacaagcatgaaaaaaggcggtgttatcatcacctttttgcacctagttgattttactcctctgcctcaaaaatttgtggtacattttttcctaagtttgaaagaaacaacaatttttttctcctcttacaggtacttgatgtctctttagttcgcctagacattgagttgggactttttatactcatctttggcttactcatatatctccccaatatcaccaatgaactgcctattaaaagctttcaatttatgtttaagtctcattgtctttagctaaattcctttaagacccttacaagccattgatttcctccaactatcggtaacggtgagcctaaactctagatgatcaaactaaaaattaaagtatctaaaaggttttacctctatttttcagtgatagtagaaggacacaagtagtgatctgaagttgtctctcaagaaaaattagctactgattgcgggaagatgtcaatccaatcttcattatgaaaaacatgatctattctcgaatagatcctagcttgcccctcttgattgttagtccaagtataatttgatcccgtccttttcagcgatcccattaaagcttgggtgagctaattagtagaatcaaaaatctcagcaattgtgactttgttccctccacttcggtcatcttgaaaaaacactgcattgaagtcacctagcaccatccaagctttagtaggaaaactcaagcttcgaaggtcctgccaaaggtttcttcaatcgagttagcaccatagacaaaggtaatacaacaattattttgttgcccaaccatcttgacatggcagtgtattagttgagaagtttcttttatgatgttcaccttaataaaatctttcctccaaactaccaaaattctaccatcaattatagcactagaataaaaattccagctagtgaatttattcatcatgtctctaactctatctccttttaatttggtctcaaaaaaggctccaatcctaactttattcaaacaaaagatatcaaaaacaattccttgtttttccttattattcaaccccctcacattccaactttctatattacaacaatccattaacccaacatggacaaaataaatccttcctctcctatcccctcctcctaccttactttaagagcttcaaaagaattcttagtggcatggtgttcctctacataacctccagtagtactcttaggtttagacacaactttctttggcgttttcactatttttggacactggattccccaacaacatgatctagcttattcgcatcaggaccaggatcaactatcgagcctccttcagtagcttgatttccactttttactaaatcttgatcattatctttcttcttgacgtccttattcagatcagcctttttcttgctcacccctagttttttctcaagtggtttatgttgggttttatgccctaaataaaactcatttcaatataattagatttacttattaatatagatcagaaataacatttaatgttgcatggtt

SEQ ID NO: 383377 - DNA, 4455 bp, Cannabis indica
aaaaagtaaagtccaaaaagagttaccgaaaatttgaaaattgatccagaaagtagagtcaaaagagccacttgtgatttaggtatggtaagctatgaaaagtcgcttgtgatcgaataatctaaaattggtaaaccactactctgatgactaattagtttggagatggaaacctgtccatattactaggggtgggcattcgatccaatccaattagtaattggatttagaaattcatcatctgatccaatctaatctaatctaattgctaattggatatccaattacacacttagattttaatattaacataaaaatataaagaaaaatatgtaaaaattaaatatcaccctttatataagtttaatactccataaacatatcatcgttacaatgtaatccaactaaaagtttcaaatacttaaaacaacattttttgagtaataaaataggacaaaatatcatgaaaataaatacacaaaacaatcaagtgttgcaaatttgacacagaaaatccaataaaaatataattaatatatattatattttttttatattttttattatataaataaatatatataactttttgacatatataaatgtaattggattggattcgtttttaattaaattttgagattaacatccaataaccgatctaatccaattagagtccaacttttagcatccaatccaatcctattataattagttatccaatttttttataattaaattagattggatcgatgcgatttaattgaattggatgttgcccaccccctagtagtattactatacacacattcaatctacctttgcctacagtttcaaattctaacataatattaactcactccaatactagtttcatataacaaacacccttcatatgagttttgcttgacatataggactacatatccatttaacattagaatcaaaatgttttttttttatctaaaaataaaagtaaaaactataggtagccaagaataagaaaaataaaaaattatatttaaaattatgatgactaaaatcaatagaaaaatacaaatttttcctacttagcaaaatacaaaatcttaaaacacaatttaccaaaacataaaaaaaaaagttcacaatttaccccctcatatttattttttctttcattttaaccaccttaggtcagtagtagaacatgcagaaacattatccctttccctaccaataaggctctcagcataacaagaagaagaattattcaagttgttctgatccattccattatagtaacaaaacccattctgcaaactcttgaagctagggctcctcaactggtcactaacgacgtcgttttgttgatccataactgaagggtaatatagtcttttccttaccgaaccattagtaccacacccactacttcctcttatttgttctctttgttttggtgcgctgagtgtgcgagcacgtgacttggcaattgctgactcagttgacgccatgtaatttggtacactcccgtaacgacacgtggcgaccacaccgaagtttggtgtgtgcgccgcagagtaacatctctcttcttttgaagacgagtaccttgggcttgagggacgtagtagtttgagtttggagggagagggagtgactgctgggctaggaatatttgggcttagaagtgggcctggttgttgggctttatgaagttgttgttgttttctaatgtttgggccataagtgtccagttcaagtgttgttcttatgatattagtgtctcttctctgttgttgttcagttgtgttttcccattgttttgtggccatccaacggtcaagccatttacttctctcttctaactcttcttcgttccctgaagatgggtttctcctatttctccatatctaaattagccaacaaaagatatttcactttgtaagaaatggtatttttgcaaaattatcaaaatgtgggctaattttccgaataccttatacttcaaaatgcatgaaaatggagagagaaagcatatttaggtaataggagaacaatacaacaaggcaaatatatcaaaaaatcatattttatatataaaaaaaacataaaacattaaaattttatataatcgaatttttgtaatttgttttttgttctctttgtgaattttgaaataatccctataaaacatagcttaaaaatagatcataaaaacaaagaagttgttaagaattttggacatgatatcataagattatatatcattaaagtcacaatgccctctattcctatttgttagctttaattcatattaaatataaaataaaaatgtcttaaattttaatatttctttcttttacatattcatattatatttttaaaacaattaaaaattaagttagttaaactcaaaaataaaaataaataaatgaataaacctgatgagagaaagcataagcaagagccttttcacgtttgaaagaagcttcctttcgattttgtagcttattagcttcttcaatatcatccttcctttgaatttgaatttgagtttgagggtagtaataataatcatcccaatcatcatcattttccacaccaccacttctttctcttgactattataatcataatcataattagtatataaaattattataatataatgcaatataaacaatccaattatgatatattactaatttacttaccaatgaaaccctatttcgaatatgttcgaggtagtttgaattccacaacaaactattattattaatttcatcgaacattgatttcctacgagtagtactcgtaggaagtccctcgagtgagagccttgctcgttgatggcgcacttgatcttgaaccctaacgagcgcttgcatgcatttcagtgtcaatttcgcttgttttctcacattttgccctcttattaatgcttgaagctttacaagtcctttaagtgcacataaagctctccttgcctttacatatttatataattcaaaaacaaaatcaacaaaaatgaatttacatataagatgatatttagtgttaaatttttacactttataaaaaatacaaatcaaagtgttatatatagtattaaaattttacacattatcaatgtgagattttctaatacttaccaagtagcctctgaaagcggtttgaatcactatagccgcgtaataatgttctttactagtattgaaactactccaacacctactattactagtagtagttgtagtagtgagcttaacaatttctactgcggcttgagcagtggcagccacggcttcagccgcagtggctgcagctacagccactgcatgattactttgttctgaaacttcatcaacttgaggaagaagaattggttttcgaaaaagccaccttcttttatctctcttctgttaaaaaaagagaataaaaattcaaactttgtttttttataataaatatgtaaaatatacattaagaataaaaatgttaccttttcttcttcttcattatgatgattctcttctcttcttctgcaactctttttaccattgtcatctttagttggagatctgaaaacccttttaacaacagtcaaccaagaagtagaagaactggtcttttttgccatgattgagaaaaaagacaactttttttttcttacttattattattattattatgttagtgttgtgttttttcactatggtataatatataactaactagtgtaagactagtaatgaaaaaagaaagaaagaaaagactgtattttttttaactttttgtaattaatgatctttggaattgattgagagaattgaaagagagaagagtagtagctccaatataagtgcgaaggaaagatgtgtttttgtgggatgaaaataaattacaagtaatgggattgtgtcagttccatcccattgtgaaaaactatgtgaataataatgttgcaataatggacacaacatgaacagagatagagagacttaatgtatatcacaagaatccaaggaaagcagtgaattgaatagggcagagagagagaggggtttttggattaatctgggttatatatatttatatatatatgtatgtatagtttctctttattgattatcactacttactgaccagttttactggtttcacgtgttatataaactgcaaaggacgaggaaagagacagagctttattgtttgagaaatgcatgcctttcttatatgtgtttttgtgtgtgagagaaaaagattaaagtttaagcaaacatttatatatatatatattatttagatcattgtaataagtaattattaacggcattgttattgggtatcagtggcgcctagtattttttataggtggcgtcttatgattattagttagcgatattgcctaaaagttattttcttacgttatatgggaactgatacataattacaccaatagcggtatga

SEQ ID NO: 383378 - DNA, 1770 bp, Cannabis indica
cactaagtaattttttattttttttttatttttacttaggattttgaaatttttttatttacaaaaatattatttttttttgattaaattgaattaaattgctcgatatttcatttgtagttgttttatagtaaatttatagttattataaggttgattttaatttctttattatttttttttattatttttatagttattttataattaatttataattgttgtgcgatttgattttttttgctactattttttttttaatgaaaaaatttatatttttatacttttgacttttaaaatcatatttttacaaaattaaatttataaaactggaaataaaatgtttaagtcataaaattataattaaaacataaaaaaatatacttatacgaaaaaattcctaaaaaatataatatttcaagtacttattaattattgttttttaaacaaaaaatttcaaaatttttaattataatataatggtgaaggatatgattgtaatttggtttaatgatgggaaggagttcttggaacatgttatcataggagattaatgaactgtcaatcatgaatttggatacctcacaacacaactccaaaataaataacaataaatgcaaataatactatttagacattcaatttttcctatctagaattcttgataaaataaaaaaaatacttgataaaataaaattcttgtcaataattacttttctaaactccaccgacatcatggatattctattaatttttaagtaattaatgtatagaatttaattaaatatatgtagctatatgttctctttcaaattcttgtttttcttttagtttgaattataaataattaacataatataaataactatgttttggattttcattgaaatcttatcaagttatatttatagtttaagtagtcaaaatatattatgctatatataagcaccattttaataataaataaataatataaaaaaagcttttatatggtatttaagcatactataaattacattgtatagaaagaaaaaaaaaaggaaattaaaggaagaaatagaaataatcattgtttcttcccaaaataacttacttttatcatttattatagtttggcaagtaaaacttaattaattaaaatgtgaagattagaagaaaactcatacaaatataatgataagtacacaaataaatcttctaacattagagtcatcttaccaaaatctagcacccattctataaatatcattgataaagttcataagacgtgtgaagaggttggtggtataattagtggagatagattgaataatagttttaactaaaactgccaaaatagcttagacttttagaggttgtttgactttataactttaaaattattttctattttttaaaattgaaaacaatttttaaaaaactaataggtgtcgttaatttggcgaaattgtttaaaaacattgatttttaaaaaactaaaaaacagaaacattaaattattgttttcatttttcaaaaacaaattttttttttgtctaacatattatattttatatttttgcttacatacccggattctaaactcgaaactatacctgaacccgaacccggatgagttcatgtcatggtatggtgttaaaaatattttatttttttttagtaagtaaattttttttagaattaattttaaaaaatttgtgtcaacaccattaaatttaaaaaatgataaaaaactgttttctattctctaattttaaaaattgaaaaaac

SEQ ID NO: 383379 - DNA, 3784 bp, Cannabis indica
gagagagaaagaaagagggagtttttgaggcttggggaagcaggcatgtggatgagtggggaacacaccaaactcatcaattgaacctgttgaaattattcaacttctgacagtaaaagaagcataaagaaaagcaaacatataagcccccaccatttttttttattaaagaaaaaaaatataaaaattcaacctttctgtgtgcttacttattgttgaactacattttagtcagtgaggtaagaaacatcaaaagggtatttgaagaagaagaagaagaggctgaaattgaagacttgaaggccattcactacaacaagttctcaaaagggttgaagctttatctatcatagaatatataagtatattttattttcttttattttttaattaaagttatgcctagaccaggtccaagaccgtatgagtgtgttagaagagcttggcatagtgatagacaccagcccatcaggggttctcttattaaagagattttcaggtttctctttaaaagaaaatacttttttcttttcttttgtttttttttctcccttgttggggtttttgaaatgtgtaaattatattgagtttatttgtatctaataatctgggcttttttgtttaaagggttgcgaatgagattcataattcttctactaaacagaacaaagaatggcaagagaagctcccaattgttgtgctcagagctgaagaaattatgtactctaaagccaactctgaggtatagtttatctctcttagtgtctcatcaatcaaatccaaatggctgattcttctggggttcaaagtattattcttgaaaatccctttccactttcctttttgtttttcttctttgaacagaacagtttatattttattttattttatttttatttttttcgtttttttttctatgcataggctgaatatatggacctaaagacactctgggatcgaacaaatgatgccatcagtacgatcattcgactcgatgaaagcactgaaaccggcgagtttattcagccttgtattgaaggtacaaaaacttatatattgcatatatctgaacaaagaaagggcttttcttcatctaaaacataagagttgaaatttttgtaaatagtaactgttctatgacttcaaagtacttgtttttatcattttgtttggattgtgtggacattactatgtttgagaagagttctagtttctagtttaagttatcatgtttttataattatattccctttgatttaccaaatgtttgtatagctgctctcaacttggggtgtataccaagaagagcctcaagaagccaacgaaattgtcacccaagatgttacctgactcccaacacttcagaggttccatctgtatctccaagcttgttggaaaatgctgctactggttcaaatcttttgagatcctctaaccatctcagctctcactttagaaacaatttttctgtaaacaacatttctactgctatgttttcaccgcctccatccggaaacaacatcaccccatctaacagctatgaccaactcctagcccttagtaattataaaccatctaactcattttcagcttaccctctttattatgggggaaatgccccccagtttgaacaactttggcaagatgtcgccctccttcctaaacttaccagtgatgctttaaaagactctaaactcggtgtggtcaaggatctttcctgtcatgaagatgcctctttgaagaacacagaaccaaatatgatcatagatacagatgatagacaatgcaatattgggtgtgatctatctttgcgattgggtcctatgagtgttgagaacaagcaaccccaggctattgcagacgttaatccccgagagggaggcaagttttgtgaccaattaccattattggataaagggtgctccatgtttcctcctagaggcaatgcttgccaggcattaagttcatacaaaggtgtagaagcagccgtgcgaaaacgaaagccatcttttgataatggaatcgacgatcagcagttttgtaatttgaagccaagtcctccttttctccacttaaatggaaaaatgagaaatgctggatcataagttctgattttttcttacttggttaactttgtggtgcaattttgttgtactcccggatgtgttatgcacccaagagctaccagattaggaaggtgagatgtatatataatattgaatgatgatgatgatgaattagatagctgaatggaagaactaacagtagagggtttaatcagcagcattatatgtactaaggagaattttagatatttaagttttagtacggtcatatattgttatagaaagctgccttgtaacagcttcatcacagttagtagtagtagttgagataatttataagtgtctttagctgtcaaacatatgtagccagaataaggtattatgctgttttcttttttaatatttttagtttaatttctcttccttctattgtaggtatgtatcatatttgggttaattaagtcaaactcatgatgaatctgatctggggttatttgttatttgatttggttaggcatacaaataaggtactaattaatatatatccattcggggaaggttttaaacaaaaatggtatagtataaattaaagtgtttgatactagttcttagatcaaataaagggtgggaaatgggatccatgtccctttagccaaaacccctcaaagtcctttattcactctgtgattgtgaagagatgaggtaaatggaccccgttttgacatggttgaaatgaatgaggatgatgatgtaaagtaagtgatgaggtgatgaaatatgattaaatccataacactaggcttaatttttgtttgtgtgagtgggggacaactcgtattcttattacttataattatatattatatctttggtcaagctagacttatatacctttagaggttgtgtggaccctattattattattattattattattatttattattttgtctaattaccaaaaagaagaagaaaaagccattattaaaaaatgaatggatggggatctttgtttatctataagaatcattttgtgtgggtaggaagtgggaacaacatatgctaatatcttagaaagtaaacaacataacctaatattaaagttttattgtttagtttttggaaaatatatccttctcttatataagtgttaattataatgttacagtttatagattggtttaatatgcttttaggatagataacgattttttttaaattgacaaaatctcttctttctttagtctaacctttatgttactcataaaaaaaaatatttaaaataacaataaaaaattaccaagggacaccttaggctaacttcaatggtaaaagttattattattattttttttgtcaacatcactttattgggtagaaaaagaaaattaagtgttaccaatacatataggaagagtagggttgttcatataaaccagaaaactgcggtttaaatccggaccacgacaatccgaaccactgtaaaccgtaatcggagaaaccgttttggtggtttggtcaatccggactgtttacaatgtaatggttcggttgcggttcgtaataaataattaacggttaaatcggaccggatcgtttataataaataatgtatttatatatatattttatatataattatatgtctaattttgaacttttttgtgtgtcaagttttttattgcatgaattttgaatttttatgttatgtttgactt

SEQ ID NO: 383380 - DNA, 1284 bp, Cannabis indica
ctcttgcggggtatcaaaatggatgtcatttactatagccttgtcactatgtagtggacaaaatatgaaagagtacataattgatataatcatcaatcttatgacgaatactttttcattttatttatttttattttcttaacataattcttgacaaaaattaggagccgtaaggtggtgtgctccaactaatgacaacaaaaaaggtgacttttgtgataccttgattagaatatttgaaacaaatcatatgaaatcgaaaaatctttttatttatttagtttagctggaaattatatcacaacacatgcaatttttatcaattttaattgttacccatgaggttatgatatccaaataatggattatggatatcacacctttaattttaatagtattatccaaatgaaaatggtagctaataaatgttcaactagctttacattttaatagacactacacaagtagtagaaaagttcaattcagagacaaactaatgtattagtgagccaatttagtggaagaaaatgatatttccaccaacttagtgagccaagttaagttattaaagtaaatatatgcattattgatttgcacaatcatttagtgaatgtctatttaattgaagataaaaggtgaaatggcctattacatcaagttttcatattacaaaatactaatgcaacatgttgttggggccttggggcccattgataggctggtgtgtatgcagtaatgcataatatatatttaatatatgtatgaatacaaataggacaagtatgtaggtatctatgtattatgaaagttcatttttcatggtggggtaaaagatttagatagattgtgatggtctcttgaatcagattcacatacttgagcaaataattcaagagttgtcctcatcaaataaaaccactaatttcttttcttttctttgttttttgtaaccttgaactgttgcaatgaaatgactaatgatctatctcatcccccctaattacaatattgaccattgtttattgaataattttctgaaatttaaagagtaggtttatttttttcatctacctaattgagtgagttgtagtatttatatctatagtaaatgtcataatgtcttgaaagttgatggctaatcatttgaactcaatttgatttgtcatatactttgactactaaattagtaatatgtcaaaaagaaaaattaagatagtattgattaccgaggaaaaaaagttctttaaaaaaaatcacaaaacatttagggttggtttgttacgt

SEQ ID NO: 383381 - DNA, 3032 bp, Cannabis indica
tgtcttgactcccggaggagaagatgggtctttagttcatgtctgggaactagcatcatgaaccacacttgttgtttctttaattaaacttaactcttctccgggtggcgtgtctatgtcaatcacatgccacacacaacagctgccacgtatattgggaataaaccagaacaacatttacccctaagtcttatttagttttaggtaaatgagacttgtgagttatcttcggtatcaataaatgagatggcacatgccctaggcgcgtgggtactatttatgaccatcatcattggcttttgtttcttttgtaggcaacgattcgcttctcgcctatttacagacccttccatcaatgctggtctcagaaaggtactcaagcgtttcaaccaccctttctctttatcatactcgttcatcccatccgttggatcacggaatttgaaccgttgtgaatccttactgtacgatggtgcctaatcgacactgcctcgtatcttaaatagtctataaaagccaacactttctccaactgggtaattttcaccaccctttactttctagattatcaaacccattcgataaaatttcagacgcctctaactttcttctgctctttctctgctgctgtcaggcaaagtattaccaccaggcctcgtcggcctctgccttgccgtctttatgtaagttttttgttcatacatttcttttacctattagggcaagtagtgatgataaaatgtgttttcgtttgacttgcttggtttcctcgaaacggcagtgacgcccccttcgtcaggcgtccaatgacctatgccctttatacattttattttatttactattttcattgtgtatgcgttgtttctctcttttcttagaaaaaggttgaaaatgagggtttttcgtgtgcccttttcaggttgttcgaagtgattttggtactcccacatttcctttcctttctttcttggatgttttgcacccagtctttgcctttgtgaatcactgggttccttttggcagacatcctgagggggcctctttccagcagataggggacccccattcccctttttgactttagggtttgatgtggggggctaactggtggatttttgttgttttagatgagtgaagtccttcgagaccttcacatgcacgatttctttaggtttgaccaagaaatcttcaatcttcatcaagtccattccatgtctacccctgtggccatcagaaggaaatcttcgaaaaaggggccaaagaagttggccaccttggaggacgtcatgaagggccctatcatctacaagaagtttgcatgtcattccaccagttgggaggctgacgaactgcactcaacgtcgacctgaacccatcaactggagaagattgtcaccattgtggggataaaaccctccagttccgaagtttaacatcgccttcccagggatgaggagatgccaaaccacaactataacgactttggggcatggagttagactcatctgatgtccggagccatgcttcccctctaggactatttcatcgagttgtttatctttgtcaaactttcaccctaccaactgatttcgcaagcctaccgcctgttgtcaggcttgtttattttttatgtagccaagaactgggctccgcccagtcctacaaaaattttgtacttttacaaacttctttcagtccccaagaagggggacaaatttaaagataatttttataaacttcagacccatctagccaatgatactccggtaccctttaacttctaaaagaatgtaaaggtgtatcgtcacaaattcttcttatcctccaggttcaaagcctttgagcgtccagacctgctgacggactgggtcagaattccctccatgcaccgtaccggccccacccaacttttcttgaaccatgcgtaagtgtttgtcggttatgggaaggaagatttgaacgtgggagaccttgtcacgacagttaactgtaggagggccaagttgatcttggagagtcaatctgttgatgacttcaacttgtccaaattgctctgccccaacgtctgaaatcttgggagtgagaaagcgctcagggaagatatcttgtccgcgaaggatagataaaataagtacagacacaagagggagcagggtctgcaagctgattcaagaagggtctctcgagaggaggcaggaaaagagaaaactccagtccggcccaaatttccattcccggttcctaactctggagcccccggtgcaagtacctctgaagcttgtaagtctcctttgaacattcacttcgttccttctgtccaagactatgctgacttaaggccaatggaatttgataacaaattatatagtttttggatgccccattcccggtggggcaataatgccaaaagtttttatttatccaatttaagtcattatttgggttagtctcggatggactctggtcctcctgtaccaattcttttggatcattcctcctatatgacttcgagttggttccttccctcggatagctttttaggggatgtgacaccagctttttaatttgtgaatttgttagagcagaattagatcaccagggtaggactattcttgttgtactatacttgcacatgtaattttttgatgtgattctgatttcttgtttactttgcacagcaaaacccatggacagaccttttggacgcccttacccagacccattgccccgaaccagacatgctggtgcaccctagggtaagtgtaactctagagggacctgttgtcgaagctctcgggaaccgggaggtggtccttattgacaaagaagaagtatttcctcctcttgacaggaagcgtaaaggttgtgttgttgttggcattttacgctctaaataaaactcatttcaatctaatctgatttgttatcaatagaagattagaagtcatgtagtttttatgttttatggtttaatgtgtataaaatctattaagaccagaacatatagttattcacaattacagtgttgt

SEQ ID NO: 383382 - DNA, 2286 bp, Cannabis indica
gacccgattcacttgattcaaagtgacttttgaagctaattaaatgatctatcaagtcatgtctcgcacttaaatcgtgattccaaatatatcatcgtcaaatttcaccccaagagagttatgaaaataagctctcggtaacatgccgggctccaaaaaaatagccattaccatcaaaagatattttttttaccattagatcattatctacaatcaaaaatgtctaatttgtattttctttcttatttttgtggacctccttcacctataaaaggagagctcccttagccttattctgtaattcttgtgagaaataaaaactcgaagtaggcgtagcttcattatcattgcaacatggagagtaaactactataaattttgtgtgtctctctctagattatttactgaaacttattaattatctccccaatctaacgagctgatgttggccacttttcaacgtcaaattaatttaaagtaagaaataagattagtattattttattaataagtaaattttatattattaatttttattaataaataagagtattttaattttatggaatcaatactatgtcactaataaataaaatttaatattattattttaattttttttttgtgcaaaatcactagctaggtaaacacatgaatatatttttaggatcattggttggtgagttaaaagagttgtggaataatggagtagccaccagagatagtacgacgaacacgatatttacaatgtgtgcagtacttttgtagacaatatatgatttttctgatcgtatgtgtttgtctagatggagtggttaagtatacaaagtttgtttgagacattgtaataataatgaatattgtatttatttttgtgaaaattttgaatatttttaatttgtttaattatataatttattattttaatttttaatttgtttaattatatataatttattattttttttattttcctaaatattaaatatattagcagcatgcattaccagcagagcctgtcgctcataattattgtctgttcaattccaaaaaaattagtggtgggttatgtcactaatgttcgccgctattaatgattattagcaatggattaataatcattaatagcagctagttattagcggcgggctattaacggagaatgtccgccactaataatcattagacgtgaaaaaatatgttattaaatctgctgctaatacactaaaatattgtagtgatgagcttgaacattcttaactaagtacaataaactataatacaaaactacactcagtattctagttgtactagtattggtagcattaattcgtactttttatattgcctaacaaatattttttggtgtcccggaacaactctatgtagaccatactgctattttggatatgttaatctaaatggaaaaatataatatgtgtacactaaacatgtgtatatatgcatttgaatactaatctcactttaattctaaatttaagtgtgctgatcaatctgagtggaaaactgctcaatgatcagaggtcgtataactttgttctgaattctcctttaagaacattcaattccacctctaacacaacagaaatagaagaagaaaattgaagaacttggctactctttctttgtttttcgggtgaaagtaagagagagagggggtctagtttcttgagtttatctcttgattttgattaatctaaagttttttataaatttatattaatagtcataaataattattcttttaattaagtaaataccaatttacttactaaaaatcacaatttacatattacaccttgacttaattactataaaaaaccataagctaatgggtgaaatggtcatattccaattatttcatataatctcaaaatttccaactatccatacttactcctggtacctctagaattttaatgtatactaatatgatatttttggtcaaattaaccgtcgagttttcattgttgtcgaagatcaaaacatgaaaatattaaattgtatatataatatatttaacgtactttgaatttaataaaaatctccataattaaaaaattatatgacatatgtttatttttaataatagaacttattttataataatacatgtatattaataattatataattaattataaataaaactgtaattagctgctaattttttatatctaatcatgcggttattaggtatgttttaattttttttttgaatagtttttattatcttaaaaacaaagaaatttagtttgtttttgt

SEQ ID NO: 383383 - DNA, 3298 bp, Cannabis indica
gctttacattgtaatggtcattatattatgtatggtaattctcattacattacaaaaccaatataatgatgattacattgttaaaaatatctacttaacccttttttgttacttttatttgattacaatgtatattatagtgtcaaaccaaatatcataatattactcctattataattcttattccatcacattactattcatattacaattaccattttcattacattagattacatcaaaacaaacatcacctagagtctctcagatcacttacaccctcccactgtcccacagcaactacactctctcatctaaactactttttatgggctctttcaggttttatttatttatttttcttttttttttcaacatataattagtctcattttctttatttttcactttccttattcttcacgttttcttttttcttttctcacgttttcttctttttctccatttttcttttcattattccacaacctaaaactatttttaattgttccatttacatgttttctcttacacacgaaagacgagataatggtgtggtcagactttcagtagtcgtcgaaatatggctcattctggcagagctgcacaaaggagaaagaatgaggttagatatctgcgagagaaagaaaaagatagattaatgtgatagtttatcatgaccgctataattagatacgaaatttgtggtaattaattaaaattatgataaagtataagtataatatgcgcataattaaaatagttttttttttttctgagaagaaggcgttcatagatagaaaaacaaaatataaaagtgttagacatcacggttattacataaaatattatccggtattgcggactgatccaccatgtaacattttcaaaaaaagcccttcttagcacattatgggctgcaaaattataagttcttgaaataaaaacaaaattacaactaactcaaacgtttagagagagttcttcattgttgttcatagttatcaattttccaagaagaagaagctccctttagtgacttgataactatctccgagtcactctctattaccgcaaaatgatgattcaatgaggtaactatctccaaggctaaaagacatgccaccaattctctaatgaggggattagaaaagtttagcatgttagacaccacccacaaaactgtcccaaactgatcccgagccaaagtcactgcacacatagaacattcactaactttaacatcacagttgactttgatccaatcgtccggcggggggaccaaccagagggcacaacagtcttcattgaagggaacacacacgacccataatctgcgtaacaaatagagatagagtcaatataatgcttaatgttactcagagagttattgtgtaccttatcattatgggctcgccaaattgtatcaaccataatggaagcgtaaaggaataacttctcaacatccactcctttcgaatccagattccaaagaaacttaacccaatcccagacacgggcctacgaatccaagactggcataataccccacggggatgacctataaagatgataagcaaagttacagtagaggaagagatgctccgtagattcctcaccctcaccacaaaacggacaagtgacctcatctatatgcattctttttgcaagtaaggctcgaatagacaaagcattagagaggatgctccaccaaagaaccttatatcgctccaagactttcgagttacaaagtttgttctacaaggcaggagcaacattgcataaaggagcatgatcaagggcttaaactaggtaggcagatttagaagagaacaacccactcagctccttagtccaaatccatctatcactaccctgaccgctaggtttgcaactttttagaatattcttaatcgtctggaatagtttcttttgatgttagtcaactcccatgggtttgaccttgcacttacataaacattatattttgaaacgattcgtgcacttacgagtataaatattaaaacactcacttttgggtacaacaggttagcactaaccgaccaaattagtgcaggcttccatcctttaagatctcatggttggacggtagacatatacaagaaaagtgtggagacttacaagatctacatcttcaaggttctaaagaaagttcatcttgatattagaattaccagtaaagacagagatatacaagcattggcaagaccttggtcgggcctttagatggtcgactaggggagatagccccatgcattgggtaaccctcaaatatggttggccaaccaagcatacatgtcacgttataacacttatgtcttttcccacaagccttccaaatcgtccccaatcctcttacgacttcggaacagttcaaactgcccacaattctaggaattcaacaccaaaatgtaacagcccaattcttaaagaatattttccatcttttatgtattttcaaataacaactttgtaaaccctaatactatataaatggtcataaccctacgtgaaagggacgatgctaaacaagctcaaaagcactaaggcatagaactctctctcttttctttacaagtcttctcactcgccacacacattcttatcattgtaataataaagagagtcatagttagaaattataaggttttagcctgtaatctgcatggtattatctcaagagtaaatacaactaaaggggagtaggtcattatctgaacaaaggggctgaacctctataaatctttgtgtgtttatatttattatcattttgcacatgatagtcataagtaaaatttgtacctagtcagactccgcgtcggttggctaaattcacagtcaacactgacgatgatgacaactccaatgaattttctgatgacttttctagtgacaataaatttttcggcgattgtgaatttttcggtgtctatttcgacgacttttccagtgatatttgttattataaattttatcaactttatttatgattttttgtttggtctaccatattttaaactttgtttattttttaagggtaaatactattttggaccctgtattttacaaaagttaccaattggaccctctgttttgttaaatgacaaaatagaccctgtatttttcaaaatggtacaaataggacccttaacttaatttttgacaattttttttttaaacaaaaccaacttgacaatacgaacagatgcaaaaatgtaaacagttttgtcataacacttttagatcggattattattaaattttattttgaaaaaaa

SEQ ID NO: 383384 - DNA, 2614 bp, Cannabis indica
aaaaaattaaaaaaaattggggtatatgtccaaacaactccatgatactcacttactcaggaaacggtggatcagttgacaataacaaaaagtaatcaaagtttaatgatttttctgaactaaagagttatgagcatggtggccagcaccaccatgaggtggcaccctggtggtgctaggcatccataatggatgccctttaacattagtctgccaaaaggtggcttctacctaaaaatgttggagactagaaattaaggtactgcacataagaggagatgacaatataagtgaaacataccacactttctggaacaccaggtggaggtagaggtagatttcttgggggagcaactctatcataagaccttttgtcaaatctccactctccaatctttccatatgttaattcaccctgaatataagagtatggacaagtcactaactattaaaaaccaacactaaaacaaagacattaaggaatagatcagtaacgaatgataaattaccttcaaattatagtcacatccataagtgtaatgaattataaactttttgcctatttcagtatcccatggaggctattatccagcaataaacatatgttaaaaaacacttcacaaaatcttcatgacaaagttctatcttatctagttcactgagtaggaatcatggaaatgttataacaaaacctgaatcatgaaatccttgtataagatgttaccaacaccatggagagcagatgaaacagcataagcatacctatttgccaccatacaaaattttaagcaaaatactaatgaacaaagtgagtgcaaaggtcacatgtaaaaacagagtttacaaaagaagagtagagtatacacacatctcaagaacccaaccaaaagctttgtctgtttcaggatctttcttcattgccaaagacacattcatccaagtgggagcaatcttcttaagagcttcctaataatgtttgattaagaattgatcagcacactatgaaatcctaagtaaactaaattgggtactcatatgcataaatggcataccttcccaacaatgacaggagaattcccgatcgggtcgattttagttattggtccattctccttagggaagtactttctgagaacagactcgtactttttcggttcaatataaaagaagggaaatgcagctccaaacccacctctagataagtttggtatgggcttaacaatgatatgatctggctcagacatcagtatgtaactggatacacatcagaattgaattaaacaaagttaatccttgagacatatataatcacctcatcagaaaaatttgaatcaggaatggtatcatttcttactcttctttaatgtctgccttttgaagccactgcacaaacgcccatggcctattgagaactatatagccctgtgtggaaaagatttaaaaagtaactaatttcttctcataaaagaaagctagcatcttccaaataatcctagccttattgatatgaactccacagttattattatttgatatgaagcaacataagttgtaataaataagacataacaagatgagcttcaactaagaattaaatttgacctcaaagtcaacgggtcgatttaaaacgaccgaacatctgagctcaaaattttttagttctcaactgtatttaatttcagttttttttttttttttttaggttttgggggggcaaagttctaaacaggacaagacaccaaatccaataaatcagacaaaaacctagattttagggaaactcagatgattaacacaatttcattttgtaaactctatacatatatgtggaaggatagaaaagtgaaaacccagaacctgatccattccggcaggtaaaggctgagcaacgaaagtagggatctcgtccatgtactgatcaggcttcccagagtgcaagatccttgtgaagccacccatctcggaattgggtccttccttaaactttttaaaccagtagtacatgaccctgcactgccacgtgttgtagacggagtcagacgccgtcactgccgtgtgaaacagcctcttagacccagatttcccttttgatttctcaaccggcatctggataaccgggtccatggaaatcgatgaagttctcgatggacctgggaaatcctgcttcaatggagcatttgctgagattattatgttgtatgtaatcaaagctacagaaaaggttatcaaagttgtgaagaacaaatttccacaacccattttctctctctgaatctgctcctctctctctctttctacttataataatatatctatattagcaaagctatactagtgtagttgttggggttgtctagagtttcactccatgatctatctggtcctctctctatataaataaataataaaaatataaaagagagagggagtcagaaagtcgtcggtgaagcagtcgggttcaacggcggcggttgttgatgaaactttagttaatacttaatagttagttatattacaattctctgtaaaaatatttcatttttattttcttacccaaccgtgtagcaataatatgtattatgtaccaaaaaaaagactattgtcttaaacaaat

SEQ ID NO: 383385 - DNA, 2552 bp, Cannabis indica
actacaaatttcttttagtatttttatttaagttttatgaattatcggttttatatttatttatgttttatgaacgctcgcttttaataagtattattgttatttaacagtattgttagatttgacttttaatatttgatatgaaaatatttagtttgttattatgttctaatcttaatttaattattttgtatattgtttaattaaaaaatatttaatataaattaattagttaattaaaaaataaatgtttaatataaattaatttttataaaaatataaaatggaatttataattttttttttaaaaaaaaaaaagaaggaatcaattagtcattgatatgattctcgagtagaaagaatttttttttaaaaaaaagtaaacatattattactaatgactttgttgttggtgatgttgattttcaccaacgactttaaatgtctcagtaatactacctattactaacaaggtatactatcaatcaccttttactaacgacatgttgccattaataaccattactaacaaaaaaattcactgacgaaatttatcctcattaaaaggtatgattcttgtagtgaaactttaattgctaatgtatttctcaaattgaatttacattctaggaggatttactaattgttctagcctatcactttgtacatattcatttcttattttatttcaatttattgcttaatttgggttttgtagtagtatatatatactcgcatttgcacttttccttttaaactttacttgataagtacagctagcttatagagcttgtattaaaaaaaaaatagttgtgcattgttgtccttaaattaattaagttcaagcattgttaagtacgatccagtaagtaagcttcattggagccatcgactacattgaagatcagatagacatagcacatcgatattatctctctagaaatgcgtgtatatatatatatagatatacttgaataatataccatgctccatgtatagctagctctttcattctggctataaactaattgaggggataatacatatattatatatacatattttgtatacttatcttctttcaagttgttaacgaaaatgaggatcagggatgtggttattgggtgcattggtgagctatctgatcatacaaaacgtttgtgtaacaaatgcatcgagggttttacaaaagtcacagttttttgccaactttttgcaatctaataataatgtgattagtaataatgggaccaaatgggcagttcttgttgctggctccaatggctggggtaactacaggcatcaggtatttaatgggacaccataaacacgggagggagtatatataaatatacatatatatattacaaatatggatgattgctatatagaacccgtactagtgtctaatattcactatattgagcattactatttagtacattgaggtatattatttattaaattaaaataggtggaatcatattaaattaattcataactatatgcaacctttctcatatatatataaatatatatcagagtcttgtatattctatggaatttatgaatgcatattaagttataataataatagtaattcatatataaaactggtgttttggcactaatattgtttaagaatatctggtatgtacgtaaaatccataatgtttaagaattaatattggactattcgtaaataataacatggggtcaatacaataatgatatgagcatattgttttttggtatccgtaatgttttcacttttaagaaaaattacattgtaattgattaatacttcttaaaaattacattaaattatatactatcattcaaaatattatcttaattaattcactaatgacaattaatattaactagtagaagtgtgcttgactttaacatttctcaaattatatatattctaattaattaatcatttgctttgatttattacttaaatataaaaaataagacaaaataatatatggatgatgctaattaaatatataaaattatacaggctgatgtgtgtcacgcatatcaaatactgaaaaaaatcaggaatgaaagatgaaaacattattgtgttcatgtacgacgatattgccaacagccctgaaaatacctcaccctggaatcatcatcaacagccctaatggctcagatgtttaccatggagttcccaaggtactatttatatcatcatctctctagcttttcgtacattcacgacacatgcatcttaactttatatatatatatttcatgcctatatatatatatatgtatatgtgtaggattatacaggagagaacgttactgtaaataacctttttgctgcaatcctcggaaacaaaagtggcatcactggaggaagtggcaaggttgtggagagtggtcctgatgattatattttcatatactatactgaccatggtggtcctggagtagtcggtacagacctatctaatatatatatatatatatatatctttatctttatatattaaaagtgcctatctaacgacatttcttggtttaac

SEQ ID NO: 383386 - DNA, 3138 bp, Cannabis indica
aaaatatttaaccttacttttactatactcaacacaagatttatatcaagtcaagtaattggtctaaaataaagacatggctttcataagagaattctaacatgaaactgatttcaaggtaataattatattcatgtaattccaaaatggaccaaatgtaatgagtaaatattgttttttgttttgtttttttaaatcgacataaagctaataaatacatatgtacaactaattaattaacaagttaagtgattaataaaaaatcataataataattaatagatttatatatactattttgtactcctaattaattttattttgttttcttaatgtttgcattttcattattatgatgtaacagttttcacttttcttcttagctttgtgccagttgttgtaacaaattatgttcttcaatatataaagtggcgatctcatctcatttctaattcttttcatggtatctgagctctaatgatgttaaatgaaactaattcttctaacaatagaggaaaagtcgaaggcaatggtactcctccgaacactgctcatctagttcaacctgctcaagaggatccacaagcaggactccctaataacaacctccttctgctaaatctaagattagacatatccaattacactttatggagatctctcattctggcagttgtaagagcttacaatctcgacggctatgtgctattggaacaattcttccacctcctcaaacacttgaaggtaatctcctgaaccctacttatcttcaatggctgaggtttgatcaatttctaatccactggatgatgaactctgtgtttgaactgatggttggacatgtgatcaattgtcgaacattattcgagatctggaacatttttgcacaactcttttcataaagattgggaaccaaagttatgcaagttcgaggacttcctcgggccaccaagaaaggttcatcctagatcgaagaatactttctaaagatgaaaagttgtgaggatgctcttgctagagctggacaaccaatcactgatgatgatctagttatgtacattcatggaggtctaggaaaagaaaatgaagtcgtcattgtcaatctaacatcttgtgaccttctgttgagcctgcaagaagtttaatccatattacacagttacgaacttcaaatcaatcaaaacaacactgacactctctccaatgttaagcaaatcttgcaaatcttctttgaacaacaacactaaaagaaaatacattggtcgtggtcagagaggaaactagagaggaggaagaagctactctagtaatcgtggtggaagaggcaatagacttatgtgtcaattgtgtggaagaactggccatactgctcaaaagtgctatcataggtttaacatcacctttagtggagcttcctcctcaggcaacacaaactatgacaccaacacaaaaaatccacaagcaaatcttggagaaactccaactacaggtgatatctctagagcatggtttctttatactggagccacgcaccacataacaactgactcctagaatttgcagaacacagtggactacaaaggcgaagccaaagtagttgttggtaatggtacttctatgactattcttcaaattggttctaagtctatgtctaataaaattccttataagcctcttgctctcaaagaaaatttgtatattcctaatgttagccaaaatctatagagcatttctctattcaatagaggtaatcatgtcactctagagtgtagtaatatttgttgtctaatcaaagataagacaacgaggcaagttcttctaaagggttccctcaatgatgccctatacaaactccaagtgtagccaccaagttcttcatccttacctcagtccaaaatcaaatcaatccaagaaagtaaaagtagcattccttttgctctcaactgtactactgctagtaatcatgctctaaataattctaaaactgtttctacttggcattgtaggcttggatatccatccaaatcaattttagctaaagttgttgctcatgttagtccaaacttcaaatgtaaatcagtaacttttgcgatgcatgtcaaatagggaaaatacaccaatttaataattttaaatctactgaaaataaagctacaactccttttgaattagttcacacaaatatttggggaccatctttttacacttccatcgatggatacaaatattagataagttttgtaaataattttagcaagcttgtgtggattattcctatcaatgttaagtctaaagcaccttcactgttcaatcagtttaatgcccttattgaaagacagtttctaaccaaaattaaatgtatacagtctgacttagggaaagtgctttcacctctcaaaaaccagttcctaacttttgacattgtgctcaaaaactcaagttctcatatacgtcaacttagggtagaataaaaagaaaggatgggcatgttgtagatgttggcctaactcttctagctcaaactaaaatgccacaagaattttggtgggaagcttttatgtttctgcatcatacctcataaatagattgcctacccctatgaacaagtttctctccccatttgaaaaactgtacaaaactccaccagattataagattttaaagatttttggttgttcttattttcctctacttaggccttatcaagctcacaaggtgtctttcagatccttattaaagtgtttatttatagggtacatcatgtcacacaaagattatagatatcttcatccaagtgacataatttatgtagctagaagtgtcaacacctggtggaacaggcagtaaccagattaaacctcctaacaatgttgcatcatatacaacctcatttctcttgaccatgatgtttggtttattgataccagtgcaagaaaccacatctcaaatgagcttaataagatgaacctaaaagaagtaggggtgttcatccgatccaatccgcacttttttggtcaaacaacatccaatccgcactaagtgcggatttcatattttggatccaatccgatcatccaatccaatccgcaataatgcggattggatcggttatttttttaataataaattatttaatat

SEQ ID NO: 383387 - DNA, 3294 bp, Cannabis indica
ttttggactctgaccccaacttatacttggaaactgaacgtggacctgctcccagacttggacccacccccgatctcgatctcagacccagcctcagacccgaattaaataaaattaacaaataaaagtaaaaataaaatttacagaacacacttttgttttttatttttaaaattgaaaaataaaagtagttatagaatacattttaatttatcaaaaacaaagttttcctttatttttttatttaaaaatttaaaaacaaaaatgctaccaaatgtcaccttaaataatttaaaataatttaaattaaatctatatttttataaatatttattatacgttcataatccatataaaagataaaagacaaatctacctcaaagttgaaaaaaaaaattaatataatccaataataaaagatataaataaatctttctcaaagtttgaaaaaaaatatataaaaaaaacataacccagtatagtatcatagtctcatacctcttaaatcttccaacaattaaaaattaaagtaaacaaagatgaaactaaaaatcaagaaaaaaaatatctttacacttgtaattcacaatgatcatcagttcattatcgtcattaaattttcatgatttaaacatatgatatatcatttagattatggatgataatgaaaataatttttattgtcaatgatatatatatactatgtatacgttaagaataaaaaagaaactatacatatatatgtatatttatattggggtcagaagtaatgcggatagtattatctccgcccctgccctattcccgtttcgagtattgaaattgttccctgccaccaccgaattaactaccaagataaagaatctccagcctattagaagcgggtccccgcaattacctattcctgcggtataaattttcaaactctaaatatgacacatcattttttttacaactatataggcaatactcattggagttggcctgattttagtgtctaacactatctaaatgtgtcaatttacaattaattaatttctaaaaattattataataaataataggaattttttatttgtacactttaaaacagttttttttttataattttacgcaattttacatagaaactcttataataattaacagagcaatctaaatcgtaatcgaaattcacatagcaactcacataaaaactactaaaataacttaaattgtaaatttaaaaaagaaatataataaatttcttaaattatatgaactctgatatttaattgcacgaatattgataaaaaagaaaaacgactctgaacacacacagaccagcagccctctttttctaaataaattatttttgggcaccagccgacattataggtgagcttcttgaagaagccacgcaacaaggaagcttaccccataagttttcagatattgattaatttaagtgtagaatttaaaaaataaaacaaaaaaatgtatgtgtatatagtttaaagttttagcgtatgtagataagaataaaatttcaaaacttatgattgtgaagtggtttccaaatatggacgaaacagcttctatctatatattggcttgttcgacccgttgtcgtaatttccatcgtacataatttggagtccgaatatcgcaacacaaactctcttatgctataagaaaatttttgaacattttgctcttataacaaaacagtggacaaaaataatttcatccataaaagaacctttaaaaaaaaaaaaaaattataaaccgaaattcgccttgttcctctagcttacgttttccccctaccattcaagataataatgattatttttttcaagagagtaataatagatataaactcaaatgtccacttattatacacaataatataataaaattacacttttaatatcagttattccgtttaatttaaaaaaactgaaaacttgtgattcagaaattgtcacatggtcaatttgctttctctttttggagccttctagcgagcatgcgatctctcttctctacttgtgagatcttggtcctgttattgcaagaagttgtctacccatattttttttttgtttgaagtaactgttaataaagaacaaaatagtttcagagaaaagtagagaaaactacattctccaaactgcatctatatcaagccttaatgcattccgggtgttcctcaatgctttggtcgatcaaagaaatcttcctttcattatcttcttcagaaggcaagtgctaagcttcaatttggaatataaatttttctctaaggctggaaaggagactcttattaaagcggttatccaagcaatttcttcatatgctatgtcttgtttccgaatccctatttctatttgtcatgacctcgactaactcattgctcacttctggtgagggtcaactggtaataaggccaagactcattggaaaagttggaattcctgtgtctaagtttcatgggggtttaggttttcgaaactttgtttttcataatcaagcatttcttgctaaacaagcttggcgtatctttacgaatccaaattcccttgtttctagactcttaaaggcaaaatattttaagcacaatgatttctttcagatactaagggtcacactccttcttgctcttggagtagtattttatggggtagggaccttctttctcaggggctcatttagaaaatcgaaaatggtaattctgtttcaacccttcatcattattggattcctggtttcaaaacaattcgatttaaagcaatatccaaccgccagagaccgcggtatcttttttcataaatgaggttggatgttgggatcttcataagcttaattaatagttatttttctgatgacattgtgaataccattcttaccatcccaattgatccatctcaagaagattctcttatttggagcagccattcttcgggtaatttaacagtcaattcggcctatcacctagccactgctcgagcttccctcactgcttcgcaccttccacttctaatctggattttcttttaaagtggtggaaaacagtttggaatcttaaagtccctcccaaaattaagcatatcctctggagagcttttcatcatgtcctcgctacttctttaaatctgtttgataggaaaatcctgccctctccaaactgttcaatttgtttgcatgaagttgactctgtcactcatgctttcctaggtcagaagttttctgggtttggctggttattatcgtcggtttgttgagggtttttcaaagattgctgtaccctta

SEQ ID NO: 383388 - DNA, 800 bp, Cannabis indica
tggacacaaacaaagcatggctcgaaaatgtacatattggtaaataggcttaaagcgttgaagtaggtgttcaaatatataaatcagaagggattttctgatcaacaggctgccactttaaaaacaaagctagaattagaaagtattcaagagcaactccagcaggatcctctaaaccatggtttactagctactgaacaggaagtgagggatcgatatgttcaagtgcagagaaattactcattgtttctgcagcagaaatcaaagtgtgcctgggtacagaatggggactcaaatactgccttattctatgccagtatcaagcaaagaattcaacagaatcagattttttttaatagagcaacatgacggatcaagagttcatgaccctcaacaaattacagatgcttttgtgtcttactatgaaactctgctgggaactaaactagaaggaaggaagaaagtaacaagcagaattgtatgcagaggccctactctcacacaaagccaagcagaaatgctcacaaagaagtacattagggaggatgtaacaccctaactagcataggcatattacgtgatttttaaacatactgtgcagctcgttgctaatcaacgagatttatggaaaacgtgattaattaaaatttttgcttattaattaaacttgtaaaatatttatacaaaatactcgggatccagattacaaaacaatttaaaaaagtttactgtctatataaaatacttgtcgcctagcaactaattacaaaaatatccttgctgtcccgatgatcgtacgc

SEQ ID NO: 383389 - DNA, 1981 bp, Cannabis indica
gttaggatttgttagtaataattgtatacagaaattaagtcggtagaaaaattaacaaaaacatatattttagtaaacaattagaaatttaacccctttttcgaattttagcaaacttaattttagtaaacaatataagaacatttaattaaacgttttttttatttagtttacgaggccgggttgggttgaaccatggaggtggattcaaaggggtaatattgtcaacttaacggctcaattaaacaaactagctttcaaacataatactaataataataaaataaaaaggttaaattgagttaagttttacgttaaatttatataattaaaaattaattctttacttataccaaaaaagaaaaagaaaaaggaaaaaaaaagtagttttaaaatattataagtttacaggacttgcaagtcacttcctcattattaaaatcatcactctctgcatgtaaaaagatgctctgaattttttagaaaatttcattttagtccctcccttcactcctcaaaaccccaacccattcccactcttctctcccagacacattcccttctctccctctcttcaatccctaaaacgtctacactttcataaaacaattttacattactatcgtcaaatggaagtgccggagtacttagtcggcggatactttggtgccggagctgtagacttttcgaatgagaagaggctgtctgaacagaaatccagcgaacatttcaccattgatgaccttcttgacttttctcacgaagaacctatggttactgatggtttcttcgataatgtcgcctgtaataactccacagaatcctcgactgtcaccgcagtcgacagctgcaattcctccatttctggcggtgaacatcaattcccaggaaaccgtagcttcggcgactctcaattctccggcgacctctgcgttccggtaataattattttaaagctcccaaaacattaatattattgttttaattattcgaaaatgaataaatttacgttggaattattttaattattcgaaattgacgttattttttgttaaaacaaattgcgcagtatgaggacttggcggagctggaatggctttcgaatttcgtggaggactctttctcagctgaaaaagaactagacaccctccaattcctttcaacaagctcagccacagttaacaacaccaagccgccgacatcagaaacgtcgtcctcctcagaaacgagccgaaacgcatcgtttttccagcaagaaactcctctgcctggcaaagccagaagcaagcgttcacgcgctgcacccggcgactggaccactcgcctcctccacctcgtcacgcctaataataatgtcgacgacggaaccaaacccgtgaaaacgacgccgtctaaaaagaaggaattggctggtgggtcctgcggctcgaatgggaattcggattcttctgggcgtaaatgccttcactgtgccgctgagaagacgccgcaatggcggactgggcctttgggcccaaaaactctatgcaatgcttgcggtgtccgttacaagtcgggtcgactcgtacccgaataccgacccgctgcaagtccgacattcgtgtcagctaaacactctaactcgcacaggaaggttttggagctccgaaggcaaaaggatttccatagagcacagcatcagcattttcttagtcaaagttctatttttggcgtatccaacggtggcgatgattatttgatccatcatcacaacggacccgattttcggcatatgatctagtgcatgccagtgtaggaaacttagtgggagctctaaattcattttaacatggacttatctctagtttatttgctaattttggtcccaaaacaacataaaaataatgaatttgtagttgctttttttttttttggtttctttaatttttaagtataatttgatagaattatgaggtaaaaaaaaaaaagaaagaaaggaagc

SEQ ID NO: 383390 - DNA, 692 bp, Cannabis indica
ttattaaaccctattaattattaaacttgtaataatggctaggactatctttttccaaataaagtttttacttgacttgttggcatttagccgttgaaatttgaaatttgtgagcatttttaaatctctcgcaattcaaatccctataccgcggccacatctccactaaattcaaatccagttcacatctccaccctccatttaatctcagttcaaaacacataactagctttttctatttccagacagtagagagagagagagtgagagagagtgatgttcaaactcaaagccaagagaaaaagaaagcgataaacttagaaagagcagaggaacatgagtgtttgaatcaagatctacttgattttcacttcggccaagattttctactaacatttcagggatttttcagctgcgcatattggttttccacaaaccgattttcttggtttttgctctttggtgtaatttaggatgttgagggatttcaaatttttgcgtggaaatactgggaagaacgatgaggcggagaacattcctgttggccggaatgatttattggttagtagaatatcttcggatgcatctagagctcctttaaacgctatacaggagcccacttcatataccaagcaagaacaagaaatgggcagtggtcggagcaaggtcgataagactccgagtaaggtcaa

SEQ ID NO: 383391 - DNA, 2520 bp, Cannabis indica
gaaaaagggatagcaaagaggttttcttgtagtgtttcacttacaagttcacaacaaaccctcttcttgactttggcttcaagagtaaaactatatacttaagatgatgggttgagttatggctcctcttcacgtcaacggatgaacatcaataaataaatatatatatataaaaatatatatatattctcagaccaaaagagagatagagaaatgttagcttacttttgtttttttttttttttttgagagagagaaatgagagacatccttttttttctttacttacttttgaaacgggaaagtgattaaaataaaaaggtctcttataaccctatggtcgaaccccctaggtgaaaattgagtatcccacccttgcttccattttcctacaagaatactcactaataaaaagcccaaaggtaaatgtgctattacaaaatttcaccttttgacattcactattaatattatctttagttgcatatatcctcgtcctgttcatagattctcactatggtatgacaaagtcctaataccgttgctcacctagtcactcgtgaccaaagtagcatgtgtggccagataccaacactaagctgacgtgccaacgcctctaatcatgtcccatttaatacaaattaaacaaattaatatttttgaatttaaccctattaaatatcttaatgaaaaccacccacacagaaataaaagtctgtttttctgcttgggagtggtctagggtcccaactactgtccagggcacgacaggtacattgtactttgctaaccaattcattcctagaatcacatcaaagtctttcagatttaactcaaccagatttaccgataattctctaatcttctataagcaataaaagaggcctaacgataaccagttctccagtaagcatcattgtaccaaacccgctaaataagatataacacaatctattcaaactatcaagtgtatttccaccctataaatcaatagaaaaaccccgaacatccaatctaaagtttttgatttggtaagaaatcacaccaaaggttttccaaatcaaccttaatactacaggacaaatatgaacatgtaggattaattctaggataattatttttgctttcacaatgtgagacatgaatagattttgcttgaaaagagctttccaactcatttgaaatcacatcaattgaaattgtattgatcgagatatgcttatttactgcggatagtttttaaatttaagtacaaaaaatactgcagttacatttaattggaggtaatggaatgaaaaaaaaaaattcattccattattttatttagtaatattttagtagagtaaccattttattttaaaaatataggatttagtttggttatgggttaactttttggtccaagacttgtttcaattcaacacctaaattttgccaaggataatttggctatatataacacgtacgtacaagatgatatatcggaaatcatattaaatatatcatataatattcttgcatatgttttcagttttcatcatcctaatccgattactcaaagttgtgaacacataatctacccataacaaatctgcatatattgtgggtatccatcacccatttgggtggatatttgactttcagttattatttcaacttactccaacttcttatacgtatccatttcataacaatattattattattattattattattatcattatcttgaagtgagttaagttgaataatcagtagccctcttgcagtgagagcctggagaaaagtcacttattttgttatcccacgtcttagatatacgtcgtgccaaataatacaaaaaatagttaccatagagaaatgttatcatcaaaggtggcctgatttttcgatctcacacatattaatttatttatttttgataatttattctaatttagagtgtatttggtaatattttcttaattaaatttttgttttataattaaaaaagtaaagatatttttaaaaaacatattctataaaactaatttcactttttaatttttttcagaatcaaaattttaaaacttttaaaaataataaaaaaaaaacatcacttttaaaaaaaatttaaatagatttttttaatcaatattttagactctgatctcaacgtggaccttattactcgaacttgggctctgtccccagtcttgaactcgaaccacggcgccaacccaaacacgaatctagactcaacttaaataaaatcacaaaataaaaatgaaaattaaagttatagaaacgcttttattttctatttttaaaataaaaaaagcaaaaatgaacacttttttaattttaaaaaacacaaattttatttttattttttgaaaaaaaaattaaaaaataaaaatattaccaaacgtccccttaaaatataacactcacaacgtcacattaatatggtgttagggaaactccaatactcagataaatttagtactaaatcatcaccaaaaaaaactatagataatt

SEQ ID NO: 383392 - DNA, 1342 bp, Cannabis indica
acaagatgagtttggcatgttactactgttattaggaatagaatggacagacatggataaggctaagcttggaaccaggctacttagaagaggaacctaactagaatgaaagacatagagaccattattgagagtgccttctattggatttttcttggagacctgatccttgacaaaataaacatgaggatggaactcaaaaatgacattattatcacaagaaaactatgatacactgagtaatttttgagtaatttgtggaacatggagaagattatgaagaacaaagacttcagaggaaaaaaagtgattgaaagaatgaattaccaacatgctggattggaaaaccagcatcatcaccaacatgaagttgttcaagtgcaaaatagtaatcttgtctctgcatcaaattagtctcattagaagtacaatgattggtagccccagagtctggataccaagcatgatcatttagtgaaatagctatcatagcttgaggattggactgagacttgtcaagattactagaaccaatacctatgaattccatattaaatcgttgatagcacttggaatcgacatggccagccgtttcacattgtttacattaagggcgagaaccattaaagctattgtaactagtagaaaaagatggagtagatccattgaatccatgaaacatactttgacaaggagcagatccacgaggtctagtggcataggggttccaagtcaaacaacgagtgtaattggaagaagagcctccatgcgtggagggattgacattgttgttactcttagttttatggtactaaatcaggcatgcagtgaaataataattatttgattatcattgtaccatagccccaatgatcactacatgtgacatgtatatatattaaatctaaaatgtaaattacatgaaggaaataaatacctcttgatgactatcagggtgtccttgaaacttcttgtaagttggatctaataaatctcacactgtagtcttctaaatcaatccaccacacacaaggagtagtgtgagctactaagataaaatttataatttgtctttattgaattctcaacacatgagtaagaactattcttgagagaaaaataattttccttttctctaagtgtatttcgaaattttagtgtattattcaaataaatatcctgggctctgtccttatttatagaagtctctagggtagaaattattccattggaatctgatcatttataactgctcatgaaatgtggatattctctacattttatatttatgcacatgagataattataaataactgcataactgctctttgtctttatctat

SEQ ID NO: 383393 - DNA, 2149 bp, Cannabis indica
agaattaaaaaatctatttaaataaaaataaaagttattttttaatttaaaatttctttaagaaaaaattagaattttgtagtttttccggaaaaggattttttgagagttatttttgaaattaaaataatttatataattcttcatttacttataattttttatatgatatccaaatattttaaaaagtatttttccatagttatccaaactataagctataaataaaagtaaaaatttatacttattttatacttttagctataagcaacagtaaaaacttagacaaacattagtctcctgttggtttcggtcctctgaaacttcctgggaagaaaaagtcccttcatgggaagggtggagtttgtgattttaatcttgttttttctggtttttgatttgattctcagcgttaatttaatggatttggaattggttaatcggctagctgaagtgtggattcttgacgatggagatggccctgttcttcctcttaataaagccggggttgaagaaggtaaaaagaaattggatttgtgtttgattgggaaagtcattggtcctagaccagccaataaggatgggaatgagagagcaatgaaaggggtttggaaaattaaccataggttccaagtagaagagttgagctcgaagaatattttttgcttcttctttggctgtcgtgaggataggcagagggtttttggtggtggtccttggacaattgataaacaattgatctgctttgtcaagccgatgggtctgggtgaaatttctaagatgaattttgattttacatctttctggatttcaatcaataatgtgccattagcttgtatgacggaactctttgctagagaatggggggagcggactggcaagatggaggatatcaagattgttaatggtaacatgaaagtgagggtgagaataaatattaccgagcctcttaaatggggattgagagtggctattgatgatcaaggtactgaggtttctctcatttttcaatatgaacacttacctgatttttgctatggttgtagcatcattggccacaaggcattagattgtcctcttagggactttgctggagataatccacggtttgatagtgggagatttggttcgtggttgtgtgctccggcttcacctccccgcgatagtctccggttcaacaggaagcgtgctgagtctccgaataacagaccgatcatgactatgggtgaagcttcgaaaattatttctgctgttgagaggtctcggccacgttactcaggtcctactccggaacatttggccccaacctctgttttggaaggtcaggagcatgacgaagaagagccgattggtgttgttgctgaacatagaaatggtggtgaaccggagttaaatatctggtcttctgttggaggccctgaaccaaatttttctgaaggtattcaaggtgataaggggatgatggagtgtgtgccacctgaggagtgtgttgttgctgagttaaatggtatacccgagtctatgaaaaataaggaagtgcttcgatgtgagtctgctgaagtagaagcatcctcgtcagggttgaatgtggaaattcatgatgagattcagagtgggggtcccagtaaggagcggctgcagcaaattaataagggaaaaggaattttgcatcattcatctcaagaagaattatcttttcgccatgcactctaacaaacatttgaaccctttatcaaagcgcagaagtctaagacttggaagcgagtcaattcatctactggtcgtggttcaaaaggtatgcctaagcctggttcttttcctattagcccaaaattatcccatgttattgtggctaatgctatgaataaactaagtctgcgttctagtggcagtagtaaaaggtagatggatgttgagtacactaatgaaaatgtaaagaagggaagaaaagatggaatatcggaaatgacctccggggttatgaatacagtattggcgaagtctgcggagcagactcgccaggagccatgagtctgttatgttggaatgcccggggcttggggaagcctggtgcgttgactgccttgcgagcagtggttcgtaagttctccccaagtttcgtttttttgtcggaaactaaactttatgg

SEQ ID NO: 383394 - DNA, 1399 bp, Cannabis indica
tttaacaatgtctgtcaaaatctccaaagcatcgcatgattgtttgtaatgaaagtcaatgcttaatttgtgggagttcgataaagacccatatgaacacttcttttttggctgccattacactctaatattatttataaagaggtcttttttctttgggctggaattgatctaaactgatatactcttaaagggataataattaaattggatcaaaaattacaaaagcttctataattcagaagagaagtctatatttcaatacttaatgttattgtatatgaattgctatctctttctgttaatattgtgtggtcgcactttaaatactactagttctttataattaatgaaatatttcttctagtagggttggaaaaatttatcccaatataacagtcaaactcagagttttattcaaccaagtataagatagaccaggtcaattacaagaactctagcatatacaaacaaaagtcatggtcaattaatgtcattacaaagatttaaactatccaaaatagaagcaattgaaaaagagcattgctattaaatattgatggtgtctagaatttttttgatatgtcttgttgtgattggctagcgatactacctaaaaattattatattaaattatatagaactcaatacttagttagatcaatagtaatattgacacataagagaatgttaaatactactgctaccttttagcatttatcattggaaaacaacaagaatatgtaattattaccaattcctacattgggaacatgttacttttggttttattataaagttttatggtttaatattttatattttgattgatgctttttgtttgattaattatgtgttcttcatcactattttttgattaaagagtggcattatagtactaaattgaattcactacaatatatattgataaatagcatttttttttttgcaagaataaatagcatggttaattgagatactacaaatatcagaattcgcgaaagttctataaacaatttattccgggggcaatcgttaaaaaaattaagtaattatttaaaattatcgagaaaaatttagtattcctaacggtttaaaatcgtagtaaacaaaataggtaacgttttttaataaaatgtaattttttaaccgtcgcctttaagggtacattaaaaaatcgtcacctacttctcgccacattttccacatgtctacctactttttttttttatttctcacatgcccacctatttcttctccatttcccacatcctaaaacgaaaatctttattctccaaaaccccacacacgcctccgcactatcgccctcctctctcgccgtcttcctccctctctcgatctccctttcttctcgtctctctcgtccatcgatctccac

SEQ ID NO: 383395 - DNA, 3086 bp, Cannabis indica
aaaaaaaaaaaaaacgaaattcgtatggtattttttttacataaattatgattcccaatttttgccgtccctaattttgggatgtgtttccttatttatagatgtctaggataagcagttatttcttcgaaatcctattcttgtaactactcttgaaacatgaacaatttacatgtttcatatttataacacatgagataaatagataattattaccatcgctcgtctttattaaaatatagttatgctgactaagcttctacgccttgcagtattaataattactttctgtgtatatcccttagtctttcaatatactcacaagtatgtggatcaataacttgcaagttcttaaagaattcattatctatcattttcagctgacatcatctttaaattttttaaggagatgctccaatgtctaccatttatatttttcgaagcgagttattgaacacatttatttattatagctcgagctggtttattttctatctttttacgcgcgtgttgtgatcatattggtgttcaaaatataaatataattaagtgctccctaaaatgtatttttcttaggatttaaaaagaacttttagaaatgaaggatatggtcttattttattcttcatttaatattggatgcatactttattttggtggttttagtattttgagagaatatcatttcaacatttaataacctgactttttttctcccaatagttccactcgttcgatcaaatatcattacaatcaaacgactaccatagcttgaatataagatgtcaccttctattctgccatttccatttcattaagcttcagagaattcaaaactgctaatcctatttctctcgaaattgaatgccctctttttttcttaccttcttccttcgaattttagccaccattttttttcacaatctcaacatcattatattccagacccctggtatagaaagtttccagtgaggaattcttcatggttccctttcatccgaatacccagtaagtgttttattttgatccttgactattatttatttgctatctctattattatttgcactattcatttattttgtatggggttgtctttgtgtaggtcttagcaatttgaagttgaaaattagagtttgacgatttatgtgctcggagtttttacgttttgcaatttcaaaattttgaggcatttttcttttaaacaagacaatacctcattttgagcatgattatgaacacccggaacttgtaaaacttggtaacccccaagtccaagccattgcttttaaacctcaaacctacaaccctcgatccatagttgaaataaatgatgaaaatattagagagcatatccttaagattagttaagaagaaacatcagctcgctataggcattgtattgatgaaataattgagggtagtcaacattgtttgcgagaagcagcctatgctgaattacgtagcttagtgaaaatccccttggcgaggccattatttttacctcgagtcattgttgtttttccaccaggtgatcttaactttgacatcatggcttcgaaagatcgtaaatccaagatgcctcaaaattcgaatgttaagtttgaggctaaacttattgagtcaaaggttaggtcgattgccccatatgttgggccctttgtagattcttgtggtataaaaacaaataataaatttgctgtctgctcggtggagaagggtcagcataactgttagccttcaactcgcttgctaagtgggtctggatgcagtgccagcaactcctcgcgtattggagtgtggagtattgagcacatcaaggttggagccctccttcctctttgccaatacttcaaggatttctacgactacattggggtcgcaccactccaacttaaccccaatgcttacaggatccttgcccatttgaaatctctctatggaaaggcccttctcctctagaagtcacatgtttctacgccattaaagcttgccctgcgaggaaaaaatgttctagcagcttctattatttgggaacacatagcggcgacaataagatgatcgtcagacttccaaataagaaagagttcaagcaagattttttttggacaagtggtcttatcccgtcaaaaccaccactttccaattaatatgtaagtgtatcttctttcttgtttaaattattttgtgttatgacttcatgctcgttactcattgtatattgtctttgatttttcagctcctttgaaaagacctacctcaactgctgctatccaacgtcgacatgaacaactgtttaacctctcaatcgatctgcaagcagctaactttttattgaatgataataatctcaaggcttgccgccttctcagaaggactcaaagcactatggatgtaaaagatcgcaagtactttgcctgggaacatgtccctgggaatattgatgatgaggaccgtggttatgtggctcgctcttgctataaaaataacctcgccactcgggaagctaccaagactccagaaggggctccccgaggtaatcatcttattttttacaaatggtcccctactgtcctcgacaccacccctactcgtttggtcaagtttagggatagtcagtacaacttttacaaatggaattgtatccaatgatgatgtggtggtctccgggacttgtaactacattatgtggagggtctcattcacatgacttagttttaatagttaatgagatataacatctataagagttatagagcatacaacacttacttttagtgcaagtgggagattgcttggatttatgtcttaaaagcaagtaattgatggataatatattatggaatatatgaaatacaattataagataaatgaatacattaattataaaatcataattaataaatatctaaaaattctttattcatatgaagttggtacaatcttgtaaggatgtataagagaattaaggttatacaatataaataaaataaattggtagtgcattaaagtaaatgaaccttaaatatagaattactaagtacggtttactatacactatactttagtgtgtgtgtgtgtgtgtg

SEQ ID NO: 383396 - DNA, 1787 bp, Cannabis indica
gtctaagacaagtgagggaaggagaagggtctttgcaacacttccttagcttaatgctaagtaactccgaaagggcctttgggcacaacggtcctgcaccaccactaccattaataatattactctcttcttgttgaacatgatcatgatcatcatcaccacaattactagcactagttttttgaggagaagggaaattggtcttagcattttgaccattcatcaatatagctgcctggtcgtatgcccgagctgcagcctcagccgtctcaaatgtccccagccacacccttctcttcctacatacatatatatatgtatacattattattattattattattattcttgtgtatatattgatacatttaactcattcacctactagcgtgtgtgttgtgtatattgtaataaagaaggttggtgaatatatatatattttacaagacttacagtaaagggtggcgaatttctgacacccaagagccccactggcgttgcctgactcctctgaattttctggattgtaccataatttgattagagagagagagagagaaagagagatgatcaacttggcctggcctggcctgaggggaagttttgcacagagaatgagagagagagagagagagagaaagatataattttggttgataaagtggaaataatgagagaataagagtaagtatatagtagtgtgggaaattaaaataaaatagagtagagaaattataattaattagtagaattaatattaatgtttttattttaatggtgagttgggttacatttaagtgaagtgtcggtggatttgtcgggaagtctatctcagctagctttaaccaattacttttcttctgcaataaaagttctcacccgctcaactagctatggactcactcactttctcttcttatttaatgcatgttctctactcacttcaacatatataattaaatttatttatatattgatataaaagtacacagaaatatcatattcccaatagccaaaacaagagaaaatatgttatatatgaatggtagctgtatatcatgtatatgcgtttacattattatcattgttatgctatgtatatatatggatgaagagaagagagtgacttgacaaatagcaggaacaattaacttactatcaattcaaaaaccatgtatttttgtaattaattaatcatgcattgatctcataatatataagagacagaaatatataatctccaaaccagaatgacagcaccttttaaaaggccttagtataaattaatattacatattcaaaccaataaatatatctatgtacaattacttttttttaggcataatcgtatgattatatatagatatatatataacgtttttatgttaatacaaattaattgtataagtaaagaagaatatatcctaaactgtaatgccgaccattcattataaatatatatatgtgcagtagtaggtaggttggttggtagtacgagtacagtgcagtgttgcgtcgaattttcgtacgttgacctgtaatagtcttccaagtgtcttttatataatttaagattataatcaaatcatatactatagattaatgataaaatggactagtgaggtctaatacttttgtaatattgctatttatataattaaatagggatataatttccgtgatatacttttacggaatgtattttgtggtacattagatgggtctcagggtacattagatgagtgtcagggtacgttactatttttaaccttaattacccctagatc

SEQ ID NO: 383397 - DNA, 1234 bp, Cannabis indica
ctctctctctctctctctgaaagggtgctctctcttaatttaattgataaaatcacttttctaaaatcaataaataaattaaactccaaaaaccaaagtaataaaggatatcctatgaatattatttagctctacttaggttgaaattattacatctctaagagcacttttgaagatagcttttctaaagtctttatcatctaaaatatattgttaaaaatcttttttttttactatacacttataaattatatcatacatcaattttttttatatttttctatacattattaaataaatattattttattttctataaagaaaatattatttttggctaattaataattttttcccccgaactttgacatgtacctaattatgcctcttgaacttttttggtcgttaaaacttccccctgaactattgagattgttagatttaaggacttttgtctaattttaataaaaaaattataacatagatgaaagttcaaggggtatgatttagtacatatcaaagtttgagggcatgatttagtagaaatgaaagtttggggagtatggtttaatacataaacaatcactgaaacagtaaaattgaatgaaattagacaaaagtccttaaatttaataatttcaatagttcggagggaatttttaacggccaaaaaagtttaaggggcacgatttagtacatgtcaaagtttaagggaaaaaattactaattaactttatttttttgtaatgatcactttagttgatcagaaaaagaaaaaaccatcaaagacaaggggtctcttctatccaaaaaaactcattatctattctaagagcatgcttagccaatctatgagtcacaacataaaattacgactagcataaaagagatatcataaaaaagttagataataaagttttaatatctgaaaataagataacttgagcccatcttaatcctaacaataaacttttacaaaattagcgaagaaagataaaattaataagtgcatttaaagaatatctattaatattatttatactacatatcgagcaaattgtattaatttgagtgcatttaaagaatatccattaaaaaaaaaaaaaaaaaaaaaaacttaaaagtgctctaataataataactcaacctaaaataaaaattacggttagggcgagagcgacaatcagatagagaaacgacagatcctaggaaagaagaaaaaaaaaaacaaaaa

SEQ ID NO: 383398 - DNA, 3196 bp, Cannabis indica
tatcagatgtaagttttgatatactaagcaaggttttgtaattttaggtacatgcaacatctgatttaagattaaaggtgaggcagacaaggtttgtaaacaacctgtaccaatatgatgaatgggaagacgattgccatttgcaaccgttacagattccttaccacgataatcttctttcagattcattttgttgatttcagtggtgatgtggttgctagctccgctatccgcaaaccaagcatcgtgatcaatggtttcagcagctgctgtaaaagcacttgaggagttgttttgagacttgttttggttgttttttgaaccaccagggacgcttcccatgtaggtctcgtcataacggttataacagtgagctgcgaagtgtccatatttgccacagacttgacaagttggtcgagagccattgcctcttcctcctctacctctagatctggtattagagcctctgttgttgttgttttagcagcccctgttgttgtttgtgttgccccttccaatactaggatgtggtcctttgttagctaagcttgcagaaggattcataggtcctccagtgagtttagttgtacctgaaaaagaatggagtctctccattttgctgtcgaaacttagaagcatatcttgtagttactgccatgtagtggatcctcgagcctcaatgagcagaaccattggaagatattctatgtctagaccactaagaacatttgataccagctgattctctggatatggttctccagcaagggcaagaacatcggccctctgtcgtttttgacgcaagtagtcagacatggagagagctcctttttttgctgtttgtatttttgtgcgatattcatccatcttagctttagagtgtgctccaaataactcttcgagagtagtccacaaggaggaggaagagtcacaccccataacttcacaagctattccttcggtcatcgacccatatagccagccgagtagtagttgatcattgacgatccattgttcaaatgcaggatttacctgttcaacagagctaacactgccatccaagttaatagaagggggaaggaactcttgtggtctaagtaaagtacctttgagatagccatccagtcggtggccacgtacaatggcagaaaccattgttctccacagtgagaaattttttcgatctagcttaagagcaaaaggctggttgagggtactcccaaactgaggtaccacgatatttggagctgagttttgtgttgtaacattctgagcaggtgcttgctggttgactgcagcttctcctcttgtagctgagcttccatcaatggcagagttgtccatggatctcgacacacgccgatcttgctctgataccaagtcagaaaaataaaagcagtaacgaagaaagaaaatgcaggaaagaatgaatactcagctcaattgagtctaaggctactgtactgtatttataggaaaagtaattacaatcaaggaatattctggaaataggacatgtatatatgacagctcatagtttgttacactacagaaattgacaaagaaaagatattttacatggtatcaatcattgtctataacagaatcatttccaaacttcttgggccatgattgttgatgctataacggtgggcctcctggtgttggactatcacacgagtgggcttcagctgatacctctatatttcttacagccccgacccgaacttggaccctagactagactctaccctgaacctggaccccaaccgagtttcaaggttcagttttggggtctagggttaggattcggggtcgggtctagatatggggtctagcgatgggtccaagctgggtctaggttaggggtttagggctagagtctgaggctggggctgaggtatggaattggggatccgactaggtccaggactaaggttgagatttcgaaccgagtttgaggctaatgtcccgagtctaggttcaagatccaggtccgggttcagggtctagggcctaagtccagggtttggggcctgagtctagggtctcgggtcggggtacagggtctagggttggggctggggtccggggtcaagattcgggtctaggttctggtctaggttagggtccaggactaggctcaaggtccaggtctagggaggtctaggtttttggctgaggtcctgagtgttagaaattattttaccaggatctagatttactaacatgtatctttggttataatctgtaatcgagcaccctaaatatgaatatcctaatacgatgaaataaacacatataaagtttagaaaaccttaaattgatggccacaaaataatatgactccttccgttcagatctctagcccttgttccaatctttcgcagagcattatcaagatctgaacttggatcttctctccttcagtttggttaaccacaatcttccacactatgattgagtacttgacttgctatgagtgggcatggtactctatcactaaaggaacgaaatcaatgaagaacaagaagagaggattcaaactcactataaaaggagtctctcatttactagttgtctgacaaagaatgaaaattaggtttagataggttagatgaaaatgagagcatcatgttccttttatagtatttcaactagggtttaggattttaattatatgaattaaaaaagataaaataataggcaaataattgctttagtggccggccacttaatgggcctcactagttacaattttgccactttatttcaacaatttgtctaatctttcaataatgtcatattttccaatttcattcctataaatgtcaaaactatttatttaataattataattaattatcaaataaaatttctatttatcttatttattaattagacttaacaaaatctcttctttccttcacaattaagcacttgcttaggaaaaattcataaataagacatagtctgattttagaattataattgattaattaaaaccaattaactgagtctacaagtcgtattatctcaactagtgtggggaccatgggcctatataatcaagcttccaataagtagaactagaatttaccaagtaaattctctaacttattaattcctccttgcgccactatagattcggacttgcactctaattatatgtaacactctatatgtactaagatat

SEQ ID NO: 383399 - DNA, 1920 bp, Cannabis indica
ataccttttgccactagttcaaattttttaacctataaaagtgacaatcattaacaataagaaagtgattaatgatcatctatatactagactttcttctgcacattcatctttcacttttttacattaatgcttgtgcagcttattaagacaatagtaataagaagaactaaagatactactcacaactatattcagtccacccaatgacttggttctcaagatcatataaaaccaacttaattgagagtaccatatgtgcaattttaaaaaaaatcagtaacttaaactgattgaactatctggacatgcacatacaatactcaacaccaaccaaccaggctatgcacaggttgagctcaagaaatcataaacaatcaaagtaagagacctgttgaagttgaaggttacaggtgaatcaactcaccctcaattctttctgttatccaactaacagtggcaagatccatctcaacacaaaaccagcaaatgcaataaacaataaaccagaaaattgaggatgaacaataagtagaacttgaattaaatgaacaaactaaattaaagatagcaaaaactcacagccactttattcattcatgatcatcacattacatggaggatagcttgatccaaaatgtacattgtgtaagagaaaattagagcaagaacattacaatcaatcctcacttgagtcccctccaactctctctaagaccctaaaatttctctatgcttattgtcctaaaacagagtacataaattgaaccaaaaaaccttgctttattggatgctgaagcttgtcttgactggtttcagctccaatcaattttaactaacttttgccaactaggataggtaggtagctgatgtagcagagagagagtgagtcaaatccaccacatggtggtttctataagcctaaaataatatatatcacattacagcattgataaaaccaagcctttaacttcataattggcaccaaggatgaataaaaaatctatggagatgatgctgaagcaaatgctgaagcctaaaataatatcaaagaacataaacaagattgaataaactaaacaaagatcattgggttttccaaagttcattttttttctgtaactttccaaagatgattctttttctgaaattctgcaaagatgattctttttaaaacgttatgaaatttaacataaagttccacaatacaatactagcatttgttactgtgaattgatcgaaattgaaaatagaataggataatgtgcacactcagtgtttcagcttcttttcttgcgcatggtatttccccattgagagcaagatttgcttcttgctaagaatgtatggtcaaaacactacgtctctaaatctcttgaaacacctattacactcgtaataggtgcctttaggagagtatctctcatgatcaacaagagccccaatttcagcaaaatttctcaaacaaaaatgacacgtaagcccaagaatgtcttcataattcatttcttcttcttcttcaatattcatataatttttttgcttcaatttttttaatattaattttttgaatggagcttgattgtttatataagaaagtataagtaaaaggatttattttgtcctctatgtgggacacaactatttaaaactcattttttaattttttttttttatgtttatgtacataaaaaaaagtagcatcaggtgatcatcggactactattggaccaccatcggaccatatttatatttatagatgtttatctccattcattaatctcgttaggaaggcattggaccaccaccagaccaccatcgggcaccatcggaccatatcatcgggctaccataagaccttcatctttaacgtttactcattttaacaacaagaaggcatcagaccaccatggggcctaa

SEQ ID NO: 383400 - DNA, 1374 bp, Cannabis indica
taataaataataatatataattatcaataatttttgacaattttatagctacagcagtaccaaccacaatataatatttaaaatactccaagtttgtttaattacaataaaaaaataaataaaaattaaaagaaattaaatgtttagcaagaatatttcttcttctgcaatgcttgtaagtttttacacgtgtgagaaactcaaagacacgccttaaacgcgctagaatgttcttcttcttctactactattactatacattatttttcaattaataataataacacaaataaaaataaaagaaagggttcaacgaatattgtctggtggtggtggtggttgtttgcttaagagggttcaaaccctaaccaccagttggtggacctataactctccccctttaaaccttcttttaacgcataatatttgagacactctgaagcatctacaaactttctctattcattatttttctattcaatttaatccaaaaactaaagaaaataattattatcataataataatgttattgttaggcctaattaaatatagagtatacagtataattaatgtatcatattcatacatacatacatatggtgagtagatgtgagtgacgaacgagttgatattgtagatacattaattattatgtaaattaattttattattatttttttgctaaaatttatgtaaattaatttaactcatcatgattcatgatgatgaagtcatatatgacggctgtgcctgtgcccaaaaatctagctaattttatatttgtcgtgtggaaatatttgaacctaataaatcgaagaaagaaaattatagatatatataaaatataataaatatgtatagttaatttttttttagctcacaagccacaccgacgactttgaagtaataacgaagttaaattaataataataacattaaatatattttaaaatcaagaaggaaatttatttgctttaaataatattattttgagtataaaggttgctaattcactcggtttggggctactagctacacattattattggtccaaactaattaatgatatggtgatttatttatttatatatatatagaatgaacttgtgtttcatttttcgttatacgtcacattagcgtaattccctcttgtttaactacctactgctactactactacttgtaaattaattaaaaatgcatgattatgtgttttatttttcggttgaattttacatcgaattaatgaaaaaaaaaaaatagacgctttcagtaccaaattaatatatcatgccaaattttaaattagatttttttttaataaaaatcataagatttattaattaataaattcgttcaaaataatagaacgc

SEQ ID NO: 383401 - DNA, 2276 bp, Cannabis indica
tcttggtaccacaatcaggtcttattcttcttgagagaccccatctcctcatccatggctttattccattccttagagttctttccatttactgcctcattataaatcttcggttccatgtcatccatttccaaatctgttataagtgcataagccagctcttcactccatatgttgtagctgtacttttgattaggcttcggagtcctcttagtcctatcccttgtcaactgatagtttgtaaggtctttttcggtgtcttcatccctaatctcttgttgagcatcagttcctcccccttgaccattgttatcgggctgctggtttttgtttagttccacctgaaccattcccggtgtgtctccattttgttccacctgattcgaacctgttttaacttctaggtttgtacctgcagggttagtatcttccattcctgcactagacttttcattaggtaaacaaggaaaaatattttcttggaatataacatctctactattcgtagttttaaatcctcatttttcctttacccaaagtctatagccttttaccccttcagggtaccctaagaaaacacactttaaagccataggttcaagttttcctatactctgaagtaaagcaaaacatccaaaaaatatttaaatgaaaaaggcttggaggtttacctgaccattttttcaaaacaaacctaggcaaaatggataaggaagtggccaaaatccagaaccaggtcacatctcaattgctagccggaggcaaaggcaaagggaaagccaaggccaaatcgaagagcccaatccttttagcaggtgcccttgatcttcagaataaaaggaaagagtccgcctctgggtgcactttggtcattcaattgctacagactatacacccttttgagtctacttttgccaagcaagtcattatatatctcgatgtcatggtcgctgaagacctcatttcactcgatgatgatgacgaaggcttcattttcttggagagacccatgcaccgctcaaggaatctgaccctctgcctgctgtggaaaaggagacaaagaaggcacaaatagaagaaatatttgagcctacacaagctccgaacaccaagggctagttcaaaggtggggaagggcaggaagaaccttcagctcctagaggtgaggctcaaactttgcaagtaagctcaaagccttcaccttccggacagagacaacaacaacttccaacttctcttcctccacttccagctgttaacctttcctagcccattttctcctacactctacttccggccgagattaagaaaaaagtcgacgaagtttccaattagatctggaagcgcattgtgtaggatcaggttgttgcacagaagaaagccaatgtcctgcacactcagagaaaagctaagattttgacaaaggcaaaaactctgacctagttgtggaccttctatctttgtccaagtatcttgcactaagggttggaagtgacactgctccttttattgcataaatgattaatttatctgctagcagtatctgcgaactgacttcagagaaatgggtcatggccttcagcacagaccttactctattcgcacatgctaccaaacaacaagccaccggggtaagacttgctttagagtactcaatttttgttgccacttttgatttttaccaacatgttctaacacttcctctctttttgtattggtgcgctagatgatcgttcttggcgaaagggcttgtgactctgcccatattgcattagtggagtgacataagcttaggaccgagaacaagaacttaaactccaagatcaaagaggcatttgtcttggcgaacaaaaatgttggttttagggttcatatcaaagtcacagcggaagagaataaaatttaatttaataaaaaatgttaaattttatatgaattataaacctcgaatcttaacacaattatatacaatataaacctaattattagtttagagatttctacctcttgttacctatcagtgtttcctaactatttttttcgtattaaaataatgaacatccaatctaaaagaacttgttgaagagtttacaccagaaccttctaagttagcctcaacactcaatgcatagagtggactattagatttaatttagataaatataattttctgattacaatgtgtaattaaatcgtgagataatgtgattgatattgggaaaacacaatcaccctcaagagagagtgacgtgtgagcaaggtagagagagagagag

SEQ ID NO: 383402 - DNA, 3534 bp, Cannabis indica
atttctacatgttctatacctttttcagctgtgattaactgtaaagatattacttgatctttagaagagttgttggtgttccttactttggtttgaaatgtttcttaaatcaaaaatgtctgcactttattaaaatgtgtcctatgattttgtcattgtgtacctaactttgttctagctcaagtattttggcccaacaattttgctccaaagatgttactttattcttaatattgatagttatgtcatactgattgttttgtattcgaaatttcgccaagtttatgattcccatttcggtttcagattgatgagaatgtacaaagagaaatcataaaccataggtccttgaggcatcctaacattgtcagattcaaggaggtaaggaataaataattcaattgaaatagattgaaagaacaagtcttagttctgttcatcgaaaacccgtctgatcaaacttaaaagaagataaaaacaagtaaaaaaacagaacatcaagctatgttggttatcaggataatgttgaagaaactgtttcccaccctgcaggtttgcttgactccaacacacctagccattgtgatggaatatgcagctggtggcgaacttttcgaaaggatatgcagtgctggaagatttagtgaagatgaggttagtaattgatagattcttggctcttggtatcacaaaatatgtttgatgattgaaaaaatttgatattttgggcaggcaaggtttttcttccagcagctactttctggagtcagttactgtcattcaatggtacattgtttgttgctttgtttggcatagtattttagactctcttttccaaatgaaatactgatcaaaatcttcattgcagcaaatttgccatagggatctcaagctcgaaaacacgctgctggatggaagtccaacacctcgtcttaaaatatgcgattttggttactccaaggttagtaatttgcaattgaaaatgataccattatggatttcatcgaacttacaactaatttgtattctctgcagtctgccttgttgcactctcaacctaaatccactgtcggaacacctgcttacatcgcgcctgaagttttgtctcgaaaagaatatgatggaaaggtacatgtgttttttgatgcaacattattttcaatatacaaatcccacaattccaattcccaacattgctctgtgtcgaacttaatacctttgctaagagtacactactcataaccaattagttttaagacgagaaacctcgtagtacttatcatacaataccgcatattatagattgcagacgtttggtcctgcggtgtgacgttatatgtgatgttggttggagcttatccctttgaagatcccgaagatccaagaaattttcgaaagacaatcggggttagttgagcttatgaattgaaaactaaagctttatattttttcggctgttgtaactgacatgttcaaattcttaaaaacagagaatcatgagtgtccaatactcaataccagattatgttagagtatctgcagaatgcaaacaccttctttctcgtatattcgttgcgaatcccgccaaggtaacaacaacatctcatatttagtacaatagaaatatggtctcttacaaattacaatgctgtgtttatatattgtgtagaggattacaatcccggaaatcaaacaacacccttggttcctgaaaaacttgccaaaggaactagttgaagtggaaaagaccaatcaagcgaaatcggaaacagaccaaaacacacagagcgttgaagagataatgcgaatcatacaagaggcaaagacgccaggggaagggtccaaagctacaactggtctaggcgccacagcatcgacatcagaccctgatgatgagtccgaaattgatgtcagtggtgattaccttgaatctgtttaaagggtggtcaaacaatataatgatgatcatcatcatgaacttcatagtttttttttttgtgtatgtaattttgagtttaatttacccataaaaacttgaatttgggagtcaggaggaagagagggttggttgtgacttgtgagattgtacagttatataaatgattattattgctacttactatgcatcaaacatgtgtaaaagctatagagtcttcaaaaccgatattattatggggtttcttatgttataaactcacttttgctcttagatttttgtcttcttttttattatagtttagtctaaaaagatcagataagattacatgttgaatacgttgaaaaagattgttagttagtgagatgatagtttggtaaaatctgtaaaggacaatcaatcttctaaggaagtggaatattaatatacacgattaattgaataatataagatttgtttaaaaaagggacaaaaaaaatttggattaaagctttggggtattgaacccgacgtgaatcgaacacgcaaccttctgatctggagtcagacgcgctaccattgcgccacggatccctagttgaatattaagcatgtatatatgtatatattgttcattaacatatttaccaataattttgataatattaaagactattgggaaaaggaaacaattgaggtactgcattagcattttatgtttttcatatacaaattaaattttgattgattaagtaaagtttcaaagttaaataaaaaaggctggtccttttgatgaatcattatcatgcattacatcatttacaatttttatattactttattcatattctgcactagctactttgttaagcaatgtacatgtgtgctaagagagataacattatattgtcaaatattataatttatacgtgaatctgtgtcaagaaaataatattgtatcttataatataataatgaaatgaaattgtaaggttttaaataagcatatattttggatttcgatttgttgtaatttatcattcaaccagtgaattttaaaaataccatttcactaaaaaaagaataatgacacaaaaagttatacatgacattttttttttaaaaaattgaaaaatcacattttattaactattaactttggttaccaatataggtaaaaaacttagttggaacagactctatactaaaacaacgaccaaaatataaaataaaaattttagcaaaattatgaactaccctatttactgatcgtttgacaaagacaataaaaacacttttcaaaatagaaatcaaaactttacagtcttgaattacatgactaaatgaagaaatcataactattagaatttgctacacaatttagtctataaatttctatacacttgtagaaaaattatctaagaactataaagatttttagattagattaagtctagaatatactagttatgttgaaccctaaaaactagtaaaagaaggatctataagaaataattctaaccataaagtgtaaggggtgagtaaatataaatactccttctagggttataaattgtaaccaacacccaacgaccaacatccaaactatcaataaagct

SEQ ID NO: 383403 - DNA, 1629 bp, Cannabis indica
gatacggataactggcttaagttcgcttcattatgtcggcaaagtggacggattagtcaagctaggtccactctagttaaactcttacaggtcagtggtgtataatggctttattgaggttgctattaggtcatttctttgtttttgtttttgtgtgcacgtgtttgtgttttgtaccctgtattcagcatttttctgaaccctcttcagtatgaccccgacacatctcatgaaagtgtccggtaccatgggcctccccaagtaatgtttgcatacttgaaataccaatggtcccttggtgaggatcttaagcggaaggaagcatttgctaggctgcaggtatagcatatctgcatttatctttgtcttgaaatgagatgatgaattttagcttcacctagcattgtttaaatctcagttttctcatcgcttgttttcttgtctgttgaatttctgttacagaatttggctttagagctttcaacttcaacaagcattcaagttgcacaagcaagcttgatgcctggaaatagctcaagtattcctctcattgctcgtgtctaccttaaacttggagaatggcagtgggctttgtttcctgtattggatgatgagaccatacagggtattatgtttatgacaacagttttttttgccttttattctttaattatttccacttttataaatactagtcctactgctgaaattctgagaaatttttgtgaccatttttagtttcttactattactttccttagaaaacattttaatattgttttaaaatctaaggtattatgcttataacaacttccttttttgtgtaatataattaaataatttaattgtgacctttttttaatacccgttctggcgctgaaacttttgagaaatagttataaccatttttagtttcttactttgttaatttctttagatagtgttttaatattgttttgataactttgaattatgcagaaatcctccctgcttttcgtaacgccactcattgtgctaataataaatgggcaaaagcctggcataaatgggcattattcaacacagcagtaatgtctcattatactttgagaggttatcccaatgtggcagcgcaatatgttgttgcagcagtcactggatattttcattcaatagcatgtgcagcaaatgcaaaaggtgttgatgatagtttgcaggtatatgatattccctcaatcaaggcattgacatgttcttgtttatctttctataaatattggttgcactttctgagctggtattttctcttcttttatttattttgaaactaatttttataatttttaaatttatgtcaaatattaattgtgtagatttactattcgaagttcatatcctcaatcagtttttacttgctttgagacatgccccctattgattctaggaaataattctcacttaatggggaaatactctgttttccgatagcataaaattgaaagaaatagtcctactgtaaacaatagtgaagagaatcgtgtgttgtatttcatagaatagtataaatttatatacaaagttaggagactaaatgaaaaactactaatacaaatggaaactactaaatacaatttaccttaatttttacaa

SEQ ID NO: 383404 - DNA, 3511 bp, Cannabis indica
tgatcttgatgtttttcttttttcttttttttttctttttccatgatgtgacttctattgtttccatttagatcagtttctaacatcctacgcctattccatttacacatctaatgtatctcacctggtcaaagtggttgtagagtttacttttgtttgtgcttgataaacccataaacttgcctgctatgttactactctggcttattgtgaaagttctttttttggtctaaatttcattgcgctttcttagtgaattttctagatatgacattgccttttccaatcaaccgaatccaagtggttggttctagaatcttaatgttaacatataccataggaaatgtgtgaattgttacttttttttatcaggagtttaagaaccttgtttttggaggagagctcaataaatgacaaagacggtgagtggctgcatgaacttgcagtgaacaactcagttcttgagaccttaaatttttacatgacagatcttgccaaagtcaagtttgaggaccttgcactgatagccaggaattgtcgctcattaatttctgtcaaaattagtgattgtgaaattttggatcttgtgaagttcttccgtgctgcagttgcattagaagaattttgtgggggttctttcaatgagcatccagaaaagtacacggccatatcactaccacaaaaattatgccgtctgggtctaacatacatgggcaataatgaactcccaatagtattccctttgacaaacctactgaaaaagctggatcttctctatgcgttacttaatacagaggatcattgtacattaattcaaaggtgtcctaatttggaagtgcttgaggtaatatcactatccctgttctcgtgtttttcattacttgttcccttgtgcgcttgtcatgttcccatgtgagtctcggttagtcatgatttagcatattgatgaaaagtataattctatggtatcattgctgtacttgtataatttcctttaaggaacacgtcactcatttttgtacgtagatttttatgggcatataagtgcagctattttgttgctatttcttccattttaggtacttttaccctcttcttaaacttgggtttagaaagatagtgatttattattttctctagattcaaactgtaaatgaagggaccttttacgggaaaagagtgctcattttaatttaatctaatagaatttagaattttataaatatattagaaatgggataagattgaaaaaattgataactttcttgtggtattcctcaccaaaatctaataataaaatttagagaagttttatagtacaccctttcatgtttttgacatttagatagttttaatcttaaatttttttgtatgatatattgtggtcattgtcccacatatggtaaagtattgagccatatataagaacacgtgctattctacttgtcaccaattagttttaagatggaaccttataattctcaacatgatagtatataacgtagttcaaacagtctcttgcacacgtgtttttttaattttatacgcatgtgattgtttgaaccttgctttttatattataaattattctgaattttttaaaaatttgcagaatgtctttaataattacattatacaccaccatataaaaaaatagtgcatcgttgcaaaggggtgcaccgtagaagtatcttcaaatttatattgcatacatagccttaatatcttctatacaaccagtgtatatggtgaaccctaaggattttattttcagggcttctgtttggtagtcatagctgtttaggaaatatattctaataatcttttattgatattgaacagacaaggaatgtcattggagatagaggattggaagttcttgcccagagttgcaagaagctaaagaggctcagaattgagcgaggtgatgatgatgagcaagggatggaggatgaagaaggtgttgtctcacaaaggggtttgatagctttggcccaaggctgtcttgaactagaatacttggctgtctatgtttccgatattacaaattcatcattggaatgcattggcacctactctaagaacctttgtgattttcgtctagttttgcttgatagagaagagacggtaacagatttgcctcttgataatggagttcgagctcttttgagaggctgtggaaagcttaaaaggtttgccctgtatctcaggcatgggggtttgactgatgctggtctaggctatattggccagtatagtcaaaatattaggtggatgcttttgggctatgttggcgagtctgatgcaggtcttttggagttctctaagggatgtcctagcctgcaaaaactagagatgagaggatgttccttcagcgagcacgctctagctagtgcggtgatgcagctcacttcgctgaggtacttgtgggtgcaaggatatagagcatcctcagttgtgcctggtcgtgatcttttggcaatggctcgcccattttggaatatcgagctaattccttctagacgagtcgtacttcctgataatgtcggggagcctatgatggtagaacatccagctcacatacttgcgtattactcccttgctggacaaagaacagattttccgaattctgttattccgttagaaccagcagctgtgattcccgagtagagttgtacatactactttttcctccaccttcctcaatgaagtctcttgcctcgcaatgtttataaattaatgttaacttgcttcttttcttttttgctaagatggtggcaatttcaggtttttactttttttttttatttatttaattcttttaattctagaccgtagtcctgtaataaagtttgggtttcttgtgtaatctaaaaacatatgcagttcttgatgaaaatacagtatcagttccctgcagggagcagttagcttgaagggcttttcttttgcctgaagaacttcttgttgtgattgagcatctcatctttgcataatgaattacaaatttacacttttttttttctcgctaaagtgatttctctcaatgtaccgttttttttttttttgactttcggaagggataatttttattattactcttttaatataagttaaatctagttgttttatatatgtagggatgttcatccaattcaattcatactattttgctcatagtacattaaatttgcactaagtgcaggttttaaattttagatccaattcaatccacgcaatagctcaaatccaatccaatatgtaaaagtgcggattagatcgattattttgaattggttactttttaatattaaattatttaatatttatgaagaaaattattttttttcacataactaacaataaaataaaataaattattgttattttatgtctctaacaataaattaaaataaataaaataacaaataacaaattcaaatgatgaaaaaaaaattgtatgtataaaaaaatgtttaattttgttttgaattgtattttaaaaaaaatt

SEQ ID NO: 383405 - DNA, 2044 bp, Cannabis indica
cagagtgagtttcgaactcgggtaatgattgtacatgtcaagacggagcgacctggagtgtttggtctcgagacatcttagggcacattttgtagtcgctatgcgacatgttgtaaaaatattttctaaaatgtttataaaagttttagcacggatcccagttatgtaatatatatatatatatacatatgtatgtttataaagtttattaattttattcaaagttttgatttgatttgacacgattttaaaagaaaacccttgattagcaaggtagtatgttatttggaaaatcactatagcgcgcccatgcattagggcgttacagttgtcccctttttctttgtccacacccttctacttttttctttctttcaccttgttaaggacatttcataattctgcaaggatccaatcagttcatcaagatccagttcttcctcaagaatgctcgcaatttggttttctactatgggtaattcgcaccttccagcattgggaggcgagatgtggaccctccttctctgaacatctctattcttttacgaacaatgaaaattaaaacaaaggtagagagcaatatactcccaaagtcgtgtctggagagggggttagctccaactgggtgttgtagaaaggaaacataatgcaaaaatatcaagaattgcagcaataatgaatttcagtacaacacagcttgcatgaaccatgatgatcaatatttgtaatagaataagcttgctctgataccaattgtaagttctaaattgctttgttactaagttcgattaccaagtttcagtttaatcatattaccaataaaattcacgagattaagcatcagagatattaaaaaacaacagtaagagacaatcaataacaagcttcccctaccactggaaacacatttcagtcagatattgcttgggttctctgaatcaaggtaagaaacctcactaaatgatttgcaaaaatacaatgtttgtacaaatttgccaagtcccttacagaagtatttaccccgatcttccgaatcccttggtcgaacaagcaagattctcttgcttcttgtttgttgaaatcccttcaacgaagctctagatctgaacacctttagatctgtaacaccaagccttaaatgaacccttcagctctcattacttgacttcaggacttgctctaaaacttcaacccacaaaaatggagtttcttgctagtacctacaataacacaaagacgaaacaagaagaaagaaatgtaaaacgtaatatctaatcttcgatcaaagaggttagtcaaaatagtaacaagaaaagttatttatatccaactaaacaaagaaactcaaagtagatagctgtaactagttggagattaaacacccaaagtatctttactgacatggactgcactaacatcacaaactatagacttcacatcaaccattctagactcgactggacctaatttgtcattatagaaaatactggtttttacagtattcaccttggaatgtttggtaaaagagatattgttcgtgttgaagattaatgtgtccttttagtatttcatgtctacttataagcaaagttgatcaatttgtaacctaaccttaattaataaagttttactctctgtttagatagagtagaaaagctttttatgttaattttgacttctcattgggcaatctgacaataaagttttgtactttgcttgttaaattttacttttatgatttaaacattttcttgactgcaattggaattgcagaatacactgaggagcttttgaaaactttgaatttgccaagtttctcaagttctttgacattgcttgaacaggttagtttctataatatatcacatagaatactattaatgaatttttataaattgagatccagtgtcaacatagtttaaatatgagtatatatatatatatatatatatgggatataggcggctaaaccacctgaatttacggtttgtaacacttaaccaacaaaactaaaattttggcggctaaactgcctaaaccctgg

SEQ ID NO: 383406 - DNA, 1710 bp, Cannabis indica
ataaacataaaaattcgtaacaaccgccaaaaacttcgtaggaaaatgtaacgctaccagcatttccttaaggaaatctcaatcgaaagtgtcatacgctttttgcaaatgtataagcaagcagagtgagcactttgccaatcataaccccacaccatatcattgtgcacaatttgtctcccttgaataaagccactttagttggcaaagataatgtcaaggagagttaatttaagtttggagcagatcaatttggtagcaactttatagaccacattgcatcaagcagttggtgtacaatcgctaacagaatcaggctagaccttcttaaaaattagcataatagtggtgtaatttatttacttaaggaacttccctatatgaagaaaagagaggactgtcacaattaaatatttgccaataatctctcaagaatttttgaaaagcgtactactaaaactctcagggccaggagctctatcatttaggccaagtagaagaagatatttcaacatcttccaaagtgtactcagtcaatagccaatcagcttgagaagggctgacttttggaccctctttaaccaaacctcttacgaagtctagtttgattgctcattttagaacctaagattctcataaaagtcaaggaaggtcttaattacctcatttttgtcattaacccaagtcccattagagtatttgactgaatagatatagttttgaattcttttctttcggatactagcatgaaaaagcttattgttttcatcttcatgagaaatccaattaactttagctttttgtctcaaaaaattcagttaattcttatgagtttcaacataagtttttcgggcaaggatttccttggaaattaaatcacaatttccagttggttcctcaaggactactgcatgttgattaaattctaataagcatctgaatctttcaccccgatttcaccttttctagtttgattcagctctttaaactttactttaaggcctttgagtttattgatgaactgatacataggagtccttgctatattttcattccagccagcaaagacaataatctgaaaagccatgtaaagtgctccaatatttaaagtacatgaagcttcttttgattatgtacacttgggtagactaaaagaatagaaggcggatgatcaaagtacgtctccttccggtatgaaagtaacttcagttgtagggaagttttccatccaatctccattagctaaaattcggtcaagcttagcatataccctatcatgcccctcatgtaactttagctaaaatctaataacttctgctgtagtaacttcttacaaaccccctgttttacatgttgttctaaaaaaaagtgttgtttacacatgttgcagaagtataatataacgtagcaacaatatgaaaaacaacacaaaatcataaaaatgtaaataaaaaaaaacttaaatatataatgtcaaattggatacaaataataaataaatattatatttgttaaaatatttgttattgttagtttgacaattatttttttttttaaattacaatattcttatataattaaataaataaattttattcagcaataataataataataataataataataataataataataataataatgataattttcgaaataataatttttcaaatattaataataataataaatttttattctatc

SEQ ID NO: 383407 - DNA, 1688 bp, Cannabis indica
ggatttttggaggaaaatggggtatggtcttaatcactgcacgttttctcgtgattcgtgtacaaaaacttaaaaccctcattaaacccaaagatcaaccacagctacaccagatcatgagacccatatacaacaaaaacacactcacaagaatacatacttctctctcttcacttcagccctctctctctctctcttcatttctttctttttattttctctgtatgtacatatatagatacagagtgtgtgtttgaaagagagagagagtgagtgactgagtgaagagggttactgtcttttaagctagggcttctgagatggcatttgcaaatgagcttcattctggttttcatggtgttttgttttctattttcttctctaaacaacttttattgggttacggtttcttctccacaaggtaactgttttttttttcttcttatttttgtttctccttaacaataaaaattgaatctttttcatgtttggatatattaactgagctcagtttaagctgcattgggccctgttgagaaaagggttcttttgttttgtccctagtgatataatcatataaaccaaatttaatgtacaaatgattttacatgtttgtcttgtgtttgatatgagcatgttgttttgttgatcttcctacaaaatgtggaatttttttgaaatgtggaaacttgaatttgtctgttgtttttgaattcttaaaagaaaaaggtaaaggaaaaaagaatggtcggttttttttgtttaaagtgttcattactacaaagaaacatgtttcaatttttttttaataattatgctaagacttggaatcaaccaaatgagaagtcttttctaaggaatattagaataatttgatgtgcttaaaaagagtagagaaaataccaaaggatgaaattggcgtatagatgaaagaaagaaacaagagtaacataatgaatatagcaaataatgaaaattgaccaagatttggaacacttttttggggttcttgtttctctgatggaattgtgaaatggctactttagagggttttgttttgaaaggatttgaagggtaagttctgagcagtttaacagaaacaaacaaaggacaatgccaaacatttctgtgacatgattgatatttgtcatatgatatatatatttatatatccttatacttttttttctatgtctgtggtgtcagattaagagagtgcagtgatccatgtacagatgaggagtctccctctgttattgcaccattggaatatgtaaaccgataggtgtatatgctgagtagggaatgaagccgttggtccgtcaagcatgtcaataggaggtgttgttgaattgacattatatttgtaatgatgtttacaaatactcagtttaacatatttttggattgtgcttgttattattattattattattagctcattgttatagtcaaatcaatctactttgcactctttggtaactacctatttactaccaattcatatcaaaagaaaatcccaattggggttttaccattttgagttcttttacattgatttttctgtgatggtaatgatgatgatgataaagccatcaaagtggttttcttttaaccatggtgaaaagccattgaagagtctataaaacagtggctacctgcatagtccactgttgtgtttgttggtt

SEQ ID NO: 383408 - DNA, 1931 bp, Cannabis indica
cattatttgtgttgaactcaaatatttcggtccatttttcaaggaaggttagacctaataaaaaaattaccctaccaaattgttattaagaaacgacaccaaagctcaccagaaatttcttccattgaccagaagtatgagcttagttgaaggacttgagtgtgctaacaatgtcgctaatattattgctatgggtgatatatatattgagagagctacaatggagtatgatgcctcattgttcaatgagcttaatccgagtattattgggcctgaaattcaagcacccaaattcgagttgaagctcgtgatattttaaatgttgcaaatgatggatcgatttagtggattgtccacgaaagatcctcacctccacctacaatcattttttggaggtgaatgatttgttcatgttacaagaggtgctcgaagaagccttgagattgaaattgttccctttctcggtaaggaatgaaactatggcttggctcaatacatttcttgtcgactcggtgttcacatggaatgaacaagttgaaaatttcttgatgaagtattttcttccaaccaagaatgccatggttcggaatgagattatgtatttttagcaattggggattagtctttctgtgaggcttggaaaagattcaaaaagttgttgaaaaagtgcttccacctggtattccacattctattcaaatggaaactttccacaatggtcttaatgtttctactcacaaaatattgaatgctttacctaagggggtattctttctacaatgagcatgagatatacatgattgttgtccagttttttgtaagtgtaacacgtgggacctaacagaagaggccaagtcgatcttccactatagtgcagctttggctccatgaggggcttctgccaaggatacatttatcgtaaggtagaggatgtggtgttgcaatttattttaacaggatctagatttactaacatgtatgtttcattaacaccctaaatatgaatttccaattcgatgaaattaaacacataagagtttagaaaaccttacattgatgcaacataataataatgactcattccgctaagatctttaacccttgttcctttctgtcacagagtaatacaaaatctgagcctggatctctttctctccttcgggttggttaccaccgtcttccgcactatgattgagtacttgacttgctatgtgtgggcatggtaccctgtcacaatagctcgaattattgaataacaatcataaggtgcgaaatcactaagaaaaggagtctctcatctactagttgtcagagaatgaaaactatgtttaggttggttgaagtgagttgttgaatgagatgagagcatcatgttccttttatagtattttcaattagggtttaggatttaattatatggattaaaaaataataaaattatgggaaaagttacacttaagtggccgaccactaatgggcctcactatttataattttaccacttcattccaaccacttattcttctttcaataatatcatatttttcaattttaatcctataaatatcaaaactatttatttaataattataattaattatcaaataaaattgtcatttatattatttattagttagacttaacaaagtctcttaattaacagataaacatcaaaatctcttttcttcacaaataagccattgcttagtgaaaattcataaataagacatatataattttagaattataattgataaattaaaaccaattaattgagtctgcaagcactattatctcaactagtgtgtggaccaatgggcctatataaccaagcttccaataagtagatctagaatttgcgaagtaaattctctaacttattaattcctccttgtgccattatagattcggaattgcactcttaattatat

SEQ ID NO: 383409 - DNA, 2239 bp, Cannabis indica
aaaagaaaacaaaattatatacataaatcaaaatttttaatcttctatgcagactcaggctcaaactcaagatacatcttgggattttcctcctcaaattctaacatttcttggtgaattggtgaatcaggataggcattcattatatcttctgtaaaatcatcatctgaatcatcaatcatattgtggtcatattcatgattatgttttctgactactgctttaatctcaaatagggattttagatccacttccaacatatcttcagaaataatcttgtcctcatgctcttgcatagatatacttgatactttcttgaacataacccacaatctcctctatgctctcaagtgtgagcctataatgaagttggtaaaagcactccaattcttctccttctcctttcgctttctttatcttatcaaagataatagaaaatccatgtgcaaaagaatgcatcaatttagaatacctttccttttcaatggttatattttcatcatgttgctagaaattattaaggtagtacaccatttcgggggatttttctgagtttttatcaccaaggctctcaatgaaagcatcaaactattaacgcaaattttcattaaccaaaataaatagtctttttgcaataaatatactacagaaataaatatataattaataaataccaaatatttttacatagttttgtagttaaaatctacatactccacgagtccttattattaaggatatttttgagtacagaatacaataataatttttgaatacataatcttttctctcaaattttccatcccttttctcatggattctgtcctaatttataggaatatagatagacagttactctttttatgattgattcaaatataattgttcaagaaacgtggacaatcccacattttatttaatcacatatgggataatatcgaataactgtccaactgttctttgtttttatcctttacacggttatttttgacttggaaggttgcatctcatttaatatgagttatcctcatttttttatcttaataagaaaaaatactaagtgttgggaggtagtttgcctcgtcacaccccttcattcgaattagtattgcgaggtgaccatctcgctatgagcaatgcgaggctgttgtatgattacatttgttctgctagagtggatgaatatccccttcttgtctatgtaatctaaggtagacatgtgtctcatcaatctcagttaaatagttattatccttgtctcgcttaaaactatatagtcaacgagttttgaatattatctatcaaactcttacttaataataacgagtttatttaatctgcatttaatgatataacattgttatatcattacggttgattcatatcctttctgtaggacacgtgttagtttctagagtatagccaaatttcgggtataacaatatcaaataagttcattttatataattaattaaatatataatacaaaatatctaaccttataattaaaataaaataataaataatttaaagataatataaccaaaatagtaaattcgtaaaagatatctacttccaaatttaaaatcttctaataactaaaattaaataattaaaaaaataattaattttaatctaataattagttttgaaatttgaaaattaaaaatatacacaagaaatctaccaaaaaattgaaattaaaatccatgaaaaaatgatacaaatttgaaaacttgaaaaaatttgtaagcaacacggacaatatgcaatgcatactattcgcgcacggaatggggatgcttgactgaggggggaggctgttggcagccttgtaagcgcatgcaaggagatgttcagacaagcatctatccgagaaacctcagacatgctttgtcttaaagtgtgtctcgaccgaggcatggcccacttctgcacgcgcagggtagaaaccctagccttgattttttcaaaattttcaaaaaaatcataactttctcaattttaattgaaattaagttctgtaaagtggtaattttcttaaatttttcaccaactatccaaataaaataattcaaaattgaaaatctaattatttttcatagaatattttgtaattcttaatcaatcatcaaataatcacataaacaaacatgaatacatccaaatcatacaaacatcattttaaatccatatttcattaaaataaatcattactatggctctgataccagttgtt

SEQ ID NO: 383410 - DNA, 2168 bp, Cannabis indica
aaagagatagagatggagattttcacgagttcattaatgagagaaaaggtgaaatctgatgcagatattttgagtgccgttttgcctttattgaagttcttatctctatccatctttggcttagttctctctcaaccaaagattcaactcatcccaaaagcaactcttaaacttctaagtaagcttgtgtttgctctcttcttaccatgcttgatcttcacaaatcttggtccttccattaatctcaatcacataattcaatggtggttcattcctgtaaacgtgattataagcacagtcactggctgcatactaggcttacttgtagcactcatatgtcggcctccggcgcagtactttcggttcaccgtcatcatgaccgggtttggtaacacgggtaatcttcctcttgctgtgattacatccgtatgtcatagtaaagataacatttttggtccttattgtcatagttctggcgtggcttatgtcgcattttctcaatgggttgctgtttttcttgtatacactcttgtttatcacatgatggaacctccattagagttctatgaaattgtggatgaagaaggagggtctgagattgaggaattaagtgaaggtattgaggaaatagctgttaatgatctgagtagcacacttcttgtggaggctgaatggccaggaatggaagatagggagacagaacactgcaaaactccattgattgccagagttttcaataacaacaatatctctggggaagcggaagtaactgttccgaaatttgatactgagggaaaggtttcaattcggtgtttggctgagccaagcattgtcaggagaataagaattgttgtggaaagaacaccaatttctcacatacttcagcccccaacaattgcttccttattggccattgttattggaatgtttccaacagcacaggctgtgatttacaacaaggattcactattctctatactaacagacagtttggatattctggctgaggcaatggtgccatcggctatgcttgttcttggaggaatgcttgctgagggtccaaacagatctgatctgggaatgagaaccgcaattggtattgttgttgcaaggctttttgttcttccactgctcggaattggaatagtctcttgcgccgatcgattcaatttcttgatccccggcgatcaactgtacaggtttgttctgttgctgcaatacacaacaccaagtgccatactcttgggagccattgctagcctgagaggctatgcagtcaaagaggcttctgcagttttgttttggcagcatgttgttgctgtcttctctttttcactgtacataattctctattttaagttttttctttcttcttcctaagctacataaatacaccgaaattctcttgcttggctcactttcatcccatgaatgaataatgataatagaaagcatgcaaaattcacttattatctttgtatagtcattttgtttgaaatatattgttgttaatagtcaacagttcgattctgtgatagttctatacgattttgattaattgggctttcttccttcttcagtctttttagtgtttctatctatttagttttgagagaattttgcctgaccctcatcatcccatattttgcttaaatcttattttcccagtcatttgtcgtaggaacacacaatgatgtccataagagtccagaagtggttagtagctcggggaggaagaccaacctctttcataaattttggttttaagaatatatttcaagtactaaatggggtttggcaaaaaaaaaaataaaaataaaaataaaaataaaaatagaaataaaatttaaaatacataaaaataaattaataatgttatggggtatttatgcataatcttttcaacttcatcaattaattatcattgtgaaattcaccatcaaattatataattaacatttttcttggtcaccacttcaaatccaaccaacatcttttttttttctaagtactctttatctcaaattacataattaggtggcgtttggttggagataatgaaatggaacagaatggaaaggaaacaatttttattccattcctttgttcggttgcattttaaagtattggaatggtatttcaataaaatgctctttccaccattttgg

SEQ ID NO: 383411 - DNA, 3046 bp, Cannabis indica
ttccagagtgattctgttggggcgatagaggcagtaaagagcaacagtcaaagcatatcatcgctgaatcataacgttcaacagctagttaccaaattccaaggtctaacttctaagcttgtcttatgggagatcaattggattcctaggaaacttaatggtgtggcccatgaggtggcgcaatgggcaatccgaacttacatatttggtagagttggattgcccaattttgacagtttcctgtcggatgagaggacagatggctgtttgtagtttgttctagtttgttttagttatggtcgttattttgttagtcttttgtagtttttttataaaatttttttttataaaaatttaaatatgtaaataataaaacaaaaattataaactaaagatcataaatagtagatgtttatttctaaagaaaatatatcgacaaaactaatttcttaaacaaaaacacagacacaaattgtctttttgataaacatatatggacccaaatttgaaacactaaaacatcaaattacctttccaaatagctggagaaagaaagctaaataatttgttcatttagctaggagtggatttaccacaactccgaaaaagattggtcttcttgaattctcctcccttatcatgaagaaaaatggatgatcagcaacaaaatctacgtactttttaggtggagaatacatacaacatccataattgtcatcctcataagtaactgctgaagcttcagttccattctcattaacttcaatacaagcactgtgataaactttctttactgtctcatcactgaaaggaagtaattttgcttgtgcattcatactcaatcccaactccttcatagtcttcgaaacttcaaatttaaaattgaagttgaatttgggtatccgtaattttccaatataatatatgggattaaacttaaatttttgagttagaaaatcttttgggtttgaaccaaagagactcattaagttcaataacccatcattctctttcggtaagaaaatgtacatggcaaatgtcagtccttttccataagaaggattgtcatagggcaactgtagaacgttaaactcatcgaatggtgcgtagcaaccactcagtgaaaaattatgggtcatatatggaacttcaatcacatcgccgttgagtgtgtagaatttttctatgagagttcttgaagggtcaaattgatcaagccaaacacccttaaagtagagtgcgtttgcgagaattgctatggttagtttagttgtctctgggttatacttgagaagatttttgataagccctttggtgttttcttctgcccaagaattgatctcgtatattgcttcccttccctatatattgagtgatggagccaaagtcatatatataaagagagagatatatagatccataataacataatttcactaaaagttaatatagtttgattctacgatacaccaaatgtgcctataaaataaaatagttaaatttttagtatgttaaatttttccgaattttttaaaatttggccgaatgcattaaataaatataatttacaaaaattttacaaaaaaattatttgagatgcattgaattttccaataatatatatttatatatatatatatataacaattcaccccggcctacacatgattaattaacctattctgtgtataaataattcacaaataaattcatatatggttgttattataaataatatataatcaaaatgaatagacatacgctttattgggtgatctaaaataacagtgattatatatacatacgtaccttgtttttaaaatctagatgattggagaccttagatttgtataccgttgagagtaatagctcgcaagaagggtctagtttgaatttcttgtcaatccaatagctattaactaaagaaaatttaggatggccttcatcggtgttgcaataatcagtgagttgttgaatatcagaggtgtagtttgcgttgagatcggctatggttttggatcccaaaagggacaaccatttctccaactcaggcccttctttcagtgtattagcaaccatactcatcaaaatgtttattgacaatggcgagaatatcaagttttttttcattagaccatctttacagccaaggaatttcttcagtatctccatatccaactccatcgcactttacttttccttaccgctagtactctactttcctacctagggtttctgcctctctatacaaaatctatataaatcgaaacatatatattcttgtttttaattcataataataataataataataattctcattaatcggacggaaaatatacgatatagtcaaaaacggaatggtttgtgatatatatgggaagacacaactagacactctaaaatcttccataattctatcatttttctcatttttaattagattcataaatatcaattaagtattatattagaaaactctataatagctctatgtaacttattttaatattaatctttataaaataaatatttatgaccataggtctaaacatttttattttagctaaaagtatttatagatattgtacataatacataatatgaaaatcacttcctaaaaacatacgtattctctcctctttttctcttactgttgttagatgactaggtttctcaattaattaaaagtatacttcataaaatatacaatatcacattcttttcaacaattcccaatgagcaaaaatttatatatgcctattacctctcaattatacacaattcttattcaaaaccctaagaaaaaaaaaaaaattctgtcccaaaatatttgtcaccattctgatctattcattaaaaaaatgacacttgtctaatttttttatagctcacgtgatgttctatttttttaaattgttttgttttgttactgtaagaacacagtttttttttaaaaaatcttttttgttttttttcttttaaaaagttcatattgctgatcttaaaaaaaatacactttgctctattttctactctaattccg

SEQ ID NO: 383412 - DNA, 1241 bp, Cannabis indica
agcccaagcctccatgcctcgtaaggttttggtgggatgctctccaaaatgcagtatatctcataaattgatttcccaccattgtccttaaaaaccagcgcttgtttaaagttctttattctaagaaactagattacaagtgttttagagtttttggtacaacatgctatccatgtatttgaccttataaatgtcataaatttcagtaccattctaagaaaccagattataaatgtcttagagtttttggtacaacatgctatccttgtatttgaccttatcaaggtcataaatttcagtaccattctgtgaagtgcatcaacttaggctatagtgactcacacaagggatataagtgcctgagtaccacagacagattatatatctccagaaatgtgatttttaatgaaaatgatttttcatgtaaaactggtttctttaacactcataaaccagaacaagaaatcttagtcagtgttccttcttggtcagtctttttttctttaaatcaacaacaagatcacttaaatgacacacaaaataatgtcacgtgaagaactcaagacaaaccaactggttatgaacatcaagatcaatcacttgaagaaagctcatccaatcaacatctagtatttaactctgaacctgatttttctcatcatagcttgtctaatgctcctaaatttgaacagaatgaggctaccaagcctggttctcacaccagcagccgtgtaatagaaacacaacaagacagagaagtaatattagctcctactaatcttatgatgacaagagcaaaatatggtatctttaaaccaaaagcttatgtgggaaaggaaaattggtgtgatgatagtgaagagcccatcacagctgaagaagcacttaaacacaaaggatggtcaagagccgtggataatgaaatgatagccttgaagaaaaatggcacttgagttcttgttcaaagacaagcttggatgaacatcattggaaataaatgggtgtataaggttaagagaaatttaaatgggagtgttgaaagaccgaaagcacaactagttgcaaagggctttaatcaaagacctagaattgactttgttgagacatttagtcatgtgattaagccatctacagtcagaattattctcaccatagatgtcacaaagggttggggcatacgatagttaatgtgaattgttagcccaagatatgtttccaagaggggggggggtgaattggaa

SEQ ID NO: 383413 - DNA, 1605 bp, Cannabis indica
gggtgaggctactgggggcctttggaataatctagaatggtacgagctcttgcttattaagagtgtccaagtctgttgaatgcatggtttgctctatcctttatattttgtattcaataaactcttatcaattattatttctctcgatccctttggctgctatcctagcaggttgtttcaattggtatcatactttttgatttcatgtcaaacattattggagtccatgatgaattgaattccattgaggaggtagtgaaaagaataaaacgaaatagcattggtgtaatggagcgcttggaatttccttaacactcatcaaagcagctaaggtgaatttggtgttgataatttaccatttgatttgcctatgaaccaggaatgaaggctgactaattagctaagtagacaacaaatgagttaaatcatcaattttattgtgaacacattaaaaaaaatcttttacacaaagcatatataatgaattctttatcatgatattctaagcttctttgaatttctaataaatcagttatttttggaccaagttgaatattctcattgctggctacaatgacttcccacatgttgtgtacattatcttgctcttaaacaatcttgaacatgttttgttactttaacactgtttggtaagaaggaaagaaattgggagggatggaaaaatttggaagggaagaatagaaaataattttatattatgttcggtaaccatgaaggagagaaattttaattttaataattattagtgagggtaatttagtaaatttatatgtacatttttatcttttcttattttctctccacttttagatgggtagattttggtggccccatccttatttttctcttccatcatttttctctcataccaaacactcatttttaccatctctccacttttctgtttttaacttttctatccttctatttttccactattccaaatatagagtaaagaagcatcattatattgttgaaacttaatcttgagtagacatgatgaggaaatcatgtctacttgatgtctatctagtctttcaagctaaagaatttggaatctgcttttcttttatgtaatctatcgtctgaagtttcattttcatgtgtttctagttattcactgctacaaatctgccatattctcaggttttgggtattcaagaatttttcaaagcagctacagatgcctcagaggtacgcgggaccgttggttgctaaaagaagttggaatttggaattgtatgaatggcaatgcatttgtagtcttctcactccaccaactgagcgttagtgtagaatctctgcattggccaaagcatttgcttgttttttacttgatagagctcacaagcttatattacaagccgagatgcatggaggtgatagttgctagctactcttcggttgaaggaattggacatttggctaatctgttaatagacgtggttaaaccttatgaagtgaaggtttctacgtatgacttctgaatgtcctatgtagttaaaggaaagttgtacataaaacttatagggatttttacgtgtagcaccttaattatatctaaatttcaaaaataacgttaat

SEQ ID NO: 383414 - DNA, 2617 bp, Cannabis indica
aaaaatataattactacaatctaaaaactaaataaaaatacttaattagtttgattgatgttgcattgatttggattttttagacacctcatctaccatctgatctagataccaattagaataattaaaaatacacatccaatctaatcgatcacaaaattagatattcaataattgatggtcggtttctctcattgaattgaatcaatttatacacacccctatttttgtttgagtaatagtaattaaaaaatccttattgttaatgatatagactataattgttaaagtcaatacttttttgtgttaggactttttttattattaataactctatttagctataacatttttgttaaaatacaattaatttggtcacaagactattaatattacatagaagttttactgtaaattattattttaatggatagctagtgtcttaatttgatgattttatagaaaaatattgcaaatgggtcgtctatactatatataggtgaaggtgaaagattatcgaccaccactacaagttatatttagacgtctaaacataatatgcataaattaattatatatatatatattgcattgaaaatatttaaagagctttgctagatttaatattaagttctctacccggccatcacaatatattttgacgagtggaggagatcactagggctggggggccctctagtctagctcttcttgttttcagaaaataaaataaataaataaattttccctttacaacgaagaaaccttcctttgtcctaccatgaattcatgtctttgtccccatacattacttttgtaacagctaaaaaatgattacagtagtggcaaggtactattatgatggtacgtacgttacttgccatatattatagacatatataacaatataacgataagaggatcattaatgatcagaaatatataatctggccggagaaggattcaacagacatttttgtccgacgattaataggacatcaccaccctcagcagtgtttgactcagactcctctcctagctccatacccttctatctcttaagtcttaactacgtgtataatgtcgcattcaacgtattaagggattgactattagtccatatactattaagcattgaaaattggatatgggtgggtttgttggttggttattacttggtcccacgtttaaatatatattcaaatataggcacggaattatatattatcctatattttattccttcaattgtattgcatatattactagcatcccttctctatccctagtttgattttttttgacattcttttaggttatccataattgaatatttggtatgattttttttttctttttaaagctctaaacattatttgatgtgaaaatgaaattactccctaaaagtattaatgaataatgatagattctaaaaattcccttcaattgtaaaaaaatagtattaaaatgaagggtaagtctatattcaattgtaaaaaaaatgccactaaaataaaggataaatgagcagtacattttggtagatgttttatttaaaaaaaattaatttaatttatttttcatgattatttatgttgtatttatgtaggattattagtaaattttttaaaaaaattaattaaataatttacaataataaaaaaaaaatttaaatattttattataattatttttttatacatgtaataagtaattgttactttagacaatataaacttttataaaacttaccaagaagttgaaaaaatttctaaactaaatatttatttcagttatagtataataaattgaacatggtaattaatgatttaaattaacttcacaataataataggagaaataccaaaagttatcagtagagcttaacactctcttatgtgttattattgttattcatctaataaaaatattgctataatcaattacaaaaagacatatttaaaaatattaaacactacaaatactactaaccaataaatcttttgagtctagttgattattttcatttattagattttttaggagatccttcttctttgttttaaagtaggatctttcctagatttttttgctagtttgcttttcaattttcctgaggtatctctaattcacgttgattgtacacatgaattagcagtttgtgcactcagagtggatgataaactaatttgaatagatgattttttatcttttctataaacttttcaatattttgaatagtttattgtaaaaaaaaaaaataataacaatcctctaataataaataagatttttatagcgcgtgcagtaaccgttaatttagacaataagaacattaaaaaaaatccgaaaatgggtacaaaattcaatccaaattggtccgagctgtccggaattgaaatgaccaagatcaccacacgcagccaacgctgcatccacgtgtcgcgttatcattacaataccagtccaaataaacccaatcacgtcaatcatatttaatatcttcacccttatattccattaggcagtgtactctacgctccttaaaggcacgtgtacaaaaaatttcaccaccccacattcccgaatacgcacagaaacaaaaaaaaaaaaaaaa

SEQ ID NO: 383415 - DNA, 2324 bp, Cannabis indica
agtttaaatagttcttttatattttatacagtttcttttgtattgtaaattatttcaaatttatcttaactttgtaaagtacatactaaacaactacaatatacattgtcatataattaaaataaaattaaattaaaactatgtagatagatgatgaaaacataaaaaaggtttagggagcacttaaaacaccctatactttaataccttcacatttcatatttcatgtcatgtctctctaatattcttattttgtttattataataagaaccaactagaatataaccagtactattggatttggactcaaatttagtcaacaaatttattagtatgatcaaattatccttaactatatctaattaagtaatttaagtattcatcttgaaatatttgaaaaacaatgcatatgcataaatcattagcatttggtgaaataagcattgctaggaagaaaactcaaatttataggataatatttttgaatcttcattgagaaaaagagatttgattatataaactataaagtgggtaagaaaaaaaagggggaaaggaaagatatgaacatcaaaagtcaaagcttgcaattgaagtttcaagagaaattaattagcagaaatagtgggagatgcataggatgcttaagaaagccgcatgggcattatataaatcataacacaatgatattattatggtatgttatgttgtgttagctcatgtgtaattgtttttgctttcaattttaatatactttgatccacaaatatttatgtggttctaatggtcccttttgtggaaagaaaactatttatactttcatttaattaaagcaaaacaatcattttgtaatatttatataaatattgaacaagatttgtgattaagaataattatagttttaagttaggattaaacaaaagtcgatatgtccgagtggttaaggagacagacttgaaatctgttgggcttcgcccgcgcaggttcgaaccctgctgtcgacgtttttgctttttaatttttctacaattaattattaacccacccaaaatatttatgtaatacaaatttagtttaaataaaacaaatgaagtgtgcaatttgaaatcttctttgaatgttagaagtgtaaatatgtataaaattggatttgagtaatatgattgcatcaccattggtccccaatttcagtagaattgtaagactattctaaatttcattttgggattctttgtttaccagtctaatttggacgatagcaataaaaataataaacaactaactttattttcaatactataaactttattggactaaaaaattactcaaaaataaatggtataccaaaatgtattatagatttttcctaaagtttcacatatattttgcttatctttttatgaacgttgttctactaaatgatctctgagactcactctctaataaattggcgcaattataagaaaaaataaatttaatttgatgaatatataaatttatgagataaatatatatattacacagcataatgcacattgctctatatatatttggattgaatttcttctgcacattaatgaaatcaactacacaaaatacaacttcccaatttcacaaatgctctaaatctaatgcaataatacaaaacaaaaaattcactatcattcaccttacaattcatcacttttgcaatttaattaaaaagctatttgattcacactagattaaataaagtcaattagctttacacaaaggcctggtgataaagttcaataggaatagatgatcataataagtttggagcttttctttaataaagaattaaagaccaccaaaccaaagagctgtgttctgacttttgagtagtaaatggaagtgtaaattaatagatatgaaaggaaaattctacactaaataacaaaagatatcaaggtggccgttcatttaaaaaaaataataaaaatatgaaatcaatggataaaactcagagacctgacaaaattggaggtacctaactagtttttctggtaaataattagtacttgacagcagaaataatgtctagttgggaacctaatttctcatctgcagtagtttcagctttcaacctaagtttattcagttgcttcttcctttcgtatgacacctgagccttctccttcctcttcttttcaagttcctgacaacagagaaatttcagaaaatgaatctctccttcacatattgatagacattacatggccaagatcattggaactaagacagtcgtacccaatgcattcttacagttacagatgaaacaagacggtctaactattcattaaaa

SEQ ID NO: 383416 - DNA, 4049 bp, Cannabis indica
aattatatgcatacaaatatacgtatacctaacctcactatcactattcttatctttcccaattcttatttctttcccatttcaacaaaactttacaccaatcacacattagttacacaaaactaatgcaaaactatgaaaagaaatatatcaatttacattttcaactataaatatttgacatgaaagtgtgtactaaacttagcataaatcttttgtaaaagtataagattagatggagtttatcttcatttagcttaaaacactcctttaatttggggattgagtagtttttggacgtttttgcccctgaattttggtttatattttggccaatatattggtgatgaaacaaaacaattgatgactagtccagttgatgcctaataaaaacaactaagcattaagtcacactttgttttaacatacatattataaccaatagtaccaacaaagttagtaaaacattaatttcaaatggtgtgacttgtgcctgcaatgaaattattattgtaccttatctacttctccatattaatgcaattggatatatatatatatataatatggtacgactaaattgataccaaaattaaagaagagtaaaaatcatgtgtattgatatatgttagtggaattataattacatcagcaagagtcatgatcattccaaaatttatatctctatacaattccaatttccatagaagagtagctaaaagacattatgatctacttgggaagctccaagagcttgaatgacactccaagaaatagaaacactgtatataaccaaaagccctattccaaacaaaccttcaagcctcatatctttccttggcaaaatcaaaagtgcccaaatcaatgctgcagccaaaaaccccattgtttggaaaagtgaagggtctcttgggatgggcacaggtgaagggtacttagaccaacaatacccaactaaggataagcctaacccaaacaaaatgttgaatatgggaccagcatagcagcctgagaatgctatttgagccccttctgctccaccattcaatgccattgtcaaattggtcactaaatctccaagtgaattcccccatgccagaactgtgagtcctaaaatagaagggttcacaccaaatatgtaggctaatgataccaatagaccaaccaattcttgtgctatgatataactccaagtcacactcattaagaaacctgcagttagccaaatcagtatgcatctccttggtgggcttgacttgtcagttgtcagatatgaaacaatcccaaatgttaccccaaacaccaccccaactccatacaccacaaccttcaatgtcttgccatcttcaatttgactgctccaaagggttgagaggagtagtggtgatagagttactgaacccactgcatacccttttgaccaattttcttcactaatcacaggaatggtaagtcttctaggcaggtaaagaggtaactcaagtatggaaagaaaggcaccacaagagggtgttgactcactatttgaatctaaacaaaccatcttctctccccttcttcctcttcatcaattggagtattaagctctcctttctccatattttgcaagattggaatagctaagtcactgccattgtgagttgagtcaacaccaccactcaattcactatctttgttattggatctaatatgcaatacataaaccacaactacataagcaatataaatggagaaaaagctcaatgcaccccaaacatctaattctttctgaagcaaaattacaactaaacaaagaagaaccaataagaagaagaaaacatccctaaaaagaccatgcttgttaacccttacacatttactcctcactgcaatgctaataactccaaccacaacacatgaaacaaaagaagctccacccaacactgtgttgagacccacttcactagtcccacctcccatgaaggagacaaggcttgagaaaacatcaggggcaccattgccaagagagagcagagtaaccccagctattgttggggacaatttgaagagcttggagagactctcaagggaagaacagaagtactcagatgctgtattacccaaaacatagaacaacacaagaagccataggagaagaagggaatctcccagaaagggaaagttcccaaatttgcaatagaaaaggtaaaggtagtcaatatagccttgttcaacacaagggttgttggattttaagtacaaacacttagctttatagtcagataaagcgtgtaagccctcgcagccttgatcagctgtgggttttaggatctgttcattactatttttgttgagaatcagatgagatggtggtgaaatggagtggaaatagaggagcacaaaagcagaacagagtatgagaaaggaaatgtttaagaaaataacatagtttttgagtttagacatgaaaatcgaagtacccattagaccaaaaccaaaaacaaagcaagtctcatggaaaagatgaaaacttgaaatagttaatgagcaaagaattgggaagaaaaataagaagaagaggcatgggatgggaatatcaaattaaaaatagaaataattaattaattacgttccggaaaagttggagaagagaaataagagtagaaagatcaaacctttctgtgaaaaacttggagatgggattttgaattgattttggattctgtgtttgtgaagaaggaagaagaagaagaagaatgaagagtgaaatgaaatgaataccatatatatataagaagaaagcatagcctctcatctcatatattctcaagtctgtgttataaggcattgtagattccattaatgattccttgaattagaagaaaaaagattaattaaataataatataaaacgtggttagatgaaaaagaaaaggagaagagagttacagttgtccatggtgaatgagaaagtgacgttgacgtggtccgcgtttgttgacaattgacaagacaacgttactacacattactcgaacgacaacattaaaactaaccataatgttgtcgttttcttcttcctcctctcctctccttttccttggatgtattattgttttgttaatagaaactacgaaaaacaaaaaacaaaaacaaaacagtcaatgtttgttctttgttgttgtaaagaagaagaagaagaagagtgtttgttttgttttcaacatatatttttttgttattttattttatttttaggaatgattttttaataattaaacctttaatattaaaaactaaaatgtcacatatatatcttgtacgaataataacgcgtttttacctacgctttttaattactttctttcataagaaatttttgttgtatgctttttttctttttcatttgctactatttagtgactagtagtgagacccacacattgataaaaatgtgagaataaaataaaaataattttttttatagaataaatatgaaaataagtgaaataaaaatgaaaactataaatttacaaggatatataaaaatcaaaatatatgatgggaaaaattaaaataaaaaaaaaagtaaaaaatcagtttgtgggagcaaatatgaatacatacataaataattatgcaaaaaaaaaaatagaaagacaaaactctacaaaaatatataatagtttaagaagaaaataaataaagaaatgttatatgtcatttttaataataggggtacacaatttaatagtagtattataactttagaattttttgtttaacaactattaattatttgtttgaatgtatgatttagtagtagtgtagtagttttgagaacacaaatcttatatatatatttaaatatgttattttttcttgtagaaaatatatattctttattatgtttacaatttagatatatttattttgctttcaaaatatggtgttaaacttgacaaatgaaattatcaaagtatgtcaaacatgtagtagtgtaaaaataaagaaaaaaattaaaattaaaaaacaaaaaatttaggggtgcaacacgaggacttcccagg

SEQ ID NO: 383417 - DNA, 2792 bp, Cannabis indica
ttttttttagttatgaatctaatagtgattttttaaaaaatttagaaagaatgaaaacatataaatataaataagaatagggaattggaaataagaaaggaatagaataaaatttaaaatgcataaaaaaattattaattttcaaatcttgcagtagaatgatttttttttttatttcaaaataaaatagtcatttcaccaaaatgatggaaaggtcactccatcataatggtattccaataattttaaatgcaaccaaacaaaataatagaatgaaaattatttcatttctattctattccatttcattacctctaatggaacgccatcttaagaataattctttcttccaacaaatgatgtaaatgtattctatgttttggacaatttttattttctttaaattcttcatttaaaacatcttctaaatacttttactctcattacctccttttaattctccaaattaattatttttttttatctttcaattttttttttattaaaaaaatctattttttcctcatatttttattagcaaaatatgttcgagtctcacatgaataatgtaggtaaaaacttaaaattatttataagattatatattactccatttattattaattaattttcagaagaaatattttacttcttaccaaacatctcattttattttattttctaaaccatactttcacattttaatttagtatcaaaactaaaagaaagctctaaggaatatttgacaaaaaaaaaaagtcaaaagagtcatgatttaatgatggtgagttaaacaaagagtcagatcaagtcatcaaagattagtgaactaaagataattaccatcttaagaggatgttacaaagtctcacgttgataataaataaaaatttctcatatttgataatgtgcgaaaacttaataacattgataataatgctctaaagttgatctctccacctaggtaatgtaatgtaaacctattatgtaattcaactacttggacggatttgctacatgtcttgctgacatgtttaggcagttagtagttgttattaggatttatatcttagaaaatctgtaaagacatttatgattataaatatgaattgaatatttcgatatatgcttgaatgttaaattaaaaaaatgatatttaaaagattaataactgtaatttaaatgtaactataacgacttgcagtaacaggttggaaacttgttactggaaaatatagacttgcaataccaaaacgggaagaaaaataaattgtacaaaatttaaaacttgatacaagatactactaaaaacctgggtttttctcactattttaaacagacgtataaaatattactgtcaatctctaagaccaatgcctattcaaccgtcgtaaaactaggtagaataggtgttggtggaaaaatgtcaggaaattttttttccgattgtgcaaaaccgtcgacagtacaaagtaccattgccgacagttttccaccgctacttatactattggcattaaaattgttgcctatagtataagtgacaatgaaaaaccatcacttatactcatcaaaagaatcgaggaataataccttgaaggtaatgaatcctctaacgaatacatcattttagtggtcctttatacgaactctaagcctctgaatcatcattatacgaactctaagcctctaaattatcattctcctctaaatcatcttcttcagtagaaacatcattattctttctcatcgaagatgaagaagaagaataagaacaacatgcggcttctgcaatgacttcaccttcttccatcaccaaaccagacactccaaattaggcctccaattactttcaatagcaaatgacatgagaaaaaggaagcaaaaaatattgattagatcaaagaatgaacagaatgagatctcattaaaatctgagaacaacaataaaaaaagagaaagtaaattgttcttatctttgggtctcgccgtgagagaaggcaaattgagaggaggtggttcgtggtcgcgcctttgggtctcaccgagcgaggatgtggcagtggtcgtggttgcttgttgttcatatgatagagccgagagaggagagaggacgaggtggttgcgtcgtttgaacgagagagccaagagagagagagagatcatattgtatgaaatgagatctgaaattgggactttgtatttaaattagaatccccaacgatttaaacttgtcgggtatactattcccgacggtttaaaactagtgttttaattttagtctcatgactaccttaaaccgtcaggaatactccactattaacgatggttttaaacagtcacttactttcattagcaacaattctaaaaaaaacttattcggggactgacgagagtagtgctttttgtagtagtgagaaaattatatgcggtatcagtatttttttaaatactactagtccacagggtcacactcagataatgaaataaattaatgaagtatcaaacattacaaaagcaattaacttaaataaatttagactctttctaataattttttgcaaccctttgtaatccaccttgctaatctgatctctgaaacacaccaagtagtgaactcccttcaacattgatgttgtgacagtcggtagtcccgtgatccgtaaggggaaataccgggtaagttgtacaatcccacatcgcctggagaaggtcaagtgggatgattttgaggctgtgtgggtatgggactacacagttgaagaaagagcttaaatggattgattggtact

SEQ ID NO: 383418 - DNA, 2572 bp, Cannabis indica
ggaagaggtagaatacacaccatggctacctcatctaaccacacactcccaccctaacgtgtcgttaccatctgattgaattgttgtcgtgacatatattttttagaaaaaatttattcaataaaataatttttgaaaattatataatataaaataaacgctatttttgacaatgtattttataaaaaattataaatttgactctctctgctttaataagtaacaattcaaatcctatgttttttaaaatgatataaaataagtcatgaatttaatttgtcaaattcaaacttgataatagtatgatttagaagtgttatgaccagactgattacatttttttttatgcatctgttcgtggtagaagctgattattttaaaaaaaaaatgataaaactgatgaaaatggcgaatatgcccagaagacttctcaagagaagcattcggaaatggcccaggatatgtcaacctaggtgatgggtcccagttttgtctcccaggtggctctgtttatttcctaaaaacacccatatctcaattgttgatgaaaataaagaatatgcccggaagactttgtctaaactgctattgaaaatggtctaaattgacaatatgtcaacctgggcgctgggtcccagttttagcctccatgttgatctgtttctttcctgaaagcacttgattctttattttggatgtagacgaagaaaatgcttgggatacttcttcaatattgtggttggaagcaccccaagttgacaatatgtcaatctaggccctaggtgctcaaacatgaagtgtttcgattctgattttgatgcctctaacatgttcgtgacagttcttattcatgtataagtacaaagtttgagctatttacactaagacgaacccgaaaactgaaactctagttgggaatgtcaaattgggcgttgggtgaaaaccctaggtgcatgtgttgacttctggggtattatttcgtatattttcaatttccaggccttagacttagattcctcttgtcttcttggttcataatactgaaggatggtgagttgaaaataacttggagggatccaaacacctatttcagagttcttgaagtcaacttgggcgcatgactataaacgcctcccacgtcgactacaatgactcaggactctgaaatgttttttttttcttgccatgtatcaaatattaacgtttactcaaccatgatcagttttcgagtaaacagtatcttacccattttgatgtttctaggtaaaagtggcttatcagggtggtgtgggatcttttgttgttgggtagaagagaaatattacaaattttgtgagataaatatataaagcattgttgccactgcaactttatttttatttattttaataattaatctactaaaacaactttcaatgtagctcactagcttgcactaaaaatgcaaatattagttatgaggactaaaaaatgagtatctacgtgtactttttttgttttttgtttttaataaaaaacaactcctacttcatcaaaaaataataagagttaggcacataaacatagaaaatcatccatccaaaactagtttatgaactttgagtgcatgcacatccaagtatcgattatattagttatactacaaacataaattaaggaattttcaagaaaaaataaataataaattatcaaatttctctaacaaataacttaaatctttaaaaaaaagagactcaaagttaagttgtcagacttaaggtaatccagtgaaaaactaggactaaaccaatactaccatgaaaactacaacttgggcattaaacactataaatttatattcacaaatatagcttaaacaacaaaaggactcaaattatacttcttcaaaagatcaattgtctttaaatagaaaaaaatacattctacttattttttcaaatggtgaaaatacaaggccacttgtagtaatgtactcgagtggatctcgttgcaatgagcctattgtctagagctcacaaacgagttcgctcgtagtgaggtctagactaattgaactatcgcaatgtgttgcttatgtggcttttatgtgtacacgtgccgaaacgtgattaggtggataatgattaaggggaagaagcatccaatatccatgtcatgagatcctcttacttttgaaaggtactgaaatttccacatatatacacccaatcacaaagacagaaaaccaatattatctacaaacagtccttgtctacaaatgtaaaattttctttatggtttttaattattgggaggcttattcaccaatcaattccattattttctatctacaacagaaagcactacttgttagttaaatggtcagaaaaataccacttattttattataactaacaataggaaacagtcaaatatacaatggtgcttccaagttccaaatgggaaagcaaaaaaagatagtatggggtcactttctcggaaactgacattttcctatctaacaaacagaaagttatttccatataaaactaatgtagtggggctagagctagtggccccaacaatgtgaact

SEQ ID NO: 383419 - DNA, 1031 bp, Cannabis indica
ttaaggtagaccaacctcatctcaatgcccctacccttttccctaaatagtgtaaatagtcatttgcaccattttaagttataatcattaattgtgaaccaaaagtttttatctttttaagaaaaccaaaagcttttgttattattgttgttaaagaaaacaaattcatatagtaaaccaacaaacaaacctagtaagccaaaaaaaaaaacatagtaaaacgagttattttcccaacattaaataaagcggcaagaattagtagttagaaagtctagtaatacaactctaaaaaaaggaaaaaaaattagcatctaataatctaaagagatgcataaaatagagaaatgttttcaatttagatttgtttcggttgcactgcaaattgaatgacttgataatctgtgaagaaggtaattcccatcgattctttcaaataagggtatttatccaatccaatatgcgttattttattcatagtccattcgattcgcactaagtgtggattttatatttttaatcagttattttagattagttactttttaatattgaattagttattatttatgaaaaaaaatattttttttacataactaacaacaaaataaaattaaataaaatttataaattaaagtaaagaaaaaaattatatatagaaagaaatgtttaattttgtttgaaattatattttcttgaatagaatatgtatttgattttaaaatatatttatattatatgtattaaatttttaaattactattatttttacattaaaatattaattgtatatttttaaaatgtataaaaaatatgtgtagattaaattaaatgggatagattatttttacatgttactcaatatttaattcgtacaaatacagatgcactatatgtactttgaagattaaattaaattagaatgtgcatatcatattaaattaaggctaattaggattttgcctcctgaattttgatatgtaccaaatcatgcccctgaacttttaaggtcgttaaaaatgccccttgaa

SEQ ID NO: 383420 - DNA, 1030 bp, Cannabis indica
actaattaagtcttgaaacgtaagtatagtggttaataataataataataataatattactattattattagggcagtgtttcattgctggttttaatctgcatgttgaaaacattaactccagtatacatcccatcttccatctccacaattttggaagttccgtcgtaaaaagtatccttttgagcatacgaaaatggaacttcgcacgttgcttgtgtcactaccagtgtaacaattgttctagtcttcggaggcacatcaacaacgtaatttgtctttgttgatgtgtcgaaagtatttgttgttccccactgtcctacaacactaatttgctcagctgacaattcgatcttttccttattaactatccacggaattgtattaacttcaacaattggtttaacgtctgatattagcgaaatgctgttgcgaagcgcaattgatcttgttttgttgtactcaagcgtcaagctcatagttttatgttcatccccggggttgtcagccactgcttggctcttctcgatgacactgaggttataaacgtggccattctcgtggcgaaaattgatgttgtagattttcttagatattacgcgctccaccactatgaacttggttttatcgataatgtttgactctgccgtagataaaactatgtctttgtcaacaccaggattattcatagataggaatttgttatatgccaaattacgcaaaacaacgacattgtcggcgactttgatgggaaagaacatcgaacatgtgttggtggggtcggagttgacttcattccgcacatatccgttggcataccaaaattggttcgtggaaaggttctttatgcgaacataaccatcgcctacggtagagatctcatgtgcaaccgattggtcgaagatattgttggcatctctgagcaccctcatataaatgtcttgtttgctattgagataccagctaccattttgcggcctaaaggcgacggtagttttgggaaatatgacaagagattcccaatccaaga

SEQ ID NO: 383421 - DNA, 1431 bp, Cannabis indica
tgataaatcttatttgaatgatcagaaaaaaaaaatacatctttatcatctcgatgaagagcaagcaagtctatactttcaaatcgcctcatcatcattagatcgtgataatgcaccgaattccatttaaacatcttatgttcccatcttcatataaatttcccaagccataaaagcatagttcttcaagaaggctaggacaacttttcctcgaaccactccaacatataccttcaactctttacaactacacctaacaacacaaccacaatgtaaggccagtggaagaccaatcaattgccattcttttgtgataatattaaaaattgcaatagcttcaatgtgaaagaatgaccctaatgtccaatatacaattccattattattacttccaacaacaccaccttgatgattccataaatgaaagaatacaggaaatttgatattagttgaagaggtccattgtctagtcttagaagaaaaaatagttatatggagatcgaatcgaactggagaaattcttaccttattaaaaacattggtactaattttgaccactttatactcaagcttattactaatattagtatcatcataatcccttgatactactaatgcatatctataatatttatggaaggcatttggagactgaggaagtgaaatatattgtttggtaaaaggattgcaaatgtatatatgttgagaagattctaccaataacaaatcctcgaacgaagaccataaataaaaataattgttactatccttcgaatgcaaaaactctaaagcccttctttgtccgtagtcaaaaatctttgatctctccgaaaaaaaatcataggaaaatgaacaagtcgatggagtaggacccgtaaataataaagtgaaaggtagagacggggatgataggtgggaaagtgtattattaagccttttttgacgatgataataattggattttcgcctcaaataagatttagaatgattgataatcgaaaactaatatttacacacagaagcgcactctactatacttcgaaaatcaggaagtcggtgtaatatttctaatagtaaatcaccactcataatgaatattaggaatgtaggatttttaccgttttaaccctacaccaacaaagccacaatatcagttatcaaggtcaaaaatgacctttcctagtctaagtaaacccttagactaaacggcaccgtattaaccccacgacatcaatcttgatgtcgtatgaatcctttgattcaaagactcagtagaagagtctagaatcccaaacactcagacacaaatcactcacacactcacaaactcgaaaccctagcagagcaagttctctctgagaacttgctcgattccagaccctagaaacccagaaagcccagaaaaactcaaatctaaacacacacacacat

SEQ ID NO: 383422 - DNA, 1740 bp, Cannabis indica
atatatatatatatatacaatcctcatgacttccacttcctccgtttatggagatagaatgtaaatggtcaagactaagaatgagaaatatatatatactaataattagtacttgagagagatgaacacacatatatacatacctcattatatatatataaataaatatatagtaataaatgaaaaaaagtctatacgcggtttcattgctaagcaagaaatatatatttggacgaataatattaagttacgactatggtagatgtgacatgaaatgtgtactgtcctagctctccgcagtctatgggattttattttaatttgtctaattattaattattgagtattattatttttaattaaaaggaaattaaaacactatttcgtcttcaaacttttaacatatcctttaggataaaattaataaatttttgtataattaaattaacttatattgtttcctaaagaaaagtaaatgttatatatcttgcattatggttgggttaatatggataacaagtatagcacacattcacatttaacaagaataaaaagagaggaagagctgcgaaatcaatctgatgaatgatgataacttccaataaacttatatttataacacaatttggcatatgaaacattttaagttcttgtttggttaatgaagaaaaaagccctagttaaaattcgtttattgctattgctaccttacgttaaaatttgttttgttaaatgattagcaaactgcctaacatatgttgttgttaggatgtctcggtattttcttgattgtagcatttgcatgtttaatgcaccaactgttatgttaaatattttgtattcagaatattaaatttattaaagttgatattttatctagaaaaaaaaccttaatttctcaatgtaattaaattatatctaataataaaatgattaattatatatgttgttaaattaatttttttaaatattttctttagttacattactatatattcatataaatatatataatgcaagatccaaattctctctatattagtattcatgtattttttttcaaatacataagatgattaatttactatccaaacataacgttactagactaggtagactaataacataacaataattaaaattagatttgactttaaagaattacattgggtttgagtgggtgtggtggtccacagtggatcacagctaagaatatataagaagttggagttggaccgggcaaggatttaagatgggcccacaactgttcagtcaagtaagagagcacatgcatgttagagaaatgttaaaaaggtagtagtgatcctagcatactcgtatatgataatattattattggtctaattaaatattaaatctcatataatttagaataaattgcggcataaatatttaatgttttagattttatacacttaaatacctaatatttatttttggaggcaaaaatacctaatattataattctcttacaccgttactaccacttgcgttattaactcataaatatggacacgcagagggccaaaatgcattatatttatttattttattttaaaatttaatattattaatatcaaaaactaaatactacttgtttttttaaaaaaaaaaataagaaaaatgcaatattaaattaccatagctgagtgaaccagtgtagtatatggacatgattattgaattgaagtgtcaatatcatgtgaaaattattatgag

SEQ ID NO: 383423 - DNA, 2003 bp, Cannabis indica
agtcttaaatgaggaatcaaatggtgcagttaatgaggaggagttagcaaatcctcttcccaaagagctaaatggtgacccgaaggaggatctcgagactttgcgcaacaacattcttgagtccatgactctagatttagaacccaactttgaactcactgctgagatagttagaaccggggtccttgttagcttcttcgacggcaagggtgtttcaaggtcaaggtaaaagacatccttagtcagatttgaaaacttaagggacattggaagttcaagaccatgaagccaggggtctggggcatatttttcgataaacatgaagattgtgcagatgttttgcgcaataggccgtggatcatcaatggaaaacttctcatcatacgcgagtggcctgcagatggagactggtttaatacggatatgaagaaggcgattttctggcttcttgcctcaggactgccaaccccgtatctcaacggagtaaattctcgaacggtggcatctaaagcaggaaggtttattcgaagcgatgcagcagacacaagaacagttgttaggagaggttttttaaagttccaagtggagattgatacttctcaccaattttcatctggtttctttttggataaaaaggggaaggaaggagtggatacaattccgatatttcaagctcccgaaactgtgttacaactgcggttatcttggccacgataagaaagtcttgttttcgctcaacagcttttgcttttcctcctgtcggagatacggtccctgcttatggcccatggatgaaggcagagacgacggtttttagtggttttaacactagaaaccaacttgattatttcagagaagcaagtggtcggacctataccccggcgagaagaacatcagaggttgtctcgaataccaaagacaaaggaaagcgaccgatcactgagaatggcagccaacctactttgcatcagactcccagtaacaaacccacaaagaaagttatcagagttcaggaaaactgtccaggagctatattgggaaaaaaattgaaagttgtgagaaatcccctacacgcccaacggttaatagcaaaaatcctctggttgatcatggacactcaaggaatacttttagaggcaggagaactcggtcagtttctcctagggtgttgcgatttcacaatcaaggtaattctagtgttatctgaaaatgacattttaaatagcttttcttcaagaccccctccaaatccagcagataatgggattctcaccactataatggcccaaactgggcccacttatgaccaaatgattgaaaagccccattctgaactttgttgctcaagacaaccccataaacaccctgagcccacacactttccttggcccatctatgctgaggaaattgggttggctgaggaattgatgggcccccctccagttgataaatatgaaccaacccctacattatttcatgatcctgtagacgtgactgaattgattcacccctgtccccaacataaaaaaaggaaagctagtcttaccttggtcccttatgttcaacacacccctgagaatactatggaattctcccaagaggtacctcatctcccaaagttctcatctacattggatacccctttcaaaatgggctcgggaccaacgcctgcttcacaaaagaatgataaaagaagacgaaaaggatctcgatcacgattgacaccagttaaggcaagacaaactcaagacaaagcgacaacttctacagaggaaagtaacagaaaatctcattgcttctctggaccttgttgaggttcatgtggaaagctctacaaaaatttttctcggggcgaggaggcggcccttatcaagcccccaacagcccctatgaagttgcctttcgtggaattttcggggactcgtcgaagagacccgacaccccaagccttaaacggtttgggttaaaaaatacaatccggattgtattttcttgatggaaac

SEQ ID NO: 383424 - DNA, 1168 bp, Cannabis indica
ttatatatttatgtatgagaactcttaaatggtatctagcacactttacatgtaatattattacttgtacaattaagtattaagtcttatataattaaagtatgtttgaaaacaattatgtagaaaggtaattacatgtaaaagtaattacactctattttaaaatataatgtataattaaattataaataataattgtatatgaattcttacttttaatgtttgacaaataagttagtgagcacacagtaacaatattaattatctaaaactagtaatgttgtgtaattatagtgtaattacatctaattctcataaatttataaaaattgaagaatgtaattgaaactacttaattatctccaattatataattactgtataattactggtttaaataaatacacaaaatcttataattacttaaaattatacttaattctaattatacaataacttttcaaatgtaccctaaatataatagttttttgaatatatccttaattaattataaagtcatatattttaaaaatacttcgctgctcaaaaataatactcatataccctttgaccgtcaaaatagtacaggtccgaggcatgttaaagctttgtgacatctgtagtgtagactttatataaagagtatatctaagttaatgaatgaacgttgtagtctttgtttaatacttttgtattgtaggcggactcgatcttttggatcatgttaactaaaatctccttaattaataagcataaaattaattccaactctcatttctataatggtactatgtttcacgtgagaactttaattattagaataagaaaattatcatgcatctataaaagtacatttagaaagttcttttgattgcaaatttaagtgtacatatattaataataacaaaatatataaattatttttaatgggtattatcctgagtaattttagaaaataaatataataaaaatttaattttaaaaatattaacttttaaaaataaattttaattcaataatcgataataaaaataaataaaataattgtacttaatttcactatttaattaaacaaatttctatcttttttacactattttaaaaagagtatatagtggtataagtactcaaagttttaaatttgtaatttttacactattttaaaaag

SEQ ID NO: 383425 - DNA, 1593 bp, Cannabis indica
tctctctctctctctctctttctctctctctcttttctttttctttttatccttttcgtttttttttttccaagtttcttctttttctctttctttttcttgtaacatttttctcttttttccctttttctccagaggtttggttggtcggtcagtctgctgtcatcggttgggtcatgcaacacctgaaacgagccttccgcacagttgtcatgatctctgtctccgcgttttcaagcattctaaccacgtcggtgaagggtggcctcacatcaggattggcgtcccagcatcgagtcattatctcacccagaacaggtaagcaatcattgggaacgataggacggacacctttgttgacaactgcaaacgcggcctgcactgctgtcatgttctgaaatgggagcatccccgtgataagctcccaaagaactattccaaaactgtaaacatccactttctgcgtatacggcctatgctggatcatctcactgcagagccgaattttccaaaaagagggagaaaaaaatcaccacattggaaaaaaaaacaagttaacaacataaaatcaaaataaaaaatcaaactttctcggaaaagtcattgcacaaaaaaatgtttcaccaccgaatcttctgaactggtcttatgtgaaaactataagaaaaagtgagacataaactcctgcacaatgtgattcagatgcatgtttgttgtaataaccacactaatagctgtcattaagatcgaaaccatcagacacttacttgtagattgaactaacacacctacaagtctcaaagacttgctcaaccatgaacatgaatatacaattaacctgggtacccactagaaagtggagcatatactatccacaaaacaatcacaagataagacaaaagaagttaagacctttatgctgtcatatttgttaagaaacgatagaaagaaagataagatcaaatgagaattctgcattaatcacgaaagttgtagtcactagaaaccagtagccttattccaaaagcagataaaatatttaaaagggggggccctattaacatgtgctcttgtgcatgatcttcacttcggacatcaaagaatattctgttcaccaaatattgaaccatcccaggatgaatatgagccacagaatattataaaaaaaatcacagaaaatgggatgaactcacaggaaaagagaccctagatgctagtatgatcatatgaaaactaataaccatttaaggacaaagttaaaaatcaaagaaggatagagattaacaccttggcctagaattggaaggaagattatacagatagctattttgaaaagctgcaagtaaaatgcactatgaaagcccatttaagagaatcacactgaggactattcataaatatggttgctggaacaatttatgattccatactagaaagagttcgaagtccaaaaccagctgcagttagtgtctggcgaagcaaccatatgaaagcaaactatctatgacatataaagactgacagtgatagactggactcacacaagcagaaactattcaggaactaacagcaaacaataaagtaaaaacatga

SEQ ID NO: 383426 - DNA, 849 bp, Cannabis indica
attaactcatcacaaagaattaaagttgcattttataaaattaaagactcaacaaaataaacataaaaataatggctttatgtaaaataaatgactttaatccataaacaaagataatgaaccacactatacaatcgataatgaaaaattgcgattaacaaatataaaaaatatgaaaactagaaaaagatcgaataaaaactttatacccttactttttttgacataacagtttcttaatcttaattatttaaaatacataattattaaaaaagactcttacctaatattagacataactataatgtttatcttgattccttgaagtatatgttctacttagaaatattttctctgtcttaatctttcctatatgatgcatggatatatatattgaggaaatataaagcttccataacattaaaaaaaaaaaaaaggctttacaagtcaaatcaaagaaagacttgaaaactcaagtcaaacaactagaaactcaaagaaagacaatatatacagctagcctacaaagaaagacttgaatactcaactcaaacaactaaaactgtaatataaaagaatccaaaggtgacaacaaaaaaatcagaattatatatttggttattgtcacatacatactatatattgaatgtttatttttgttctcttataggtgtgactatatttaatcacggtcatatacatattatatataagcataaaaattttacctttggtgcaggcttcaacggcaactatagatgttaataactctactgggtagggaaatttgaaattatatgcatattagggattaaaattggtatcttaatctaaaactatacataattt

SEQ ID NO: 383427 - DNA, 2139 bp, Cannabis indica
ttttttttttttttgtaaataaggtcctgattttagcaaaattaacattgtccttgaatgattgttatgtttggtggtttaaccactttgattgtaatactgctgctttgcagacagactcttatgattttgcctggcatgatactctttttcttcttgaaatttctcccagtgagtttactattaagattttgataagactttttttttttctcaaaactaaataaataaaggtctgatccttagtatgaatctccaaaaaaaaaagaattattaataataaaaaataaaaaataagccgttatatatacattttaatatatactagttaggccatcattaaaggaattaatagaatcaattactctagaggacccacataaaaaaaactaaccaatctcaatacatttttttattaaaaaaataaaaattattggtcagtgtagctagacaataaccacgttacaataataactcacaaaatttttaatcctatgtcctccacctcatcccaatcccaactccataacaagcaactcaaaaataccccattaaacttgcccttagggcacttgagacatatttattttttttttaaaaaaaaaattaattattttgaaagaagatatattattattattattattattattattattagaacattttattaaaccaaaataaagaaagttaagaaaataaggctgcctagttcaaaaaagcaataaagagtgtgagatcttcctagacgaaaaagtaaaaatatttttcaaaaacatgttctataaaactatttttattttttaattttttaattgagaattaaaattttaaaaacaaaagaaaatcacttttaatatttttttaaacagtttttttaatcaatattttggacttcgatgagacccggacccaaatcctcacacggccctggcgctgaaaccgtcctctgaccttaacccaaattcgaccccggacctaaacccgacataataaaatcaaaaaatgaaaatgaaaataaactttacagaacacacttttagtttttttttaaaaaaaaaaaaatggaaaacaaaagtagttaaaaataaaaattttactttcattttgtgattaaaaaattaaaaaacaaaaatgttaccaaacgacaccattattaaatagtagaactaaaatgaataaacttgaatacaaattgagcaaagtattctaaattgtatataaaatttaaagtaaattaaaaaaataataattcaaagatactaaaattaccactaataaatgacttttctttttctcccaaagaaaaaaaagtttggagacctaaacatacaaggtactgaatatacatatttgtttctaaatgggagatatttctttttgtaattttataattaattaaagattattttggtaattcatgtaatagaggcctataaatattcttattttcattagggttatagattattgagataatacatatagtttaggtttatcttgtactttcatgtatatataaatgtgaaaattaattttaacttatataacttttaggtcacttgataaataatgttaaaattatacatatgcatgttaccaaaaaaattatatattaatttggccggttgccactaaaaattatgaagcaaaaagttttagttttgtgtgattaaattaaggtacttttggtaacaaaatttaatttaattaatttatgtataattgtaaaatctaacaataatgaattgtaaattaaaactatttaaatattgattaagcttaattacaaaagttatagatatatttattaaacatgtaaggatatatataattaattataatgtttatattctagtgagaatatcattggaatgcagctctagctttttctaataattatatcactcatgcatgagctggtgtacattattattagatttattaaattagttatatattctcatgtgtgcatggtgaatatttccagaataaattatttgtctgttgtgccgcaaatttcgttttgtaattctctatttatttaatgtcacatttaattggagataataaaatagaataaaatagaaatgagataatttttaattttattcttttatttagttatatattaaagta

SEQ ID NO: 383428 - DNA, 1457 bp, Cannabis indica
ttctagccatggccttttcggatttgggtatgaccgcaaccttgagtgtgaccaagataagaaagtataatcaccgagtgtgtagtatagtggttgagattgctttgcattgatagaatcccttatttagtagctttttagagttttgaatcctcatgagataatattttaattctgaccttaattagggcagctccgatcgaactgcatgtagtatatttagtgtgtaatttctctccaactcagctgtaatgtccaccacatgtttttctattttgttacactgtacattacatcatttttacatttttctataatattaataatatatataataattttatatataataatgataaaaataatattttatttaactaatatcaatataataataattaaaaaaaaagatttagtgtaatatttagtattatgattggattgaaaaaaaatatatgatactaatttttgtgttagtacaatactaaatataggatatggttggagatgaccttgaaagtggcactcatttgagagaaataggtgacagtgtacgtaggtcatggttctcaacgtgggagaagccttagttggtaaccatcttaaaatctgtgtataaaccctaattcacctttgtcttcaacactactaagaagccaaaagaccggggataggatgtgcacctaatccccttttagttataaaaataaaaaataataaaataagagtgtatagttgcactggtttttcaatatatattttatttattatatatatgcatggattaaagtcatgactgtatattaattctagcttagtgtattttcttctagaatagcttgtatttcagttgaatatatctactaaaaatgaaatacatggtctttattatgtttacatcttgatgtttttttcttaatttgtaattattattatttatactacaaaactttcttattattacaatgactttaaaaatcagtggccattcgtgttttggtgagtcctgtcgacctatatatttatatgaggtttgtgatgttaacattgatgccgactatacataaattatgattatacatattcatgtatatatataactcttggctaaatttattaattagctgataactttttggtccaagttgttaggtgattttcgctctgtttgatggatcccctccctttattagatttttattagtgaaataattttgtttagggattacacgtatagtatctcatatttgacgttaggggtattgtgactgggatcgatgcccggtttaatggcttggtttaatgcagcccataatcacatatgttaaagggaaatttacatgatatactaacttttgtcattttcttacaaaaatactgctaggcggtattttttacttttttactgtgtttttttataagtttcatactgcagtatactgtgttaagttttactg

SEQ ID NO: 383429 - DNA, 1228 bp, Cannabis indica
aattagcaattgcaaaggttggttggtatcacgtgagaagcacgtgagaggagattggaggtagatagatagatagatagatagtagagatgatatggatagaaaaaaattagtaatagaatgggtaagcagagtgtgtgtggagtgggagtgggacctacacatggtatgagttgaagaaaatagtgagatatgatgatggagttgattcggtgggcgatatactcggcggcgtctacggcctaaaagtcttatgagcagacatcgtgccgcagaagggtgtctggcccttactaggcctgctccatgtgcagccctttatcaactactctatacccatttgggctttgagttaataaactactaaactcaactcaatgcccttcacaaaggccctattgcctgcctacaatatctaatatgtattgtattgtattgggtggaatggatggaaacaagtaacaagtcctctcacctcagcaataaatacagatttcagagctgccaaaatcagattttctgtggattgatttggtacttgtaataataagcctcgacttcctttaattacctactacctactctcatttctttttctggttcgttcatgggatgtatccaaaatatgttgtctttctttcttttttaagctacgggaagttaagtgtttatgtaggccgacttaaacttatttggggttgagtacaaaatataaaatggaatataatcggtttacactgaaatgtgaaaatgaaaccaacaaaaataatactacatcaaacattacctaaattatcagtttctaagacatttgcgtacgagtggaagcaagagtatttattaattttttttttattatgttagttttcttatgctgtttgtcatcttacaactttacaagtatcacaagtgtacgaaagaatactcatattaatttttatgttactctattttttaaaatatatcattaaattcttaattttcttttatcttatctaagatatatatacaatacatcttcctattatattctatatcattttctctatatatattcttttacttaatttaaatataaactttaaaaacttaagtgccgtttggtaacacttttattttttaattttttaatcataaaatgatagtaaaatttttgtttttaaaaaacaaaaaatgtgctctctaaccacttttgtttttcaattttaaaaacataaaacaaaaatgt

SEQ ID NO: 383430 - DNA, 2012 bp, Cannabis indica
atatatattataaaaatattttgtattccaattgaggtcacttcttggattatgtcgtactagactagttgagacatttacaaaattgcttcagaagctttgtagatctcccgaccattccctcactaactaagtatcaattagcaattaattatcttcttaaattattggacactaaacatattattttgtgattggttagtgatacttcttaaaaattattacattaaattatatacaatctgatacttacttataccaatagcaatattgacacataggacattacaaaaaaaaattatttttagtcacaacaaaatttttcactaaaagtaaaaaaaattgtgactaattataaattattatttctacgttgtgactaaaaatattaatcactaaaattacaatttgttgtgactaaatatgtttttagttacaatacttattttgattaaaactaaattagggacagcttatatctaaatattatgtttagttacaaataactctttttttttgtgactaaaagtcacttttatttacgcaaattttttttagtgcgactaaaatattgtcagtaaaagagatttttttagggtaaatactattttagaccatgtgttttgcaaaagttactaattggatcttctattttgttaaatgacaaaatggaccctatattttctaaaatggtacaaataggaccctgaactgatattttattaaaataaaacttaataataatttgatctaaaggtgttatgacaaaactatttacattttctgtatctgttcgtgttaggaattgtcttcaagttggttatattaaaaaaaaaaaattgtcaaaaattaagctcatgctcctatttttaccattttgaaaaatacagggtctattttatcatttaacaaaacagagggtccaattgataacttttgtaaaacacagaatctaaaatggtatttactcttttttttaatatatagtaagaatgtactaagcacccctattaattttaaaaaatttctaaattatatatgttatgcccctttccatttaatactatattatattatagtgattagtgatgagtgatccatgtagtcaaatcaaactttcaaaaagactagatgcatttttaagccgaacttttatgaacatataaccttttagtttaggtaggtggcaaaatatacatatatattgattttggaacatgtagtatagaatttttttttttttgaacaaacatgtagtatagaattgattcgttacatttactcacaatttacattattataaggtttaatacagaaaccaaaacaatgggagtgaatggacaatgtgagaacgagacatttggtcaaaaggccaagactaattaattaagtttggtatattttgttaagagcctataaatatatatcattaatcaaattaattacttaattaattaattgcctagtaatcttgttttcttcaaaagagaaacctaaatgtttttcactcatcacatgcaacccaacatcacactacttactttctcttacatttttataatctaaatatatttagagaaaagagggtttggtttttgtttttattattattatttaagaagaaaaaacaaaatagagaataaaaaaataaatggataattaaaaaggaaggttctggtggaaaagatagaagatgagactgaggaacttatgattgatttttatgagtcaaaaattggatgcacatggatgagcaataatatgctccttattgttataataattaaacccctaactaaattaagaattaacatgatctaattaagtggattatcaagcaatattattatttaaatataaaatctcttctctcttttcccaattaatctactctcttatattatttataataaatatacatataatattaaaataaaaactaatactttttttcttaaacccaaaactaaccccctccacaattctctctctctctgcatcatctctctctc

SEQ ID NO: 383431 - DNA, 1183 bp, Cannabis indica
attatttaaattatggttaaaactactcaaaaatcataatctcatctcatgaattattcacccacctcaatctcaatcctcctatctttttctttctttatttttaagcataacattctttcctttttctttaaataaaatttatatcattatattattctttctttttactttttacttcttctgtctctcttattttattaaagagaaaaaagaaatcttcaatataaatagtccgagtccagatgttgtgtggtcgtggtgatcatgttttatttattatatatatatatagaatatagtgtatattgtagtatgtataactatcattagagcataataataaaaacacaaaagaaaagagcagagcagaaaacgccaaatgtgtaatcctcccattccaacttgttcatataatactaataattatacaataatacatctttagctgggtcaattatttattatttattagaccagatgggccgatcgtgcttaaggtccagcccagccagcccaaatccttacttgccggcctttctttcttttttatcatgtttggctgagtcaattattattaatttatcatcactgagactcggaacacacccacgagacagagatgtgaaaagagatatattgaagggttaatttcacaaagggacaaaaataacaaaaaacggttttacggaattttaaacatttttacgaatttttttgattttatttacataaaatacgatctttttatgttgaaattttgttcatttgttgttaatttttgttatatgtatgttatttttgttattttttgttgttattttcatgttacttttatgttgttttcttgttgattttatattattttcgtgttattttttggaaaaccgtaaaaatgtaaaaaaacattctttgaacgtaaaaatgtaaatattttacaaaaaatggtgccttatgtaattattcctatattaaaggacacccgacctttgtgatactaaaactaccattagtattatttagggctaagttgaaaattactatttttattaatcaattaatcaaatttacctttaattttatatttcattgaaatatacctctttttatatgtattgtacccaaaataccttaacataagagagtcacatggagagtatcttgaagtgacaggagcaaaatt

SEQ ID NO: 383432 - DNA, 1243 bp, Cannabis indica
agaaaatagtgtaattttacaaagcggtttaattccattttcattctacaaatagtatataatattggtgtcttattccttggtaaatatgcaataaacatttaagatttctgttcataataattttaaattaaaaatgtatgttaattttgtaacaaaattagtaaaatcgaatactttacaacaaaattgttgcaaagctttaaaagattatgaattattataacatttcaactttaaaaaaatgataaaattcaatacaaacattcatttacagatccactaatcttgtgcaatgagtgacatgaagtgtaattttcttataggcaatctagtgttgcttagttaattattcaattaatcatttgggattttaaagggaatgctattttaatagtagagttaaaaacaaaacactatcataatattatttcctattctttttgtttactccaatgacgtatctcccaagcatgatcatatattcaaatcatgcattattgatagatttatacatagtttacaaacatgcttatgcacatatttatatatatgtgagtatcttattattattacttatattacacgactctattacccatgaaaagattctagacagttcttcaaaaaatgtaatattataatgattggtaaaataataataatagctagtagaaattggattttatgtatttatcattatgacattaattaggtatgaattattataatgaaataatgacagtggaataagttctcagccctctacaaaccaattctctctccatctatttaagaaaattaactacagtataatagtatagattcattcaaattcagaaagaatcttctaaatgaatatgacatataaataaaatgaattcaagataaagaaagaaagagagaagtttcctttttccactaatggggcctcttcttaagtacaaaggtgatattgggtgtgaaatagacacagtaaccacactaagcttagttgcatagcatttctaattaaacaaagccaaatcgctttgattcaaaaagttggcaaaaagatgagtgttagtgaaaataaaaaataaaaccaacaaacaaccaaatctctctttctttctttctatctctcattttctttctcttctataataataaatgaaaaagggaccaaaaaggtcatagcatttgctaattggtgtggtccctcctccattgcatggatgctagagttgggtgaattgagcat

SEQ ID NO: 383433 - DNA, 1876 bp, Cannabis indica
accacaaccacaaccacaaccatgccgtaaaatctccatcgccgaaacctaatcagaatttcctctcactcatcctcaaagccctcattatgatctttataacctcacttttcttcatcttcgtcggcgtagccgccatcctcttcctctgtctcgccggagaggcactacaccgtcgccgtcgccgaggcggtggtgagacccgtcccctcaattccacgtgtggattctcgcctcgtgacctaagaagacttccccaatttcgttgccgtaacgggaccgaaggcgagtgtgtggtctgtttggatgggtttagggaaaatcaatggtgtagaagactcgttgcttgtgatcacgtctttcaccgcaggtgtctcgattcgtggctggttaaggtcccggcttgtccgatttgccggacacgtgtagggttggattttggtgatacggtttcgtcgtcttcttcgctcgatttggctgaagaggctaaacagtggtggggattcaatgagtgacaccgaattcgagggtttggttaggcatgtaatgtaagttctgctaaaggctaaagctttggagatttttgtatgatatgttaacttaattgggtttttgctctaatgtataatatagtattagaatctaaattgaataagaatcgcagcatgtttttttttcttcatgcttatttctttttcatatgtttactattataatttcctttcaattgaacttaatttgcttaaaatttgataaataaagggttttaccagatgtagctttgtatgtgattgtgtttagcactttactgcttaaagttaggatttttaggagtgattaaagtaatagtgttgtcagtggcaaatcttcgtgagtctttatttctttactcgtgtgtagtttatgaagtttcaatgagatatgaaatctttatgtggagaatgatgaagatggttgatgagagttgatgaatcattctactctttagtggatttagtctagtaagtatggatctgttgaagctgcagttatgattgaggatgtctgtaactaccgaaagggcaagggcttgtgtagtaccgagctctgtaataatcagcttctcattgtgcatttttgttttaatgttgaataggttaattgtgttatttggcggctagaagatccatactcagtttcttaataatctcacacagtcacacccttaaggttgggtttaggtcgggtttgtttgttggatatcttgtaatcccgaagggcgagtgcttgtgtagtgccagagtgttctgtaaaaatcagtttttcattatgccttttagttttaatctggaataagttgattgtgtgtttttggctagaacattcacaagggaatataccttgtatggatactcagtgtcttcataattctcacatagttacaccctaaagatcgagcttatctgcataaggagatttgacataagtttttattagtgatcataaaaggctagcacagatggtaaggacaacactttagaggacaaaggtcatgcgtggtccttttctacacttaatgatatctgtgattctgcaattcagagtttttgtcttccgattttctttctccatttcatcctgtgttctcacaacttgttctctctatcttatccaatctgccttgtgtatcttactatgatgatatcacattgattgtttgttggacattaatgccttatggaggctgagagaagtttttccctatttacattgtaattgttttgagtattaaagatatctggatatttcactagaacttttctgacaatgaaactgtgaccaatgtactttacagctcgtactgtttgttggccataattcatgaaccccgtgagca

SEQ ID NO: 383434 - DNA, 2092 bp, Cannabis indica
gatagaaaaattataaaaaaaataaaaaaataactcacctaccattgcttgaagttgaccataggaattgtggcagcccagacaatcttctttagtggtcaagcaatgttgattgctgttcttggactgagaaagtctaatgagcaacattaatatatagagcattaatggagctgctgttaagtgatattgaattacgagattggaatgaggagagttatttttatggcttacatatttttttttattccagaatgtaaagcctgaaatcattgttcagtgtttaacctctgattttaggggtgacttgactgctgtggacacttccactcaggattatatgtatttgcacacaacgttgaagttgttaaacgtctccaatgaattgtttaagatcctcaagctgggtaagaatatatatatatatatatatatatatttcttgtaaatgtggatttctagatgattgtgctaaggtgctttcaatttttatggagatttaatacttataattgtttgattttgatttatctttggagagagaaatagggagagtaaagaataataagaacaaactgtatttacagaaacataaatgtaataaaagtatcttctatatctaaagatatatactttcttctttagtcaacgtatttttgcatgatttttttagcttgaataagtgttcaaagagtttttttaggtggtgcgttttttatctgcatagagtcgtatattctggataagtatgtgcctgtgacttgtaattttaatttgcgtattcttatgtttatggattgaatgtcataggctgctaagagaagtctggcctcaatccttggagaaagtcaatttaatagagtcgtcttaattaatccacagcaggccagagagtaacctaaggtctttttttcctttcaatgaattaatcaattttctttgagattattgaaattctttctaatgatacaatacaaagagattagtgtatagtgaactatagtactgtcactgtgagttcaactttccatcttattagtaataagaattatgattagacaatgtaacttttatatgatagaagttgcttcacttttgcactagccttccttattaatgtgtttatcatttttagagttgaaactatttgcaattttcttcaaattgaatcttcaagatcaaagagttgtttgacttaactaagattcatttttaccaagggtacgtgattatgttgatgtcttctattactatgtagtctttaatttgttttatgttgaagagctttactattatttcactttctatttttcatgaatgacttctgtcttcatatttctccttatgattatgtacatttatgtgtcttaggcagttgaagttcaataaattttgttgtgtctttgttggcaggtaagagttccactatcataggaacatatgtaagacaatacattatgcaagtcagattgtattaatctttattaataactgatactcaaaaatctagcaaagttctaaacatgctggtcttagaaaatcaaggctttaaagttcttaaaatgttggtcttacaaaattagggttttcttttttcacttcttgcttggttattgtacctaacttgatagttgcacttttgaaggctttgctcgggctcgaaggattatcgctattgcatctgtaaattattctactcatttgattaatttatttatatttatttatatatatatgtataaataggctttggatgtgatcacgcattgtatgaaatgcgtgactagtgactcacaaaaataatatatatatattatatcaacaaacatagtacaatctaaaaaagtgacatgtgttcctttaatttttttctttttctgacaactattattttaagccaataaataatagataaaggacaatattaatctaatatagccggttatactaacctgttgagttgacacaaatattttatatgtgctaggtagggatataagtgtaatttcacattaagttttcatgcatagagtaatctattacgtttttgagtgaatatcaaccacacctaaataatatagatgttactggg

SEQ ID NO: 383435 - DNA, 1780 bp, Cannabis indica
atagtatggattaatgctactaaaaccagatcaactagagtaataagcttaggttggtattatggctaatcatgctataggtacaaactttcaaatctcactttatacgcattggatgtgattagtagacttatgttaattgtgtgcatgagtgctcaattacaagtcagatatatgttgtgttatgttatgattttcatactgagtctgttgactcacatatatgcttctatgtataggtaaaggcaaagccaagactaaaccgtagtgagagtagagcttagtaacaatcatacatatccaaacatcttaacctcaagggttgcaatcttcaagacaccattggcttagtttttgaatatgtcgttagatgacatttttgatattgtataatttatgtatagtatacaaatagattttgagattccaaattgtaaatattttgttaaagtgttttatgttaattaaattttttattattacgaaaaattttattacacatttttatgttcaaaccctttgactggaaaatactagcataataattaagaaaataccgtaatgtgccttagctagtaagacattacaatttggtatcatgaggccaggtttgttctccatagaccgactagatatgtaaaatcatcatcaaagacaagctcaactcataattcagtatgcttttatatgctttagtagttttgaataagatagtacgagtataaacacaagataggaagcatgttagtagtaaaatagatgaatagtagttgattaagtttccatgttatgcagtatttgttgtgtgatttcgatcaccgtctgactgacttgacttatgaaatcaaaagccttgtcttatagaatggacactgacaagacactagaagttagggtgatctagttgtggctagaggtgatcgaggaggcaagaatccccttcttgctcccgaccaaggtacaggccatagtcgaggttgtggcagtaataatgctaatccaccacaaactttaccatattgagagtagagctttgtagaaaggtaagccaaatttcaaagacaagaggaggagatacaatgactcaggcagtaggctcctcctattttacctctttagaaggtgccacgagttcccatttgagtgttgccaattgaccaacccacaacttgtaaccaaatagaacaattatataaaaggttctgaaagcaaggacctccagtctctttgggggtcccaatgtgatgaaactcgagcagtggctgagaactatcaaccaaatcttgaactttattggggttaccgataatattgagttacttgtggtacttcttagttttaagaggatgcccttgtatggtaggagatggtatctttgagtcataatgtggcgactatgacttgggatgagttctaacgtttgttcaatgccaagatataatgaggcaacacgtaattctaagagaaagaagttcactcaattaactcaagagaagccaataccagtgatagagtatatgactaagtttgataggcttgtcaagttggccttggaaattgtgccaatagatttcagtaagaaagaaaaatacttagctggactcaacgccaaaattaagcatgacttgatgatcataagtgtaacgtccccacttcaagcctccattgggtccttacacccaccaaatgaatggctcttatacacgagtatgtcactctggctgctttctagactgatgactgaccctacataccaacacgagtgtttccagcatgcttt

SEQ ID NO: 383436 - DNA, 1363 bp, Cannabis indica
gtcttgtacttcataggcagtactataaccaaaagcatcattagtagtagcagttgtaagattttattattcaatctcgggtgcgaaaaattcgataatgagattataaatttgccaattaatgatgaggaagaagaggtagaggaagaggagtattcttcaatccatctttataaatggaaagaatcatcacttgggttagtacattatgacctgaatggtaacactgttgatttgtgctttaatttttgggtgatgaagaatggtggtgattggagtaagattttgaaacaaaaactctaagttccttctcttatgttcagtttcattatcttcagttcgttggagttttgaataataataataataatgaaaatgaaaatgaaaatggatttattttttcaagagatgtaatgaatgagtatgatctttataaggagttgatattaattgaccagtacaatcatgatcttgatgatgatcatgatcgtacattactacttaaggagagtggtaatcatgttcaatacattcaagcttttgattatgtggagagtttggtttcagtgtatcccattaatccctattaggggccctttttcttttctcattttttaataaacttaatttacaattttattatatggttaatatcttctttatttatttgtttaactatttattgttttctttttgaatttgtactcttgtatttgaataatactccaaatttactatttttctttgcacatacatctttgtggttataaggagagaaattcttcaaaatcttaagattgtaaaggtccaacattttaataaattatctcccaaattatctgtcatttgtttaattttcaagtgttggacttttctcacaataacatcaagctttggaagtgtaccatcctatatttgtaatttttcatcaataaaaaagaatgatgatgagaacaactttggtatttttttaacattaaaacttagttctcctatgctgaacgaatttctattatttggaatgtaactttatccatttatctagcaacaatctaatatataagagatatttcaagaaaaattactgaacttaatagtttggtttctttgaatttatcaagaaacaatttcaataaacaaattcctacagagtttagccagttggtatctctagatgctcttattttttcaaaaaaccacttttttaaaaaaattctttcaactttttcgaaagtggaacatcttaacatgttagacttatcatggaataacttgtttaagttatgttttgtataataattagtatattatcccaatatttttgtatttttttagcttactatatctatcattaacactcaac

SEQ ID NO: 383437 - DNA, 1799 bp, Cannabis indica
aataccattccctctcttccactacaacaaccacaacccaagaagctcttatttggagagtcttctaatcaacaatcattacagcctaatatctaagcaacaaccacaacattgactttcacactagcaactctgaatgtaggctgtactaataagcaatcaacgcaatctaatgatcaagcaacaactacaacaatgaattttgcaccaacaattcaacattaattccaaattccaattcgttttctactgctggtactcatgatgaaactcatgagtataatatggttgcagtcactaccataccatgttctacaaatactacccctgctgaatttaatcttgctaataccaatttaagataaaatgctatgccagccacttcgtcacccaatgagtctactttggctgagttgtacatgccaagtgttggtaacaaattatgctatgttgcaacttatctataggggccactattcataaatatgcctcagcatacttcaataccagttaccatgcaatccatttcttctcttgtctcagactcgatcattagtagcactattgctattaatgatgataaggaaattttttccccaaactgtatgtgctagagatagctagaaaatcagcctgtgagaaaaactctcaagcaatgtaggggtcccaaacctaccacctcaacttcagttttgtccactgaagaagagtcaaacaagaatgtttctaggttttcttttgatcattctagctccatggacaacttggcagaggctgctttccatccctgctttcagccatgaaaatcgtcaattggaatgcacgtggtttggggaatctaagtgcattccgccatcttcggttgcttgataaagagcaatatcctcatgtattatttattatggaaactaaagtaggaaataatgcaatttctcgttttcgtcaagctttaaatttgaataatggacttgaagaccctagagtaggattaagtggaggtttacttttactgtagaatgataatattcatgtaacacttctaaactttaatgcgaatctctttgactgttacatggtatgtgatgacagatcaacttggcacttctctgcatttaatggtgcagttgaaattcaaaatcacattcacacttggaaactcatggaacgatgtaaggatattgctcccttgatgccatggctggtcattggggatttcaacgaaattttatcgaacaaaaataaacttggaggtgctttaaggaatgaaactcaaatggataagtttcgaagagtccttgacaattgttatctaaatgagcaaccttttgaaggagacccttatacttggattaaaagaaggcataaagtgaatcaaggaaaggcttgtttggtgctttgtaaatgatcaatggcaatgcaactttcaacaattacaacacaacatctagattaatttacatcagttcatagggctattcgaacccgaataattccgcagtaagggataatgacataatgcaagaactgaaaaaaattagaagaaatttggacgagcttttatcactagaggagacatattggcaacaaagatcaagagtagattggttgcgatgcggtgataaaaatacaaaaaatttccatgctcatgcttccagtagacgattaaatagcgcaatcaaagttttgcaaagattttgatggtgtcatggccacaactaaggatgatatggatgatgttattgttgggttttataccctaaataaactcatttcaatataatcagatttgcttattaata

SEQ ID NO: 383438 - DNA, 4324 bp, Cannabis indica
atctccgactcccttgcccagctgcagcgcccttaataaggtgggattcaatctaagtaaaatttggggaaataatgttatctaaacttggatattgaattcaaacccaaaaagaaatttaaggaaatttggtttaagctgattcattccgtttctcgttttgacttgtgctttgcttaggtttttctcaaggcgaggaaagggaatttgttgttgaaagacttgaactttcgttacggagtaatggctcacaggttgcttcgagatgttgaggccgatggttgggaacgatcggatttccccataatctgcgagtcatgtctcggtgataatccttacgttcgtatggtatgtgtatctttgattttactacgagctttagggtttcttttttttttttcttcatattcatatctttgatgtttgatgttaaatgagaccattggcttagaattaaagaagtacaagtttagaattctgactaagctattttgtaaattgattatccaaacactttacacagcaattttcatcaagcaaaataagctaaatcttttacttattctatgtttttagctatctcacattcaagtacttgttttatgttgtgtgaatcatagtttctttgttccttattatatgtgattgtggcaatgcccaataagattcgtgattgtccttgccggagcagaatggatttctttagaatgagttagatttaagccaatatctgttaaatctttatatagttatgtaatttttactaatgctgttggttacataattcttgaaatgcagacaaaagcaaattatgacaaggagtgcaagatttgtacacgaccattcacagttttcagatggagaccgggtcgggatgcaagatttaagaaatcagagatttgccagacttgcagtaaagtgaaaaatgtttgtcaagtttgccttttggatttggagtacggtttaccagttcaagttcgagatactgctctttctattaattctaatgaggccattcccaagagtgatgtaaatagagagttttttgctgaagagcacgatcgcaaggtttgtttaaatttacttttatttaattgcagtaaacaacaatgttgaaactaagaaagaaatatgaagtaaatttacacacttatgatatccattttcttttttctttcttttcactttttaatcatggttttcttaagcactatattgttccagaagatttgattcctgagatcatctggattgttcctatttatgtatgttttgatgagaggattaagctgattaatgcaatctcgttgataattgtagcttgaagagagaaacaaactatatgtgtactgtttagtctattttattgcttgtggtatctttgttggaattgctaatcatgaagatggatgcagccacttatgtaccttttttcattaattgttgattggttcttaaatgcaggctagagctggtttagattatgaatcttcttatgggaaggtgcgagcaaatgacactattttgaagcttcaaagaacaacaccttattacaagaggaatcgagcccatgtctgcagtttctacattcgtggtgaatgcactaggggtgctgagtgtccttacaggcacgagatgccgataactggggagctgtcgcagcaaaatataaaagatcgatactatgggtatgtccaatagtaaataattttcaattcaattattaatgactaatttttgtgatgcctttctctccttttttctacttgtctacctctgtgttttttttggtgccaagaacttttttgctatagctaatctactaggtaattcatgttttgaatgccaaaaatgtttgtctatctctgttgctgatattattcctcattcggttattggtctttcatgtcaaaagcaagagagtgtttctagttaatctcttatctgcatggtgaagggatcacttatgttaattgctattcctattagtttaccgcaagacaatttgctcttttttcatcttctattgaaatcattgtattagaaagtcataagttgatgtgtgctagttgctagtttctttgcttggtgcagtcaaggtttaatagctcaatgatgcacagcttctaataagcctgaggtggcaatcctagacctgaactttgataaaagaaaacttgttaaaagtcatccagaaattataaagaaatagcaaatacattagaataaaagacttaatgattaccattcataaaaacacagtttcagaacaagaaaattgcctaccagtagttcatactacaaactaaagttaacaaaaccaaaaatcctaattgtagagtagaacttataaatgttgcagataatttgtaacttgatagtttgtctacatgttatttatctaaactacttttagttgatgattgtaatgttaacttgtaacttatttttcaatgtgaacagagtcaatgatcctgtagcacagaagcttctcaacaaggctggagagatgccgtctttggaaccaccacaggatgagagcatcagaactctctatgtgggcgggcttgatgcaagagtcactgagcaggatttaagagacaacttttatgctcatggggagatcgaatccgttcggatggtactacaacgagcatgtgcctttgtgacctacacaactagagaaggcgcagagaaggctgctgatgagctctctaacaaactggtaattaagggtttgaggttgaagcttatgtggggtaggccacaagcacccaaaccagagaacgatgcctccgacgaagcaagacaacaggcagcagtagctcacagtgggttattacctcgagctgtgatatcacaacagcagtttcaatctcaagaccaaactgcaccaatgtactacaacatccctcccccttctcagccagagcgaaacttttatccatcaatggaccctcagagaatgggtgctgttgtttcctctcaagagggtggtcctagtggatcctcaggttcaggtgagaacaaatcacaagaaaaggcgccacaacatgggcaacattttgcttaccatcctaggcctccgcaacatggccagtatcctcagcaatattatccaccatatggtgggtatatgcatccaccaccaccgtcaggtccaccaccaccgtatcagcagtaccctgcaccacctcatcattccgcaatgccaccacgacaaccccctcctccagggaaccagcagcagtatcagcattctgccgcttcagcctctgctccagcaggatctgtagcgtcgggttccaaccctccagggtcatctgttagtgctcctcctccgacatcatcatctgagcaataaaacttacatctttttctggattgttgttttatagcatactctatttttgcttattagctcactcttaattggcttttgtcttttaaattgtgaaggtctatgtattcgatttcttacttactacatccacaaatcttaatgattaattatggtgtttagctgattatatcaattagatgatgttcatttctttttttatataattaatttgaccaaactccttgaacttataatttggagttaaaactaaaacaataataaaattaacatccaaagaagcctgcctgtacaacttttgaaattccattgagataccagaaaacactcacaactagcattacagggctgtcatgatataactgttctatcaaaattgtcaaaaacatcaaacttggctgaagaagtcaatgaatgttaggttggaacaatagtctcaaaactctactgtctactgtatttttagtagtgccttgagaatcttgaagaggttgagatatggaattgtcattccttagaagagattattgaagaagaggatttagagttagatattaatgttgaaaattcaacttctctatctctaataagactcccaagataaaagaaaatggacttgtctacattacctgagttgagaattgtatctccacaagagaacttgcttgtaattagattagaagaaacaacttgaaatcagtcaaatcattggttagtaccttcatgagtggtgaaagaaagaagaaaatttcatctgattgggcaaaaaaaaagaaaaaaagaaaaccaacttggaacttgaagaatgttgctatgtttaagttattattatcatgaaactttttcatttggttaagtccttcaaatgagaagatagaaattttttcatttggtatacttgttatcctattttcttaatgagctgtctggtgtagtgttaggctattttagcctatgttttgg

SEQ ID NO: 383439 - DNA, 3132 bp, Cannabis indica
atcaactggaaggatttaccgttgtttgaagctatatgggagaattatcacaacatgcgacatcagtttcctcaattccaccttgaggacaaggtgaaagtttgggcggcgagcaatgataagccaccaattcgattcacttatactagaaggaattgtaagtaatgagtggatttgaggttgagttggttttaagaactaaataatattatgatattcatttattttgtttttgttttgagtgactttctatttctattttgatttattttgggaaagttatgtgggattaaaggagaggaaagagaagggaaaattatgtcttgaattattgtgattaagcttatgcttgggggaggtaccaggtttcttgaataaccagggagtttttgttacttttctgctgtgttaataacttccctcatatttcctagtaatttctttggctggaacagatacacttctggtgtgtattagcatgatagacttaagatacgttttacttatactaggatgggtaagtgtctttagcagctgatatgagtgggaggcgtgttttggtcatttctttgtatagggtgaactgcttttgttgagctgagtgtgttgtttgttgattatgcaagaatttgagtctatactctgcatcactgatctgaaggaacccatactgttgcttttagtttccattcaataatagctcactacttcttcatctgtttactgtttcattaaaattcaggtgctggtgaaagattatcgtaattggtgttgtagttttgctgttggtttctattctatcgagcaggatattatccaattccactagcatgcccgacccctcaactctataattctcatcgtcagctttaagaaaaaccataggcttgcccaagaatgggtctcctctcaaagtaattgactcttctcctaattggaatttcttgatttgtattttccaattagttatgtcaatctcaagagtggcaagctattgaatctttggcatcgcatttgagtggcctaatcccaatgggcaatggtgagaaatctccacttacttgagaccataaagttgtagaactacacccctacaaatgctttttgcctccgagtcacttggccccacagtctcctgtaaaattcagtctttaacacgggcagcaacaatttgttaaccaaatctattgacaagaaatgggttacttgctggtcttcaacttatgtaacaattgttgctggtctttgacttatgtaacaattgttttaggtgtagttagcctaatgactgaatttaatgacacgtttcaagttcaactttattctcttgttcttggttaatctcagctgcttcttcatcctcatcttcatcacgagttaccaatacattaaacttctttctctccaacttgtttccataatatcgctttctatcacatgatagcaaataccctgattcttcttttcttctatctccaaattagtcaaccaattatattacgtaggaaattttctagctaagttccgtcccttggagaggacttactttcttacaaactggttagttgttgggtgtagcttgctgtattcttggtatagctgtaaatgacaagttgtttccaatcttttgagctaattccatgacatttggcagcagcgatattatgatctgttgatctgaaattaattatttccgatcttttgatctgttgttgttgactattagagttgctttggctttttcctctcttagatgtgagaacgtaagtcagtagcgtgcaggaatgccccattgcaagcttattattaacttactagatccaccaactaaaaataaaaattttacttaaaaacaaatggtctccttgctcttcttaaaaatcttcctgacgagatgactaaaaaggttatcttctttctagaagactaaaacatcgcacattaagacactgtggctgccttctcaaagtcaattttacttgtcacccgtttgctctaaaggtgtttaaacttaattactttgttgacaactagactaacatgcaaaatttgtctaccttacccactagaaaagtttggctaattaggaattttatccctcaatttttgatatgtaccaaatcttgctctccgaattttttagtccattaaaaattctcctcgaactattatgattagtgaattgaattttgtctaattttactagcggaagctttacatggatgaatgttcagagggcacaaattggtccatgtcaaagtttggaggcatgatttggtagatatcaaagcttgtggggcgcaatttagtacatggacaattgtcgcgttagtaaaattgaacggaatttgacagaagtcattgaatccaataatctcaataattcagagaacttttaacgactaaaagtttggacacaaaaatcataattagttgtctcgcctaaaacttcccggactcttgttgagaaccttagatattatattgaataagttattaatctagttgataggccacttcttgaatcaatcttttatcgaaataaatgtctcgtatttacttaactttcaaaaaacctatgaaagcaaagttgctctgtacctatgggaagcagtgcatataaattatggattccattgttgactattgctggtgactcccctcatcaaaagctttttcaaagattttcaactttatttaagggggcaagcaagcaccacaagaaaacgattgagaaaactcagatctataagttcctggatggtctcaatgttgagtttgatgaggtggggggaggggttattgcaaggcagcccctgcctccaattggtgaagtattcgctgaagtcagaagagaggagagtcaaatgagtgttatgttgggaaagaagacacatacatctgttgttgaaagttcagcgctcgccaccatggaagtagcatataacaggaacaccccattcgtgtagaaaacttatgagaagtcatgtgtttgatgtgatttctataacaaaccttgtcatacttgagagacccgttggagaatccatggcaaaccagcaaattggaaaagcaaggtagagagaggaaaggcaggccgaaccccttctgcacatgaagctgagtccagcc

SEQ ID NO: 383440 - DNA, 1130 bp, Cannabis indica
gaatccaaggctgattaccataagcatcatagggactaccactgaccacaaagccatcatatttaggcaaatcttccaactcaggaaattctccttcaacaacctaacaagtcccatctctctccttcttctccaaaagcttccacaaacacattcaagtaacctccatacatttttttcacatactcagagtctcttgcagctaacaaaagaccaaatcttttctcaccatgatcatcatctccaccttcattcatcaccatcctcatcatcatttccatatataatatataattattatatagctagctcttgagttgatatatatactttaagaggggggacatagttatatatgtatatttatagggcagacatatggatatattggaatatttgtgtatagtagtatttaagtatgaaaaggaaatccaatatataaatccctactacaagatactactacttattgagttacacataatatgtaattttagagagtttaattggtgaaaatagatttttaatattaatgtcaatttggatactgattctcttgattttttttttatgtctaattaaatggcttattattccatatatggtgccaaagaaaatttggaaggttggattgttattttggaaaaagataaaaatgttattgtagcaaaagtaactaattaaaaaaatgaaagtgtatcaaacactaaaaaattgaaaactaattatgtgtatttataagagtaattagtgataatggattctttttagttttagtaattgaataaatgctatattttagtgtttgattaaatttaatttataaaaatataatgattttattttaataaacttttgtaaaatgatgacatttaaaataaagtgtcgagtggagttttattgtaagtttttgacccttaaatattcagaacttgataaatattattacacaaccacatacgatggagaggaaaacaaatttatttaaaagatcattttatataatattttataactaaaagagattatatagaatcaatcttactattcaacaatcaaattatatagaggtttctcaaatttcatttcttaaaaaaaaaataaatactattttggaccctgtgttttgt

SEQ ID NO: 383441 - DNA, 1004 bp, Cannabis indica
ttagtcacaacaagtattgtgactaaaaatacatttagtcacaacaaattataatttttgtgactaatacttttagccacggaccttttagtcacaacataagaataataatttataattagtcacaattttttacttttagtcacaagttttgttgtgactaaaagtaagattttttgtagtggcaataaacaaatgagggatgacatgatcttctctaaaattgatagggtacttgcaaaccagagttggcttgagttgtattctactgctaaagtggtgttgttaaatgaaggtctttttgaccattctcctgctgtcctgaaagttcagaatgtccttctcgatggtaaaaagtcatttagatactttaggatgcggagctctcatccctcatatcctaatgtggttgctgaagcttgtaaccattttattcctgtagcagtgatgtttcaggttgtatctaaactaaaaatactgaagcaggccctgaagaagctgaatcaggaagcttttgtggacattccagctactgctgctcaagcaagagatagactaaatcaactccagcatgcccttcatcagaacccccttgaatttgtgttgcagcaacaggaaaaggaagctagagcagagtttacttcggtccaggctgattatctctctttttgcagtagaaatcaaaattaaattggatcaaagatggcgattctaattcagcttttttccacaagagtattcgaattcgtagggcacaaaacagagtgctatctatccaaaatgctgctaggataaaggtttatgaaccacagcaggtaaccaaaacctttactattataaatcattgcttggttccaaattgagcaatatgatgcatgttaattctgatattatgaatcaaggggctgtgttatctaatgaacaggtagctgctcttcttgctgagtttcagttgaggaagttaagtgtaacgccctaaaataattaggcacgctaccccaaaa

SEQ ID NO: 383442 - DNA, 1171 bp, Cannabis indica
tatacatatgtatacagtttgtttattcataatactttatattctattttaatgtttgtttaaaatatttatacacattagtgagatttttttatgttacacgggaagtatgtgaaacatatataatatatatctgaccgcgcgttcatgcctatttgtaattaacacttgagaaatgtgacttagctactaagtttacttaaccgcctttaaaactttgtattgtattgagagagatatataatacatttcaatttcttcgcacatttatatcaatatatatattatataaaatgtacaattgagtgttgtgtttgttttatttggatatttggatcaggagtaagtaaagatgggcaaattcgtcacttctttcacagaccttcaaaggcttacacaactggcacaagaaaacgtaggaaggttaacacagacgaggatggaagcgaaacgagatggcataaaacaggtaaaacaaggcctgtattcatcggcggaggagtgaagggttttaaaaagatcttagttctatacaccaactacggtaggcaaaggaagcctgagaaaactaactgggttatgcaccaataccatttgggcaataatgaagaagaaaaagatggggagttagttgcctctaaagttttctaccaaacacagcctagacaatgtggctcatcatcatcatcctccatcatcatcaaagacccatcaataatatttgatagaggtagtcctggattcgatgatgaccataatcattatcatcatctagcaaagaaggcggcacttcatcaagttgagtacaattatagtattcccaataataataataatcctttccttaattataatgatcaagggtcccataatagagagagcccaccacagctaatccccaatttggttgtccaaggtgatgggtcttcgtttattcatcgattaaccacagatgcaagcaaaggaaagctgtcttgaataagataaaataatacacatatatatagtagctttatttggtagggtatatatatagaaccatgacagtgacttttctggttgttggggtatatatattgttgttgtgtaacagtccatcgaataaattatggtcattataagatattagatgtttctgatagggaaaagaagagtggatgattgatcgaaa

SEQ ID NO: 383443 - DNA, 2501 bp, Cannabis indica
gaagcttaaatcattgaaagttttctttagagaactgaacaaagagcactactcagatattcaggtagcagaaaggaaggcaaggcaagatctagaagttgtgcaaggccagctacattagcaaccattagatatggaattgcaagcaaaagaacaagaagcgatggagctatttgttaagattcacaaagactattgttctttttggcacaaaagtctagattaaattggctcaaagatggtgatgaaactcagcattatttcactcaagcatccgagagagaaggtaccataacagcatcttctccatatcagatgttgctggcactagagatgaagacccgaagggcatcactaaagctttcttagatttctatcaagacttgctgggatataagatggtgagtagaaggccagttgaatgcaatctaatcagaaaaggggcgtgtataactgagcagcatactcagattcttactgctgcatacgcaatggaggaagtaaaagatgcagtctttagcataccagcagtaaaggctccgggccggatgggtacaacaactccttctatcaagataactgggaatttatcaagcaagatgtgtttgaagctatcacttcctttcgccacacaggccacttgctaaaggaattaaattcaacaattatcaatcttgtgccaaaaagtaagtgcccgaatgttgtaagtgactatagacctatagcatgttgtaatgttctttacaaagttgcaactaaaatgggttgtagtagattgaagcttatcctgccagatactatagcttaaaaccagggagggttcataaaaggaaggttcattgcccacaatatcatgatttgccaagatttgataaggcactaggggaggaaaaaggtaaattgtatgattacacttgatctacaaaaggcatatgacacaatagaatggattttttttagaagaaatgctacatgcctttcaattcccaagttcattcatcaaactgattatgacttgcatcaccactcctagattatatcttctatttaatggatcattacatgggttctttgaagccaagagaggacttaggcaaagtgatccaatgtcacctcttcttttgttctaggaatggaatatcttagcaggtttatgaagaaaataggtgataaagaagactttctttttcattgaaagatagtcggggattaaagataaactatttgagctttgcagatgatgttcttttattttgcaggggtgactttaaaagtgtctatctgatgctaaagggccttaagctattctcaatgacctcaggtctacaccctaacaaaaggaagactacaatttattgtagtgggatgaatgagaatatgaaataagaaggattgtggatgcttctggattatagagaagtaatatccctctaaaatatcttggtgttcctatctgtgccaacataattccatcaacttaatgttcaattctaattgagaagatgatagcaagaatcaaagtgtggagctcaaagaatatttcttttgcttgtagaactgtgttaattatctcaattttactaacaatacgtgcttataggagccaaatccttattcttccaaagaaaataataaaagagattgagagtatctgtagaagctttctctggacagggagaagtaatatgaatggtccaggcaacattgcttgggagcatctatgcaaatctaaaaaggctagagggatttgtttccaagatattgcaaagtggaatcaagctgctattgcaaaacatgtttaggcaattgctactaagatggatagcctatgggtgaagtgggtgcatagtgagtatattgaaaatgataattggtgggggtataaggcccccaattatagcagcttgtattggagaagagtagtgagcacaaaggacttggtgatatagatcattcccccttatcagtttgttacatcagatttcaaaattgctactttacacaagttgttaaagcaagaacacagggatttttatgtcagccaacaagtttggagcagacttaatgttccaaaacacaactttgttctatggattgttgttcaaaacaaaatgagaacaagagaccgagttcagcaattccatatcacagatgaggcaaactatgtgttgtgtaataatgcagtagaaagtgtgtgtcacctgttttttgattgtatgttttctcagccatgcttgcaggatttgaaaattggctgggatggagatcaaaagctaactcactacagggtgtactgagatggattaacagagcaaagcagagtaaattcaagaagagttgttatacagcttgtatagctgcagtagtttacaaaatctggcaggcaagaaataaacaatactggtgtaaagaaagcactgatctgaagctactagtgcaagaaatcaaatggatagtgaaaaatagaattacttgtgtaatgcctcaatgtatagatcaaa

SEQ ID NO: 383444 - DNA, 1332 bp, Cannabis indica
ctgaggaattacataagacccctacttttattaactaaatcacaattcacaataatatatcccttttataaaagctttatttcagttaatttgtactctacacatgctgatgttgttatttttataacgctcaccaaataagcagtcaaatcccaaaaagttgggaaacacacacttaggtagggcagcaaagcaaacaataatcttaatatttattaatttatgtatgtatcatgtatgtcatcccatacgtaaacgtaaattaaactgatcacttattatatattaatatgaaagccagtacagaatcagattgattcaggtatttatctatatataaatatagttatataatatgacgatgatgtcatgatgatgtatttcgtgctggccaaaatgtattcatgttcaaccacgtttggaatgaaaaatagggtaatatatttgaaaaggctattttggagggagggaccatgtactaaatgtttcattttcttctgtcatatatatacatatatgggccttaaatagccttacattacactcttttgcgtaacgtaaaggacacccaataaggccctcaatcccatgtcatgagaggggaccaaaacaacatagcatgatttattttgtaagttgaaatgggtgaaagaaaagctattaataatactccccttatttggttgcatataatattattagcaagttaataattagccattttgatcagctagattctagctagcatattctattataataaaataaataattattagggtttacagctcatcctaacacagatccagtattcttgacatgcatgaaacagagtttattagatcgatagattcttctagcttcctattttattttcttcaacctttgacaagaattgattgtttggtaacacatattcttttccaaatgctgataaattcacttgtttatttatatagtagtgaggaatatttcttttttcgacccacatgatcccatgcacatggtttttagctttgtctagatttaggattgtgggtgacatgcagaagattaaaaactatgatttttttttttaacaattgcatgagataaaaaaaatttacaccaaatactaatttttctctaaactatatttatactttcacaagaaaatttttacatttatacttttcttgctttaatttttttttttttttacttttttttactatattaaaactttcaaaaaaaacttttttttctctttttttctttttagttactgtatcttttcttttctcttttttttttctctaatttatctttgtatatatataatatatataatga

SEQ ID NO: 383445 - DNA, 1816 bp, Cannabis indica
tacaaacaaattaacacgcaataactcaaacgagtcctaaaacaacataatatactaatataattatatatgtttcaaacaccttatttattctatataattaatttttttatatattatgaaaaaaaaaaatgagacatagacaaggtaccccaccgtgatgggacagaaaaaaattattaaacctttcatttaaaaaatattacagtattttttaaaactaaaaaaaaaaaattgtaataattttaaatgtaaaaatatttttttgacatgaagaaggggggtgggctctaggcccagcctaacctgtcttaaccaagcccaaatctaccactgtatgtggaaagaaattgaagaatacttactttttttatacataaatcaaatttactttcaaataaatgagtatagtacttaaattatcctcatactcacataactaagacataatttcaaacataataaatttgtgttatttgttgatagatgtgtatgtttgtggaaaaattgagataaaatttttattagaaaaaataaaaaatatcatgaaatgaaatgatagaggtaaaattgatagaatgatagaaaaaagagataaacataataaattttaaaagagagcgtaaaacttaaaaacatcaaattaaaagagatatgtagtttccctcgtgtttatataattacgtaccagtataaagcctttaataatttgatcagtgtagtaatcaggctgggactcttgcaaagtaagcatatgatgaatcatactatccttttgaccactcaaactactcgtcttactcctatgctcatcgatcaaaccttgtaaaaactcatcagtattctttgcaagtctcttcactctcttctcaaaactattcttaccaccaaaccaattcaaaattggcaaaaaatccccgggattcgccgccccaccataggcgacaacctttttcataatttccctaaaccgctcggcttctttctgatccgaaacattgtccccgtagtatcttttttgggcaaccattctcatcatgatgttataagtcaactctgacaataatgatttcatctctacttttagaaactgggcttttgccggcgcttttttatcaggaatcagcttgagaagaagtcttttgacttcgtctcttctgattcctgaaaaggacttcagacgagtcgaggagaagatctcaatggcgcctatgcggcgtaggttgcgccagtggtccccgtatggggattgggtgatggttgtgtagttgtaggctaagtgtttccctaggaggagaggaggacggttggccaaaacgatgtcgtttttggtgaagcattcttcaacggccgatggagatgatacgatgaccacgtggcgcgatccgaaccatagagagaaaacgtcgccgtatttgaaagaaaggttttggagtgttcggtgaaatggttgtttgatgagatgaaggtggcctatgattgggagtgcatagggtggagttggtggtagggttattttggtaatttttttactagtaatgatggaattatagagcttgaaacctaataataataggattatggaaatggatatgtaaagcaatggctcttccatggtgttttgaagtttttcttttggatagaaatatagatatatctatatatggtgaggattgtatgagataaaatgtatagatatatataatatggctaatagtaataaaatataattgttcaaagttcaagatatgatgcaattcattttgacttgttttgtgtagagtttgtccacattgaaaaaaaaaaaacaaagaag

SEQ ID NO: 383446 - DNA, 1788 bp, Cannabis indica
tagtcagagcttcatttccaatgaaagtcttcctaatcagtgagtacaagccatgctttagttcaccttttgtcactatcattgagcccttggatatctttaatattccatcttctaccttgactatacaaccaattttgtcaagcatacctgacatcttggagagtcctaaaagttccatcaaacatctttatcatgacagaaccaatgccaagaatattacaggccttgtatttttcaagtaacattgttcccgtaaaagttccttgtaatctttgaacatttccttcataggacacatgtagaaagagcatattgagtctaggatccattcatcaccacttccttcttttgacactaccaaaacaataatataatgatagtaatgacagccttgttcaatattcgtcaaatcaagagccctggtgcagatggatttggagcgggtttcttcaaatagatgcggttggaagtcggagatgaaattacataagctattttgattttttttcaaggagggttagattatagaagagttgaataagcgtgtcatctcttatatacttagccataagagccatgttatactttttaccttcttaaaaactaagacttccaagtttcttaggtaagcaagcataatagagatgaaactagctcctatttccattaactcctcaaaggaaacttctacacgatttatcaatggcagcagtaatcttttgaggcaaaaagaaaaagttcatccagtaatttcaaatgccaagaagaactaagtgaataagttgggctctcctagcaaatgaaagatgacagctagcccaaccatgcaatcttttttaaatcttgtcaagaatgcaaccacatgttgatgccttttatttagttggccagatgttcacccccaaatatttaagatggaaagctcattcaatcattttggtaatgtcaagcataacttgctttatttcttctttaactcctccaaaataaatagtagactttgaaaagtttgcagccaagcccgtagaggaacaaaaaattgaaaaaagcctcataaatgattttgagataagaaccattacctttgcaaaaacttactagatcaccaatgatcagcaaagatttgcacattggatgaacacaaactctttggtcagcaaggcttgactaagtaatctggtgagatactccacccccaagacaaataaaaggggaaaaatagaatctccttgtctaagacctttctcccctttgaaagaatcatggagtcttctattaagcataatccagtaagaagttccacaaaggcaaactaggatccaatgaataaacttgacagaaaagcacagccctttaaataaatcttcaataaacccccaatcgacaatattataggccttagtgaaatcaaccttcatcaaacaacgagttgatatgcttttcctagcatagcctttgagaggatcctaaaaaattagaacattatgagcaaggagcctattctaaataaacacaccttgattattgtagactaaactaggaaaaatctcactcaatctcgaacacattattttttaaatacacttatataaagtgttacaacaagaaataggcttgtaataaacaccagaagaaggattctcatctttaaaaattaaagaaaagtttttcaaaatgagctatctaaacaaaaatgagctatctaaacaaaataagcgaattgtctaaagtcggccccatgcgcgcgcggaatggctgcttgcagcctccagcgccgagtaatct

SEQ ID NO: 383447 - DNA, 873 bp, Cannabis indica
gagagagagagagagaggtttataatgaccctgaattgaaagttctattacttggaatgtgtctttaaatacaaaccctttgctgtaattttttttattttaatggaatcatttattactgttttagtatgatctagtgactaatatcaatttttgcagttgccaatgatatattattacttaatagaatagcttgaatgattgattgttcttcaattgttttgttaatgtattgctgcttttgtactctttgttgttgcttatgtgatttttacttgaatgtgtaatctttaaaatacacagcgaatttgattattcacggttttcatctaatttttgccaaaccacactacgtgttacaagttggggtaactcttggaagttgaagtttgcaatgaaacaagctttttttccccattttgtgtgcttgttactaatgacctttcaatcattataatttatgtaggctgcattactaccaaggagctgggtactgtgatgaggtcattgggccagaacccaactgaggcagagcttcaggacatgatcaatgaggttgatgctgatggaaatggaaccatcgacttccccgagttcttaaatctgatggcaaggaagatgaaggataccgactctgaggaggaactgaaggaggccttccgagtttttgacaaagaccagaatggattcatatctgctgctgagctgcgccatgtcatgacaaaccttggagagaaactcactgatgaagaggtcgacgagatgattcgtgaggctgatgttgatggtgatggtcagataaactatgaggagtttgtcaaagttatgatggccaagtgatgaaccattactgccaaatgaacttcaccctcg

SEQ ID NO: 383448 - DNA, 1929 bp, Cannabis indica
acatgctgatattttcatggtttctatttgtttgcatgataccaaattgtaccacactctagtactccatttttttcctctgaaaggaactgtatgagtacagtttaacccagctttttactcaataaaattgatgaaaccagaaatatattaatggcagtcacataaatgaggaccaggtcctcagacctcgataacaaatttattatctcattcaattaattctccgaacaacaccaaaaatttaaaaacccaattggcatttatacttagtatcatcaatgcagagagagagaggagagccaagccattaagggtcagagcttcacgttaaagaaaacactttttaatactgtaaaattatattccaacttcggccaattcgtctaccaataacaccttaaatttctctcatgaaaccacaatagcaaactctattagtcctgtgacttctcagagtttttctttccccaaaccctctctttcatgtgatctcttcttctctcacacccttctccatcatcacatactcttgcctgtgattctgttaataatatatattgattacatactgtacctcatgtatatttgagtgtatcagtatacgtggcactcttctcccctttatatatattctcctactttctccaacttcatcacaaacgatctcgccgtacaaatatatattcttttgttggcttacactgggatttcttcaatttgtacaataagtcaataacaaagagaaagaagggtttatagattatattataagccatgaagggcaacattatttgtgtggctgtagttttcatatttgtgctctcagtcccggcctccatgtccattaggaacatagcaggtatgccgatatatatacacttttttttcgttttccatttacattcatatatatatataaattactaattaatttttggggttttgtaataaattaattaggtggaggagaggattataaaaatgaagaggtagtagtaatgaagcgagtaataccagagacagagattaaagtagcaggttcgagattgccagattgttctcatgcgtgtggatcatgctccccatgtagattggtaatggtcagcttcgtttgtgcttctctcgctgaggccgagacttgtcctatggcctacaaatgcatgtgtaaaaacaagtcatacccagttccttaattttaaaactctcacacacacactacgtacctactgtttacttttttcaatcctccccctaacatctaatatgtaaagtagctagcattagttttagtagttagtatttcgatctccattatgatagtgaattaattttgttttgtttctttagaaggaagttgttatggcattaatttgtaatcacagagtttatagttgttatcacagtttttggagggtttttattattatcgcagtctattattgctatatctgagatttgtatcaggaaattccaacacttaatatcgatcttcacttttattttcaaaatggaataaaataaattataacaagagaaaatgttttgattttatccttattatatactgatgatatatcatcttattaaactttattttcttgaaagaaaaaaaaatatattaaaaataataaaactggaaaacaaacaaatgacaaatgacaaatgacgaacatactggcccataaaggagaaagaaataattacacgaccattgtccgtcttcaacggcggtgtcatcatcataaatgtccaattagagcatctctaacctcacactaaatttatagtttcatgcagggcatttccaatgctaaatattaaatctgtattaaatcaacacaaaaataataaaattttaaaaacaaattttttttttacaattacaacactaaaaattacactaaaattatattatttattattata

SEQ ID NO: 383449 - DNA, 3710 bp, Cannabis indica
aactcatatagcatcctaaattattctgtgtcaatgatcttaccttatatattattaattggcaggggttaggggctgttgtgggtgccttgtctcgcaatcttcatgaacttcaggaccgtcaaggaagctacttatcaatatatgatgagactgctcttccactccaggtttccttctctcttttgctggaatctatccaaaatattggttttacttattaacctttacaagggatcaatgtgcaggatcctgttgtcgatgcaataaatgcagctgtagacaggttaacctattcaacaaactttcttaccttcttggcacaacatgcattcattatgcaagaagatttgcctactcccaccggggaacaacctgatgacgggagatatcattttatgtcacttctcctgaacctagtaaacacatttctctatatggtaaacacatacattattgtccctacagcagatgactactccatgagccttggagctgccgcaacagtttgtggggttgttattggagctatggctgttgcacaggtgttttcctctgtatatttcagtgcatggtcaaatagatcatactttaaacctcttgtattcagcagtattgttctgtttatgggaaaccttatgtatgctatggcttatgacgttcgttcaatttgggttcttttgattggtcgtcttttctgtgggtaagttttgtttttccttgtagtttctttcctatgcttttctgattaatttaacatgaatttctgtctaattttcatcatttatgaaaataatgaactatattttaagaaatgaatgggagactggaactatacgatcctgataactcttattttctgaatttcagattgggttctgctagagcagttaataggcgctatattagtgattgtgtgccattaaaaatccgcatgcaagcatcggctggttttgtcagtgctagtgcacttggaatggcttgtggtcctgctcttgctggcttacttcaaactaattttaagatttacaagcttacattcaatcaagacactttgcctgggtgggtgatggctattgcatggcttgtgtatttagtttggttgtggatctcatttagagagcctgcacgtgaatatgatgatattcctactgctgagacatctaatgctgctgctggttagtgattagaaaatagtactactatataatacagatcaaacttgatttacaattagttgagtttattcatttaccacgaaatatttaatgtgatgttgaactctttaaatggcagaaaccgtagaaaccaatgggcttgaggaaggtcttaaacagccattgctaatcactttagaagacaaacaaggtgaagatgaagatggtgaccaagaatttgatggaagtgaagaagctgcagaggaatctcgtcaacctgtcacttcaattggggcagcatatagattactaacaccctcggtgaaggtattgtgtgaacctcttattatgtgctgatgtcattttaaacatgaaatacttgagccaacagaaatactaaaaatttggtcatacatcaatggattttctgtgttctcgtgtctggcaagaaatgcggaaaacatgtagttgtatgtgtattaatcatattacctagttgtaattttctgattggattttaatccgttcaaacttttgtatcatttttcaggttcaattgttgatatatttcatgctcaagtatgtaatggagattttactctcagaatccagtgttgttacgacatattacttcggttggtctacaagcagcgtagcgattttccttgcatgtcttgggctgacagttcttccagtaaacattctggttggaagttacattagcaacatgtttgaggacaggtactaatttgtcattttatgtttttgtttgatggtcagtttagtaccacacatgtttgtgctgattacaaatgcaactctttccatttttctgatgcaggcaaattttattggcatccgaaattctggtttgcctagggatacttctaagcttccacataataataccatacactgttgttcagtatgtctgctcgggtctcatcttgtttgtatttgccgaagtacttgaaggtaagatatcagacagtttaatttgactatcattttaggaaatcaaaatgatcactatgatgccaaaaaaaaaaaaaaaagtagcctacgcattttgctccatgaactaaatgaagattacgaactgtcatatatgtgtatgtatattgtactattgcattgccaattccagccattgatttttttcccacctaattctaccctaacaggaaatctatgtaggaattagcgaaatacaaacccgaattttttgattgagctatccctttactatttgaaatgataaagtggagattaacatagctatctatctgatctgtatgtgttcttgcaggtgttaatttgtcacttctgtctagagtcatgtcatcccggctttcccgcggaacctacaatggtggtttactgtcgacagaagcaggtacacttgctcgagtaattgcagatgctacaataaccctggctggatttttgggggagagtaggctcttgaacatcacccttctaccgtctcttgtcatatgcataggttcaatcgttgcaacatgttgtacctacaactctctatattgacccttattcatatatcatgtatcaaagatggtctctcattggcaatgccttgtcattttatttgttagattttcagtttgatattatcatcatcattccattgtgtatatggtcattttattggtaagaaatctagttcatgagtatctttctccattggtttcttaattattttcctagtaatgtagacaactaaaataattaagttaatagaatgaaaccattttcggaggagttaccaaatgcattttcttcgagggttgaaccgtatataatttcattgattgattgattgattgatgagaatgcaacatgctattattgctttaagctatttccaactaagaatgaaatatttagtgttgcaccaatacagaaaatgtaatactttagcaccatagtattttaaattcgaaccatacaattacaaagtttcatgaacatcaaatttgctgtgagattttcgtttgaatcattatgagggaatatttaccaaatttgatgccttgcggttgcattgagcttgctcttagaccaacctctacaccaaaataacgcacataataatgtaatttgaaaaaaaaaattatgactatatcctacactaataatcttcatttttttgggtttgaatttttctttttatatgtataaggggtttgaaaatgtttttcatttttcatttttttattatttattttcttattttttatttagtccaagaacttcccttaatccacatctcaaaacacaataatgatgttagagagttttagaaagagccaagatgcaaaatgaccctaaatttaacaattaaattaataaatgtccatttttttaaaaaaattaataaaatgtccttttagttaaaaatttgatgataaaattacaattataaccttgaataattaagtgtttgctatagttattttgcacaataatatatcgttttttatgtgcaataatatattaaaaaaaaactgaaaggtagtatatatatatttt

SEQ ID NO: 383450 - DNA, 2116 bp, Cannabis indica
atggaaaatacataatgattttctacgtaaattttgtctttgttggatcacatttggaactcctcaggctgcactcttttctctcataactctagcaaaactttctacctttcttttttctgttttcgtttgcgaagttctaattcattgttgatgaaggaaaataagttgttcttacctgtatgttgtatgggttatctcaccagtaatggcaatggcacttctgataacactaataacaataaaattatctgattttatcatcatttgtaaattccctctaaaattacttttcgtttaagaatggagcgtctgattaataaaccctctttgaaacgtataaataaccaaattatcaagaaaatatcaatagtagagaatagagattatcattatccaatagattttatggcatagacgaagaaacattttagtctaaaactagattgcttgattaaagtgttagggcgaaatcaatagaaaatatcatgaataaacaaaatttgaatggcatacgggagtcaaaacatccatcagatgataatatcatcctagcacataaacaagaaattaagaactagcgagtagagagtaaacttttcgactttgatgtaacaactaaaaccaagaagtcttttaaaagcatccaattctagtcaataataaggggaaaaactcaatggaaactggtttacaaaaggaaatctttgacaaaacttatgagtatataaatcccccatgttatctcatcttctatccttacacaatattagagcagagggggtcctgagtttgagccacatacacttacttccaatgcatgtctaataattttggggttaacactaacatactcgggctggactgtccaattaacattgcttactctattgcctattgtccaaaacaaaaggtaagtgggggtgtcgaattttaaatctaatttggcacatttgctttgggtttcttatgaccaactttctaagctgaatatagcttacaaagcatatcgcgtgatatatcatacttgattttaattgccaacatgtatctccaaatggcccagcatggcattgcgagcctaaaattgaattcatttttgtttgcattaacatatttaaaactaataccagaaaaggattcgtgaatacctccaatatcccaggattttgcatggctattccaatgacacgtcttcttaatcctttgtagaccgcctcattgattctcccatctccaaccacggtaatattggcacacataattctcagaaaaaccgtaaaagatttaacttctgtatccctttcagatgaaacaagtgtgccctgcatacaaacatcatgcagattgctcacttgattttcactaattgagtcggtaatttctttaggaaagttagaaatagacttggagaatatcatcagtattcaagatggattcctgctgtgtatgagggacaacggaatcatgactctcaggattaaggacaacatggctgttaccacagtcttaaccacagaataagctttgggatgttgacacttaacagctgtcaatgtcagaaaatacttggaataatacaaggcatcgacaacatttacaaagttgaacgcattaacctgagtagagagcacaaatatactaattaaatcacatttttctctataaataaattacttttgtggagacttgaaccctcaccacaaacacatacgctcatgtaactttaaattttatctgtttgtaaaaaaaaaatactaataaggaccctcaaatttaacaaacaagagtatatgtaatcattagaagccttgctgatttgtttcaaaatcatttctccaattgcaagtgtaacattaatgtttggcagtgcaatcttcgcaaatgtgttgcaacttgcacatgagacatgagacgttgaaagcctatttttgtggtaatattgtgattgcattttaaagaaaaacagtcctttgacatatgcataagaacagcacatagctgtaatttagattcatttagggctcgtttggaacgctcgtattgtattgtattgtattatattgaattggattatatatcatatttttatataatactatgttaaactttaatt

SEQ ID NO: 383451 - DNA, 977 bp, Cannabis indica
gagagagagagagagaaatttggtcaatgaaaaatttgtaaaaaagggttatatttgacagtgtcataaagaaattgtataataatttaaaaaataaaattgagatattaataaataaataaaatataaaaaaaatgtactatgagctcaaattagaattacttgaaatactttggatctctttgttttttttccctttaatatttaacaaaactaacaaaattttgacaggtctagtcctaattattattaaactaccacaccctcattttttttttatgaattagtagtaagtttgtattgcttcaatcaacctttacaatcaatgtagcaccaaatttggccttatcatatactaatgacaacttataaaacatcacaccatgcttgttctctttgtgagatctttttagatctaatacatataattttaaatgttattcttgactgagtgtacacaagttgtaactatttgtatcttttgattctaaagacaatcattcttattctccccaatttgatacaccagctctcccaataccgccgatgtaacttgcttcttaaacttcgacatttttgctctcgagatccatctaaatagtcctgagagcggtcttgccattactttccaaaccagccagtttttgatctcctctaagcatttgttgctgagaagtatagcttccaatatcaactattattgtcatgaggagaagtatagcttcaccaatctgccttttccatataaacactgtgaatctaccttactcacagattgtcttgttttgttttgttgagatagcctaaatgtatttgcctaacgcatcaatgttccataacaaatgttccttatccctaagctgcttttcagaggtgaaaatcggtcggttatggtcggtttttaaaattttataatcgaccggtcggttacggttttcgtaaagaaattataactgtataaaaccgaccgtacagtt

SEQ ID NO: 383452 - DNA, 3374 bp, Cannabis indica
aaaaaaaaatagatcacgattgatacatgtatatgctaaagaacattattagtgagtggagattctgaaagtaaattgttcaggattctaatttaacatttagtattagaacaaaacaatataaatatgagtttagagtaatagtgcatatataatattaacatatatatatttataaattataatatatatttttagatatattatactaaatgtgcataattaaattaataaaactctattattagcgatgacaagattgttaaatcgaaaataacaatcgaattaaagcaggagcaaacagagtaatgaaaactaaaaaacactaaatgcataaaataaaataaaaaattaatatcaagatatatactggttcaagttcgatagatcgatgtgatctatgactctactccaattctggaacaccaccataattcttctttattgattgagcaagaataggtacaatacagtcgagatgagattctctgttgagcccttactaagtatttcaactctcatactttacacccaataatcttcttcatctacagaagattcctcttacaaaatcctaacccaatctatctcttttctctacacctctctctctctacctctcaatcttttctctctcaaactctcaatctcatttgaacagagttctcaaacgtgtatccaatctctctgaaaaagataagtgaaggtggtatttataagcttcggatcaagatcttaaagtcggtagctacaagaaacaagattgttaagttagttagaaataactaacttaaacaactcctctttgagcaaattctccacatcagcttaagtattagagcctccgagaacataaataagctcccaggctcacgaaccactgacactcactgaagacacttttggataggattgagtctgttggagtcgactatccagaactaccatttcagcagtgacaattagtcagcttgaacttctttctaggggagggctagcaatcttgaaaactaacctggagtggacatgataatcatatgagaacatccatctggactcgactatcattccacaagactacttttgggattgactttcgcaagtgaacaactttccagatatgatgtttgcggagactttttcatttagagaaattatacaacatacatatatacttataatatagtacacatatatttataatataagaaaaaaaatatatatcaaataaatttgacagaatgttatttaactatgtctatgatagtagttgaggtatgattatatttttattattagatagagattacaaaattaagaataattaacatatttagtggtgtgaactaaattagtatgtgaataggtgttttgaatcttgataacaaaaattggtacattagttttatttgtagggtaaacaagctaagagaaaaaggcggagtgcatctaagcatgatgtaaaattaatttttattaggagtgtttatcaaatttaatccgcactattttactcatagtgcattcgatttacactaagtgcggatttcatttttttgatccaatccaatcagcaaaagtgcggattggatcggttattttagattagttactttttaatatttttttttttcacataactagcaataaaataaaacaagttatagttattttatgtctccaacgacacattaaaataaataaaatagatatatatatatataagaatagaatatacatatgatttattaagttgtgaaatataattgtattatatatattagactttttaaattattattttcttacattaaaatgttatttgtatatatatttttttaattttttaataaatatgtggattggatttgatcggttacttgtacatgtcgatcaacattcgatctgcacaagtgcgaattttcaattttccaatccgcacaactgcgaatattcgcactttgtgaattggatcggctattttatgaacacccctagtttttatgaaatttttattagtaaaataactttacaaatttttttattaataaaataactttttatagtcgcaaaaacgaccacaaattacactgtgcgaccataaacgaccatagatttatattttgcgaccattatggttgcataaaattaattaagtgagattattttgaaaattttaatattttaaatagttagtttggcaaatttctcttttgtggttggaaatttataagcaagagtgtttagaaaaaattgagtaggatgcgtataagcatgatatatggtttggtttgttattaacatagatagaagaagaagaaaagaaagataaagttggaggttgatagaaagaagggatctttctccctcatgtctcttctcctcagctaaataagttgtgtataataaaatttttcgtaaatagcatcataaatatttaaaattttaagtttgtaagtgacataatttcaatatttatttttagcggtataagtatccaatatttataaaattgtaatttttttttaattttgtcagtacaaacactgttattttcttaaacaggccacatataaagtttagattttagatcattaggtctagacagaaacatatagtatcagttgcttccgaatattcctttaataaattcaaaataaaactataggaaaattacaattttacaaactttgatacttataccgctaaaaataaatattaaatttatgcggcttataaactaaaattttggatacttatgccgctatttaccctaaaataaataataacagctaaaaaatcatatgtaaatatatatatataattttatatgtaaatatatttaaaatcaaatatatttagacttttcagcgttattgtttatttagtatacactacttatttattcgtcaagacaaattttatgtaatattaactttactttcaaagaaagaaaagaacaactaagttgtcaattcaaacaaaaaaaattcctcaaaaaaaaaatccactagagattttcgatatttacgagtgtaaatatgtttaccttacataaacgacatatatagttggaccttaaaactattttttattttattttttggtttataaaatttgcatataaactaaacttattatttgttaattatggccagcttagttttataaatacagcctgttttttcaataatcttttcatgttttggaggagaaccaatctaaatggtgtgactcactttgtttcctagttttttcagtgttaatttattgtattctcctcctttaaagttaaattatattatattatattaatatccaatttttattttcatatatatatataataattaaatagaataattagttaagat

SEQ ID NO: 383453 - DNA, 4735 bp, Cannabis indica
acaaaataaataaatttgggtgacatttaacttttacatcataattgtgtacacgtttaacacatttattaaacgtattgttttcaaatcaacacgcttaacctaaaatgacacgattataacacgtataaaaaatacaagttctttaaatattttatactgtaaaaaacctggctatataaagaaaagaaaaacttctaatttttttatcattcgctttatttaataaaaaagattaaaactatgaatcttatgagtaatgtttgtgttacatatataattatattaatcgtgtcagttttgtattgtgtcataatatgtttaatcatgtgtcatatgtatcaatttcaagtttgtgacctattatcgtgttatgtcgtgtgacctgttaaaaaaacatattgtcataaatgcgttgataacacaacataataacatgaattgccaaccctacctaaaaacaattaatacttgagattagagaaaaccaaatgcataatcatagtttttcatgagctataccttactagaggtcatgtcaatgtcagaagaagtaacaagattattgctgagattgtcaattttcatatgctgctcccttgtacaacagtcgcgttccttgtgtgattttttttgctcttccagttgcatctctagttgttcatgctccaattcatactgaaaaataataataaacaagaataaagatttagagaataaaagtgtgtgtgcatgtgttcgtgtaccagtttaacagtgagtagcttgtttgattttttccctattaggattaaggcacaaaaaaagaaaatgatgcatatcggcaaaagaagaaactaccttgagcaaatcgtttcgcaatttcaagatttcttgctccagcacctcagcatgagatccctaaagaatagttttacaatgttagcccataaatttcaaattctgtaacaaacataatacaataattacctgaagctgtttaacaatgttagcctaagcttatcaaattgtgtgacaaacattacataactacctgaagctgtttacggagctcctctatctctagcttttgcctttttaataaggctgcatctgtcaagatctgtaacagcccaaagaaaaggaacaaaaggaaagtttcaatatcaggcagtcctattaaacaaatcaataaaaaacaacattgcatgtatgaaaataacaacttttagcaatgtatgaaaaagaacattacctcattcacttgaacacagttagcaatgcgcttggctctgctagcaaattgaagagttccctttgtttcctcaatgtgagccttgatgttgcattaaaaactataattaatatcaagcccaataattgattggaaaaactgaataataataattataatataatatgctacctcttctggagctatagtgcacacaattgaagttttggcattgccaccaagcgcaggctgaagaatccgagtcagtttactatctcggtaaggtatatgtcctctgcattaaaagtcattattataaaaatatatagaattctccaaatgaaatttacactaagaagaaaaaaggttatacctattttttgcaccatcacttaatttgttaatcacattcccaagaatcatcaagctcttgttaatgtgctttccttctttcagacgtactccaccagctccagttttggcaatccgttcggaaccagctaaatccaccaaattctgtatttgccacaatcaaacaagaacagcacaatgatacaaatcaaacatataaaacagtgttacttgctggtgattttcaattaaaaattagtgtcagtggttgaacaactcaataacatttaaaatagttttaacaccatggcaaaaagaacacttaccaagacagagacccgaatagcatcagaacttaaatagtcaccagaataattagtctccttccccttactttcgattatctaaggtaccaaatacataacataaatcaagcctgaatacaattactgaaggagctcaacatgtaataatactagtgtgggaacttatgaaggacataccattctaaatattgtgtgtgatctgctgcttcgaacattcatattcgtttcaccaaaatgcctattagctacataggaaaaaaaatcaaacaatataaaaataacaattaataaaattgagccaataaaatcccaagggttatcaagttatctttcaaaccttctccatattcaagaagctttaatacttgttcagcattattgacaatttcctctttgaggccagcaacaaatacgccacgctgaattaaaataaaaatacgtaattcaatgagttgaatctaagattaactcgtgaaatttgacacactaccagttgcacacctccaagctctcatgaattggaagtttctgattttctactgcaaaaagatcgttaatctcctcattatagatttccatgtacgagatcctaatcaagaactcgcggtcagacatctgcaaattcaattaaagaaaccaggtcatatatacttttctactcaaaacatcagcataataacaaaaatgggagtgagtaggatggggggagagagtactaccatttgaattctctgaaatatatcttcaactgctcgttgaataattccgggatctctttctgaaccattcatggtgaaagtctttccactactagtctgtccatatgcaaaggcagttcctgtaaacatctcaaaagacagaatatttcattgagagccacccaatataaagatgattaaaacgctgatagtgcattaaaaaaaaggtccaaaacccatatactggtactctattctaagccaagtgtacccagcgaaggataaaagcccttcatagcttaataaacgttcctctaacatagtttaaaggttcaaaacctcttacatcactttaattagtttatgatgcttagaaaccaaacatagacattcgctctgcaaattgacagaccaaactaaacccagacaggtaagcataaaccttcaaatttgctcaccaaaaaaaatataataacattaataaataaatcatatgaaaataataaaaatgaaattacaaaactattaaaggataagaatagagagataaagagagcgcataccattaaaaccttgcaaagcagcacgaataatatccttggtaagaacatcgtaaaccatagaatttgagcaactttcatcgaatacgtgatcttcataaacacataaagcaaaaattagatctattggtacaaaagaataagcaaaacaaggaaatatacaaaggcatgtatataaataggtaccgaaagcgtaagaaattccggagagcggggtgccatgggctttgtgaagtgaaatgcggttgtcttcaaccttccagtaggttccagaggaagaatcgtccgataccggaggtctcactcggacggctacacagatcttctccattgttcactcttttcgctgtctccctggcctggcctagtctggaactcacctcagttcaggactgcgccatttgtaaatttgaattctccccactttacttaattgcccttcacttcacgtgaaccttcatttttcatttttcattttttagaaaaataatttaaattaacctgtttcaaacaaataataataatttaaatttacgcagtacatcgatacatcaacaatacgtagaagcttttgattagaaaaaaacaatacgtagaagttcatattaaaaaataaaaaaaaaaaaaaaaaaagaagaatcttacaaataacttaaaaataactctagaacaatttaacaaacaacattgttaactcggaaactttctcatacgtggcaagaaggatgacatcacggaattgagtaaacccaattatagcagttgacctggaaggagaccctagccgtacgcccaagttattgactttaggacctccgggatggaagttcgaacttcaataacttgaatccaactcactatctttcagtattttgtaccatgaagacatggagtaacttaatccaagccccgggaggtgaaatgacaccaacctacaacccggaagccaacctgagcacctagggtttcacccaacgcccaggttgacatcccgaacaagggtttcagtttctgggaccttcttagtgcaaaagggtcaaaacttgcattgggatatcaactacacataccacagacatatttctgaggcattagaatcaaaatagaagcaagttcatttttgagcactcagggcccccagcacccagcgcctaggttgacaattcgtcaatttgggtgccttccaagtatcagatcgacgatccaacttttgcatcttatttatcttcatcaaaaacagtgaaacaacttctttcgcggaagaagcaacacttcttatgtgccaaaaacatggcctagggcccaggttgtacacctggggctggccttacgcccaggttaacattttgttaacttgggccattttaattggagttttccaagaacactttcgagcatcttcttcgtttttcagaaaatattgagatttaaatatttttggtgaccaaacggaattttcgaaagggcaaaactgagacccaacgcccaggttgacatattgccaactaggctgttttcgatcaagttcaccaaaaagtgtttagagcatttttttttcattatcagaataatgaagattcaagcaaa

SEQ ID NO: 383454 - DNA, 2714 bp, Cannabis indica
aaaaaaattaatgattctgaaatttaaattatatagccacgttttattctcttttttaatttttaattgtactataaatcactttaaccatatatctatttaaaatcttttaaaatatattaaaaaaatgtggtataagattttttagttaaatttttttaaaatttacggctagctagctttaatttttttagctatttatttgttcatttttttttaagagttatagctatttatttcaataaaaaaaaattctcaattttttaagtctaaccctaatattaactttacattcctaatatttttttttctcatttctcatagcaatcattctcttttttcaaaattctactataaattcccacttaggtttttgttaattgctttgtttatgatgatattcaactcgacggtcttagctccataaatattacggtgacaatttctacaataaactcggttgtggtaacttcataaatattgcggtgtctctaaaatggtatatcaaagttaactttataatttttaaaaaaatttctaatattaatacatatatagtactttgaagtgtttaaagttaaaatacatgtatagttttattatttttttaataaattaaatgtttgaactacttcatcctgtgactttctctaaaggaatgagagggtaccatatataaatattatgtgtatatataaatattgatatataatcatcatttgttgtttttgtaatttattgatggtctaactaattaataaaaaaattcacttgggtcttgtcagttttgacatggttgtgagttgatacaaaaagtttagttttgttgttattcgtttgtgatcttttaactgggttgacgatgagtagtagacagccccaaattcatgatttaacagagaactattcgagttttactgttgatgacgatgatgaggaggggttactgttcgaggtgggggaagatggacttgctgaaatagatgatcggtggctgttggtggggcgtttcttaaccaatcgctcaattgacttccaggcaatgcaaaataaaatagccactctatggcaattgggtcgaggcttatatgtgaaagagcttgatccgaacctctttctttttcagttctaccatgaagtggatatagagcgggttattgaaggtagtccttggaccttcgatcgtgcgccattaataatggaaagggtctctcatggtgttaatccgcgatcaataccgctaacgaacattgaactttgggttcaactccacaatttgactattggatttatgtcagagaaagtgattaggggtgtaggcaattacattggtacgttcgtcaaatcggacccaaacaatttctcgggagtttggcgtgattacttgagaattcgggttaagatcccgattggaaagccgctgaaaaagaagaagaaattagagatgcaagggggaccggtgtgtcatgttgttttcaaatatgaggatctacccaccttttgtttcatttgtgggatccttggccacgccgaaagattctgcgaaaagctttttgacaccccaaaggagttgatcacaaaggagtacgggctagaaatgaaggccgctccgagaagacgaaattacgctgatggttccaagtggctgcgatctggattagccacgaaaaatgctggctgggcaggggagagttcatcgaattcaagaagaattccggtgagggtgccgacggctggaggtggagttaatgcccattcaatggaggagggaaatcagggaccgaatgtgaggggatatgatcatagtcacggcaatcaatatggaattaataaaaacaaatcccctagttctggggaggcgatttttatggaaggtaatgtggatgctgaggtggaaaattctaatgttgggttggtatttcttgattctaaaagaaggagagttatagaaggccaagtttgtgggccgaaggagtgtattgatgggcaggtgggccttaacaaacatggaccaaagtcacaattggtctcagatgctactgtggaaataagtgaagacttaatggatcaagggggtgatccaaaaaacttgtatggggcgggttttggggtccagacccgccaagcattatgaatgtattaagctggaattgccgggggcttgagaaccaacggaccattcaattccttaaagagatgatatctcacaagaaacccaattttgtgtttctatgtgaaataaagtgtcaaaaaactaaagtggatgggcttgcaagacttttgggctttgatggagtttttactgtggatgctattggtctatctgggggcctcgctcttttatggaagaataaggaagatggtagtttattgggctactcaaataaccacattgacatcatagtgcattcggcccaagctggtgattggagacttacgggtctctatggcgaacccaaccgtagccgtagacacgagacgtggaatttgttaagaactttggccactcgttcgacactcccgtggtgcataatcggtgatacaaacaacattgttcgtcatgaagaaaagagaggcggcaaaccttatcctcaacgacttctcacgggctttaacgaagcacttcaacagtgaaatctgcacgatgttgagctccaagggcacccgtttacatgggagaaggggagaggctcaaacaactggatcgaagttcg

SEQ ID NO: 383455 - DNA, 1846 bp, Cannabis indica
aaaaaattgctagtattttagatgcaaaaatcttcaatttgttagaggaaaagatgttcctacagacggggcaaaactgttttgacaaaaaaaaggaaggtggttttttttataaaaattattcagttagaattttgtttctctcgagttcttcctctcaaagttcaaaatgcacctatttttgttcttttatccgttacctttttttttctcgtccctcctacgttaacctgctctttagtctttatagtacgttctttgcatgcatggtggagttgtcacctctttaatgctatggaagacacatgtacatatgtgttgttgatcttgcatgatttgttttactatgggattatcttttgttttaaaataattttattttatatgacttggccttacctcttactaatggtggtgggttttatctcgattcttacatttaccctacgtttgttatttccaatctataccgttcttctattttgatttgtgattcaaattatcttggatcctcgatgtacttctctttttcatgatccgggctatggtatgccacatgctccatcttgacttaacgtgagatatcatttatcttaacttgatctgagatctgatttggctatggctatgtccaaagtttcaatgtcttattcggggcttggttaggtcttatctaggtttgagctgcatgacatcttatcttgatctaatttgagtttaattttctttaacgcgtccgagttaaaacttatctcagctttggctgaatcctagccttccttagtctggtctaagttaaatcttcttgtggtttagactgagtttgagttaaatattttctcgatttagactgaatcatagcattccttagtctggtgtgagttaaatcttatatgggtttagagtgaatcgtagccttctttagtctggtctgagttaaatcttatctcagtttagactgagtccaagttaattcttatctagatttagactggttcatggcctttttcggcctagccccaagtttagccttatctcggccctattcaggctaagatttatggtctgagttattcaatcttgtgtttatagtctttttccaactaacttctacaattttttaagatgggcctgcactttatcactccattgggtttttccctctctcaatggactttgtaaaaaaaacaaattttctcccccaaacaactataaaaaaccgggatagagtaaagagaggggttggattctctcaccctaaattcgtattcttgtttccctcgaagaatctcgatcttttgtcttaagcatcacaaagtattttgcaggaaaattcctcgtgttgccagtaatccaaagggatgtccaccgaatacgaaggtagaagggatgctagaagaagattataagggatccactcaggattggtaaatattcactactaattttagggagtattcctctatcaaattttcaccccgaacaattatatctaattgtgattatgttaatcgttcgtagtcaaatttttcttaacaacaaaagtactgtaaataatagttgtattagattgatatctttaaatataatttgctgatataatctatgttatttaaatattgtcattactaattgtactaataaattaatataataatatatttttaaaaagaaattgataataatatttgctaattaatataacatacattactcgcaaatagtaattgtatatttgaaaaaaaaataataataaatagaaggattttttttaatttaaaagaaatttattattattaattatttaaaatttatatgataattaatttttaattaaagataaaat

SEQ ID NO: 383456 - DNA, 1865 bp, Cannabis indica
ttgagactttccttctgatcctacttcttggcacttggaagagtctctataacctatagggtaaggagcattagaaggaattcgtcctggaaccgttaggctaggcaatctcctagatagtaacaccaagaggttagaagaacagatagccgcactgacgaagttagtcagaaaaaaaagtagggccctcatcgatatgaggatgagtactcagagtcctatgtgaggaggattgttgaagctccaaccctggagaacttcaaaatgccccagatcgagctacatgatgggtgcactgatcctaaaactcatttggccaagtacacaagatgatacaggtggctagagtcagtgaggatgcaaaatgtttatgcttctccttgacccttaccaaatctatcgaggattggtggaagagattggctcctaaatcaatccactcctggaaggaactacagtttgccttccaaaagtaggttattactgcccacgactatgacctagaaatgggctccatcaccaacatcaagcaataggtgggagaaagcctaaagagtttcattcagcgaatgatggaagcggtagccaaaactaaagtgtccaatgacatgaaattggtggccctactatttaccgagtttttttgaaaaccaaatattttgagagcttagagaaggtaacggataacaaataataaacaaatagatttttacgtggtccaagcattaatgatccttaacgcgtccatattattcgcctcaatgggaaaacattttcaagactacaagatattacaacaaaattgccttgcttctcttgagagagaggcttcttagaattttagcagagtaattgtatgtaaaggattgttctccccttgcctcaagaaaaatgagactatttataggcacacatggagtaaagggttcaccctttacctacctagggtttcgtattccacacgctattaaggtctatactgtgaaaggatgatctgactattggctgatagggaccttctttatcatgtggtgtatagcttcttgtgagaaattttgtatgatcttggacacgtgttgtgtaaaggtttatcctttgcaaaatagtctttaactaggttgttgggcaaaaagcatactcgagggtgcatacgcgcactaccatgatttggcatggggaaaaaattgatcctatgtcagaaaaatgtgtaaccaggcaaaaagcatactcgagggtgcatacgcgcactaccatgatttggcataggggaaaaatttgatcctgtgtcagagaaatgtgtaaccgtctacaaggtgatattaggcaacgtgctgacgtggccaacgtctctaaggcctttatggtgttctaggttccttactaagagaagctctctctgaggccattgcctctccttgccttgtaggtctgggagtcatttttcttggttacctcggatgacttgtgctgtgaccatatcctttccttcgatcatgccacatgtttgattaatgaaaacttggataacatttaccccccaagattttgagattctctagatcacggaagcttgctattattcctgacattgaccgttgacacgtgctgcatatttgggtcatggatacactcctagatgagttgtatcctactgagggtatttacaacatttgcttcctcttgtgtggtaaccacgtgacatgttaggagggtatttttgccccttttcgtgtgtggcaaggcgtgtttagcaagaaaggtggagtgctacatgtggctgaatgacatggagaacgggaccttgacattttagtgggccatggtgttgggttttgtgccctaaataaaacccattacaatctgat

SEQ ID NO: 383457 - DNA, 1217 bp, Cannabis indica
ggactttagatgtacacccaacatcatcactataaatgtttgaaattttttgaaatatttacaataccgaagacatagttcatgatattctaatttaccactcatgttcaaaaaaaatttacctatcttcgatactgtaaactaattaaattttttttaaacaattagagaaataatgttataataaaaacgaataacgctataaaaaatattttaacatacatttttaagcacaattaactaaaaaattataataagaaatttacactaacacttctacacaaaaaccaaatattttctaataactttcacattaacaaaacttattgacaaaagccaaacatacacaaaatgacaaaagccgccaaatttttctctccattagtttgggggttcccagattacaatattacataggatagaaaaagtaacataccaagtacacttattttattagccttattttgctcacaggttgggttggatgttctttcattactcatttggcatcgataacttcgttccaacaaagtatctatctgttactcattggaaaatccaccctatttttaaccatcttctgaattttcagccgcacttgacatgggtgcaaatctttaggggataaataaaaattggataattctgaaatacaccttttaaaagttgttgacagcttataaatttttaaaaaattttaaataatgtattgtattaaaaaataaatatatatgaatgtacatatcactaaattaattattatcattaatatttgatcgtattttttattgaaataaataactaaaatattttcattcagtttttttttctctcttcatcttctttttctttttttcttatctattttatattattttatatcatgttattagcacgagtctctgcccgaagtaaatattttgttgaagttcttgaatattgttttaatgttacaatacactaaatatatatttatatatatactcatctaactgaaacaatttcaagaattttttttcttttattttttcatttatatatctataaattatatatgtatatttatgttcttatttttatatgtttattattgaatccatatatatacatatattatatgcttttattgtttatctatgatatgataaagaaaatttataaaattatgcatatattgagaagattacgtattctcaataaaatattgcatatattct

SEQ ID NO: 383458 - DNA, 2901 bp, Cannabis indica
atacctttgaaaacaagaagcgtttggtcatgaacccaataattttgacgatactaaatgcgccaaagaagaactagaagatataagcccaatcaataataataataagaaaacctaatttataagaatgcccctcccccaattagcaatgatcaaagaaacccattgatcttggtttattattgtttattttcagaaccgattgatcgtaattattatttgttaattgaattgaagtagattaatgtgattatttgtttgaacattcaatggtggtggtacatatgtagaccttttcaattctaattaaatatgaatttctaacttaacctcaagtgaccataggaaggtgtgttggaggtcctgggttcgagtcctaggttatgtattgtgtaatatataaacgcttgaataaataaaaaaaaaaaaaaaaaacgaaaaaaagtaaaaaattaacaaactttaattcgacccttaagttggcggacgggaaaattaatattgtaacgaaaatagcattattgcatattataccaataatagagtacttacgtaactatacctttcagcttttatgatttctttctcctcagaaagaaaaaaaaaaaaaaaaaaaagacaagacatatatagtgcaagtcaaacaaacaagtagcagaataaataaagttacagcaaaaatacaaaaaccacaaaaaggagcaattgaaaattaaaataaataaataaggatgtcatcatcaattaatatgcatgcatcaagaaattatgattggtaaaggcacattcttaattaccatataagcattgtgattgaatgattaagaaatacagatatgacaactgtatatatatgtgttaatgttcattcaaagtcaaatcttaaaaacactggtatatctctttaaagcaatatagatgaagaaaagtaaaagagaaggaatgcactcaccaactattatttatttattattcagcaaaacaataaaaaaaactattatttattcatttcaattttcaaatctctcgcatatcgcatagtaaataaaggccgtgcttttagagtggactgttctgcctaacatgcccattccattaatattttgataaaacttcttctctcgaactaattaaaatgaagtgcacatttaatattttgcttacctgataatacatgtttcttaaacttcccatccatcttagtaatttgtttagtgagtttgtacaagcagtacactacatcagtcatttcttcaccttgtttagacactcccgagtgaattcacactcaaaaaataagtgttgaaccgtctcttcatgtattctagacatgatgcaagtagagttatcgataatatagaatccatatagtctctccttagtttccacagaacaaagcaatctttaggtaaactatatctacaccatacttctttgcaccatcgtaccttttcctgtggtggacagagcagtttatatagccattaccgatttaatatttttgagctaaaaactgaatcggatccatgagctggctgactatattttttatctccacaattttcctacagtaccaactactttgggaagtagccctgccacaagtttctatattgtatataaacattattcacccatttgagccatagactatcttttttgaagctattgcccaaacatatttcatcatcgctaatgtgttccaggttgcaatgtctctgaaaccaatatccctagttgttttagtttgacacagtgtgttccaagcaactgctcctggtcccaagacagtagcttgacctttccataagaaggcacgacatatactctcaatttctgcaatagtcttctttggcaaagccataattggactccaatatgaatgtattgccaacaaaattgaatttacttagactactctaccggcaaataagaggttcctaatgctccatgctctcactctaccagtcattttctcagcaaatgttttgcactccactgctgaaattttctttacatagctagataggaatacaacgtacttgaaaggtacctcactcctactgaatccagacacatctatgattctctgacattccctttcatccattctactgtaatagatggctaattttgatttgtttggttgcagccccgaagtatctaaaaataatttaagacgtccttgtaacatatatatagaagatatttttaaagttactaatacaaaagaacaggataccatctgtaaaacttaggtgatttagccttaagggttcgcatctgtcatgatacccaaaatcaagtttcattctaactttttgtaatattctggtgaggtattccatccccaatacaaaaagaagaggatacatggatcaccttgtatcaattctcttttggattcaagaaaacgatgcatagtaccattaaacatgattgagtatctaggtgtttgtacacaagtcatgatcgaccttatacggaactaaaatttaattggaaatctagtttaatttgcatgaaactaatgtcctaacttcaattttcagattcatgaaatgaagatctcaaaaagttgaactagggttccttgacaatttaactcaagtataatctaaaaaaacttacatcaatactatagtaaaatatttatactggtgtatttttgttgttttctaaatttctaatggtaaatttgttcatattaaatcatgaagagacacgcagatagagttacgtatgtggaaacactgttttagtttttaatgtttcataacagttacattacagttgcataaacattttgctaacagttattttgtctgattgaaaccttcgtctgatgcaaccttcggccaaccacccgacaacttttgtttgatgcaaccttcggccaac

SEQ ID NO: 383459 - DNA, 1596 bp, Cannabis indica
gattgattatttatagctactagttatataatcttttaacaatgctcattaatgattgtatgatttgatattcaaaatattaaaattaaatattccgttttcagaagtaaaaaattgtaatgagatagtgtaattagcacttctcatttgattttatcttattacatttacaatatcttttttgacttctgtacttgaaaatacatattagaatatttaattttaatatttttgcatcacaagttaacatattaagaattctattgtcaaatgaattattttaaatttttcaaaaattttacatatttaaattctaaactcaaatgagttattttttttttctagtgtttattatagattatccttgaaaagattctcagctaattattaatgcttctttgactcaaaaagttttattaatcctataataaatatacaaacaaaacaaaggaaaggaaagtaggaagcttttgtatcactatattgatcggatttcccccactcttatatgtaacaaaaattttgatttcactttttctttaattaattttgtaccactatattgatcggattgccttacacttttatatcttacaacaaatatcatatccacctgtgtatatgaatctaaataaatgatggtatgtacttctcgtatagccttcagctcaaataatttagcctttcttgtgtaaaaacgtttggaaaaacaatcaaaaagtcaaagaatgcatcaccagcactagcatggaacatcatgacagttactccctgtctgggatcttccttgcagcaccaatttaagtgagctagcccaccgttactggcgctttcacctgaaaatattgtagaagaaacacataaaatcaatgtaaaatcagataaatgccaccaactaagcctggtaaccaatcaccaccttcctctgaaatatttaatattgatctttacagagaaaaagcaactcatttgttttggtctaatttaaaaaaccacttactgttttaactgatcccctcaaatccccaaggaagtcttcaacagctgatacatgttgaagggctatccaaacatgaatgcttgtttaagtctgcactcattactattgtctcatctacgcctcacaacaaaaatcttcggctgcactgaaatcctcggctgcagtataaccaccatctttcattaactcggtcaatccatctgatacaaggtaaatgtcaggttttgacgtgtccccaaccagaaagggagagaatccattgcccacatcaacccaagcacagccaggggatttcctcacacccaaatctctcatgaacaccctcacctctgctagctttttccaattcccggcagcagcatacatatttgcaattaacacatagtagcctgaattctcagtcctcattttcagtaggttctcggctgcccattcccctatttctacactcccatggattcgacaagctccaatcagagtggcccacatggcagcagttggcttgtagttgtgtggcatccttgtgatagtctcctttgcttgctttattagaccagccctcccataaagatcaaccatgcaagcatagtgctcca

SEQ ID NO: 383460 - DNA, 2282 bp, Cannabis indica
gttacctgagataacagaattatatgttgtacccctttcaagtttccaacattggatagaaaaccctcctgaaaataatcataacaacattcttcattccaagccattgagtcacaggaccccagaaaattactctcttctctagctctttctcaagctagttatgtattgtttgtatgcttctttaggagaaacttaaaaatgtggaagataatgatactacatagcatagcatagtggattcaatttacacttgagcttacatttgggcaaattatagtccgaactcctcttagagctctcttcagaaatggtttgtcccttgaatcaccagcaattgacttgaaaaaacaactaaaattttagcatggaatcaatagtctaaaaaacattgcacaaatttaagtgaaagttaagttaaagctagctacctcaacatatgttccaaaggcttcgagtgcaaccctcttatccttgaccaatgctttaactcgggctctcttgacaatcaatgacaatataaccatctacacgggctaaatatcacaagacttagaatactacaaacactttgaaaaacaaaacagtaaaaaaatggtttgaaacaactgagctgagattgtccaaatgtatattgcaaaacacacctgaccaatctcactatctccatcagtaactaaaattgcatccctggctccattttcttgtacatttcaaaataacttaatttagaattctcgcattctcgaaataattatatatatattttaaaaattgctcaagaaaattactatatcacttattgaaattacctgaagattcgtcttcgtcttcatcgtcaacaatggagccatctttagggagaagatcaggtgccccataccatcttctcaacttgggaccccctataaaacacgattaaaagcttagaacacaaaatagtgataggatcgtaggagtgagactgagagtgtacaagaaaagacatgaaaaatttggaccttctatatagtcaagaatttggtcagcaaagctgattttcttcttggcggagcagcggaaattaagagccctttcggaagtgatggtggtgagaaaggtagaattgaatggcgtgcagcatgagattgagttgttatcggtaaaggtccttagagagagcgtagatttacagggaagaacacccgccatagatatagaaaccaccacgctcgaggtttctctcatccaatccaacccttattttagttttcataattaataatgcggataatatccaaattacaaaataggctcaccgtatccaacaacacaagccacagctacaaacgacactttccccttactttagtttactgtcgtatattttaattattataaaaattattatttttgaaatttaaactaagaggatcacgtggtgtagattttttttcctactcttttggttattttgataatttagtagtcacttaaagaatttccatcacacaaatgacactacctacagcagtttaaccatgaaaaagtcaagcctttaatcccttctaagaagtgttgtggtggggttcaaactctttacccaagcaagaaggaatgccggtaaaaatatatctactaatacaccacgcaacacacggtaaaaacagcttattattataaacatttttctttaattgagcttgtgatcttattaggatcatttacaaaaaatacaaaatgataggtctacgtacaaaaaaaaaaaaataataataaattcaatagataatttttacaaaatacaaagtttaaagtagtattaaccctccattatttacaaaacataaacctacagacaagtatctaataaaaataattgtgtcaagaaaatcataatctttttataaatttgtcttcattttaaaactataacaaaatctaaatctaagtcttagaaaaaatattttgcttgaaggtacacttagtttaagatttatgaattgtgtttaaatgcaccacatgcaaatttgactaactcactaatgttgcatgaatgatgaacataaactaatagaatgttttgttttggaaaatgagacaaaatacaagagttttcggtattcaaaagcataacccttaacatacataaaaatactcttttaaggctaatttttgttacattacaatttaaataaatggaaatctgattttttatacttaaaaaaccttaatatttttgttcttaaaccaatacatttcaaactaaaaaatatatgacacttttatctaaaatccaaaaa

SEQ ID NO: 383461 - DNA, 1810 bp, Cannabis indica
gtatacaatgtaatttcctcattgttatgcgtggttaaaatctattaagaaaaaaaagattatttgtatattatcccacattattgagtgtttgtgagatttatattataatttatactcataatttaagtattttgtgattgaagtttataaaaaaaataataaataaaattatataagatccaaataaaattagaataaataaatatgagaaagaagataaataaagttaggatttgtttggtacaccgtattataccgtattgtattatataattgaattgtatttcatgcaatatttttatataaaactatatgtgatattagtttttatgggcatctaaatatataatgctttagtataaattaaagtttaacatagtatcatataaaaatatgatatataatctaattcactataatacaataaaatatattacgacttaatatgacgttccaaatgaactcttaaagaacataattatatagcaagcattacgtatcttcgttatttatttttaataaaagtattaagtttcttttattaaaaaaaatatctgattgatagctcataaaactaagtatttttttattattagctgttgccatagttagttctgagattattacaagctgatatacaactacctttcttgttcactctctataaataaaatgcctaactcaagaattgattagcttttgtagttctttgagattcaattcataaaattggtccagatacgtattgtatagataaactaaattcacatggtattaggaagcccttaactatcgtcaacaatggatcttagaaactcagtttgcactacagctacctctgcaacaacaattcctctgactcctttgattgctcagatgcaacaatggaatccctctcaaaactcattaaattcctcaacagttcgtcttgatcgcacgaactaccttggaaatcacaagtgattcccaccgtcatcgatcatggactggacgtcatacttcttattggtattgctctgactcagaagttcatcaccggtgatttcaatccatacttcaccatctgtaagcaagaagatcaactgctgcttagctggttccgttcatccatgacagagacagttctggatctttagcccatcacaactcttcgttcaatgtttggtgagcacttgaacaatgattctcgagtcaatccaaggtccgattgctctagattaaatcacagctttccacaattcaataaggtaacctttacatctcagacactttgataaaatcaaaattcttgctaactctctttctactgttggtcatcccatggaagaaaatgacttaatcatgcctttattgaatggattagatcatgaatatgatcctattgtctttcatgtaaaccagtcttgttgataatctctcattagagtcgatacagtctttattgttaactcacaaaagcaggatcgaaagaaatcactccatcactgatcttgcatccaagatgtctacaagtctcagtattcacaattcaagttcatgctactgctactgaaaacggtgttgtccatgcacctagagtcttatttgatcaagtgactgatatagatgccacacaagaagctccaattgtcactaattatgttgcaacatcaactagtgctccaagcattgctgatcatgtctcatgcaccaggtctgaccctcctgcaatccctgcttcatttcccactacatcaatacccttacattcgccaaatcaaacacaaccttcctctcaccagatacatattggaaattattttaccag

SEQ ID NO: 383462 - DNA, 5026 bp, Cannabis indica
tgcacttgttggcttggttctttaatagaggacgaacacaagttataccttcaaattcaagatacgagcagacaggaagtaccgcagctactcgttggattttttacaaaggacgatggccaaagtttttgttctaatgctttctcgcaaaagggtaatttgggcaaacattgttgttcttcaccttgaaaataaggtgaattttaagcggccaatattgttgggccttgggatattagaatattaaataaaagggcataagtataattgtattgagagtattggtattatatatagaaatgaatagtaaaagaaagggtgtgaagaatttggcttaatttgtaactgttttgggagagaatcaggctctcgaaatcctagaattcttaatttactcataaaagatcttttaataataatatctaaacactttgaaaaacacttttcattaaaaataatcttcatataatagttatccaaacgataaaaataagttaaaccttatactttgaactataagtaaaagtaaaaacttaaccgaacagaatcatgtatgatctacattctagaaagaaactttacacacaattttgacaccatcttcacactgtgtctgtgagtctagagtttgaagtgcatttcatctaagcttcaaaatgatcaaatggaagattttactaacaggcaaaatacaagttaaattatataaggcaacattgttgtcataaaatacaaattaaacagcagccctttcactttttcatgcagcctcactgaatgagtacccttcaagatttgccttctcaattacctctttctgctccattagatcattgaagagaatgaaaaaaaacatgtcaaaacataagaaactgagtattgtatgacatggaaaaaagataacactaggatctgcacctaacactacaatatttggggaccagaaaatacccaggagggacttgaacatcaaatcttttaacaaatagtttcaatggaattgagaagtatattcacgataaattatagagggtaatatataaacttgttttaaagaagactacaataacgaagaaacagtaatttacctggatcagtctagtgataattccaggacttcgctgctcataatcaagcattaaaaaagagtaattactagtgggaaaaaatcaaatatttttgggatcaagtcaatataggattcatcatgtacaacaaatgaaaggaatttggaaacctcaaattgctttttattccatgatatgtccttccaagattttgaattgagtgaatcccacgagtctggaatagaaactgtctctacatgttggagaagtctcaagctatctgcaatggaaaatgattatattgaatgctattaggtcagtctatcatctatttctcagcacgaagaactagagctagtgtaaaatacatacgaatgaatgacaaaaaagtataacaattttacttgtgaggaatgcttcttcccaaatctcatgctccgaccacattggtgctacttctcgaaaggggatgcctttggttaagcataccctaaataagtaaaggatgtcaaatgcagtaaacttaatagatcaacaaattggatattgttgtgttctgccccgactaggatcttaactgaatatcaacaaaaagaggcaaaatcgcagagaaaatagagacttggaagtcaataggagaactagacagatttgatgttagatactatacagagaatattgaagaaacattggaacaacttgtcaattacaagctaattctctccataaggctctaattcttcttactctcctatatacactattgtattccctttattgactatcttctcccaatcctagatactttcattattgcgattaagaaccagttaataaatagtgaaattggcagtagaatcatgggttagaaccagttagatacttactcaatgactagttgccggataactcctggaaggacaccatcgccaataggtgctgtttgaacttcaaaacaatctatactttctttctcgtcaaaggacgttccttcggcaccatctttgtcctgaaaaaacctttacactgaatgtcatgcacaaaatgaaacaagtggaaaggcataacctgcacacttggtataaacacaaataactctaagattcaattcttttatccataaagtcaacagtcgataggaaaaaaaaacaatgaaatggtgtcactaataaagttcttccattactccattaaaaggcctgctagtagataactcgatactataaatcaaagttcattgaagcttaacacagccagaaaatcttacaacttgatcattcttcaccttgcgacaaacaacaaagaaattagtaacactgccttcaagtaaccgattgccgtcatttgacaacaaaagatcagttgccaagggaggtttcaacttctccagagattttctcaccctgtaaagaaaacaccacaactcccatatgagagtaaactatcaaacccaaaataatgagacgtaaagaaactgaagcatagtgtagtgtttccttttctattcatgtgtgtacattgtttgatgagtgttgttaacataattaatgctaaaactaaaaaaggacaaacccaaaataacacaaaacatgttactttcgcacatagaaaaagaaaaggttcagttattgaagatgggaattgtgaaatctactgaacttacctcacccaatccgagtactttgcagacgcaacttccctcccaggaccaaccacagccaaatgagaaccattttctcggatgccaaacacaggaggtacaaaatctccgatatatacaaggacatcaaaaacatctaccacactttcacgtctcacattctccttctcatactcactctgagtctgaatcagtttctcgaaatttccagttactaaagtcgtaattgaaagttcctcaccctcactcctctccttgagcgcaatcggcacaacttttcttacagaatcattaatgagaccacgaatttccgattcccatgtcccagagatcgtcgagaaatgaggcgacgagtctttcgaaaatcttttagcctcgaacagaagctgcggatgcgaatccacaagtatccgtacagattgagagagtcttctcaaatgtctttcccagaacaatacgcaggcaccatcgttgtgagaacgagtagtcgtgtaggcaccttggggagaaagggagtttcgtgttcattgttgaaatggaacaaaatacacacacacagagagaaagagcttacctggatgggtttcgaggaaggttgataagggagggatgtgggtggagtgagagagaacgccattattgaacaagaattttgagtttgacatagctcagatctttggttatagagcgcttattttgtttattagaagaaaaaaaaaacagtatgaactatgaagaagaaaaggaatcgaagagagtttcttgattgaacaaagctctattcacaacaaactaactaactaacagatcgattagttagaagacagttaaagagcttaactgacttaactaaaaacttaactaatatcatttacattcctcctaaaactaaatggttagtgttgaaaaattcaatgtctcctactaaattcaacaatgtttcctgaaattgatagaacaataaataaattattgctaatagtcaaatagtaattaaaatatgaaaaagaatacatcttcaatagttcattttattctgtcattactaaaggatcaacagaaaatgaaggaaaattattaaagctcaacatacaatctcaagaaaatattatataattttagccaagtataatcagataagatgatttggaactaaacaaactagcaaaatgtatgtagacaagtttcatttgaatatttatatgtaagaagaacaatatgatttcagttcaccctcaactcatcatcaaaaccatacacttactaaaacgtagctatactatattatatatatatgtactcaaaaaagaaaaggaaacagaggaatatcaagtaataataagtagtaactaactagtaaccttctggaaaattagaagggtgagagaatgccagaagtatctctagctgcccatccaaatgtcttctgtgccatttttgtttgttctgaaatgagagagagagagagggtgagactactagagtgaatactcatcacagacaccaaaccaaaagacattgcatattcgatttctaaatattacaagtacttctaaaaataaaatcgacgaaaataaaaacaccaaatccactcaaattgaatacttaagagtggattattaccatacatgatatcagtatttgtaatatatcaagttagagaatgagtacattaaatatcagccacaatatcaataaaaccagaaaatctcatacacccctcccaaaaaatctcatcagtttaaactattctgcagtgaaaccatttgtgatacttgatgagtttatctttaaggagctgatgcttgagaagagatcgactagatttcaaacagacccagactctacaaacattaaacccaattttcttttattatttttggtatattggcaggcactaacaaatcaaatgtgtatataaataacgaaatttgtaacgataagcagaaagattacttcagtgataggcgaagagaagctgttgaccttaacactggtgacaatggtgtcgagattgggatgaaatgataaaaaaaaataattaggggttgggatagatgattctgcaccagttgaacctgtacaaaaaaaatttgtaagtcccccaaactgaataagccgcccatatcaaatcgaaaaaaccgataaaatttacaaacaaataatccgaaaaaataataaaccgcccactctgttaattgggcgggttggaccaaccaacctaaccaatccgattttgcacctttaattttttttttttaactttttagtttgtattatatagggaaatttgcggcaa

SEQ ID NO: 383463 - DNA, 1836 bp, Cannabis indica
aatcaataagaacatcaaagaaaatatagaagaaaaaccaaataattgtagtttgaactttgaactaaaggtattcaacctctatacatggcccaagttatagctaactagtctccatttttccactagcaccaatacaactcactccaattataaaggcaaagagtaaaaggcacatcccattacatgtcaaggcctagaaagtgataagaaatgaaatgaaaaaaagggtaaacccttacatattttcaatccaaataatatgcaatgaccattattcaattgccatgattttactttgccattgagtttaaatacagtactaatttgattcttttctccaactccacttactttacattaaattcaaacatttgatagaggagtgagtggggacctatatatataaatatattgtatgagtaatgaccctctatataaatttttgagatgtacacatgtcaagtgtgagagaatacaatattacttaagtaattaaacacaaattaagtatgcctccagccaaaacattgccacaattctatatattttgctagacactagcctattccactgtctaccttagtgtagacagccttttataaaaacctaatcatccaatgagaagagagtggctcttaattgatcatctacatctagtaattctttaatcaataatctaacctaacctaaccgagtagtttattaattggaacaataattaaaagatattaaagctgatttctacatcaaattgtgtatgtggtatgttccctttcctatccttgaaaaaaaatatatcatttagtctcttgatctttgacagatcatcattattgttcacttataactaaatggaattaaaaatccattgacttgaatttccgttcctagacaaatgttattggtttggttattgagtcacatacatgcaaacaaaaaggttgaaataatagtgttgtttagtgcagacttgtgcttttttagttgtgtttgtggatttcggtgctttataatgtagcacatataaaaaggtaaaatggacaaaatactagtagggaattgtgggatctatagttctatatattgacctttggaagtggaaaggtagtgacatatccaccatggttgtagccactagctcctcactaggaataaatacactagttactttctacttaaaatctagagacatacaccttcaatttcaatggcttacctgaaatttaagagagaaaaagaaaaaaagctagatttcacatggaaaaattagttttgccaaaagggtgtatagaagcctatagttaaaaatagagaatatattttatgaaagaaagatacataaaacccaagtgattttcttctgaagggcttttagtaaattttgttttgagtggaaaaggataatatacaaataaaaacagctataagattagctgttacaattttctagctacataaatgtaaaataaggttcataccttgaacttttttttttaaaaaaaaaaaaacaaacaaacaaacaaagataaaagtcacaatgtttatgtcatgtggaaaagaaaagagatgacttagtaattaggatgatctcatttgacattcactaccttttatttgtttattttatcaacaagtttgtacaatatgtgtatggaaggtttgttttttaggagtatgcttttgtctcaattggtaaggtcctttttgtttttagtactaaaataattttataatcaatatgatcaatatcatcaatatatataaataaaagttcacgtaggaaaaaaacagaaaaatacaaaaaggaaaaaaaaaattacaaatatactatag

SEQ ID NO: 383464 - DNA, 1477 bp, Cannabis indica
atttacataactaaatactaacaaactaaagcatacaagaggctgaaagtctgtcttctagacagccaaagaaagaaacaaaaaaaattatatatatacattgatgttgcatgtgatcaacataaacatcattgtttgacaatagaacgttacaaatgaatcctatcgtattatattatatagtattatactaaattgtaaattgtattgtttatcagtactatataaaaatatgacatatgatactacacaatacaatatgatgtactaatcggacctttaaagtgtgtctctactaacctgaacagcacagatgaggggtgaatgtaaacttcctgagaacctctgatagtcttatatttcccattgtgactgtatgcctttagtaaagttaaaagaagatttgtcagatgcaaagtcacaatgtcacagaatttttatcaagacagtaaaatatagctaaatcaccggaaaggaaaatagatggaaaatacttgtgataatgcagctgataacaaatttacttacctctaaattacacgcgtttgcgaaaaacccagctgtaattgcttttctgactatctgaaagaagattaaacaaaggaacgattgtcagaccaaattaactaacaattcaattacacaaactaaagaataaaaaacaatgtaagcactgatggcaaaactcactagtatatctccttcacaggattttaaaacgagacctattctctgagctgttcttctgagctgttctctgacttcaagcactttcttctgcgcattaatcagagaaacaacttaagaaaatgtggaatgaaagcaatctgaacaatagttgggtatttcaaaaaagaggtgtaccatcgcatgatagttaacaaagttcctatagcaccactgagaagatttaccagactgcaaaaatcctttgtacacattcaagaaggtcacatggtcaccctatatccatcaaacaaagttaacagacattgttactcaaacgcaagagtgaaagtacaacattatatagttatagaggtacacaaccccagagatagatgcaaattctcagggctgtagaataacagcaaaatttatccaccttaaaaatataataatctcattagaaaaataaaaaaaagattccagtacctcagcagttgcaaatctcaacttcacctcatccatctccttttgtgctcctctactagaaacccagatagactgcatagtgattcaattcttgtcaaccatattctaacaagggtaatattagactaacctcctcccaaaactttattcaggaacctcacttgtgacggagggaaaccgtggttacaagctaaacaaaggagagggccagagtctttggtccccaaccccgagatgaataaaaaccctcgcttgtggcggaggaaaactgtggttacaaagtaaaactaaactccaaacttgtaacaactctaggcatcct

SEQ ID NO: 383465 - DNA, 7039 bp, Cannabis indica
tttatttttttttattttagcaacatcctcattcaacttcttttttttcttattccaaatttgtaaaccagaccctacatccttcattttttgtttgaaaagactccccgagtgtaccaaatctctcttccctaatgactgtgaattgattggagacattcctcctcctccccccatgcctcttcaaagtggaatctactttggcatttagtattaccgcatttcgcctttgagttcctaatcgagatgttaagcaccgacagtctatgatcagactctgaccaatctaacacttttatattggccccatcaaacctcattaaccactcctcactataaagagcattgttttctgaattcatggttgcattccattttggatcttcaagagctttcttcacagtaatagggagaagataagctatgaagacttttggtttgtgaatgccagattttgctctggtttgcataggaggctgatttgttataggaaggggagaaggcggagatgaagaggaagaagaaggtaaagaagagataggagagggaagagaaactatttaggaagaagaggatttagacactattttagagtgggaaataagagaaaaataattggatgaggagaatgagggtgatactaaagatgactcaagaggttgttgtgagactatgggagatgacacaacatgtggagttgctattggaaaattggaaggaggagatgatgttgtacaagatgaatttgctggctttttgtaaggaaagtcatgttcattgaaaagaacatctctggacatgtatactctactatcaggggaaaggcacttgtagccattctatgtgagactatatcctaagaaagtgcttggcgtggatctgaaacatatcttgtttttgtaatagggtctaaggttaggtaaacataagcagccaaatgtttttaaggtagagtaatctggtttttgtgtaaaatagtttttcatgaggagtaatgttgtgtagcactcgagtaggtagtctattcattagataaacaaaaactctacatgtctcatcccaaaattttaaaggtaaactatagagtgtgctaataaagtcaaaccagtttccacaatgtgcatatgtttcctttccacaatcctattttgctcatgggaattaagacaagagactatgaattattccattacttttcacgagattggtaaaggatctgagctccctaccccaatcagattgtatctcttttttctttagatttagttgaagttcaatttttgttttgaactttataaaagtaggaagggccccttccttagttcttagaagataaattcaagtatacctagagtaagcatatacaaagcttatgcaatatctaatgccattgcaagagtctattggggaaggaccccatagaacagtgtgtaacacttgaaatggagttgtgtagactatttttgagttaggataagggagtttgtggtattttccaaggcaacaagcagtgtatagatcataaaacagttttattgatattagaaatattacatgtttccattacagacataacaatggatttagctggatggcctagcctgttatgccacaaattgaaattggaactaggtacattggaaaaggaactaaagcattgtaaactagtgtcactagtgataggtaatgagtgctagtttgacacaatagtaggattgaggctagactgagatgaggtagttggttgatcaaacttgtaaagtccattttcaacattcccaaccaacaaagtcttcatattgacttgatctttgacataatagtgataaggatgaaattcaaaaaaagacacgattatcttcaacaaattgattgacattgatgagatttttagtgatagcaagaacatgaagaagatttttcaagtaaagttgttgagaattgaaagaagattgaatggtagaaaagctagtgtgtataatatgaaaacctgagccatttcccatgtaaatttgatttgaaccttggaattcttgagtgttttgcaaatttgtaacatctggtgtgagatgatgagttgcccttgagtcaaggtatcagctcgaatcattgatagtctcaagagaggcaagcatggcctgcatttctgtcatatttacaaatccgccatggaatgactagaaacactgtggactagtgaaggttttgtcaaacctgtaaaaatatttgttgacagtatgtccatgtttgtgacaaagttgacactgaggttttgtgtttgatgatcctcgaccagttgtattagcaccacgaaaaccaccctgagaggtcgaaatggttgagagaagggtggatatgatggaagagggagaaagccatagttgttgtacaaaggagtaggataagatccaaacataggataaccagctcgtggtaaaaaggacatagctctaccaacatttgattgatgagtttttggtggaggatgagaggtaaatctgggtcgaggtaaggaattttttgattgagctacaagattgacttctagtttggctatgtcaagctcaaaatcagcaattcatttcgtacctcttgtgccattagtagagattcaactttagcaacataataagcattttttttgagttgataaggaagtgatgaatatagggtattcttgagataatccattaaagattgcttcgatgtgatcttgagtggatagaacaaagacaatcgaagcaagagaatctacaagatgcttaatattgagtagataatcattcagagaactagtgagcttggttttgcaaagttgagtacgaaattgactaatcttggcacaattttgagcagagtaatattcttcaaggttggactagatctcagcagctgtgttgtagccaaccattcgagtgaggatcttctcggacatggaggataagagccatcaaactagaagattatcttgaatgtcatactcaatgaattcttcagaaatttgatttgtgagttcatcttcattggtgatgaatttaggtgaaattgattttagatcaagaaatttgattaaacgatggcctttgatggcatcaaagacttgatggtgccatggtaggaagttgttttcatcgagtttaatagataacgagtgattgaaggtgagggtgtttgttttgggtaacgaagtaaaggaaggacttctggaatttgagctggaattggccatggagaaacgatgaggaccgtttaggcatctgataccatgttgagaacaagaacagagtatagcttaaaaaacaaaagtaaataaaccaatattttgtattgatgaagatgaatcaagttacattgattacacatgttagctttgttgaccgagatttttgacaaccgattaaatgagataacgataagagctttgggataattagtgcagatgatttttacgtggttcaggcattaatgagtcgtagtccacgagtctctgttgttaatgagaatatttcttttacagagaatgttcttggtgtgcttttctctctccttttttcgatcacccttctcattttttatcagggatatttatagagattggtgagaatagttaaaaagcggtaacttgtctttgagtgctacttatggataagcataagttcctaaaaatacaaaatagggcatgcattacctatatagtaggtgtcatagagattaagtgagattaaccttcatccttccttgattgatgtgattcttcataatggagctatcactatcccctttgattatcgtgtaatcaccctaaataaggcttacgatgtctgacatgtcctctaatgggcgtttccagacactttccccatgctgcattaaatgtgaggtgactgttcgaatagacccctctcgtcctggagatgccttacttatctcaactcccataaaagaaggtgtgctttttacactggtctgggagattactccccgaaccacacttattttcttctatacaatttttaactaatttttaggttaagtatcctctaggtccatgtgtcatacatagtcgtggtcatgtattttcggaaaaaattggggcaacatttacctctcaagtcttatttagtagtgggtaaatgagacttgtgagccatctccgatcttaataaataaagtggcacatgccccaagcgcgtgtgcagcattaatgatcgtcatcgttgatttttatttccttttgcaggcaacgattcgcttcccgtccattgatagactcttccattaatgctggtgtaagagaggtactcaaatgtttcaaccgccctttcttctcttcatacccgttcatccatccgttggatcacaaaattcgaatcgctacgaatctttaccgtacgatggtttctgatcaatgctgccttgcgcccctaatggtctataaaagccaacacttttctctactgggttactttcaccaccttgccatttttagtccatccaacccattcgacaaaattccaaacacctccgattatctcctactcgaagttgtcaaacgaaatattaccaccgaacgtcgtcaacctcttccttaatgcctttgtgtaagtttttgttcagacgctctctattttcttttcttttgcttgttagtgaaaaataaaaatgatgatattttcatttgattgtgcttggtttctgtggcaaggtggctacggtgaatgttactgtgacgccccccgcctaaaatggggcgtccaacgaccactgttgtttgttgttgtttgcttgcttctgggtgtttgaagcgacttccataccttttttttttcttttttactaggatgttttgcacccgatgcttgccttagagaacctctggattcccttttttggtaggcatccagagggggcctctttctagcggttagaggagccccattcccttttttgatcctagggtttgatatgggggctaactgctggattttcatttttagatgagtgaagttctctctgaccctcatactcacggtttctttgggttcgaccaagaaatcctagaccttcatcaaatccataccatgtcaacccccgccttaactggagcaaaatcttcgaagaaggggccaaagaaattggccactttggatgaagaaatgaagggcccagtagtctacaaaaagttcacctgtcgctccaatggttgggaagcagatgaactacatttgacacagacttgtgcccaccagttggaaaagatcattactgtttctggaatcaaaccttctagctcatgggtttaccatcgtctccaaagggacgaagagatgcataatcataactacaacgacttcggggcatggagccagacccacttgatgtctagggccatgcttctgctccagtactaatttattgatttttggtcttcgttggcctttcgccctaccaacttatatcacaagcttacaacctgttatcaggcttgtatattttttatgtttccaagaactgggccccgcccagtccggctaagattctttatttttatgaactcctatcagtccccaaaaatggggacaagtttaaagatggtttttacaaactccaggcccacccagctaatgagggtctagtgcctttcaacttttagaagaatgtgaaggagtaccgccatcggtttttctttttctttggctttaaagcctttgagcgcctggacatgctgacagactggatgagggttccctctatgcaccgcaccgtccccactcaactctttctaaaccacgcacgtgtgtttgctggttataaaaaggaagagttgaacacgggggacctagtcatgactgccaactgccggagggctaagttgatcctggagagccagtctgtggacaacttcaatttgtcaaaggttctttgccccaacactcgaaatcctgggattgagaaggcgctccgaggagatattatctcgttcgcggaggataattatagcaagtgtaaattcaaaagggaacaggagctagcatttgctcgcgcataggccgcttcggggaggacctcccaagagaaggcagggaaagagaaaaccccaattcgacctaagttcccatttctatttcccaactctggggcccccggtgctagcacctctggaacctgtaagtcccctttgaacattcacctcgtcccttctgttcgagactttgctggcctaagaccagtacaatttgataaccgactgtatagtttttggattctccattcaaggtggggtgataacgccaaaagcttttatttttcaaacttaagtcactttctaggtcggtttcggatggtctttggtcctcccgcaccaatcctcttggatcattcctaatatatgacttaaagttggttccttctctcggatagctttctacgggatgacgacaatagtcttttaatttgtgaatttaatagtatagaattagaccaccaaggtaggactagctccactgtactatacttgcatacgtggtttttgatattgttctggcacctttatttattttgaataacaaaacttatggaggaccttctggacgcccttgctcaaacttgcaatcccgagaccaacctacctgagcagcacaacgtgagcgtgatttcaggggggcctaccgccgaagccctcgggaaccaagaggtggtcctgattgatgaggaagaagaagaggaagaagtcgtccctccccttgatcggaagcgcaaaggtgtgatggtcgagccagagctttcaaagaaaccaaagagggctgacactcccggtccaagtgttgactcagggattccttctgaggtcgatgagtatcctgcacctccaagtattatcttgactcctgctcaccctgatgaggaaagggttcagctccgcattgtaaagcataactatgtcatgggagaactgtccaggggagatgctgaggcagaagctttaaagaaatgggttagggaggcccaagatgggcccttttgaggcgagtatgccggg

SEQ ID NO: 383466 - DNA, 4780 bp, Cannabis indica
aatattctttgttcatgtttttaggaatgtttaaatggagagtttgttcgtgtgggttcaaattccaagtttgctccagtagctggatatcattggtactatattttaatttttagtttttattgaaagaaactatatttaattgaacaattggaaattatttaagttctctgttcagctgtatgagctcatttatcataataaaaaggctaattagaactttgcccgccaaaactttgacatacactaaattatacccttcgaattttcaagccgttaaaaattactcacgaactattgaaattgttagattcaaaaaattctgtctaatttcgtttaattttactaatgcggcaattgtccatgtataaattacactcccgaattttgacatgtactaaattttgcccctaaattttcatccatatcagacttccgctaataaaattggacaaaaatcttgaatccaacaatcttaataattcgagtggaatttataactttctaaaagattcaagggcataatttggtcaagggcaaaatgcctaattagcctcagaaaaatgattacagtttcagctagattatctcttttaatattattaattgattgactttgcttattatgtttttttttcttactctctgttcaggtttgatggagatgggtgtgtgttcttttacttctctctctctatatatatgtatatgtatgtgtatgtgtatgaactactgaatgagatgtttaaatttgaagcatggttcatggtgtgcggatcaaagatggaaaagcaacatatgtttctcgttatgtcaaaacatcacgtcttaaacaagaagaatattttggaggtgctaagttcttaaaggtatctcagactcagaaaagaatgccaactcttctacaagtttattttgccattttaaagaacattagaaatcattcatttccttctgagtccaggcttgtgataattaatgacttgtctttaatctgctatggtatggaattctcaggttggagaccttaaagggcttttcggattgttcatgtttagcattcaaacgttgagagataaattcaaagtattagatttctcttacggaaatggaacaggtatatgtatatatagaaatggataatgaatagaatgagaaaatagaattttggttcaattgggagattgattgattgatactgtttcgaagaatgcaatttggtgatttgtctagtctcgaagaggactcgttaccaatcattagacttgtttaacacaactctgttacatacattcttgctgaaaattctgttctttctttggtttaattaggaggcagatatttactcagacactttcttacccttagtaatggaaggactaattgttttctatcactctcttccagctaatacagctcttgtttatcaccatgggaaacttttagtacttcatgaggcagacaaaccatgtaagcttcatcactcttttttcttcttcttaaacttgatgtaatcccactagattcataccgaaattgactcgaaagatataattttcatcatgaagatgttcttaaagtcttggaagatggggatttgcaaacacttggtatgctggattatgacaagagattggcacatacattcacagctcatccaaaggttgacccttttactggtgagcacacaccacacatcttcataagtttttttagttagccagctataatgtatttctccttagttgccgattttcgaatgcaggtgaaatgtttacattcggttattcgctctctcctccatacgtaacatacagagttatttcgaaggatggtttcatgcacgatcaagtaccgataacaatatcagaccccatcatgatgcatgactttgccattactcaaaattatgctattttcatggatcttcctttgtatttcaaaccaaagatatattagatattagggttaatatctgtttgaatcctgtatttttcaaatgatacaaatagtacctgagctcaattttcgataacttgaagaagcaaaaaatagttagtcttttcataacaactattcggattattattaaattttattttcacaaaaaatagctcaagatactattttgtaccattttaaaaagtacaggattcaatatgtcatttataaaaataaagggttcaatcagtaatttttgcaaaacaaaaagtaaagttacaatgcgtttcatcttgttaaccaaattgattttggtacattgccatggatttggcttcaaattaacaggaaatggtgatggaaaacaagcttatattgtcatttgacgcaactaagaaagctcgctttggtgtccttccacggtatgcaaagaacgagcttctaatcaaatggttcgagcttccaagctgttacatatttcataatggtgcgtacatttttcctatcttagagaaaaactaggcattagttatgctgttcctgatctcgttatgcaaccaaaccaatttttattagccaatgcatgggaagaggaagacgaagttgttctgatcacttgtcgtctcgacaatatagatatgaatatgatcagtggggaaatcaaagaaaaacttaatcatttcagaacagagctgtaagaggattttgaacattttattgatactaaaacttttcacttttcagtagcatgtaaatttttctgatgtcgtgttcttattgcttcaggtatgagttgagattcaacttgaaaactggtttagcatcccaacgtaaactctcagcatcatctctagaatttccaaggataaatgagagctacactagcaggtctatacattttctttttctcattttgtaaaagaatagtaaaagttagaattgctattaggcactagcggtgtcaaataccatcacgaggtgacactttataaatagttaccgattttctatgataattattaaattaaatggtacatatccgttttgttaaatgacgaatcaaatcctgtattttttaaaatagtacaaaataataccttaaactcaattttcgtcaaactaatattgttataatgtctccaggtcaggttattattaagttttaacttaacgaaaattgagcttagggtagtattttgtactattttggaaaacacaagatctaatttgttatttaagtaacaaagcggagagttaaatcaataatttttgaaaaacagaggatttaaaatagtatttaccttaaattaaaatacgtagaatttgattcttagttataccaataaagttataacacattgtggtggtgctctttaacatttttctttctaaaattgtctttgggtgaacgaaatcaggaaacaacgctatgtgtacggaaccagactggacagcattgcgaaaatctcaggcatagtcaagttcgatctgaatgctgagccagaaagtgatgatgaaaaaaacatgcatagagattggtggtaatgttcagggcttgtatgatcttggacctggtcgatttggttccgaagcaatatttgtccccaaagttcccggatttgattctgaagaagatgatggctacctaatattctttgttcatgatgagaattctgagtactttttcttatagaccaatttgtttacaaaatcaaatatatgattattagttacaatctttgagatgatgaagtttttcatttctttcattgttgcagaaaatcagaagtacatgtgattgacgcgaaaacaatgtcagctgatccgattgcggttattcatttgccttgtagagttccatatggattccatgccttctttgtcaccgaggtcagtaatcagtattattctaaatgcttgtttggtacgccgtattaaattatattatatttaattatagatgagaccaatgtgatggtgatagtgaaatcatagagaagagaatctaatatgttgttaacagaatttaaagataaaagatattatttattgtcattttggtgaaattgaatgttttaagtattgttttgatatttgatcaggaacaactacaagaacaagcagagctctgaactgtgaacctaatctgtaaacggaggaagctaaatgtttacgttcgttttactctgttgtcgttcttcatctattccgagtttcgaccaaataatttattcacactaattttctaataatgccaatcaataatttgttctagacataatttttttacttttaactttattcataattaaaattttacttaggaaaatcaccacgaaacaacaatgaatatattattaggacactcactatgaatcctaaaactcatgtggacccttttaatataagatgataaatatatttaatatctaaataataattttttaatcggttattttttttatttttaaattagaaaagtgaatattttctgaaatcatgttttataaaacagttttcacttttcaattttgaaaacaaaaaaaaaatcacttttaaaaatttttaaatagtttttttttaaaatcaatatttttgatattgatccaacctagaccttggaattcgaaccttggctcaacctcgaacccaaacaccaacccagacttggatctcaaactcgaactctaaacctagacctggacttggaccccgatcttgacctaaaccctagacccagatctcgaacccaaatcctgatccccaaccccgaaccctaagccccagacctgaacctggacctcgaccttagatatgaacccagaccctgaccctcgat

SEQ ID NO: 383467 - DNA, 639 bp, Cannabis indica
tatttgttaattaaaaaaaattatttgtagtgttaatctaattcaaatattttaagtagtggatgttatataattcaaattgaattaatttaacaataaatatacacaagactattgagttttagccttaattcccactaaaattagatattttgggcacaaaagttattattgcatatacataggttaattgtccaaatctaaatctaaatagaaggctaaatgttggtattcaattaagttacttttttgttttattggttgaatgagttttcacttaatttttcaatcacacacaattaagttgcttatttttttatacaaatgaattataaaaaggttgttggtgtaaaaagtcaaattacatttaacatgacattatggtgatcacaatgtgatcaaaaattatattgcatgatcgttttgacacatgtttgagccaaatttattgttgtcattgtcatttgtgtactgtctcattaatcataaagtaatcattaatcatgtagtaatttttattatatatgaggatgttgttttgtggaagccctaatcccaccataaaaaattttatttttagtcacaacaaaacttgtgactaaaagtgaaaaaattaggactaattataaattattattc

SEQ ID NO: 383468 - DNA, 1247 bp, Cannabis indica
ttaggttcagtatatcgttatattctaattatagaaagtctaattatcatttaacaaaatagaatattaattataactttcgtaaaacacagtgaagaagtgagtttgatgaataccataattatgggatcgaaccgaattagagcataagcaatccaaacagagctattgacaacagtcgcaagagaaaagaagaagggcatgtattccacactttttgtcttaatcaccaatttctgcattattcatttgatcatcataattaaattatgaaaaacaacaaaagcatataataatgactaaattaggatcattgccatttttcatttaaaaagacaaatgttggttgtcttaaaaaaaattattatccgatatcaaatattttaatataaaatagaaatacaagatttaatactaaaatgcactaattattataaaatgtgtaattttcacataaacaatctagagcggtcattttttattgataattattgtaataaaaattccatgttcgaaaattgaaaaatacctatttttttcacttatttgaaagaaaattgtaatgatatatacataagatgcataaaaaaaatggcaaaattatagtaacttgtaaccaacattaattatcttatctaactttctttttaaaaataccatttttgttactaaacatatatggtaaattctcttcatgtataaaagattagaaaaaggatactaaccatgatggccaaaggtgaagagtacatcaaaatattgaagaagacacaaacaatgcctataatgagtgaccttttagcatgagaatgagcaaggtttaaagccaaaaatgctagaagagaagtgaaaatgagctccaaaataaggaccacaagtacttttagccttgctttcttgtctgagaaaataaagaagattaagatgaaacaagactcgatgacaatcccaattccattgatagtcaacactaaaagacttcctggctgcaccattgggagcccatataggccccataacatgcagttcaatagggttgcaaggtatggtattgctgagtaatgctctactctaccttttctccatatatcaatcattgttggcctgcatcaaaattacccattaatatatagagagaaaattagaattcaacttttagcatccaatctaattgtaattggatattcagctttttgtaattggattggattgtatctattcggttcaattagattggattggatgat

SEQ ID NO: 383469 - DNA, 2831 bp, Cannabis indica
ttttctaactttgttatgaaatcgatgtaattttcacaaacaagaattttccgtttcatgggcccttattaaacttttcagcccaatttaaataaaaggcccagcccgatatgtatgccctaagttcggcctatataaatggcctcactttcttcaaaatccccatttcatcagaaccttcacggcgcaggagcacaatgcagatcttcgtgaaaaccctaacgggaaagactataaccctagaggttgagtcttccgataccatcgacaatgtcaaggcgaagatccaggacaaggagggcatcccaccggaccagcagcgtctcatcttcgccgggaagcagctagaggacggccgaaccctagccgattacaacatccagaaggagtcgactcttcacttggttctcagacttagaggaggagccaaaaagaggaagaagaagacctataccaagccaaagaagatcaaacataagaagaagaaggtgaagctcgctcttctccagttctataaggttgatgattctggtaaggtgcagcgactgaggaaggagtgtcccaacgctgagtgcggtgccggaactttcatggctaaccacttcgaccgacattactgcggcaagtgtggtttgacctatgtgtatcagaaggccggcggcgattaggttttgtttttattatcgttttttaatttaattaaaaaaatgaaattatcaaagtctggatattttttttgagttggtactgtttgatttctacttaattttagtttatgcaattttgctaagtgcttatgtttactgttttggaactttgataatatagttatattagttgataatttgtgctctttttatatcatttgaattatgcttattgagttcttataatcattatttgttaccctattaaattgattattcaaatcgttaataacctatctgagtaattattattttcctatgaagcaaataatgactagttgaaatttgtttttaaccttaaataatgtaatttggttatttaattggtatatttgtacttagactgcacttgttattttcagttttgtgttttaaagaaaattaggcttttctagcagtgaaatgttcatatagggaaattggtaagccttaatatcagctttcttggtttaagaattacaccatttcattaattcattcagcttcaacacttttaagtaatcaaagtaatataattgtatggaaagcttgtgtgtggatgtgtttgtttataatctagttcaagttcagtgtcttgtgaggtttattacttgtgatgtaggtataggacgaaaaaggtagtgatgtttgtgtgaatctatgtaagtatattagtctatttctatgttagtttgtttcaattcatccacatgaataattaaaaccttttcaacccctatggtttgttcatgagattgacattttcattgaatgtctgatactatagctggatcatctcaaggttcagatgttgattatccatgaaaaatcatattttgtgacctatccttattgtaacactttctagtcatgtggggctgctggattgattggtagacctgcaactgttgttgcttggcagctatgcagaattgtcgaataatcgtgcaatctcatgtggctcgggacagtcagttaatgggcaaattaaattttcacaacttctctcagtttagcactcaatcaacgtgaaaatgtttgttgacagtcgctgaaaaatgaagtattgaatttcaaacctcctcattgttacattcttgtttgtgattggatattcatttctatgcatgtttacctattatatacttaatgtagttaatgtattagtatatgttaatgccaagcaaaatgttcttggccaaagtccaaaacatgaaataagtagaaacaaaaagggaacaaaatgattgggaaagaattttttgacatgttttgttatagaaatttaattcatcaaatgagttagccttaaaataggtaggcggaaacctgatcattttgtaactttagtctttgtaatggccgtgttcaacatttcttttaatttttcagtgtctaggctttgtatataagattcctcttaactgcatttggttgggaggaatgaaaatatgaaaataggaatggaacggagtaaaatttaaaatgtataaaaaaaattgataaaagaatcattaattttttttcttattacattggaataattttttctttcctttcaaaatgggatagtcattcatgagtattttattagaatgctattttaatgctttaaaatacaatcaaacaaaaattgtttttattttagctctaaccaaatgtaatgctaaaggtttttatggtgccaagcaagcgtttcacataccgttattgaagtattttattgtctcacaaactatgagaaattactaactaattaagagtctcaacgatagtgttagtcactttaatgcgtcaaatagcaatgaaaggggcattcaacttcaagcgaatttattgataatttacttattgtttggctacatgaactactagaccattatatattttgatcaatgagcatttacatgtaaaaaaaacaaataagtaggatttatccccttgaattatgattttagagttttgattcttgactttattttattgcaaaaactagtaaacaaagccgcgcttcgcgcggttttaaagcataatttcaatatatatatttaatatcatatttatttaattaattataattttttaaaatatatatatacaaaaatatataaagaaaagtgagaaatttatacattttttaaaaaa

SEQ ID NO: 383470 - DNA, 2378 bp, Cannabis indica
ttcctcaccaatttcttcaaatcttagcaggttttactcttcaacttacccttgaagctttgaggtatgctcttttctatgttgtctaaagaattctcaagttttaggtttgttttggattaaggtcttaggatttcagggctgggatgccatactagaattagaataagtttttggatgtgatatagagattgtttaagtttaatttgatttgaaatagagctactaatcttagggatttttcaattttagggatttttattaatgttgcgtcggtttttaactctcacaattataatttgtggcgtttataaaatctcgcaaacataataatcgactgttataaaccgacgcaaaataaaaagaaagtttttaaatttttttgctttatttcgtaagttttatttttagcgtcatttaactaaacgacgcaaataatttattattagtgttgtttttaaacagacaggtccaattatttggacactattctcgtcggtcaacgctatgaacagtagcgttgactgatgtgaatagtgtaatttgtagtagtgtttgtatctcattccataatagggattctactgaaatcctagactgtagggccactactttcatgtcatctttaactttcttctcaattgttgcctccatcattcattggatataggctttagggctcccccaaggttgttgtttgatgttggtcaacgagctgaccttcatatcaaagtcctttgctgttataaatagattccagaacatggattgtagatccttcaagttttggatagagccaaatgataatattttccaccagttttaggctaattcagaagtcattaatgagaaacacaaaaatttcccatcttcactgacttgtgccacttgcatcagcctagggtacttggacaagtgagccttggggtctattttacctacgtacaactccatttacagcattcagaatttttttagcaacttttccctaatgattctcttcacacatggtttcagatcctcatcttctgaatcggatatggctctacttttcttctgggccagacggtctgtgatttttgtcaatacgactatttgatcttctagttgcttggtatgataatccaatagttcacgtccacgaattttgtcgttgatattttttcggagatatctcctatgcgaggtctagccttctagcctcttactttatcccatttcacatttagatggtccttgaggtctgccattgacaagttgtcttccaggtctagatcttccacgtctatgcttttgctgacaaagtcaatggggcagtctttccatccccaaatgttaggcttttgcacctgagcgtgagggctattgtttcgattgactctatcccgtggaaaggttggataatcttacctttgggctcaagttgtcttctctttctgtcagggttggtcaactccatctgtgttgcttcatgaaaaattttgagtgggtctgtttgaagggtcatctgctttactttttcattttctttttcttggagcagaagttttggctccaagatggttgaatggtggagtggggatgttttcctatgaaagaccagctttagcacgcaatcgtgtgaaagattcttgcaaatttggagaaaagtcttcctgatatgctaatattttctaagtatctacgtattcttgtcccaatcatactacttcaggatcctactcgtagtactcctcgtcatacccctagtttttgtggcagtcatcttgaggatttttatctagattttcttgatcatcctcgtcaatgggttcttcattaatgttttttcctagattggagatcttttttgagtggcagtcattgacctctaatctttctttgtcttctacagtacttgcataaatgtgcactagaggaggcccattaacatcatccattgcaacatcttcgtcaccctcacatgcagtaagttttgtggtggtttttctagtgctaccattgttgtaggtgacaactttgataaaaaaaaaatatttcttcaagctctcaatgataaaactaaaatatttaccgagattttagaaaactgattataaatatttagacttaaaaaaataaatataataaagaagaagaaaaccaagatttttacattgttggggtgttaatgagccttagtacacgagttaatattattagattaattttttttatgtattacaaaaggatgatgttcttgctcgaacttaagaacctaaatttcagtattagtatttaaacaatcatttttcaacccttttctgttggattttgtgccctaaataagatctatttcaatataattagatttactagttaataaagatgagaaataa

SEQ ID NO: 383471 - DNA, 1625 bp, Cannabis indica
caattcaccaagtattataaaccggtgcctgtgcattttcttgcagggacctgtttgtacgcatgtggaactagaaatgagtaactttaagaagttatcttgttagctagttgtttgacacaatattaaattgaaataccatttttattcattaattggtcttaaatgtgtgttgttgctatacaacgtacattttttgtgtaacaaaagcttataaatcagagcctgcttttgaaaccacattttggctaaccctacgtggcataccgcgcaagggccatcactgaagagcgatggtcatatagctctttaatttttggccacctttgcagggcataccttggaaaggccatcactgaagagtgatggaaacttagctattttttaaattcctggacagtgaagcattactactgaagagtagtattttgtataagtgggctattggtagtacttaccgagatgttttccattccagtatcttggtaggagagctaactctatgttttcattgtactcgccaaacttgcatgcacctttacttattatcttgtaacttggtgcagacttttttaatttagaattgactatgttgatgggaggcacgacctccttgacatgtgatcaggagccaaaaggttttcctttcatcttcttggccatcttccgcacctcatcgatgcgagagtcaatgttctttacaaaagagtttagtaaaatcatctcgaatgtgcaagggcccttctgcatcagaaaatgaaacaaagcaaaaaactcaagaataatgaaaaatgcataataagtcaacaaacaaacataagagactctggttcgcgttcaaccattgacatcgttgtattttaaattcctgagaacaaactgtgtaatgtccccacactctagaaaactaccatactagaagaaacacatgtagttcatcaaggtgaatggatctacctagagttttgtgagggtggaatgaagtgaatggactctctactatatcatttactctaagcaagtagtcattgactgaatactggagatgatccagttttagagattaaggatcgaacccatcctttgcaacacgatcaaactcctccaaatgaggagcatgtgtcaaatggaaaggagaattacctctaccgaacgtgctagcacctagagtatgtctatctaaaaagatggcagcgaaacagacttttagctccctagccttattcatgggttctagattcctcctcgtccactcctccatccaacacttatctttcttgacggcctactttacccaatttgcaactatctcaacaatggcctcctttacatcgtatcgattggagcaaatcccacaagaattgggagttatgttctggtgtggggatagcagcctaaccctcctaagcttctccatgatcatcgaaccttctacttttagttgctccggatccatactgcaatagaacttttacctctctcagaaaagaggaccatgcagagcgaggaaagttatctgaaaagtagataagtaaaggttggataaaattccttaaaatctggagggttatttaaagggaaataagtgggtaaagtttggtacttacctgtgacagtcagtagtc

SEQ ID NO: 383472 - DNA, 3609 bp, Cannabis indica
aataaaaataaataattttaaaagtaactaatttaaaaataaatttaaaagttacttaaatatattaacataattaattattaagatttataaaaataaatttttaagataaccaaaatgtatctcaaaactaaattatatagtatataaatattatttttatgaaaaagtaatttattggtttcttattagtatcataagtaaccacaaaattattttttaaatgcagaaaaaaaaaaaacagaatttcaagattatttatatttgaggcattttagtttgaaattaagatatactttaacgatgtggcaaagtattattgtaaatgaggtttattaagaaatttttgtgattattttacattttaggtatattttatttttaaaaatcccaataattaaggtattccttacatttgatttgttatttgttaatcttttaaggttgtttacacatttgataccacctctttcatctaaaatttactttgtgtttttaataatacttatttggtaatctctattttaaaataatcatacatatttactactctaaatttaaaatttttgataaaattttatcaatacaatcaaattgtttaaaattttataaaatttgaatttaaatttaattatttgattatatataactaaaatttatttaattaaattattaaaattgtatcaattaaattatacttgaaagtattaaatatttataatttaaaaatataaagtactaattaaaaatataattaaaaatagagaatactaaaatgaagatattcccatcttctaatgaaaaaatggtttggcgccctttttcttacgatcggagaagagaagagaaaaatatctccggccagaaagttggtcaaaatggacttgattccgttcaaccacaggaggcaggaccagctggaaaagcactggcagcagctgcagtacctgaccttgcaggatcaggtaaatcagaagaaaatcgtacctttgattttctctgtttttcttttttccatttttggtgcctttgttcttaggttcatgaattaagaactttccctaatggtgaatgatattgatgtatgagttgagcatttgattttaatttgtagtaatgatttttcagtcccttcatcactgagtaagactatggttaaagctgataccaaatcactgaaatcatttctctgtttagtgttttctgattggtttgttgactttttgaaagagcttcaggctttgaatgtttctgttttatatacttatttacactttgagtttacatccaatcttaaataactttacttataaaggctcaaccttgcttggagaagttccatttaggattttatcaaggctcacgattggagaaggagtagattctggtaaactaaatttctcagcatctcagaaactctgttatttgctgtaatttcaaccatattccacatttcagggagaccaatttttgtgcctatagtaaccatattactagggacattgaactggaaatagtgatgatggttttttttttttggtaaatgaggaagtttgtattactttacaggtatatctaaaccaatctttatgtgtacaacttgttttttcagttacaaagaaaatgatttgatcaaaaatctcatttttgattctagaaatagttgcattgtatctatggtgggctgggcactttattttcccaaaaggctctgttccaagctctccaaacatggtaaacaagtgattatggctttcttcacgagccccattgatcaagcactctttcactgttataacacccaagagatataatcagtctctggtatgcagtctcctccacacagctaaccacactattccatattccatcatcccacctttccccatgatcagtagaaagtaatttagagctcaaatattttatactataggacatctgaatcaaatctatttggctacaatgatttttgagaatttctttcacctgtacaacctttttccatttccaactggctgtacttggagccttatagctccaccagttttcttcttttatatacaccaaatgaacccacttaacccatagcttatctttctttgtaggctcgtaagaattagcccaaacatattttactttttctcaaatgttccattcttcaatcttcttgattcccaaacctccatgcttcttctttttacacagctgctgccaacctactttccctgaagccatgctagccttattaccatgccacaaataatccctacaaatcatatcaattttctgcagatttttttttagggaaaatcaaaatttgagcccaataggagtgaatagggatggtgttgtatgtgcactctagtttgttattctgcttggtttttaatcactcgtaataactctttcttctaaaaaaactcagctcaaaaactctaaaatattgtagagtataattttattcacatgtttctttcttggctcttcttataataaaactcacctaaaacccatcccatttctgtctagctttgtagttctatgttatacatgtatgtaaactctaccattttgttgttagtttattctgttggcgccactcgttgatattgcctaatacttttttctacttccctccattgacccctgttttggcattagatagtggcgaaccagaagaccagccttatacgtcagtttctaaccattagttcagtacaaacaggccagacaatataaattttctctctctaagttgacatgaaatatatgattgaaatcatattcatatattatatacataataactaggtatatttaaagagctcttggaaaaatcagtaattagtttaagatttttatttgaattaatgtaatgggaaactcactacaaagaattacaagttttgggttacgttaaatgattctatatttggcttattctaattattacatggcattttgctctgattttcttagttttagaacacatttgagtggtgctatctgattttctaattactttttttgcagtttcagtggtgctatgtgttgaaaaagttaaagcaggaataggttttagtgttgtacaaagttttcatacgtgaatgttggttatatgatagaagttttgctagtggctagtacacatattagttagttttcctcttcactcttgatgagatacatgctgtacaaattttagtatatagaagatatgtgtattaatagtgataccagaaagttgtagtgaatgcttttgcattttatgggacttaatccattgttatttttgtcttgtgtatggttgacttcgagttataccatttatggaacatcttgaatatcttatatggacttaatccattgtttcataataaagaaagaattttttagtagcaaagccataacttgctagcttatatattaatgactagcttttacagaaatatattagggatatttttaaaaatatacgtaaaatacaaaataattacaaaaataactaaacaaatctcaattacaataataccttgccacgtcattaaaaaataccttaattttaaaataatatgcctgaaataaaactaatcccgatttttttttttt

SEQ ID NO: 383473 - DNA, 1784 bp, Cannabis indica
agattagtaaggcacttagcactaattaattgtattacgtggttatatgtgtgttttgtgttttatgagattctagtgtgtgatatgcatgctatgtataaaatatttttatatttttctacccgataatagtagaaataggtcgaacaacaatttaagtcacatggatacgagttatatcaaggtaatggaattagaccattttactcttagggttacgagcttactgtaacatcctattagtttaggcatgctacggtacttttctcaattattatgcaacctttgctaatcaaaagctttaatgtaaaggtgatttaatttaaactttaattactaaacataaattgtattttatttgtaaaatatggaatctcatatctatattttttaactatatatataatcaaaagatgtcgcacatcgactacaaaatcgtgagttctggctgttccaaagatccaacactccaagttgaactgtctcgatatgtacaatcttcatccagctccaaactcattgtcgttcagcaataactttacatttatcgcacataaccaattaattagttgtgatttttttttaattcatctaatctatactctataataatatgtatttatatatttatatgttatattaaaaaaaaattgccatttttatttttttcaaataattatttataatttttaaaattatctaatgtgtaatctacaataataaatattttattaattattattaatatccgactatttaaaatgaatttttatttttgatagtttttaattattataaataacttcgtacaatctatatttttatttttattgtattatgattaatatttgtactaatcaaatataatataaatatattatataattttattttattaataagcaatttaaaaatactagacttaaaatttaattcataaataataaattaattagtttaatatataattttaagaaattattaatattgggcgcggatgaaattttattattataatttaaaatataaattacacatttacataatttattaaaatttatttttttatcaaaatatttcaggtaaatacttctaacactaacatttttatataaattctccaaaaataaattaagttttgcgacttattttacaattatcatccagttacaattacttttgtggagaaagcattccaacaaaatcataaaagaaaatgtaaaaaaattcataaacagtagttcaattatttctttttattgaaaaaaaaaagtctaaatagtctttgaaaagcaattacatagtcaatcacaagcccaatttattaaactgaaaaattattatcttttcatttattgtattttaaaaacacattgtgatttcttgggggggtttttttcgaatagaatgaatttctcattaaaaagtaaaatgccaaattaagtttcaaggacccgactaccacactcttgtcatatctatagacaagacaaatttagcaagtgtgtgagctaaagagttaacagaatgattacaaaaaaaaattaaaaacattaacacgattaaaaatagtataaatatttttaaaaatcaagccaaactcagccaagaacaaatatcttttctacaagacataaataacatgttgacaatttgattcgactctacattgttgaagtcaagacgcaaatagagaagtatactattgcaatttttttgttaaattttcactaattttaatatttgtcacaatattactatttttttatatattttaaaaaata

SEQ ID NO: 383474 - DNA, 1689 bp, Cannabis indica
atatatctgatcatgattaaaaaattgaattaaaaattttataagatgccaaactgataaatattatactgaaaaagaaatatttgcagcaaaaataatatatcttatatttttaattttatacacttatatatactatatattttttttcgacgaataaaataatttatgtatgttacatttttgttacaatttttaatcctaatttcatcaaatattagacctgactaaagtaacaggcgccaattgattaatggttcacttttaataaaaaattcatactgaaaaaataaataaataaaaacataatctttcaatttcattatttattttaaaattatttaataatttttcaaaaataaagtttaaattagactactaatataataacaagtgacattttatttaaccaaatcacaaaatttatagtaacgagtgcaacaaaaacataacatataatatttaatttatcgaaaatataacatataatataatatataagtgtaaaaaaattaaaaaacataatataaatatttaaattataatgcaaatattattataatttttttatttttttgaggttttttatatataccttatattaattttatttttgtgaataggaagggaatataggacaatcgaacgcgtttgaatataattaggtgttactactaatgtccccctatggctgtgacaaaaagtaaattgcttactcttttcacacttaatttgacaattaataatcatcaaatatcaatattttaaataattaaaacacaattagttggccccatttctttcttttaataactaattaagttaaaactttttttttaattttattatttttgttataaaaatataaggctaattagtaatttttctccccgaattttacatgtactaaatcatgtccctgaatttttttggccattaaaaattccccctgaactattaagattgttaaatttaaggatttttatctaattttagtaaaaaaaagtctaacatgatgaaagttcaggagacatgatttaatacatataaaaatttgaggggcataatttggtagatatcaaagtctgatgactatgatttagtacttgaaatagtaaaattgaataaaattaaacaaaagtccttaaatttaacaaacttgatagttcaaaaaaaaattttaacggccaaaaaaattcaaagagcatgatttaaaatatatcaaaatttaggagaataaattactaatgagccaaaatataatgaatggcttcacacgtgccatgttcctatgtatatgataaaaagttataatttattctttctcttactttttgtgtgtgtcctttttaaacgcgtaatgggccataattcaaatcatgtgagctgcacgtgctttagttgatcttaagaaattctagaccagagaaagaaacatcttcacctgtcggcatacatttgtacttccatatctcttacctcactataaacatttttttttaaaaggaaaaattgtattattaactaaccaaatcaactcttaccaaaatatatctattctatataaagtgtgcctatataactaaaattcttggtttatgagaaattcatgggtgatttttatttttatttaataaaataataaaatattatttatattataataaaataataataaaacaaatctta

SEQ ID NO: 383475 - DNA, 1819 bp, Cannabis indica
tggtcaaataggttatcttccaggtttactagcattcttagatacatttgtctggtcaattacataattgcatagagtattggtggctcttaacatatggaatttcaatatacaagttgtctcaggcgatcaaattagttatcttacttctacgcgaaagccctggaaccaataaagatattcatcttctgtggaagccatacacatcaaacgtgcataaagataaagaaggaagaatatgcaagaaaagcacattggtagtattacctgatgctagcaagcccaccatcattatcattttgaaatgtataataatatcagaaaaaatggaccccattatagcatctaatcctcaaaatctccttcagggatcagtctatcttcaacactgaacttatggacaaaacatttttttaaacgcaaaatgtgaggaataatgctgtttccattgttgcttttgcatgcagaaatttgctactcttatccctgttggacgaggacaagcatcagatttatttgattcacccaacccttttcttgaaccaatggaagcaaatggtctttcttcaagaaaaacagtactgcagacaattgtatggcaaactccaaagtcatcgccataaccttttccggcatatgaaaattttcttgtgcctccactttcccactagatcatgtcctgtagagtcaggggcagtgttctccatctcaatatgctagagcctggagggacataattttgccaacattagaaaatcagcatagcagcgaacacgcaaacagtaacacctcttttcacttgcattatgcgcatccagatatccttgtagtccactgctttcaatctaaaaaaaaagaatgtcttcctttcatgccatataaatttatatatttctaattatataattcggtttcaatttcaacatagagctgaacctctatataatcataaaagattgatcgttcagttttcaggtgttgaaaaagttaaggaatttcattttcaactagtgtcatcattctttaccttaatcacaacataaataatattaaaatacaaccatcaccttgcactctgactagctaaaacaaacgataatctttagtatataaatcccgaaagagatttaagggggaaaaaatcaagtaaatggtatggttgtatgcgcattcatatttacatgattattcatcgttgtgcaatgtgatgttccccaataactaatttcaatttaaaagtttaccatgtctaattcaatattaaggaattgagggaaacaatgaaaacacctgaggtagtctgcgggaatgaaatctgcacagtgcttgggcttcagttcttcgtcatcagtgatggaagcttcgcgttacgccgacgccattggaggcactcctcgagagaaaggtagacagagttgagatttgaaaagggaattgggattctgaaagattaaaaaaagaataataatataaaataaattaaccctgaaaatgctctaagttgagcccaaaattttcatttccatttataaatcaatttgaggtcaattgtcatatcattttggcgaattttaactaatcttctctttcaaaaaaaaaacttgaatataatgtgtttaaccttgaaataagaaggattaaaagtggcgcattgatagggcagcctagccgtaattagttagtgataatttttaaacatttttaaattgaattatattcaagcggttaatatcaataggagctcatttcatataaaaatatagaaaacaagctaggaagttatgtaattttaattaaaataaataaaaattaatattaa

SEQ ID NO: 383476 - DNA, 1274 bp, Cannabis indica
aaaaaaaaaaattctttggtcgaagacttgggtttgaatttgagtttggggtgcttaagtcgagactaaagccacttagatagtggtcaaaactagggtctagctcttggttcggggcttgcttgggttggagcttgagactcaagtcgagctcaagttcaagaccaaaatcgaggccgaatcctaatgtaacactttgagaaatgtggttctaagtaattgtgtattaagttttgtgcatgctcatacttagttgttacttggttgtaatgggtattgtaacagaatcaaattacgagttacaatatttagtttgttcttaaaggtgatgtgaataagattacaatgtaatcacattatattatggaatcctcctaacattcaaaaagttaggttaacaagaatcacatcacaatagattataaaaagtaaaactaaaatgattttaaaaccctttctttatataaaaataaaattaaaatgataataattttgttaatttatcatccattccaatattcatcattccattctattactattcgtattataattacattccaccaaaccaaacccggattaggaatattcttgccacatgtgccagaaagcgccacacatccgcctacataaggagcccgaaaaagtcggccatggcaccgacctgcaaatccaaactgcatcttaagctaaaatatgagattttgttcaagtacaacataacaaattacaaactaattacaaaaacaataaaataacaacatgtcttggatggacttcctctgccctgatagattgcaagatcaaattgtcaacagtcacttccttaaattaagagaaatcagcaagccttgctcaatcgcctccgctttgctcggctacatctaaatcagaattagcaatgatacgaatgaaggccaagagattttaacatgaaactattgctattaggcactaatggtattgttcctttaagaaattgaaagactgtcttagtcaaaaaagcctctttactactcgaaactttctcactactttgaaacctgtcacaactctaatcccaaataataacataagttttagttcaggaaagacaacagaaaatgtttaaaaattatgtttcttcacattgaatttagtaacatctgaatgcataagcctcaagaaaataaggggcaaatgccagaatctcagttacaaatccatttcggcaatgtacagcgctaataacactattaaaaacaagtgttacagagactctaatttattgcctt

SEQ ID NO: 383477 - DNA, 1426 bp, Cannabis indica
ttggagagaaagagttgatgttccattgtgggaagaatattaacatatttttgagatatggaaatttgtaggatatatttttgttatggggtgtcatttcaactttcaagcatatataggaactcaaattttccatttgaatttataaatatataattgaagataatttttgattatataacaaatttttatttgattaaatttgaattcaacgtctgtcgtctatatgatactaaatctttattttgacaaaagataggtgaaatgattacacaccttttttagaactatcttaattttatgtttgttctagttgttattacatatgtggcttttttttttaagtttgtttgattgttttttcttatggtgtatgtcattcgtgtgaactttagttttagttttgttttcaatatatttgtgtggccttcttttaatagaaaaatgaataaatgatttttatctttaaactgttattactaccttattgcactctctaaatcttgtgttatattaaaaatatattttgaactattccctttgcaagttgtggacattgtgttactttctatcctacttggctataataaattagttggctaataaattaattagtgatacatatataatcgaatttaaaatttaaataatctatttttttattaaaaataactagaacattaaaaatatatataacattatattagaaaattatttttatcaattatattttattaattattacaatatcataaaaattaattgaaaaaaatactgatattaagttaaaacttaaattaaaattaaaataaattaaatttatttaaggatgtcaactggtagggtataattaagtagggtatgcttatttcacgatcctaccctatatataaaacacaaattctacccactcatacccaaccctattatcctatgaatttttgcaagtagtatgaatattgccctaactggtatagggtactcacagcctaccctaataaattttaaaaagattaaaataattaataaaattatgctataaaaaaataaaagaaagaacaaactaaatgacataaaaattatcgatatatatgtaattatttgaataataagtaataattttacttatgtttgtaaaattaattaatttttttttgtatggattataaaatataattagttaataattaaaacaataataaagcattatagataataagtaattattttttaaattttatattttatactaataaataaaaagtaacttttactttcatgtatttttcaaatatgattgaaatgcatagtattaatatttgtaattatttatccgtatagcgtgatactattactattactatatattcaaataataaatctgataaattataataaaaatataaaataattaatatatattatt

SEQ ID NO: 383478 - DNA, 1002 bp, Cannabis indica
atgaagcagatgagcattgtaaattcttgggtcttacaagcactattggaaggaataaaaatgtgatttttttagctttttgaaggataaagttcgaaaacaaatctagagttgggataataaattttgatctaaagtaggtaaagaagttttgattaagtttttggtccaagcgctccctgcctatactatgaatgtttttcttatcacagttggtatttgttaagatattgagcgctccataagtaaattcttgtggcagtcatccaagagcaatggtattcactagatgagttgggacaaactctcctctcacaaaagtaacagagggatgggattttgtgatttcaaggactttaacttagttttattagctaaacaaggctagcgacttcttactaatgaagatagcttgatgggaaaaattttcaaaattaggtattttacttcaagtttttccctaactgctacgttgggtaacaatccaagctatattttgagaagtgttctcgaatctcaaaatgtggttcgggctggtgcaagaagaattataggtagtggttcttaagtaaatattctttctaatctgtggctcttggatgatgagaatttgtatatgaaatcttctgatccagctcttattggtaaaacaatatactttttgatgaagactgaagctttggagtgggatacagacattctctctgatgtgtttattgggttttatgccctaaataaaactcttatttcaatgtaatctttatcttttaaatatcaataaagaaactgaagtattttcatcacttatttgtgtgtcatttggttcatgttatcatttacttatttatttgatttataaattcatccaaacccattttacatttatattcttgtttattgtgtcgttagcacagtggaaagtaatcaagattatgtaattaaatatatattcctagatttatcagtacacaaggtttaactgatatgtgaatctacaacata

SEQ ID NO: 383479 - DNA, 1493 bp, Cannabis indica
aagaactgacagataaaagattaatattgaaagtaggaacatagagaacattggatagtgttaaagtgggagtgatgatgacagaaccaatgcaagacacagaagccacttggccatttgggagatgaacaggagccaaagaaggatttggaaaggtctgagaaaataaatttagatcatgacaaacatgatgagttgccccagtgtcaataatccatttagagtgatttttagaaggattcatacctgaaagatgagaaaccagagggggttgaatttttggtgtggaaacattggttgaattctcttgaattcgattagcaagcagctgaattatagattggcactgagctgtagtaagaccatctgtcatgatggaactaaaacctttattatctccattattatcaacaggggcctcaattgaattagcagcaatttttgaggcttgaggttttcctctcccatgaaatttatggcctggagggtacccgtgtatcttgtaatactttgcaatggtatgtcctgtcatcccacaatgagtacacaccattttagatctcccaaattgagaacttccagtaaactgcccagattcactgttctcagctgagacattattcagtcctctttgcctttcttcttggattaaggttgcatacaccttattgatgttgggaatgggatcttgcatcaagatttgggatctggcagcagaatatgattcattcagaccaactaaaaattataacacccgatcttgttcttgatatgcctgtacaatcttcatagccccacatgtacaaacaggtagaggtcgaaagtcacgaatcatatcccagagaccctttaatttcgtgaaataaccctggatgttggcactaccttgaacaagaacttgaagagccctcttcacctcaaacacctgaggtccattgttctgttgaaatctttcatggagttctgcccagatagttgctgcattatccatatacattatgctctccccaatatcagaagaaacaacatgaaatatccaagaaataaccaggctgttacatcgattccacgcatcatagtcttcgtgatcaggagttggttcaggcaattgtccattgacaaacttcatcttatttctggcaagaacggcaacactcatggcacgcttccaagaattgtagttttctccccctgtcaagatcttgggaacaagagtggagctcggatgatcactgttactgaggtaatagggattccaagcttcatccttgtatccacgagagacctgatcatgagtttgattattgccaggttgatcacttgaatgctgaccttcttctataacagctccacttcgtgtttgaaccatggtggaaagagatgaacaggaaagaaacagagtagaaaaaaatgcggaagaagaagaaaagccttacggctctgataccatttcagaaaacaaagaaaagaaaataaaagagagaaagaaaatt

SEQ ID NO: 383480 - DNA, 2274 bp, Cannabis indica
caagcatatatcgatcgtgcatgattccaaaaaagtgttgactttggctgtttggcatataaagaaagtgaacacgttttttagagctgaatttccattcaaaataacaaggaaaccaggaaacgcgtgaagataagagtttcattatcattttttgtttgtttataatcgaagaagaaatactctatctcatagtggtcactagtgatcaaggaagggtatttgagagattcgagaatcatatggcgttgggagcttcttcttctggaaatttttcgaagaaatatgatgtattcctcagctttagaggtgaagatacccgtacgaaattcacaagccatctttatactggtttagaacgaaagaaaatcaagacttacatcgacgtgaaaagtcttgagagagggcatgaaatatcacctgcgcttcttgacgcaatcgaaaattctaagatttcattaatcgttttctcggagaactatgcttcttcttcgtggtgcctgagtgaacttgtgcatattctaaaatgtcaaagcgaaatcaatcagattgttgtgcctattttttacgacgtagatccattacatattcgaaatcaggatggaagctatggagatgcatttgtgaaccatgaacaacgattcgcagacaaactggatatggtggcaaaatggagacatgctctgacaacggcagctaatctacaaggctggaattcccaacacatcaggtttttttttatatatatatataaaaaaagaaatacatttttctttttagaattattcacttacatttttaataatctgctgctgatttaagtacttttaggtctgattctttttatttgacacagataagtaaagagaaactaataattgatgttattattgatatatatgtttgtataaatgagttttatgtggtacttattctgaactaaatcaacagtcaagaacagcatacgtatgtttaagtgagaagcacaaaattattggtgtttcacccctgttcatctatattgttatatccttacaccactttaattgttaaagtgatatgatgttcttggcatccctcacatttgcggaaatacctctactggtttttgtttaatcagaagtgagcagcaccttaagatcagaatcacctatacaaagtacaaactaacacacaaataaaagtcacacttttatatgtctattcattgcaaatctaactacattcttgacaagactaactatggatactgtcattacttcatgtgcagcccggagccaaaattgatagacgaaattgttaaagatgtcttaaagaaactgggacgggtatcctcaaacaacactttcaagagtttagttggaattgaaaaacacattgaagaaatcaagttgttgatgagtcataattactcgtcaaatattggtgtagttggcatttggggaattggcggcataggaaaaacagctcttgctgatgcagtgttcagtctttactttcaccaattcgaacgttgttcctttctcaaaaatgttagggaagcatctgaaaagtatggattagagaaattaagagaagagcttattacaaaactattaaaagaagaagaaagcttagatttgggagcaccatctataccagactatattagagacagacttcgttctacaaaggtactgattgttcttgatgatgtaagtaactcaaagcagttcgagtacttaattggtgatcgttttagtgaggatgagcgatttgacattgggagtcgaatcatagtaacaactagagataaaaatgtgctaaaaactattgaagctgatgaaacttatgaagttaagcagctagatgaggatgaagctcttaggctttttaatttgacagctttcaaagggaattctctgagggatgatgattatgtagagctgtcgaaaaaggcagtgagatatgctggacacaatccgttgattatcaaaattttgggctctcaccttcgttaccttcggtctccaaccaaagaaaactggcaaatgcaattggagaagttccaacaagttcctcttgaggatattcaagatgtcttaagaacaaactacgatgggctggataggaaagagcaagatatttttcttgatttcgcacgctttttcaatgccaagtacagagattttggacaacatctttcaaccagtaaaacctcctcttcccagtctcattaacagattgagaatcatgattgatgtgtccaggaaaacaggaaagaagatgagacac

SEQ ID NO: 383481 - DNA, 2336 bp, Cannabis indica
taatatggtatcagtagacattccttttcaaattaagcttcaagaaatcaattaaagtccttcaagaaataaacaacggtgcgtacacgagctacaacaacagctacttccactgatcaagattgttcaatgcttccatagttccgccaccttcaaccaattccgctagcactctgcctcagacaggatctccggttccaatacctcgataaggacatcgatcatcctacatacaaagatatctgacccccatactttctcaataatacggaccatccatgattggccttagcaattaactttgatcctcactgatcgcaatttctagctatggaaattaaagagacttcaaaccctccattagcgccaaaaataaaacttcttttgtggaaggtacgttgcctcaaccttcccccattgactctctttaaagttcttggaaatgtaaccaaatggttatgtcatgaatcctccattccatgtcacctgaataaagagtggtattatgtatcttgatactgcagtcgatatgtggacaattcttaacaatagattcaatcaaggaaatggtccaagaatctttaaactcaatgagactttaacttaccttcatcaaggagatgaatatgtgagtgcctatttcactaaattgacagtatgtgagacgagatcaatcaactcagccctcagatcaattgcacttgtgctgctccaactcaaactcaagatcatctcaatcatgatcaagttttacaatttcgcgaacgcttgaatgattcctatcatgtcattcctgataaaatcctcttgattgatccttgtccaccactaaataaagtcttttcaatggttatccatcaagaaagacaaagaacactcagaaatggtacgtctcactcaagctcttactacaactacaaacctgattcttgctcctacaacaacacatgttaatgctgcagcaaatcaagcatccaagaacaaaaggcctctacctcatggtattcattgccaaaaacctagacattacaaggataaatgttactttctccatggttttcccccatgttatggaaaacctagatccaatgatacatctgcttcacaaagcaagaaactagaaactaattccacatcttgaagcagcccacaaacactccaaatttccattctacaaggtgatcaacaaaccactcaattgacttcaactcaatgttaacaactcattttcatgctcaaccaacaattacagccaaccactgatgcttcaacatcaaaaagccccaacattaataactttttttataactctaaattcgaatccccaatttcttggattatagacagtggtgctactcaccacatttgctgcaatattagatgtttttcctttataataaaatcaaacaaacacaaatatgttacccttcctaatggaacaacagttcaaattgaacttatatgcactaaaatatttgttcgaacttattttactaggatttaaatttactaacatgcatgttgattataaaactataatctaacatcctaaatataaaatttcttaaaataatgaaataaacacataagagattgaaaaatccttacataaataccagctgaatataatgactccattccattcagatctctagcccttgattcctgtctgtagcagaacattatcaagatctgaacttggatcttctctctttcaatttggttcgacacagtcttcctcactatgctaggtattactttgacaagtgtgggcatactctcaataccatggaccacaaatttttagtgaagaattacttagagaataatagatagaaatattagattccttttgattcagtttgttagacaagagagagtctagagtcatcatttgaatcaaaacccttaatgttctatttatgggaatttattaggtttagggttagagataactgggctaagatgaaagatccaatggcttagaatagacaactcatggtcgaattaatccctataaggcccatgagttagatttttgctattattttacttccttaatgagacaaacttatctttcttcagtaatatcatttttttgctctagttatttaaatactaattctatctatttaataattataaaataaaattactatttaaatatatttattaattagaccttccaaggcctcttaattaataaataaaccttgaattctcttttcttctcaattgcgcccttccttgataaaattcacaaacaaggtatagtcttattcagaattctaattgattaattaaaatcaattaattgagactataaaataatatta

SEQ ID NO: 383482 - DNA, 2610 bp, Cannabis indica
ttaaatttaaaaaaaaaaatcaatttgaattcaaagaattttagcataaaacgcttgttaaatttttcatttaatttttttaaggaaggcttgtgaatttattaaattatacataaatatttcttttttttttctttcttgaaatagcgcgttttttaaaccgcgttttcagccttcaaacgctccctataaatgtttagaaccacactagagacatctctcacacttaaaaagacctagagaaatcggcgattgaaagctctcgaaatctgagattcattcaagcttcttcacccatggctaaaaaagcaccgatttcgaatcgatcttgctcgcttggaccaacggaagaggttcagaagatattcaacaagttcgataagaatggcgatggaaaaatttcctgcgatgagcttaagcatgtcctccaggcactgggctccggtacctcccccgacgaggtgaagcgcataatgtcagagatcgacaaggacggggacaactacattgatctccaggagttcgtcgagtttcactgcggtaccggatcggacggtgattcttgcgttgccgacgctaaagccggaaacaaggaactcaaggacgctttcgacctctacgacctggataagaatggagtcatctccgcaagtgagctacactccgtgcttaagcgtctgggagagaagtgtacgctgagtgattgtaagcggatgatcagatcggtcgatgccgatggtgatggaagcgtcaattttgaggagttcaagaagatgatgactcgctcctgaagtcaatggcaggtatttgatcatctgaaaacatattgaattgaaggatttagattagaggttcccttaggctaacgtagtccgtatttgtagatatggtaataatatatctgaacttcatgtggattgaaattgatcatggtagtttcgtgttccagcactgttggattaattaattaattaggttggagtagagtagatttactaatatgtcacaaagtggttgaagaagcaaagattaacattgtggatacgacttatttcttcttctctttgaggatgatctgttctccttctctttgtttttttttttttcaacagttctctgttgattttatgtgttaaatttagggattttaattttttttctaccactttttccaaaattaaaatttccaactccactcattgaaagagaagtagcaattgtgtattgttgttatcagaggtgagaaaaccatttgggaaattgtggttagcgtgtggacttttgtggtccactgcacgaggtttgattgtgtgcattattttcaaataaattagctacatttttttatttaaaaaaagaaaagcttatttgaaatcttgttaattgattttttttttttattaaaaaggcaattatggccattggcgaaatgtacgtatatatttttgttttttgatattttttcttttaaatggacgaaatctatatttaaaaatggatcattggttcaataaattgttagcattttattgtagtgactaataaaaatgctccaactcaaccgtaataaatgtctcactaacgttgtccaagaatatgacttagctgacctcaacacgggaaagaacctccttgtgggccacagaaattatatgcaatgcagcagagagaatttaattttatcattatagagactgttttaaatttatcaaaaaatatatttagaagtaattaacataatatgtttctctctggattaatttttttatttatttattttacaactaggaaacatgccacgcttaatttaaaataacttttaactttttaaggataacattaataaaaattcaataatgaacaataaaacacattaatatctattcagtaatgtcaattcattataatctttattcttatttttttcttatttttgaaattttgtaaagaattatatattaggctaatttaaaatttaggggcacaatttattacatgttaaatctatgatttattagatattatggggcatgatttgaaaaaatcctaattagtctgtatattatttcttttacaatatattaattatcagtattcttagaggttataataaagaataaaatattaaaaaaaataaatttgtagaggattttatagaaatatatatataaaaaattatcgtactattttttatctaaccaaaaaagcacaataagagatttctttagttaacagtgaaaaaagaatattagaactgaattctcacacaagataaagatttataaaaaaaacaataaaataaatctatagaatacttttatatgacttcaaaaccattattgttactgtaatttacttgtaattaccattacattcactgttggtgtcatcaccatatctcatcattacggtatattgaaatttatattaggtatgtgaaaattacttaaaatttttactgaatttaaattatatatcgtaaagatttttaattaatatttattaaatttactgatctcgaataattttttattttttatatgttaatatatatttttttttattttttaatctaattttgaaatcaatttaaatctttaaattaaaaat

SEQ ID NO: 383483 - DNA, 809 bp, Cannabis indica
atgtgattttaatggccaaacgctgcgttctgatgctgtcgggtacaaaacatgcaaaaacataaaattttatatatggcaaatataatacatcctgaattcaaataaatttccataaaatgataaatcataattattattcaagttttataaataaactctaattattttctaatttcaaaattatgctaggcagtctttacagtggtagccagtggttacgactcaggagaggttggtgagagaaagggaggaggttgattcatgatggtgaatggaatggaaatcagtatcaaaatgagaagatcttgtgggtttctttcttctctgactgaatggatggattctaatcgagtacttaggcaaatcttgatatcattgttagaggtaatggaaatttttggttatttcgactgggtcgccaaggctgcacacacttccctaaagagaaattatcggtatcatcgtgatttttttgttttaatttttatatcatctatcactattgcttgttttatatatttttgtttatgatcttaatggggtagatgttgaacgggtttatattagaattttgatgaccgtcaagcctgggctggccttgagcttgttattggcggccattgatgcttgaactttacgctaccaaaatattcatgttttttcattaacgtaatttaattgagtaattaattttgaatttatatttgttcatcttttgtatctattatatttatttttaggggttttttatttttatactttaaaatagtttttttttttttgtcatttttatgaaattctacata

SEQ ID NO: 383484 - DNA, 597 bp, Cannabis indica
gatattcgtttagaccaaggctcccttggagggaggttatctatcttgcataagattagtatgtttgttgttgttgtactcatccacacgtattagggtataactttccgagaaatgttaaagaacacttatcgtatttagtacttttatgaagtgtaatatcattattgctgtaacttaatatcgggttctacttattttactttaataaatattataaaatattgctaattaattataagatgatactttatcctggtatagtaaggattataaatgttttataacaatgctctcacgtctttttcgaatgtgtaaagtccccataaagagcatacctttttctgataaagaacatacttgggtgaatagtatatataatatgagaaatatatacctattctatcgtaaacccctttgaagggatgattggttggacaccctaatgaagcatttgattaggtgtttaattttcttttggtggttctattgtgggcatgcacacatagacgtattttaggaaaaaaataagaacgtagtatcctaaaatgtaaagggaaatttgattttctatacttagaaaatcaaaaaaaattt

SEQ ID NO: 383485 - DNA, 1331 bp, Cannabis indica
atttaatttaactaacttaaatttaaaaaaaaaaatacaaaaatacatcttttacactatataaaatatattaaataaaacatatttaagtcaaactctacttttttattattttttgcctaaaatttttattttgttatttatttttttcaaccgatgaaataaattccgtctatataatgtaaacattaagagattttttaattaaatataaaaattaagtataaaaattcaaaattttttaatattaccgtaatatctagatatatatatagatatttagggattagattaaatcgattacttttacatctcaattaacatcccataagtacaagtgtgaattttaaattttacaatctaatctacacaaattctaatatctatgttttatggagtggattgaatgggattaaattagatatttaatttattagtcaaagctctttttgggtgatgtttcatataagcccaaaatgaaaacgaaaaaaaagaacaaatatcataaaaatccagcaacaaaataatacaatatatgcgaattgttttgataaaggttatttacattacattgacaagtgtgtagagggtcttaacttagtgcccaacaattcaagtacataacagtttgaagagactcctcagcttttctcgtactcttatttgttgcagcagaaacagccccagcatttaatacatcattcgaatgataaccattaatgcctgataagcactgtatcaatctgattttatgaatagatggattaattatgttacccgaaagccactttgactttgagtcgtagtaatttgtatccgtagtcgtatgaccagcttccattgtggctacgctggttctcaagcttcctctgctcgaacaactcatcatgattcaattgtaataagtatgggattaagtaagtgtaggaagataacgtttttggagttttcatgtgtcaaacttatatataggaaaaaaaataaagagtgtaatcagttggcggagaaaagcggtttgtagtatgaaacccatggattctgcttttaccattggcgatattttattcatttttaatttaaaaaagacacaaaatatccaaatggtgtttcttggcaatagctagctgagggtagccaaaacgtggctgccaagattaacattccatcttattctcacatatatatttaatggatatggatataattcatgaaatgcgtcattcatgatgtggttacatgcgattcttgcttattgtactagcaaaagatagacaaaattaaaatatatattaaaaaaaaaaatacaattcataaatgtgtactatttcatc

SEQ ID NO: 383486 - DNA, 4080 bp, Cannabis indica
gtacggtcttaattttcttgaagcaaggagcaggcaataaattagttttttaattagagggtatcgactttcaacatcaattagcctctttctaacatagtaaaccagatgttggatgttgttttcctctttgattagtacggtgcttactataaatttggtcactgcaaggtatatccccaattcctctttctccagagattttgataagataggaggctgtgcaagctactattttaatgcttgaaaagcttcttcacgctcctcagtccattcaaatttttatttccttataggatgttaaaaaagggtacacaattatctgttgattttgacacgaatctacttagggcggctatccgaccagtgaggctatgaacttttttaaccttcgtgggtgatttcatatccaaaaggacttgaatcttttctgggttagtttcaattcctcgggcattaataataaagcctaataatttacctgaactagccttaaaagaatacttgaggggattgagattcatgttgtattttttgaggatttggaagcattcatccaagtcctctatattcccccccagcctttctagatttgacaagcatgtcatccacataaatttccatgttatgcctagtctaatctttgaacatcttatcgactaacagttggttggtagccctaacattctttactctgaatagcataactatgtagcaatacaagccaatgtcaatccaaaaacttgtatgctcttggtcagatgaatgcatctttatctgattatacctcgaataggcatccataaatcttaggatctcatgacttatcatagcatctatgagttgattgatccttggaagtgggaagcaatcctttgaacatgccttattaagatcggttcaatcaatgcatacgtgtcattttttatttggcttgggcactaagatagggttgggtacccatgcaggataaaaagcttctatgatgaacttgtttgttcagagcttttataattcctccttaagtgtctgtgtgcgttctttgtctagtagtctccattttttctgtacaggacaaaaactaggatcaacgttgagggcattttttttgtacgggacaaaaatatggatgtcttcatgcgactagcaaaaaatgtcaaggttttctcttagaaattttatcaaagtggattttattttgagcaacaaacctcgttcaatttcgagcttcctattcggcatagtggaatcgatctctatttcttctaattcctccaccagcccgatgttcgtataaggatctccaaagcaaggatccatgtcttcatcctcgccttgggtggatccctattaattcaaatttttctcgacctttgacccttggccagaaggttctttcttttttgcctttgtcaaagcaagattgtagcattggtggtgggcagtgttttggtctccctttaggcatctgatccctttccttgttaaaaacttgacgcacaagtggtaaattgctactttcaagtcaaatatggtcgtcctatcatgatgttaaaagcagaaggtacatcaattactagaaattgggccattatagtgtttgtcattggaatctttcctatgttgaaagggagacgatgtatctaacaggagctatacttttttcgaaaaaaacatacactagctgcgggcagggaaccaaatctttaagatgaagccccatctttttcatatgttgttgtaaaaagaatatttgaggaagcttcattattaatcattgaccaagccactatcatgttagaaatttacacttcgacaacaagggatcattgtgtaggtaaatgatatggttagcatcatctttactaaatgagatgatggcttcttctctgcgcggctgctttggttttctctcttccataaccaatacttcttcatctttttgttcatattgaagtgtttgagcatacctttctctagccttgttcaaatctccagcaatgtgtggcccccaatgatcaattgtaaatgcacatccaccgatggaggcattagatgattcttattgttatcaagttgggcaactggttggttctggtcggtcttcgcatactgacatatgtgcatattattctttttaatgaggaattcaatctcgtccttcaaattgttgcacttgttactatcatggccaaaatctttgtgaaattggcagtatttggtggtatccttcttgctcatatctttcttaatcggagggggtctcttgtaaggcacaaccaattgagttgccataaaaatgatttctcgctccccgatgagtatggtgaagacagtgaactttgatgccttctctcggggttgttgttgatcgattttattattaaacttcccttttttcccatttttgtggttgtttctattgttcgaccttttaccaccatggtcgaaattgtttcccagctagatagatgtattagttgtagtggttgagagtgcaggactttggtcgacccttttttggccaattatgtccactcaccaaattgcttcctcaagctttataaatttgtctgcttggtcttaaaactctcccatcgagctgacaatgagtcatttgatatatttccacaattctccttttggcttaatacctcctagcacagctgctagtcttccctctttggtaagtcttttcactttgtggcctcagtcataaactaacttatgtaatccttcaaagtttctccaagtcttacttcgaccaagtcttctaagtgagcagggagttgtctcaaagaagagaattaggtgcagaactctaaggcaaaggcattccatgaattgaatttccctggtgctaacttgaagtaccactattggacggcctctgccaaggtagcaggaaatattctatgccttacatcaccttttactatttgtaggtccatcttcaaagtatttgatatgagataacggatctggttggcttggtgtacatcttccaatagggtattttgaacttggtcgacagatcgagggaattgatttgttgttagaatggtgaacctcttgttcgataaagctctaggtcggtgagttttaggtcggtcaggccttgaatgagtctcttaagttggtccaactaggcttgcacccctagatcaacttgacttgcctattgacgggcatgtgtcactgttgacccttcagagcaccaaagggtaaaaagttatctacattttgtggaatatagttctccacattaatcggttgatttttaggcagacggacaaactttttgtcccaattttctctcctacgatttaaatcatctcaaagatcaactatggctccatcctttggaagacagatttcccagagcacttctatgtggttggctcatagatcgagctggcctaggaggattagtattgtttggaagattttctaaatttttgccattgggtacgatgagtattgcgatgatagtttttgcaatgtccactatcaacttcaacatcgctattgtttgcgtatgactgtccactatgagacattgtacgaccttggggaggttgttggccgacatactgaggttgcctatagacttggacttgtccatcttggttgtacaccgccacatgtcccctaaatcccgcacatggccgggtaagtgcatcgtccatcctcccttcaggcaacctccctagggacaaaaattatggtgatcttctcttcaaaggtagtgacttggtagagcttgatcatctatcaggttgccactagtttgattctggggccattgaatcagaatgtttgtcatggcgggttttttgcacataattagttgggcgctcctctaggttgtactcttgtcgtccaaaggggatgtaaggctccttccctcaatttgggtctcttctaaacggtgtgttttctagtaattgccctcagtctgttggtggaactgtctaattaagttggtagcttcccttgatcgatggttgatgttaaatgccaaaatattacatattttatagtgtaaaaatacaaaataaaattaattctttataatat

SEQ ID NO: 383487 - DNA, 1910 bp, Cannabis indica
taaatttacatttttatttaggccacaacacgactttgagtgtcgtagctagaccatttacaagaaagaattttttcttggtggttatgatgttgcgacatggttttacaatgccaccacattgaaatcttcaagcccagaattttaggcactccgtgggctgcctccttgctgaaagtagaaaaaaatttaggttttaaccttaatttcgaaaatggagaaaggacattggagggggacaattttttggaggccaacaacacgtcgtggagcatcctaattcgatctcaacaagtttatttcctatttcgtttaatttctatgtttgttgttaggattatttttatgagttttagaatcaagttttgagggtattttaagtagtttttatttgttattgtttggttttatgcttgtgtttgttcgttttgcaattttagtaaatgaaaagagaaggctgaacttttgggagaatttgagtcaataacagaagaaaaagttaagttttggtgtcaaatgtaaatataggataaatcctaagacgattttgatgttgtagtgaactttagggatcgaaaactccaaaatttgaagaaattttattaagtcgtgacatggcgttggtgagccgcgacttgctctttattttactccagctaaagttgtaggagccgcaacatggcctagtgacatcatggcttgctttgagtacatgtttatcaatttcgacatggatcgcaacacattttggaggaagttgtagtatgacttcagtttctctttttcaattttcacacggctgcgacatgaaaaaatacgagttatggcccgcctttgttaggttagaaaaaataggtttaaaaacctattttcgtgccaaacttgaagagagaggactttgggggtaaataaagccaccattggacttctctaattgttttgaaaagttcttttgttctctttatcattctcaatgtttatcttagattattttatgtttaagatgacgattatgaactatttttcttagacttgttatgtgaattacttgaattttttttatatgaattaatgtagattttcaatttcttattcttgtattatttcaattccatgcaatatgatttagttttgtaattatatattggtcgtttataatttctatttaaaaattcgaatcaaaattctgaaaatgtaagatttgataatgttgtggttgcttttgatgccatttaatttagaacgaaattatctagattgattgtatgatttttatgagttactatgttcaatgctttcttttttatttaaccttttcatagaaatataaagagatcacttagactgagtttgtaagttataatcagattatgcactactattttcaacttgtcaattgaataagaagaagatgagttaggtaaactatattaagaagtaaaagaaatgatagttgatgatactaatatagtcctaattattttctcatttttgtttcctttgatttttttttattgttattttgttgttattttctttgctaaaaattctaaaacattatttgatcaaataaaaataaacaaaataaataattgattggtaattgataatcaatttttgtgggacgatacatggtcttaccatgattttattataaattgcgactatatgcactaggggtgttcgcggtgcgggtggtgcggtttttaaccattttttcaaaccaacccgcacatgcggtttttctaattttccaaaccgtacccgcaccgcgatactaaaaaaccgcaaaaaccgcaccgcaaaaaatgatgcggtggggtgcagtttctgcgatttatgcggtttgaactattacaatttttttttttttgaaatcatcataaaataattaaactatcattaatata

SEQ ID NO: 383488 - DNA, 2078 bp, Cannabis indica
atatagatatagatatgcacatgatttatagagtatgattactatatcaaaaaacatatgatcatcaatccatattattatttacaggaaaactttccatcatattacttccaaagaacattttatttgcaggtccattactagacctggtaattggtataaataacctacaaacaaaacttaccaaacaattaatgatgtctaaaagatgaaccatataataagatgaaaaaagagcaccaaccaactccattgaatcaagcaactagaggattaaaatgtctataattctcatgtggtggtcctgtgcagctcattgtatcttccacaggttccaccccttgtgctccaaaactcaagtactcattcatcatcttcttattgaaagagctttgcttcaagttcatgttcttcaggcactttcgtttatccatgaaagtaggcgaatacaatggcgagcctgagtgagtactacttgaaggcgagtgagtcgagccagtaacatatggcattgtcttgatcacaccatgcattaggccagcagcatatttcatcttagtagatgggctagggaagctctcaactgaaagtgttcttctgtgggtggtattgttgttaggaagagaggaagatttcgagtacatttgccttagaggtataggattgtcttcaaaacctctacatctgtttaaagaatcaagagactctacatcttcattgaattctattccatcagagcagcttttgtccttccttttacgccatctgagaagaaatttcagacgcgctgcagcagagcttagagaaggaacagacttcttcttattgtttttgttgttgttgttgttcaatgagttagccaagtcaaactgcctactgataagttcacctgaatgtgtgttgaattgcccatttgtttgatcccaacaagaatcagaataagcattctcaatcccggtgtataagaatatctcagcatcagggattctgaaagaagttcctggactagtaccaataccatgcattttcaaatgtgaaacaagggcatttcttgctttatggtcttgacaattggacattcctccagctgatatcaactgtttgatcaaaattgcagaagatactgactgtggcctttgcttgagaagatctaaaggagtcattccatcaccatctcgggtgtttagattaatcgatggaacagtcattagaagctctaccaaattactctgaatgttctcatttacagccatgtgaagagccgttcttccatcgttgttcctcacattgataatgtcttctacattcacaatgtcaccacacaacagcttttgcatcagctcaaattgcctgtcaattcttcgaaatccaggtgctcgaaaaccagacactgccatatgcaacaaagtatctccatagtggtttggcaaagtggttaaggagggagatgcaagaattaagacctcaaccacggctaagtatcccctgtaagcagccacatgtaaagctgtgttcccttgctcatctctagtggtgatcatatcaaaggattctacaagatgctttacaacctgcattgataaatgccacaaagtaaattttaagggtatatttatagatttctgtttattgttaccagatttccaatgattaagaaattgagaaactgcatagattagcccaagtttctttcagaatatctctagtaatagacttttcttaatctgtttaatgactaaatattctaatgaccaaataacactgtcaccatgatgttaaaaataaggttaattaggatttttttttcccgaactttgacatgtattaaatcatacttcctgaattttttttgccgttaaaaattcttcttgaactattgagattgttagatttaaggatttttgtctaatttcattcaattttactattacagtaattgtttatgtactaaaccatgctccccaaattttaatatctactaaatcatgccccttaaattttgatatgtattaaatcatgccctgaattttcatccagaatttttttactaaaattagacaaaagtccttaaatttaac

SEQ ID NO: 383489 - DNA, 2552 bp, Cannabis indica
gatgctttctcagtgacctgtattcttttctcttataattctatggataattgtttttttaacacaccaaactgttattttgttgatcctggaccacgatagttagttgtttcaatctgtatttttttcttgacaaatctgtattttttctacccataacaactattggtctttttctggatttcgttttatcacataaagaattgtatctatctaatatctatgatatgttctttcttgcagagtgaattgaaggatgacaaatacatacattcatctcgactttatactttgttaaatgatcaactccaacattggaatgctgaagttgagcgatacagagctatgattgatgctttgcaggttagattgctttcttttaattccttgtaggttattcaacttctatatttcggcatcttctgaaagtacagtttcaggttgacaggtctcttgtcatcagaagggataaggagctgaatgctaaagtagaatcagcagatgcagcgaggaatgctgttgagattgctgattccagaactgaagaacttgagctccagctacagaagagtattaatgaaaagaatgatcttgaagttaaaatggaagaaactatccaggatttaggtcaaatattatatcttttgagctttgttctttttagtggtcatttacttcaactgtttgaaaaaagatttacttcaactgttggtttgtaaatggtctcccttctgcaggtagaaaagatatcaaagcagagttccatgtcatggcctcagctttgtccagggaaatgaaaatgatggaagttcagttgaaacgatggcaggagacagctgatgaaacactttctctacgtgagaaagcccaatctttgaaacttttgctcagtaagaaggtgtgcttgaagtctccactgtatttatattcacctttgttagttgcatattttgttttggccatgacagtggtaatttaaggaagatttacaaccttgagctgagtgtagggggaattgctaaatggttacttctaaaagcagagtctggctgatttctttttcgaactcatttgaaatcagtgtattatagaaaactgattagtctatatctgatttcttttcacacctcttaccacctgactcttggccacttcttcatttaagtttgatttcttaatcttattattgtccacggactatgactacagtttccttttaatgaaaattaaagaatgaatggaaaaaactgccataatctctcttgtttgaactcctctttccgcctcttgttcatatggaaacatgtacatgaacgaatcagttgataaaaactgaagttaaaatttaaatttttgtttgaatttcgaagtagagtaatatgataggattccagccccaattctcatgtatatcacattccatgtatatgagatcttgcaaacattgccaatttggtcctctactttttaaatattcagttgttgattcttttattttttgtatcttatagacaattgaacaaaagagtttagcagaaaaatgtgctgaacaagtgatagaggtgaaggatctgaaggaaatggtaagatttgtgctcatttaactgatgcatttcatccttttgtttcttccatttcctctgctccatggatgttttcttttttcctcttctttccttgttcaatgtagtattttaattgttatatatcaatttatgtactgaatgatgtcttgtcattttatttcattcccaatttgtttagtatttttatatggttcagctttattgtaaatgaattgtagtcttgcacttcaattgttaatattaacatacgtatatgggaaaataccattttagtccccatgttaaactgattatagacgtgactctgttttaaaaaaatccagtatgctatccttcaattttatatgatataccaaaattaatcctacatctgattttggtcaaacttttttttaataattagcctttttacctttgttttatttcaattaataaaatatatttatttatttatacattgaaacttaattcatttttatataaagttacatgttagaatttgaaaatatatatgtatatatataagatattagtttaaaaataactaaatgtatttattataataaaacaagggcaaaaatatcttattgaaaaaaattaagaccatttcacctttgttttatcaaaaaaaaagtgtcatacattttcttaaagatatcattattttaaaaataactaaactaaaaaataacaataagggaaaaataacctattgaaaatagtatgaccaaaattaagtagattaaatgttgttagatttaataaagcaaagggtcaagtatgctgaaacatgagagacctaaagtgacgttaaattgggaggaatgaaaatataggaataggaatgggaatgggaatgggaatgggaatgggaataggaataggaatggaataaaatttaaaatgcataaaaaattgataaaaaaatcattaaattttttctcttgttacattggaatgatcttt

SEQ ID NO: 383490 - DNA, 857 bp, Cannabis indica
tcgaaacataatagagatacgccccgctcgtattgaactatgggtgcaaaatactttcaaattctaaggaaaaaaaataagagatagtcttcagtttatcatattcttggtcttagagagcataataccttttactgtttttcattaatatgtataggaaagcatatgtgttggtttagaatgatttcttttcggggaaacataaagaagagaagcaagaaaatgtttgcatgaaatatttctttgaatttttagcataatatagcaagagatcttactgtcccagttatatttataggcaggtatggttgaatttgttggattgattaaggtgaatgtggtgaaaggcaccaacctagcgattcgagatgtgatgactagtgatccttatgtcatccttgcgcttggtcaccaagtgaggccctttcccttcactaatttcttttgtatagaaataatgttccaaattttgttatacataattttgttcttcttcttaataatgattgttgcagtcggtgaagacgcgagttataaagaacaaccttaatccagtctggaatgaaagtctcatgctgtcaattcctgaacaaattcctcctcttaaagtggtaagtttttataattattaaatctcaaatttcagtaactcatttaataaatgtgaaccatttttattaatttgcttgcaatctatggatactattagaatgcggaagtgtatggttgaggaagtaggtttaggtgagtgtatggtataaggcgtatggggttccatctcaaaaccaattagcaataggaggaatagctcatgcatcttatgtttggtatttagtttctacgcattatcaatgtgg

SEQ ID NO: 383491 - DNA, 2595 bp, Cannabis indica
aagagtgtagttataccttcgaatggaggactgttgagcagtacgggcagagtggaatgacttgccttcgggaccaggcatcgagcaaagtagaagctcaaaattgtctaaaggacaagtaagttccttgtaaagctgcaaatattagacacttttgttaagaaattttcaaaatgactttttttatgttttatgggaaaaattcaaaaaaaaataatgagaaaatagtttaggttaaccaggtagccttaaagtaacgagatgggtaaccggtaacctccttaagttaatcagttaacttatgttatttttcctttttttgcgcacattatataaaaatccataaaatttgtaatttctacttattctcgatttgagttttaacaaaagctaaaaaaaaaatattttcgtgaaaatttttagggtaaataattaatattaagaaagaaaatagaatttgattgaagttagcataaatatgtaccttgattatacccttctggggtagataataaacctcctcacaggtaggacagtacaaacgtgatggttgactagatatgtgtttcatgtatcgaagacatttcccacatttactaaggactcgccccgagtcagcaactggcgagaattgcgcctcaaataacgcatccatgttatcgatctgcaaaaaatcagaaagcatcgaaacatattcaagaataacaacataacaacactctcattagagtttttgttttgttcttttggtgatatgtttggtctttaaaagttattgcttgcgtataaactccgggtactaaaattgtaacaaatgataaggaattctaacctgcttaacaaaataactgaatttttgcctgaattggagtagaacatgctgaacgacatgaacatgatcagcttgtcccttagcaacatgattaatctgttgttcgatgaaactacgaatatccggcaaacatagatctgggtcaatacattgatatcctcttatcaaggttatacctaagggagtcggaaccagctttctacccgcttgtacctgcaaattgatctcgtaaactaaatctcacaaatattggagaaacaaatcaggtaataaatggaaagaaacaagcatttaaataaattaaatcaacaaataaccttcacgaaattgcgctcacaaatgttgttaatatgaacagaaatcgatgcatctgtgcctattccattcttctccataagggaaattagttcactctcacttaaataatctggaggcgatgtactcccctgcagacagtacagacccgaaatagatataatttttcactacatacatgatgagaagatgaatatgaaaacaatacgatatttttctagttacctcgtaaagttccactcttgcaacttctaacttctctccttttctaaactgtggcagatttttctcagctatacccaaccacggcataacgtctgtaaatcctttagtcaatacacgaatccctacacagtggaaaaattccccgccagttgaaaattctacctttgttctgcaacaaaacaaaagagttgatatattataaaagcacacaacaaatttagcattagaaatggccaaagcagaaactgtataagctattgaaatttcagcacgtaacagagctcaaccacgataaatcatacatccaatcatgttttcagccccgtttcacatacatatacattatgaatttattaggttttaaactctattatgtgcaccaaaaaggttaattatgcaactgcaccagaagatctattaaagattgacgtaattgaaccagcatgtaaatattagagaccgggtcacgcaggaaataagaggtgtaattatgcaactgcaccaatcataatgctgaaaggagggttttaatagaataaatgaaggaaaagaaaataccagcttcagttttacctcaaatatttgcagtccggataaagggttcctataaaatgtttacagacatattcaaatactctccaagcatctgtttccagcatatcttcagttgctgacatcattggtgtaattggaggatggtcacctgcatctgtgcctccacgtggtttgtgataaccatcagaaagaagtggccttacataactacccaatgtcgggttatttgctagcgcaccaagagttcctttaaagtcaaacgaagatggatatgctgtgctctctgtacgtggatagctagaacagcagagtataagataatagtttcataataagcaaaagaaggacatgacactgaaaaacaatgccatctgatattatttaaaatccatcacaaaagaggaaacatatttcccgaagatcaggttgtcagttcaccaaaactcaaccagtcatacatttattcttctcctaggcatttatctacccttttttaacatcaaaaaaatttgacagcctaagaagccagccatagactagacatctatctacctagacattctacattgaaacaagtaattatagtagagcaaactctgatcaagggaaaccaacaaaaaagtgaatgtagttcatggccaaccaacataatggagatcgatgcaata

SEQ ID NO: 383492 - DNA, 939 bp, Cannabis indica
atatatatatatataaagagttattgtatatatatgtataaaggagaggttttttctttggtggcaagccaaactttttggtttgggaaaaaagagttcaagttggctttttattaggagactgaaaaatgagcttagatttttttttttttgttattttgatttgtaatttgttggaacgttgacattatttaatagataatagttttaagttgtaaaccatgaagtctccaacgtgtggatttgtattccaatggattagtattagcaacttcttattctaattctctcttctttttattgtattttattttataacattattatttaaattagaaatactagtaccccagatattgttgtactacagcaaccctgtttctagttattattattattgtcaaacatgtatatatataatataaatataaatatttcaaggtggttttcactcaaaaaaagaaaaaaaaaggaaaagaggttggcaccaactagttttattatgtttgttctatgtaagttttattagggtttatcttgtttctcaagttccttttttttcatatatataaaagactatataatatggtaggtaagcatagaaaagaatccatttttaacagtttatacttgtctactggaataagtattaagttcgttctaggtaaatgatccaaagtttaagtctagtcaagaaaagacattaaacagatcactcctttgaaaaagaaattagtcttttattaattatataagataaatctttgagctaactaatatagtaaaatataacaatatcatcattttaattgaaatagatggggatgaaagtagttgcatttcaattaattaataatttaaagaggaatttacgctttatactcttttatattgttctttttatttttacctttttttttaaaaaatctatcattttta

SEQ ID NO: 383493 - DNA, 2313 bp, Cannabis indica
ctttacaaaaaaaaatctatgacaaccaaatgttgatttatcaatcatctccatattccatactttggttagacttggacatttgttgctcatcaattcttaaatatttactatcatacaaaacagctaataaaatgtacaaaacaaaattggcagcactcaaagtagccaaaacccaataatacttatccaaacgactcctattcaaggtgtcttggaaccaactattatgactttctcctattgagctaatcttatcaactaaacaaaccgatacaacacttcccatagttcccactccaaacacagccatagcaaaatgagtcatgtacctatccatagaagcaggcccttgattagtaacaaaaagttcaatacttttcttcgaaatcccatcaagtcctccaagaagaagaaattgcggtaacaaccaaaacatgctcattggaatcttatcttgaggcttgtagagcaacccatgattgttcaccacatcaagccttttgttttcaactttcgcagccgttatacaacaattcactgcaaatatcatcgacacagcgatcccaattctggctaaatacctaatattcgatgatgatccataattcgaagctattcttacataacatttcccgaattgtgcttttgcatgatcacgaaaaaatacaagtgtagtaagtggaacacttatattaccaattttttgattcatgtggttggcttgttcaagaaagtaggtattcccaattgaagacacaactccaagaaggaagaaagtggtgcacattggaatcatgcatatgatggtcttggtttcttctacttcagttacactacaaactctccacatattaacattgtgttgtgattggtttggtaacacaatagcagccttgtctaggcacctacatttttgtagaataatttagtgtgttaatttgcatggaaagagaaaaaaaatagaatttgaaaaagggttgagataaaaaacctgaggcgatgagtgtgagatattttgtaactaatgccattattttgttgatgctcatacaattgagaggcatcttttggagatttttgaaatgatttaaaggcagatgcaatcaaaaccctaaacacaatagttaaggggcttcctcttgctttgtcacgttggtatgttgtaattccagttaagaatataattgtggccaagactgaacatattgctgtgatgccaaatataattgaccatgattttatgatgggaattaatatagctccaattagagggactagaacaatggcaaagacaccacaacagaaataaagttttgcattatttccatcacgagttttgtgatcttcaatgaatttgggtaaagaggttaaatgaccagagactcctaaagctagtagagtaagtcctgtataaaatagaatcttttgctctttgccaatgcagctaggcttgtactcatcacaatttcctactatcttggatagaactggtggtgttgacattgacaaaaaccctaaaccctgttttcagtcgattaaataatattatattataataatcaaaattttcatactatttgatatgacaataaatgtgtgacataaagaaatttcagtatatatatatattaacctagcctttaaattctcgctattaatttgcattctaggaaagaaaaatatgtttgcattttcaaaacaaaataatatgtgagtttatattaccaccaaatttaatttgatgatgtaatgatttaatttgatgatgtaagttttaatttgaggatgtaattgacatttaattatatattatacatctgaaacaattttaggagtgaccattctattcacactataaaattttataatgggtatgatctcatttattaataaaaaataaaaattcacaaaacttactcttccatatattgtataaaaaagttcatatattttaacaaatcatgtttaattttttaggaaaaacatatatgtaaatatataaaagaaactatatagtatataagaacaaagaaatacaataatttaattttaatttcaatcatttttaataaatggggtgcctaaatatatttttgggcgtaaatatgattatttttttaaaaaataacaatggagggaaatatattaggaatttaaacattcaacaaaagataaactggacttattaaatgctattatataaaataataaatttctcatgatcaactaaattatatcaatgacaataaaatggtaataaagtgatatatatatatatattaataaattaaatgaggtaggtaggagtat

SEQ ID NO: 383494 - DNA, 2279 bp, Cannabis indica
atgagcatccaaacactttaaacatgttgtaatctggtggttgtttgaacagtttttcataggatgatagaaagtctaaattttgatttggaagtctgtttatgatattggtagctaaggtgtaagtttcccaccaaaaggttaatggtatttgagcttgagctaaaagagtttgggctatatcaacaataggcctatgtttcctttcgaccctactttgttgttgatgtgtgtgtggacaagaatttcttttgacaatgccaaaagattgaaaaaaggtgtacaatggttcaaattcctttcctaaatcagtttgtacacttttaatttttaagtcgaaaaacctttctacataggcattgaactgataaaacagtttgttctcttcagatttggtttgcattggaaagagtcacacaaaatttgtgtaatcatcaacaaagttgagatagtatttataaccatcattgcaagtgtgaaatcagggtccccaaacatcaaacaagacaagctcaatgtttttccacataatatgtccacctcaccaagcattctctaaagttttactattggagatgccctaatgtgttatgccaaattaaaaaaaaaagctttttccttaatttctttttcttatttaatgtcttttatttttttcctataatgtttgatattagcttgaaattgtattttcataatatgataatatttaaaaatattatttataaattatatatttttttttgttagagggctactttttaaaattagaacaggatcttcaaaatatttgagatgacatgacaaaaccctaactgatgaaaaactaacttaccagctcatcaactcctccttcctcttcttctattctaatataagctctcgaatgggatttatactagtctccaaacaattttcaatacctgaaaatatattcatgagcgcctaaaccacaattaatgggcctgaaatgcaacatttccaagccttggtccacaaaagtaaattagctgcatgactcggtttatgtgccaagactcttagccttgtagccttaaacttccgagctctgaggatgcaaccacctttgccagagcccctgagcctgtgaggctcactacaccataaccatcatcatcgccacaacttccaccatgagtgtggctagaaatctctcggcccgaggcatcaaagccacgggctggtgccatctctttcacttgagccaaacacacccttacacagccctcaaggtgatatatatatagcacccaagttgtgacccttatgctccacaatgccagccaaactccatcaaggctggcagtggtgctaaatttgggcatctgcctaccaaacttttgataatcacttcaattaacatcaactcctatttttttaatttatcaaaatttgatttcaaacatccaaaacaacccagaattttgataatcaaaactagattaaatatgaaaacagaaaactatatatgttgaatctgaaatatgttatccttgccgcctctttgactctatactttctacaaacaaaactaaccatttaagcatactactacaacccaaaaatacccatgagaaagaccataggcttaccattcttgatcttgatccaattcttgaccaaaattctcaagttttcctaagtttttttctccaagtctctctctgcttacactagtttattcaagtggtaacctctctttttccttaagtgcttttgatcccttgaccattttgtctccctattgcgcgcgcacacagcacacacactatcaaatgtgtcacacttagtcatattttcattcaccaagaaataatgccaaatgtataatctaaatactaaattaataataaatttgtttggtacactgtagtacatcatattgtattgtataatattatattaaaaatttgtatctaaatattatgttttagtcacaagttatttttttgttatgaccaaaagtcatatttagttaaaaaaaaaattacgttaaaataattttttttagtgatatacaacttagtttcactaaattgaccaaataacactttctatagaattattttatggtcctgataaaggaaataatatacctaaactatataatctatttctcactataacactaaacagcacaaaactatatatatactataaacaatccactcacataactaaattaaaataagattttccaagtattattttaaaacttttaagctgtaataatcacataaataaataattccctatta

SEQ ID NO: 383495 - DNA, 3258 bp, Cannabis indica
ttccattaatggttgcagctcaaaaatcttgaagcttttgtacttacgtactcgttgagctacatcgcaaaaatattagctatttaatttatttacacactcacatagttgttatacacccttataggtttagggcactaattataaatgatattctccatagacgatagtaattattaatggtagaaatacttccattaaaatgctaaatattttacacaaaaattacatccaagcgactattctaccacaatatttaatggagttttgtaactactcttactcctaatacttatttaaataatatcagtgtctaatggttaaataatgtaattttttaagtttcaaaacattttttagaatattataatttattgtaattcctcacatattacaatttgtgttttattatactatataatataatctcccaatacattttatataccatgtcataattttaatcttaatattatattatttaaatcacacatatttttatatattaaaagtgcttatctaatgacattttttggtttcttggtttaacagaatatactttaaaaataaaagaatattctgttaaatttaatttaatctcccgttaacaaataaacccaataattaaacccaaaaaattaaataatcttttttaaattaaaaaacatcgtattaaaaaaaatatcttagtacatatctctctactttgtcgctctccatcctattttctcccaaagaccgtttgatttatctatgcagagacggagccaaagagaatgaaaccctagaaatagttttggaatcaaatgtcaaatggaaatatatggaacttatttgaaaaagaagaagtcgaattgaggatgaacaagcaaaagaaggataagaagttcgaaaggttaatagtaaaagagaaaaactatctttttgaatggtcatctactattgtcaaaaaatatttgtacccttcgacagatggtgtaggatatggaccccatatgtcgaggtgtattagattaaaaattgccttagaaaaattattattagattgaaaaggcaatttcttttgttttgccaagtgacaagtggggcaatgaaagggaatagcaatttcatgagaagaatgtaattgtttattgatcttatttgttatcaatacagaaggatgaccaaggcgattgtgccattggtattgattttgttgtacattacatgaaaaaagaatactaggtgcaagttggacagcttgcttgaggtagtaaagtttgccatgtctcttagcaatcccaatcctcgatgtctgagaatgtccctgtattatacaatcattagaagtgaattttactatattagaagtgttgtctaataatgcatgaaaggttgaatttgaaaccaaggacatataaaacattaattaattacaacagtaccaacctttttaatttgaacagagtttccattaagtaaatttacatattttccattgtgtacattagtgaaagattgaaagcattgtaagtgagcacaaacataatgggttgccccactatcaatgatccaagaagtgaaagaaaaagggtcgaatgtaccagaaaagttgttggcagctggtgtgtcaacagaggtggaagcatctgttgtaagttggagttgttgagttaacatattgatgattcgttggcattgagaattggtaagttgagactgggagatataaatgctaggggtgggaatctgcatggtttgaggagcccgatttgttaaattctggtctggttttcttgaagttgagggatcagttggctttcgagtatatcctggaggaacaccatgtaaaaaatagcatttgtccttataatgcccaggttttttacagtgggtacacattggacgaggctttttgtttcttaattgaagtctgattagaagcaggggcaggatctgtgttgttggctgttggtgtggaagtagcagtggcagcaaaggtggggatggttcgatggccaatggttctttggcgttcttgatggacagtcattgaaaaaactttgttgagagggggacaagggtcaaggagtaatatctggtcacagacagcatggtaactttcattaagtcctttaagaaactgaaggacttgatcatggttagtatgatcttgggattgagttgctgcagcacaagtgcagggaagttttggcctcaattgatgaatttcatcctaaatggccgcgagtttagtgaagtaagagctaacagaatcttccccttgatgaagataagtaagggtttcattgagctcaaagattcttggcccatttccttgattaaatcgattatgtaatactgtccacatctcagcaacagtgtcaaggtacatgatgctgcttttgatctcaggtgagaccgaatgtaagatccaagacataaccatttggttacatcggatacaagaaccaaagagagaatcattaggagggggttgagggagtataccttcaagaaatggagttttattgcgggctccaatggagatcttgaagtctctgcgccatggttgaaagtttcgatctgtaagaattggagaagcaagaacgagccccggatggtctgcattactcaaataatagggacttcagatgtcctcgtaggcaggacgatcaggttgagtttgttgaacaggtggaggagctggtgactgagctcgattgttgttgttatcagctgaagtctgagatggttggggatcgattggagcaggggcatcgaccacgggattggtggaagtagccgagatagttgctcgtgtcctcaccatggatgaaagtgtgaaaaagcttgaagatttaggcaatttcttctgatataccatattagaacagagaaactggagaagaagtattttttattattctgtgttgaatggaaaaatacaatggagagccttatataggcagagaatgaatacagagagataatagaaccaactaacattactgacacaatctaactaacataaccgacaatagagtctaactgattctataactaattcttgatacgtcacccctcatacttttactttatgtagatatataaatatatagattcgttaagaaatatatttatggaattaatttttaattttcttatattatgcttattatatttttacatttcatgtagtaattaattaatgtagagggagtgtgatgttagactttttatttgggcttacattaagttttattggttttatta

SEQ ID NO: 383496 - DNA, 2263 bp, Cannabis indica
tcatattgtcacgtgactcgagatgtgacttcaattagaatgaaaaacaattcagtttttcttctcaatgacaaaacgatatcaaaaggaaaaagactcaatatcaacttgagaaatttaggcctgaaaccaaacccacctcaagaaaatgtacgtgaaagacttgtacacgaaagtgttccaattattcatgttaaaaattaaatcacaaactcttcttgttagtgaattggctttcattcataaattcatatataatatatttatatatgtgatgaatatgatatatatagtggaagtggaaccaattaagaggctgctttcattagccccatcaccacatgtttttatctctaaaaacacaaagcaaagcaaagaaaaagccaagccaatgatgtttcctttcccattgtaatcaaattcattataaagggcatgtttttatgtcccttaccatttaatttaacaaccaagaaaaaataaaataaaaaagggttaaactctcctaattcaagggctaaattcaataataataataagagaaaaagagaaataactctctttctaatttcaaaagctcttgcttttcttttctttgtttggaagattgtaatgttcttctcttgaaaatttcaaacaacttggtggtagggtcgatgtagttgttagtgacccactaataaaaatgtcaaaacacttcattttgttttctttcttagtattctaatccaatggctgagatttgaaggctcatctcatctaataatctttcaccatacattttctttacttaacttaaaagtaacaactacaaaaatctaaacataagactccaatgagttttcccaaattaataattaaagttagtttctgcagcagattctccatgtcttcatctcactttttaactctttttcattgaagaaactcattatatgtatatataattacatgtgtacatattttcaatcattactcatttgtcttatagtaacttaattcatatataccaaaggaaattaccactatatatacatgatgataatgatcatatgaccctttaaagaaaaataatacttttccacttcaattattttaaaagtgttagctaagagtgttatcttctgcatacactcaactaaatgaattaaataaattcaaatgctttaaaagaaagaagaaaaattgaatcatttaaagcctgttgtatggctgcaaagagtgggaaaatgtatatatattcattgatgttgtatatatataaatatgtatatcataataatcatatcatagcatatgtgataccaatggaccccaatgaatgatggggttgtccctacatgtttgccatgtgttcaattctttggtaccattgctctttggctccattactccactcttggattatatgcaataagaaactataattaatgagaattaggatatgtttggttacaagaatggagggtaggaaggaaggaaatgaattagtatgaacgatgaggaaagtaactcttttttatgtctttcttatatattgtttggtattagaaatggaaaatgtcgattaattactaaattttatcattactaacataattatttattgtttttttaaggataaatatgatattatatatatttgtctttttttaaaaaatatttttgttttaagagattgaaaattttaatttggatgaagaagtcttcctccatttctcttaccttttgccaaataaaagatttcacatattctcgagggccggtccaaagatatataagatctaaggaaaaatgaaattttggaatcctatcaaaataaattatttgaggttagttcaagtagccataagaaggtgcgtgtgtgttgaaagttctgagttcgagtctcaatttatacattgtaatatataaacgcttaaataaaaaaaaatattatcaaaataataattttaatgcttattgtaatggtaaaacttttaaaaagtcgtaagagtttcaatatgcaatcatttatagtaatggtaaaacttttaaaaagtcgtaagagttgtaatatgcaatcatttatagctacacattaaatattttgaggtcctgagcgtttgggggcccgaaacacacgcttagctcgcctactctcaggaccggccctgcctccatttcttttcctccatcgctctgtgacagtcagtagtcccgtgatccgtaaggggatataccgggtaagctgtgcaatcccacaccgcctggggaaggtcaa

SEQ ID NO: 383497 - DNA, 889 bp, Cannabis indica
cccagtgatgatggaacaactgatcgagattcaccattaaaggattctatcgtggaagaacccattcttgaaactacatttaaggacccatgaagttgttgtgtactgacatctgggagcttgtcaatgaaaggagacttgttatcgccacctggaagtatgggcatttggaagtttcggcctcttcctctggaatggtggtgtgaagtctgagagaggtgagccatattccagtgttcttgaggataacgagaaactagactgtgatttgtctcatcttggaatcgagatatgttacccggcaacccacggccaaactgcacaacaacaaataacattctaacttagcaaaaagctcacatttagttttatggccaattaaacaagatctttctccacataatataaaaactaagagaacaaaataaaaatgtacatcgcatcagtgtagggacttattatagcaattaactgatgtttcacagagctaagtagcataaacaaaaaccaatgactaggaagaaaattgcactaggtaaaaaaggtcagacaaacgaggattttgtatggcctatcaaaaccgtaaagaaaacaaaacagaaattacttggctagtagatcaaattggggttttaatgtactatttgtccatgttctaacaaaagacagaccaaggcctcagcactgccaaacttaaaaaattaacaactgaaagcttccttaacaactttcatgtattgtttttgtctttaaagtgaaattgatgacggagattatctcaaacaatctttgaagacatctctaaacaatatataaagtgtctctcaacagtaaagtaaaaaagaaaaatggggaaggaatcacagcacaactacaaagcaaacaaatt

SEQ ID NO: 383498 - DNA, 1661 bp, Cannabis indica
atttttctatcatataaggataactattttttttattgttattatttttttcactatgatgtttgtagatattttttttgactaaataattattaaatattaaatagattaattaaaaatatctaaatcatataccatttaaatttaaatttgattagatttaattctgtatctactttctcattatttgtaattgttctaaatctgatcgtgcaaactcatatattaaacacaatactccaccttgaaaccgttctctgtttttttttctttcttattggttggtgttaattcgccccgatgattcaagtgtcatggtttagcagaaataccatttctatctttaattttttcaaatataaagatatttcaaatataaatatttaattttttcaagaaaaaaatttgtaatctttaaaaataaaatatatttaaaatcttaaaaagactaaaatcttaaatgaaattagcaatacgtggctcggcacgtacattcacctagtatatatatatacagttatattgtataatttttttttttaataaataggattttttgtagagttttgttccattaattttttttttcttgttgcaacttttttcaagttatacaaatttttgtaaatattcctcttaagttacattctatttaacaacttgctatgaattatgtagccatgagttacatgtatattgactatggcccatttaacaattttgagttgtctcaaatctaatttataagcattaaatatacaaatattacctataaaaatgtatatacatattcacttattcattattagactgatatttatgtatttatttttttatctaaacaaattcaaattatcagtcatgttagtgttacaccaataaattgtttaaactaatgagcacataatataagtgcaaagggttatttacaacaatttttatagtttagaagaaatttttgtaacgaaaaaaagggaattaccccatatagtattttttaaaccttttttcttcaaatttacggtttaggtttctaaagtggttgcagcgctagttgcagttggagtttctatacgattttttgttgcaatttaagttgcagcgctagttgcaataggggtttctatgcctaattccgtaaaaatacaaaaaaaaaaactgttttgaagtgtaaaaatgaagaaagcccctcttgaaaaaaaggataaaactttaaaagggtagcaattcatggggacaaatcctatttattaatttttttaacaagttcattttatatttttttattccactttatatcatgactttattttgataattttttacaaagttacctttttctttgaaaacatgcaaagttacctttgagaaataaatgataattcttttttataacaataatgttttaaatatgccattgttagccctattggaataattgacatcacattattatttcttaaattgatcttgctacttgatgagatggaaacattcaaaatctcaatatcactctttattgtgagataaatagttgtgagaaaattttggttttgaaaggaaagatcatcattttctagttcttaaaagctagggcttcatgtctcaatcaaatagttgttgaagatttagatttagattttttgcccctataaacttag

SEQ ID NO: 383499 - DNA, 1324 bp, Cannabis indica
ttctttttctttacttttttttatttgggaatgagtcaaattggcaatgctgtgttaattcaattactcaatgctaacacaaaaattcaactactttgttaattcattataaacttatgagacaaacgtacccaacttattttactgagttgaatgttgatgagatttatgaagctcctgagctcccttccaaccaggtatccatcgacaatgttagtcaatgtgaggattttcttaattcccattctgaacttcgggatggatactgttgtgccttcgggtaaaaatcagaagcaattgagttctcattcatgggttgaagaggtcgagaaggttgactaccaaagttttgagaaggagatttgaggcaaatttaaagtccaaactcattctactttactttattttacagaaccaatcaaacatggtgatcaattgattgttaagattgatgttgaagaagttgaatttgaagactccttacgggaaaatttgaccattcgtgttgttttaggggttatcctcccatttcgtgtgttcgaagggtttatcaaacgagtttggagaaatttgggaattgatcaaattgttcgtatgcattctgatttcactctagtgagcttttgtgatgaagctactcgtgatttggttcttgaaacaagtgtgatccattttgataaaaagtcagtggttcttcatccttggactactgacttggattctgtataactggtgagattagttcctatttgggttcgtttgaatggtctaggtcttcaatattggggtgagaacaaccatatgttcttgttagcacaataggaagaccaattatgattgataaagtcacaaggcaatacttatgatctgaacgaattcccattagaaaatttcctcaattaaaggcctttggaatgaaattcggggtaaaatcacttcagttgttttatttatttttctaatgagggtttcattctcgaagatcttaacaaaacagatttctttaatccctaagactgataccccaactactattgttgatacaagcacatagggtgttgcaatatgctatataaatgtatatccaagataagttgctcaagattgtatgaggttctcccctccttagttcataacgactagggtgccttcatctcgaagcgtcttcttgctcataatatcttagttttccaagatcttctcaagggttatactcaaacgaacatctttgctgccttatgaagattgatcttagcaaggtgtatgatacggtcgactagtagtttttctttaatcttctcagggcttgtttggaacgtcgtat

SEQ ID NO: 383500 - DNA, 1134 bp, Cannabis indica
gtatttccttttttatttaaagaaaaaaatcgttatatgaatatatatatatatattagatatgatttcaattttacacaaacgtggaagcattgaaagagtgatcagtacacacagaacttacattatttgttggtccccacaatatgatgaccactcatataaatttcattttgaacttatgtttatataaattattattaaactcatttatcagtacaaaattttcaacctataattatgggacatgatagatctattgtttacaaacagttcaatgattttttcttcttctagcttggggttgcccccgacttttcttttttcttttgtttcttgtgcttaaattattatacatatatatatatatgtatattcaagaaaataaaaccataaaaatatacatcaactcagcatcacatttaataagatggttttcatggattattatacagaatttatgaaaacaaaaataataaataaaaaattaatttaaattagtttaaatgagaaagtccacatggaccattaacttaagagacccacgtcaaaatcaaacacgcatcacgagtgtcgaggttttaaattcttagagaactactagtacttgttgttcgtcctctaaaccctacaaaaacttgatgaaaataaaaatataaaagtgaagtttcttcaatacattaataaaagcaaaatttacataagcactttaaattgcgctttttcattttttacggacattttgtttcttcaacttttatttatttagtttttttttagaaaacattgtgtacgttgtacaaggtaagttcaaataatgtttttgtttaacatcaaccaaaaaaacaatggtctatatatcttttgtgagaaaaagaagggaaattgataaaaatgtatgaatatgggttaatttttataaaaatattgtcaggaattttttttcaaaagtagtttatttttataaaacaatagttatagaatacaaaacaaaacaactaaaaataatagtggaacaacaaaaaagcagtacaacaatagtgaaaattgaacacaatacacagtataaaacttatacagtatttttgaaaaaaattccgccccacaataaaaaaaaaataaaaaaatttgaaa

SEQ ID NO: 383501 - DNA, 1738 bp, Cannabis indica
gtttttagtgcataaaatatttcttttcttcttttgtataatgtgtgataatgctttgctgcatcaagttagggaaatcaaatagttaaaaataaataataaataaatgaaagaaaggcaaaagtaaaataaaaaagaaaagtaaaagctaaggtctatatataagaaaataatgttaatatgtaataaatcatataaaattctcaatacgatcgagctagagagaagatatttgaaaatctggtggtttgttgcatacttttcgttttatctgattcaataatagattattttgttttggattgtatctgttatattttattgttatattttttgttttagaacccgtgaactttttctgtggtcattcttttctgcatacaagaggaccttctgtgaaccccactgctcacttgtccccaccaacatatatttggttacttatttcatttcatatattgctttaacagtttatagtccgtgaaccaggccacgtatgactttaatttccttcttaatcctttctttttctcttgatattaaaatataaattatcaatttaagaataaggtatcgaaataatgtaattatgctacaaaagaaagtgaagataattgtatcattgtatcattatctatccatatagtacatagcatgatataattgatggttacctaatatactttacggtacaatctacaacttaatacgatgcttcaaacaaatcactgtatatttattcatttgctgatatattattattatttatgggacaatgttatgaaatatcatttgttttgttttcttcacaggaatatatatatttatatatatatatatatattatttgcatgtataaaaagaatttgatgtaaataattgagaggaataaatgtatatagtttggcactacaaacctcatcttcctttattatatacatttagtttttcttttgaaacttatatgattccaacaaataatttgtttatgtggtatgctctttttttattttaataagaaacctggactgagaagtaatattatatatggtgaagcgatcgagggggtggtttgttcctaattttgtgtttgccgtcggatgaaatcttctcttcatgctctttcgttaactggtgcctgaaaatatgaaaaacaaataaaaagaaatggtacatatttctcctccatcaaaaacaaaattctacaataattgaacttgaattattgtcttattactcgggaaattaaacagctgaaatcagctgaaatgtttttttacagcatatggacaattaataagttgcacccaagttttctaaccaatcaacattctttagactaactttctttcttttaaaatgaaaaaatctcttacaaacttctcttttgattttatttacaagaaaatgaacattatacatattggcattccaaagagtgttatttcaagcttcccaaagatgataaaacaaggcatttaacataccagtataaatctctcttctaagtttggactgctacaccttttaacccacttgacactatattcaagtttatttggttggagattcataccagcccagctgaaatgtttgttgctaataagattatgtttatctgttttggaactgttagggaatgcaattggttatagtattttttaacaagcaagtgtatttatatatatatatatatatggggccggccgtgaaatttagtgggtccatagaaaaaata

SEQ ID NO: 383502 - DNA, 645 bp, Cannabis indica
gcaaaacaggaaacaaaataaataaattgtttatttaaaaacatatttctcaccatatgactaaagaacctgaaatttttgaatgcatagtttgagtcaaatggcttataaatgttttcagaacaagaatttggctcctcattaatgtaacttccatattgagctacaaatgacatattttatagtcaacatatatttaaagagagaataagagactgaataatagattgaatgacacaagcaaataaaaaatagtaagaacatttttaataaaactctataaaagtggtgcattattatatttagcttactctaatcaaatgatgctccaatagtagtaaagaatatgtgtcaaaattctcacatgttaaaagttgtatgaaatttgaacaatatataatataggtcaaatttgcaacgtaatagaaattacgtatacctagttactttttttaccattaattaatgtatttaaccgctttaaacttttttatttaataatttaataattttttttatataatttcattaaaaaaaaaaagtatatatttattaactttttagattaatttgcacaaaatgtatttttataacacaattaatgtagtgaaaattacatgaaatatgggatttcataacaaagtt

SEQ ID NO: 383503 - DNA, 1180 bp, Cannabis indica
tcttcttattcttcttctttttcgtctttctattattgatcatcgttgtcgttgaaggagtactactcatcatcatcttgttgttattaaacggcgtcgtgttcttgatgtagaacactcgacggtaattatcatcccctgctacggtggggggtgctcggggtttgatcactacttcgccgtgttttgttgttgatggtgaagaagataaagaagaagaagaagatgaaagagtgttcttggtgatattctttaatggttttgttgtcgttgatgaggaagaaacgacaacaaaaaaaaggattaatattattaataagaagatattcatgatgatgatgatcaaaggagtagctagggtttatagctgcatttgtaaacttggatcatcacaattatttcttgttattattttctaagaaagaataataataataagaagaagaagaaagaagatctggctttgttgaaaattttgagagagagagagagagagagtgaaacttacttacaagtatttatatatatatatatatatgtatattataataatattattatatatggatgtttgtacgttgttatattagataaataattaatgaaggtacttattaataaataaatgaataaataattaaggagttatgtgtattgggttggtgatattgataggaaaagtttaaattttcatgtaatattgatgatccttgtgttcactgtatatatatgattataaaataataaataatattgatgagatgacatttaaaatttaaactatagaatatattattttggaccaacatttattgtgggcatttatttgtgaccttttttttttataggaaaggaaatgaaatatatgttatattatattcattaatgtaaaggctaattatagtttttactcccgaactttgacatgtactaaatcgtgtttctcgaatttttttggccgttagaaattctcccgaactattgagattgttaaatttaaggacttttatctaattttattcaattttactgtttcagtaattgtttatgtactaaatcatgttccccagactttgatatctaccaaatcatgcccctcaaactttgatatgtattaaatcataccccttgaactttcatcattgttagtaatttttttacttaaaattaagactaaagt

SEQ ID NO: 383504 - DNA, 1152 bp, Cannabis indica
cctgcccttgagcttcttcagcacacatatgaggcggcgagccaagaatggtgccccatgactctaccaacatctgtcccatttgaacaaccctctcatggttcctcttcataatcccctctaacccaccttcgaaggtgctcacaaactccataaccgaaggcacaaggagctgcgagctatagtcccgggtcccaatccaagaagtctgaatgggcaactcattccggctataaaacacggcaacagaaggtggacaaaagaaccatttatgcaagtttgttacatagaaatcggccccaatctcttttacatcgacggggacagtacccaaggcgtgagctgcatcgacaaagacctggtcgacaccctcctccctgcatatgcgaactaattccccaacgggaataaggacagagggcatggaagtaatatgatcaattatggctaacctaatcttgctaccgttggcttttcctctctgtaaacccttcctgaaccgggcaacgatttcttggggggaacgaacaggaaagggaagcgggatctcaacgacggaggcgccggcggtggcgacgtaggcttggatggatttcttgacagcctggaaggcgcagttgaacatgacgacggtgtcattgcgggagagggaggtggagatgtggcggaggacgatagcggcagcagtggtggcgttgtcgatgagggagacctgatggaggtggtcagcgttgatgagggacttgaggagggagcgggagtggaggagagcgtcggggaggacgtcggagtagaacttgtcaggttggcggaggaagcgaagatgccattcgtggtgggcagccaagacggagtgagggcaacaaccaaagctgccgttgttgatgcgggcgatgccttggagatggtgggagaagtgttgttggatttgggaagcggtgttggagttgtgatgatgggagtggccattgccattgagatagtcatggtcttcctctccttcgtccatagctttatccatattggtcatggtaacggtggttggttactagtttccgtttattgattttggggggagggatgcttgatgtttcttaggcataattaaatttttttttaagtggaattactttatatattgtgttttttttt

SEQ ID NO: 383505 - DNA, 1797 bp, Cannabis indica
tttattattttatttacttttataactcttattcttatataagagttgtttagatgtatctcttatttgtttcgacaattaagatagcaatttagtttaatttaatttttttataattgtatatgttgtatttatttaacattaagtatattttttttagaaaaatttaaataatttatatttttactatgcatataaaaaaaaacaagtataatgaaatatttaaatattataattataatgtaagatttataagtgatctgaaaaaataaaaaataaactaaaaaacttacttagatgccaaaataaaaggagaatatactaaaacaccattttcaaataactatagaatatcctaaaacaccattttcgaaataagaatagaacatcctataatttatagtggtatttttatattaaaaaagtaaaaatagttattattttcctaaaagccaaaattcatttctcattactagattatatagagtatgaaaatttattatatttgcttgacgatttaatgagttaataacgacgaattaataacatcttttttagttcaatcacaatttgcaataaaaaattcaattggaacaccaggttaaaaattaaagtaattatattagattttgtattttgattagattttttattttataaaataataaaataaattcaaaacaagaaatgaatttttttttaaataaaaattaataataatttaatttagagttgttatgaaaaattaatacattttttactctttttttttagtgttagaaattatttttaaattagttatatatattaaaaattaatttatccttatataaaataaataatttaattagtaacttttataaaaactaatgcaaaaaaaaaaattagcgtggtgcctgcggtagctgattccaacccactcaacgcggaacatttagaacccctggttcgcgcgcatgacaaggacacgtggcgctcccaccacacaaaaaatgccaaacctaagagagtggcataagtgtaaattaaaacatctttccaagggcatttatgtatttctcctaaatatctctactctctttctttctctctctatactacttcccattttcttgccatactttttattttctctctcttaagttttttccctaaaacccttccctttaagctctcgctcgccgccatggctggactcaaccgtctgagcgtggtcgctccatctttcgctcgccgccttctcgggctcggctcccgaagagcctacggatcggcttctgcggctcaggtacagtacgactattatgatgacgaagaagagtggggacacgaggatcggcgccaggtgaaatcactggtggactcggagggtttcgtccctggaagaggggttcaatgggtggtgatcggtgacagaaccgcaaacaaacacgtgtacgccgaaaggctctcgaagcttctggaagttccccacatttctatgggaactcttgttcgtcaggagctcaatcctcgctcttctctctacaagcaggtcatttactttttttttctttgatttttcttttccttatttaacttgaatttttgtttgtttttcttctccattgttattgggagaatttattttgtccataaaaagtgggttaaacattcaataattgattaccattttgatcatttgagatttttgaaagtgaataaatgtattctcaaagtttgataatgtagtatttgtagccctaaagtgcagacatttaacatggtatagttaaatttcaagcttttatacaatcc

SEQ ID NO: 383506 - DNA, 1896 bp, Cannabis indica
ttttttttattgaataataaatgagataatgtagaaaaaaattttatttagggcataaaacccaacaacaggctttgttaatttttctttcaaaccatctcattacaagtccccccaaatagcccaacactgtgttaacaccaagcattttttcttagagtccagtcacttaaaaacctctactacccattcaaaaaaaggttatccaaccactgtcaaagtgacaatccccacacaattctagtatgttgaacaccttgacaagtaacaaaattgtgtaacacattctcctctcacacactatagatcgggcaaaaagctaacaattcaactcttttttatagtaaccgaaccatagtaggaagacacatcgtgctagctcaccaaaccttgttattcactttaggggagacttttagcttctaaaaacatttctaaacattagaatacttatcttcaatccatctcccatgaatttttttataggaggttctatgcacccttgactgaatataaccttgagacctctttatcccgcacataatgggtggtatgtccctttaataagatgatgtagcatattaaggacaatttatttgttcctattcttaaacatatcatcaattaactactcatcccacccatcaccatccataagtaataaattattcatagtatagcatttacaaggccatgatgactacaaataacatacaagttatcactatccaataaccaaggctcctccaagactttataatatgactcacattccttacacactaacgaaccctatttcttactaactcatcgacctcccaaatacttcttcaaataaaacactggttgttacaaagagaggcagagagaaacgtaccttgttgcaagtatcttgctttgaaaactcttgaaactaatgaggtcaaacgagtgagcagcagccagccttgctttccaagatgagcaagattaaagtctcttaagtgctagaaacgcatacccctgtactcttatgattacataacttatcccattacatccaaagtattcccttaccactcgagttagaagacttccaccaaaatctcgtcatttgcttctccatgtctcgacatatctctaacagtaagagaaagacactcattgcataacttggcaagaattgggccacaactttaacaagtctctctttccccgctcttgataataacttatcttccaaaccttgcattttcttcctaactcaatccttaagatagccaagtatcagtgatttgttttgtcctaaagtgcttggtaaacccaaatacatgctcccctcctccaccattcccatttgaagtacttaaaaaagatgcaacttaagttaagtctcacaattataactaatttttttttgaagatttccacaaattcactttctggcttgaagcagttttgaacttcagtaacaaatcatgaattttcaatgcttcatagtcagttgcctaacagtacatgtagctgtaatcaacaaatagaatataagaaattattggtgctctatttaccactttgcatccatggatccaactcttactttcatattttctaatcagagtcgacagattttcaacacacaaaataaaaagataaggagatataggttctccttgtcaaatgccccgagtcggggtgataggtcccctctctcttcgatcatgaacaatagtataccgagctgaattaacacatttcaacaacaaatgcacccattttcatgaaaacccatttttagaagaataccctccaaaagtcgcactctatcctatcattagcattgctcacgtctaatgtaaagcccgcttagttaatttggaaattagcagttaatcatgattatttatgaaaattatt

SEQ ID NO: 383507 - DNA, 1167 bp, Cannabis indica
ttcactcaaaaaaaaaaaaaatattcctacttttggaatgatttgaaatgtaaatttaatatagtaatttataatataaatttttatttaaaatcaatattttagttttatttgtaataaattaatagtaatttaataaagaagaagaagcaaagccgttatcaaagtcaaagagatactgcctataaaacaatcttaccaaacatttacaatttgataaaagctaaaacaatatatgggatatatattagcctaaaaaatgtcctcactcaccgtaccaaacataataagttattatcttataatgagatatttaatttaattaattaatttatattattatttatttatttttttttttttaagaaaacagaacttcattcaaagttaaaaaaaggattaaaaccttacaagttcggtagaagaataacacaaacttattaggagatgacataaataacagctaactatacactgatggtgaaaggagcaaaaaactcaagactcacacagaagcatttaaaagaataaatcccaaaaaaatccaaagaccaacaccagaaaactaactaaactaaaattcaaaaaataagtaaacaaataagatagaacaacttcaaagaactctccaaaacacaaaaaagactgcccgaaccgaaagtccaaaacaagcagggcaaaaacaaaagactgctgccaacttcctacgagaaaagttccctcacgatggttctcaacaatgaaagagctaggaaagggaaaacacattcctataataacatcgagtcccctctacaatgagagataatttttagtatttcattacacaaaacaaattaaataagagaaatttgcggcataaatatttaactttaattctcaattgtagataaatacttatatttaataccgttaaatgttaagttattattcacatgttatttttttattagtatatataaatttttcttttttaaaaaattagaaattcatgacttggattaattcaacaactagttataaaaatataatttaaatattattaccattaaaaataaaatttaaatatttaggtgacaaagtattcattaaataattactacttccgtgggatccgaccaaaataaaaaaaaaaaacatacatgtcacgtgaattcttcgagtatt

SEQ ID NO: 383508 - DNA, 587 bp, Cannabis indica
ttttttcgatgctaaaatataaattatatgagatctatgaaaacgattttctaagagtctactacaaaaattttgtaaattatttatatatgttatataatttggaatgtggatatgatagtttaatgcaaaattatttaacggaatctaataattagagagattgatcatataatatagtgatgcttatataataaaaagattaattattataaacattttcttacatacttccattttttaataataaataaatatatcatataacttattattgttattattatatggcctagaaatggtggttgtaatgatttgatagcacaagtaaatagtaaggagaggagagccataaatttaaagggtagggaccaattaatattattggattgatgttatatggctcaccaagctaggtagctaccattccctccattcttccttaattaggacaactctttcaatgcatttccctattgctaagctgtgtgtagacccaactcccttatatgctactaatacttgtacttgctctgcaattctgtccccaattaactgacaaagaattattgggcttaaaataaaaa

SEQ ID NO: 383509 - DNA, 2685 bp, Cannabis indica
atctttttttaataaaaaaattagaatttgaatttgatcatatttcattacacactcaataatcgatttgactgatttgcaaataagtaaaatcaaatctaattataacataattaaagtataataaaaattaaaaaagaagaaaacatgtacgctaaagtaaaaattcaaaggaagagaattcggtctgaaatctgtacatgtagatgatgtagtagtagtagtagcagtaacaattgataccagaaataagaaaagagaatagggtgacaaaatttcccggcaaggtatttccattttttttttagagcttggtttttcttttctttttgtacagagtgagagagagagagagagagagagaatccccattgccggtaatgcttaatggctaaacccaaccccagaaactaaatcggacctcagcagctcaaagcttcgtacttgacttgaattggacggttaaaccccacctgagacaacaaactaccaacagcagccaggtctcggcaaaatactccttggaatacatttgaactattattattactattatcattattgtgaaggctggagtcatctgattctgattccgacgattcagaagacgattcttgagcttgctgaacatgaattgcagcagcagctgcggcagccgcagcggcctgagctgcttgtagagaggctgcagcctgagctgcttgtaaagacgctgcagccttattcctctgtctctcggcagcctcttcatccataattgtactcatcacactagaataacccttctgaagtaatctgtacagcaacaaagcagacatctttgccctatctctgatcgaatcaacatcaccatcatgagaaatctcacaacgttctataaacccagttgccttttcgggcttgtgcctcaaacacagcaagagatgtgctctctcaagctcagacctcgaacaccctcgtctaagaccgatcaaagaatagtaatccacattccctgtttccccagaagccaccctctgtttcagggtttggattttggtcgtgagagcacatagcttcccgggtatttctctgtacctaacgttgtggcgtttccataccggaccggggagcttccggtcgcgtaagatggtgttgtagagaagcttcaagtgctctagatcgtgtaagcaatcaggcaagcaacggatggtttccagcaacgaagctctggtgtcaagagcttgaatgcagctctggtcgagagccagagttctgttgcagtcagcaatggcctcggcgattctgcctgcggacttgtacgcggccgcgcggtgcatgtagcactcggccaggaatccttgtggggcaccgcggcgtccgtcgacgatcttgctgaagtggcggattgcctcagagtatagacccgcgtccagggctgctattgcagccgtgcggcggcggaggaggagctttatgtggctgagtaggttgtttacgttttctgattctgagagggattgaggaggcgaggcaggtcggttggtggcggatgagacttcccctgagagagggaagttggagagaaagaagctgtcttccgaccaacatatgctttcgcggcggaatgcggcgctggcgagtcgttttccggtttgaagaagagccatggcgtcttccattagaccgaggtgacaacaagcttggcctaataccaaatatctgtgatttaattcaattgagaaataaccgagttagctcaaccgagtcagctcagtacaaatgacaagacaagtgattaaaaaaaaagatgtgatctcgagaagttttcggacccaaaatagcaaaacaaagcccaagcattgccaaagcttcaaaaacaaatcttgtgaaaagtcttttttaggttaatctttttttttttttttttgagtctttcaaaattggtggcagtgcatttactcaaagccatacagaggaaaaaaaaaagtactctgatccgaattcagaatattaaattagagtcatgaaaagaagaacctactatatacaacaatttatgaggaaacgtaaaaaaagattttaaatttatattaaatataaaataaaggtttagaaaatcaatgaaacagaagagtaatgaaaaagtttgaattattacctccattgcccttcttgttcacaacttttacagagtccggccataaccttcttcttcaagtctgagacggagaagcacttgaaagaaggatcacgatcgtccgatgagtcggaggaggaagaagatagaagcttgactcgttctctggagaggtgctgagatgagttctcagagccagagtcatcgtaagtcattttaaggcttggaatatagtcctgaagcatgtccgccacgtccttgaaccgccggagatataacagagacctagctttgagctccagtgcttgctcaaaccgcggcgagagagccagagccgcgtcgaggagagtcaaagctgaaacgatctcgttgtgttcttgtgtagcaatgaggttccttgcgtctttcaaatatttatccacaatctgaaaagaaaaacaaaagaaagagagaaagaaatcaattgaaaagtgattaatacccatttgagtatgatcaattgtgagtatgacccagatataaaaataggattttggaagaaacccattatcttttttttttttttt

SEQ ID NO: 383510 - DNA, 2334 bp, Cannabis indica
aaatatcataaaaattatcgtatcctataaatattagttagtatgagtttagagaaaaattgtaaacacatatacattatacaacatacaaaatcaaatttccctttacaacactatgttgtatgcttggggaagcaaatctccttaaaaaaaaaagttttaaagcagcttaaaaaaaataaaataatcggggctggttcactaacgataaataaagagaagagactcccgagtctgcctcttctctctctctatctgaaaaacctaaaactcttttgtccctcaccgccggatccggctcaggctccggcttttctcgcggtcgagtcttattctgcattttctttctcgttgtcttgcgccatcccccctcactgttaagttttttttttccttctcttctgttttaattatggcttattttgtatatccattgtcttgatgggatggacattttggttttgtcgaacgtgtatggatgacaatggctatgtgatttaatgaagtttcatggaattgattattgctttgctggaacaattttttcttctttctttcgtacttatttcattaaaatacatggagtattgctcaaataaattgttgaaactactgtaaagttcactgagaaaatcactactttcattcgcttgcttttaaatcttagaaacgaatgaatgctatgattttcagtatgtgtgcatgagtctttgattcagtcattttgcatgtacatgaatttcttccattttgggcctccaaccttagacaatgtcaattttttgtgacttctggtttgggcattgagtcccccctcccccccctttttttttctttctattcgatgagtagctttttcttccctaaatcccagtgttgacaggtgctaaaagtaagaaaaatgtttctgaaagtccagttgccatggaatgttgtaatccctgctgagaatttggataccaaaggattggtgcttcaaaagtccattatcgtccgtttgcttgatgagtttgctactaagaaagcaaccaaagatcttggataccttcttgctgtgacaactctagaccacataggagaagggaaagtaaggcaacactctggggatgtgcttttccctgtacggttcagttgtatcagtttcaagattttcaggggagagatagtggagggtgttgtacacaaggtgctcaagcatggagttttcttgaaatgtggtcccattgagaatgcttatctctcttctcttaagatgcccggttacacctatactgttggggaaaatccagtcttccacagtgacaagcagcccacaattgagaaaaatgtggtggttcgggtcattgttatagggaccaagtggcttgaagctgaaagggaatttcaagctttggtcagtgtggatggtgattatctcggcccccttgacaaggagtcttgaagattccttttatcttattatgtatataaactgttacatgttgcagctaattcctgtaggactactccttaacaagtttaactgtaagattttatatagcatgcaatatttttgtggatcgtgactgtttgcatattttaattcttgcttgcgtctgtttctgtcttttagttaagttgtggtaaatttgaagttgaacactttcttgctgtcatagttctgtagttgaggccttagaatgggaaaggattatatatttgacaaaccttacaagccatttgagcagtgtgtctgttcattacgttctttgttgtttgagtgtcttgagaccaaaatagtgcaagtttttttttttttttttttcaaatttgcaatttaggtgatgatcaagcttgaaattggttactcaacaagctacttttcttaccaatagaattagagctgttcttggttgtttgatagtactttacattgacaattgatgatacaaagttgaattctaataagatttgctagttgagtaaaggacttattgtgtaatatgaaacatagtggctggttctgggaggggaagggatcaaatcgtggaaaaaatagatattaaggagaaagtctctagatggtattgacaactatatttcttttgctaggaagagcccctaggaggggcaaacagaactgagataaaaacgaacagacaaaaaaaaagaagagcatttttggacattttaattatgctgcccataatgtggtcaggtggacttttgctcaaaatctttctagtctaattttagttatctataatacgcctttatttcggaaggagaaaaacttgtcaatgctgaaaatgattgtaagcttggcaggagccattttttttagagtaatttgcg

SEQ ID NO: 383511 - DNA, 2230 bp, Cannabis indica
gagagtgacttttcaaatgagggagataaaattggattttaataaaatgtatctcactttacaaattatatctactattgtattaggtatccaattttattatttattaagcatacaatttcaaattttcccttttcttttaataatagttgtcctcttctctctttcaggcccagaccattaacaagggcatgtttcgttgtggacttttatggtgggacatcgcgggcgtccattaatgagaggaaaatcactctcaaattttgccctgtcgcattagaagatcagggtttgctttggtccctcctcttaccaatattaggttggttcttgctctcaattttctctctttttcactctccaaacactcttccatcccaccaaaaatagaacctctactcgcttattcattgcagagtcaaaatctaggtaagttacccctgaatcgtaaataatcgagtttcatcaactgggtttctttgatttagtgtatctgtaatggcctctgcaggaatttgattgcattttgacaatttcttgtttggggattgattgaaggcaagacttgcatttttgctcttctggaaaaatatggtgagggattaagctttgcctatggttttcgttaaatattctctgtcagttaaagtctgaagctttattcaatttaattcgcatcaatggtagatattgtttagtggtttgatttcatttgttctctgggttaatactttatgcctttggctttcaattattcagtttaggctgtttggaattgggattatggattcttttacgtgaggagtttaaaaatagaagaatgagcctttggaagcatgcaaagtcatgaaatgttcttctgtgtcaaatttttgttttcgaatcacacaattgcctcttcattttattttcaaaaattaaatccttgattatggtcataatggttgtcttcaatgatgtttgggagaatttcccttatgatacttactcaaagatgattccatgataggtttatcactcaagttttgtggatgatgaaagagttactaaagcttgtggatgtcccattttgcctctaaaaacccatataaagggtcctgctccagatttaaatcaaggtttgactttttaatgtattgttacatctttgatgtaaagaagattgcaatatcactcatgtttgataaatcttttgcagatcaaactgacattattgatgaagcaattacattctttcgagccaatgtcttcttcagaaactttgatatcaagagttcagctgataagctccttatttatctgacactctatattaatgtggctttgaagcggcttgagggttgtagaacttcggctgaaggaaccaaggcaattattaacttgggtcttgaagaggtacctgttccaggagaacctggttttccttttccaggtctttttccccttcctctaaccaagaaggaagcaggtgaaactctttctttggttgtgcttgcctttagttttaacacataacatactcatttgggacctttgcattcatgacaatttgaagagttcaatattattttagaatcttgtagttttagctgtaacctctttgttttcattattgtttgaattagtttttttgaaatatgaacttatatgtttttcttggcttatctctatggtcatgcataatatatttttatttgatgagtcttgaaagttcaaggccaagttacacctgatctattattctgattgatagcttaaacataaatttagttcctatcaaccactgaagatgatatagctgctccattgaaacaatgatgttttcaactgtttcattgatataggttagtagtggtcttacttcttaaaaggattttaagtaagtgtcaatgacttgacttaggattttctcttggccaagatgcagtgtttttgtttatattgttgttaagaccttttccttgaccacccaaagctctattaatctgttttgactgacttttctgatgtgaaatgcagaattactcaggaactatctgaaacagataagggaggagactagtggtagattattgagtgttgcttacagacataatgggactccaaataaatggtggttagcatttgccaagaggaaatttatgaacatcattgtcccttaattgtttatacccagtcaaaataatatatgtgtaggcaccacattgatgtgataaaccattggttgtga

SEQ ID NO: 383512 - DNA, 1966 bp, Cannabis indica
tttttttttatttattttttgcatttcttacgaaatttcacataaaaatactcataacaactaacgcatcaacctaaaacgacaaccaaaatctaacataaaaactaccgaagaaaccaccagaacaactcaaactgtaaatttatataaaaaaaaaataatatatagagtaatttttcaagttttatttacattctcacaaaattataaatacactttaatttaaaaaacaataagcttattttttttttaaaaaaaatatatctaacttgattaagaaatataattgcgtgcaacaataatatataaaaaattcaatagaaatatcactctcattgaaatcacgattaagaaaaaaacaagaagctcaagcaatactatgggctacattgttagcataacaataaacaaaaacgaaagaggcaccattcatcgatgtcatcaataacaataccaaaaggacgaagcatagaaaaatgttataaattgcttgtacaataagtaggcaatctgatttgagcaccatcgaaggccatgaccgcattttgatcaaacttcgcctcctagatacaaatagcttcaactatgccagagcaatcatgtactcaaacacaataagagcgaccctccaccaccctcccctcatggcctttaacaacccacctaactacatcacgatcttgagcttgaaaaactgtagcatcaacatttacccactattggggtaattttaaatacttcaaaaaatgtgagttttaaatattgagtaaactacattgtatatccactttactttatttattttaatttttacctttattttcgtattttttaagattatacctacttttatagataatatccctattatatcccttaagttaatgtaaattatgtactagacttaagtggagggtgagagtatattgggtaatccactcacaaaagtggatacagtttaataaaatataatataagggtgttttaattaatggatacaaaaaagtgatatttctcaacttatcccctaaatattccctttaatctttatttttttattttttttttatataggaaaattacttctcaggcactagccaacaagtcaaaatgacttacacaaaatttggtaaattcgaccaccaaactttcgcttcatctaaagaaagagcaactttagcaagtttatgagtgataacattagtctcacgattacaaaaattaaacttaaacaaagaaacaccattacagagcttaaggatgtcatttaaaaccataccaaactcctctagtcgacattcttttttgttaagaagcaagaccacccgttgacaatctgtttcgacatccacctccaagtaacctagccgccaacacaactgaatgtcgtgcaacacatccacaacttcaacaacaggtggggataaagaaaacttgttggagccgcagcagatgccaaactatggacttcatggtctctgattactgcaccataccccatgcgcctctccaccaattttagccctgcatcagtgttcatttgacccttccttcagttggaaggagccacagaggggcaccattcgtaacagggaccgaacgtggaggcttcaaagtcacaattgtcttcttatttgccttcaaaaaattaccagtaaaagttgatgcccatccaacaagactctcaaagtcaagcactttttgttatgaacccatacatacctacgatactaaatatgccacaaaattacaaacaacaattctatttccactcttgtaagaatcgcctcatgtttcctaaggctatgtttggtgggagggagggagagtaggatggatggagaggttataaaggatgggaagtaagagggatagagatgattgttaatctccttagtattggttggtattaggtgtgaggtgggaagatggagaaaaaatttattagtaaaattacaaaattgtc

SEQ ID NO: 383513 - DNA, 1667 bp, Cannabis indica
gaacctaactcaaaccccaaatctaaacccaaacacaaactataaaattagacctcggccccatttgtttcaaatgtaactaaaatgaatatttgtaacaatttgtataattgacaaaaaaattttataacaaaaaacaaaattctttagacaaaacaaaactctagaatagtcataatttggaaaaaaattctaatttatcgataaaaaaagggtaaatagtagcataaatacttaaagttttaagtttgtaagtgacatagattaaataaatttttagcggcatgagtacctatttttagcggtataagacacatataaggctcgaattctagattatgaggtgtagacaaatatgtagtatcagttactttcaaatattcttttaataaattcaaaacgaagtttgtactgacaaaattagagaaaaattacagtttaggtaaatagcggcataagtaaaaatgtttgtaagtggcataaacccaacttttaatttttagcggtataagtacccaatgcttgtaaaattataatttttctcattagtcagtacagactatgttattgtcttaaatatgacacatataaagcttagattctatatcattggatctagacagaaacacgtaatatcagttacttttaaatattattttaatcaattcaaaacgaaatttgtactaatgaaattgaaagaaaattacaaattttacaaatactgaatacttatgtcgcttacaaacataaaacttcatattgacagaaacataaaggttaatgaaaataaaaagagaaacctattcttttcttgatgagagggttgagctatagttagttagctttggacccatgtatattaatgggtgcagtactaacaattaattcatacactaaactaacaccataaccattcactcttctctttctctttttcactcaggccggccatttcatctcactctttcagatctggtgttctggttagtaacaacattttactaaatttcacttctttttatttatataccaaattttttgagtatatattatgtgttgtgttcacttcttgtattagattatacatatgtgctctgatatccattactatattctctttcactatccacccattattcataataactttcttgtttttatttaaactaataataagtacacaccaccattttcaaacatatataatgttgttccaatataagaaaatatatacaaattattatatactaaaaagtaaaataaacattaaatgcttttcaagattttttattttttattttaatacataaatttttgttttttttattgagaaaatatatacatttagatttgattaggttttttttttttttttgtagtgtgtttgtgtgagacaaataaatatcttttttttcttttctaaaactaatctagttataagatttatttatgtttgtaatttaacaaaatttagaattattcaaatattgacattgatataaatgggttatgtcattgtcaatgcattgattattgatgactgaagtaatagcaaaattatgggatcctttaaaaaaaaaggtgatatttacaaaaattattcaaaaatatgtgtaaatgaatttggggtaagttgaaaaatgtctcttttattaatcaattgacca

SEQ ID NO: 383514 - DNA, 2347 bp, Cannabis indica
ttttcaaatctcacctctttaaaaaaggatagtataaagtatagtgattacatatatttattaatattattatttcaaccaaataaacaaagtattattgtgatattattgaacgtatattaattatctcattgttattatttcagaagtataggatggcaaactttattccagaatcgaataacagtaagtgtgaaatatatttatttttaatttttaacagttagaaagaacttccacgtgtagaaaatgattagtacgtagtactctattaattatatgcattcttataaataattttgagataaaaaaaaggttatagctagttttttattgtttgagcctatcatctaaaactaatattaatttatatgtatatgtatttggctccaaatgtgtatgtactacaggagggaataagtttgagaagaaaaacatttcagaaatgctgccaaatttcactgcaacatcgtgagtccttatgttacatcattctttataataatatatatatatatttataattattatcatttgttttgaaataaaaattaatgctatatatatttatatatatgtagtgctgctcagctaaatgaagccctagagatgcagaagcaagtgcaaagccgacttagccaccaccttcaggtatatattatacatatatatatatatattattaatagagaagtagtttgtatacactaaaaataaaaaataaaaaataaaaaataaaatatgtagcagaagatacaataaatatcaagttttgtgaatataattctacagtatatacttggtgattcttttataatcgatcattgtgaatatataattgaaattaatggctgtattgaaaacgttttaacaaatattttaatatctaaaattattgatatttctaccgtgcactcattttcaacatctagagacttttaattttaaatttttttaaaataaattacaataaaaaaagtgttgttctctatttcaaataagtatataataaaagaattaaacatggaacaaattaatttaaactttaattttagttgcatgtattaaattaaaaatttacaacaatatatattatcatataaaaaattaacattaaaattatatatatatgtagaaaatacaaaaaagactgcatctatagatctttttctatatataaccataaatttttgaccatattataattatatataaatgatgtaaaaataacaatttatattataattaataaataataatctttctttatatatatgaataattgatttgaagtatatatattaattagtgtattaatttgtttgaggaaacaaaagagcatgaaggttaaaatggaagtccaagtaaagtacatggaaaaaatcatcacaatagatcatcatcatcagcccaatcacaacaacaacaacaatactactactaataaaaaagtagtacacacaagatcatcaccaccaaaatatatgaataataataataataattcaaatgattattattattattccaaagaattattattatctgaatcagcaccaaatagtactactactgaaatattattatcccaatcccatcatcatcatcatcaagatcaaggaattacctcatcatcatcaccatcatcatcatccacgtcatcatcatctatatcagatcagcttaataataatattccagctacgaagaagcatagagtactacttgatgaaaacgacgacgttttctcttctggattaatattacaatcatcagtacttgattcagattcacattttttgggtgaaaacatgctattattcccagatgataatatcagcttctattggagtattattaacaacattaatactatagattaattaataatttatttacatcttttgtgtacaatataaatatttagtgctactaataaaattaagttattgtcttcttgactttaatttttttttttttatttatttttagcaagtgagagtttgacagtttaaagaccattttggttgtttttgcaatagtacacactacacaacatgattaaatagataatataaatgcaatatttccgtatagtatatacatatattcaacttaattaatttacactatgaggtatgaaccgttaaatgcccttgattcaaaattttgtaattaaatataattttttttttgggaaattataataaatgaccataaattataggaccatatttgtaaatatcttcagttcaaaatttatagtaaaatgattcttttagattatttattatttatattgtcttatgctacataaaaaaaatcaataattttttttttcatattt

SEQ ID NO: 383515 - DNA, 3188 bp, Cannabis indica
ataataataataataatggcaaagaaacaagaagtttaggttggataatgtatagtataataaacttgtcggtttgaagaaaattattttgtatgagtaatattaatatgactagtaaaatattcacacacatatggatatgctatctcttttcaactaattatatatttattaaaaataaggtatccgattgaatggattataattaaatgttcaggatacaattaattaaggaggtaagggtcacacaattaattaagatccccaatccaaacatcttcttatagctaagcctaaggtaaatttagctaaattgtgggaattggccggaaagtgaaaaagagaacaatttatatcacaatctatttagcaaaatttacagaattcgggttgtcaccatgtgtctagagtactgattgggcttccatgttataataccttacaaaattacaaggtttccatatggtaaagctaattattttgtttcttataatacaggtatgtgaggcatcaacattcatctccaacaccattaaaaatttattcttggtttatatttataatttttacatgcaaaatctttagtcatgattttcatacctagcgtaatatgcaccaaaaaacagaccattaactgtcccaacggtctcattcaatatagggtcaatttccacgacgcttatctcatcgagtatcattaatgtgattgactttagaattatattaattaattaaacattaacaatctcacaaaaagcaaattgtcgattatttgttgctgaaaataaatatgtgtgtcccacaccgttaatttaaatattaattaataaaacaaaaaaaaataaacaaattctcaaaagaaaaagttaaaatcatctccattatattctcgctcgatcgatacaagaatttaattacaaaggaaaaagaaaaaggttaattaattgattattatccgaagaagatagtggccagcgggcaagtatgttgacctcttatatccaagatatgatgactaaacttatataattatagctaataactttcttaattattagctatacacatataaatatagagattttgactaccaaaaagaagaaaaaatgatcacatgtgggcggtctcgtgtaattttaccatgggcatgcaccgtcagtttcagatatactgagaagctcttctaagtagtccgctcctaaatcctccaacaccaccacattctcctcaaacgacgtcgtttcgttataaacgacacaattattattagtagtaataatcttgttttgtttgtgaataatctgcttattagtcttcttagaagtttttctcttgagagaatgcctctttttcagagccaacaccggagaacaaccttcttcgtttctatacttcatatccctaagtgactggcacaccttctccgccggaaaattgagaacagcaagcgatcctcgcattgcgaatgcagcttggtcgtaagccaaggcggcagcctcagccgtgtcgaaggtcccaagccaaaccctgacgccgtttctcgtcgagtctcttatctccgccgcgtattttccccacggtcgcttcctcactcctcggtaagagatctcttcttgatataatagtacttcctggtctgatgatttcgatgaatttacctcttcgtgatcgagtttgttattggaggccgtagtagtactagtcgtagttgtggttgtgctcgataaatttgattcggccaaaacgccgtagagaagcatttcttctgtgtcgttttcgttgaaaggaaggggaacttggttgtcgttcatcatcaacaagctgtcccatgacatagattcaagattagatgagtataagttgaagctagaataatcacactctgaatttggatatgggacgaacgaggtggaataatatggatccatgtacaaatagtgtactatgtatagttttgaagttgtagataaatatatgtaatgtttttattttatttttttttggataattggttggttgagtggttgtgtttttggtcatatgagataataacttaaatgtcttcgagaatcgagatatatatagtacatactatagagaggtgtaatagctagagaggctaaccccacacatgattttataacactgaaaaatatgataacattttaatataaacggagagagagagttggaaacaaatttgggtcgttaatgggtttttatgggcccaggggaccaaactcatagattgttggcacgtgagtcaaaaaaagagaaagtcgttcgtgggtataggcggccaggtctacatgaaaattgaaattcaaactcgtgacatcagcgtgatgacgtaaaataatttttataaatttaaaaaatcctaatcctataatagagctaaataataacaatttaatgataaaatataggacagtgcctgatccacttggtgttggtggccgtgttcactacttacttcttacttacactgctgttgtgtctcgtctttgtcgcaaaacgtcaccgtctcggccgtctctatgtggacccatttggcaggagagaatagaagattagcaatagcaactagaagaaagaaggggatattaggaatataatgggaatagaagaagctgcaaatttatataataattaataattttattttatgattaaaagaaaaatatttattcatgattcttcctaaggaccaattgtttgtcggtatctttaatacatacatagccctatattgcattctattttatttagttgtaagccaataattttgatgtgaggtatttatcgtttgtgatatataatgtccataagagcatcaacaatggtgcaatttttattattgtttaagtaaactctgctacaatttcttcacaaatctctccaccttaccgttatatctttcgaagtcaataccaatagttaatcttaggtctatggaatgatttatcactttgtatatttttgattgcttatatgaatagttagatcttctattcatacactaggtttaagtacttttttcaagacaccttgatgtctcgtttaatattttcttatataatgcgagtcgttagtattcagcttcaaatgtgagttatgagttatatctcatttataacttttgattttcctttctcgtcagataggattttaatcaaaaagttatt

SEQ ID NO: 383516 - DNA, 860 bp, Cannabis indica
aaccctgagggtcttgacactctgtcacccgagcagttttacttcgtcccgttctgggtccaagctaactacatcccttttggtcaaaaatcccttcagcttgcttagttcatcgccaatgaacttagcaacctcttggagatccacccattatcccttacggaaagtttcggtccttaccttcgtctctgtgttctggatgtcaccaaacctctccgtagaggtatgaatatctgttttagaagaatcactaaaactaaatggattgcattcaagtatgagggactacaaaatttttgctacttctgtggcactcttgatcatacttacaacaagtttgatcattacctaatgagatgcaacaattttgttgttgctcctgtttttggttacaaggaagaccttcacgccacgtccaaaaatctattgaagaaaaaccctttcgacatgtccaactctactcccattgaggaatacctgagtcgtggctgcatctctgaatagcggttgcaacaagctgttgatcagtttttaaaccttggccccaactttgtcatccctacccttgcccaagatcatgaactgatttcatccccaatcgtaactgctaataccaactccaccatagctttttctactatcccttcccctcctatcatggtcacctctgtgatcacccatacagataaaaggcaaggtatagtcctaccagataactcttgtgtgcccccttccaaaactgttaggccctccaacaaaggcatcaccatccaagttttatccagtgcccctaatgctaccacagtggtgttgggttttatgccctaaataaaactccatttcaatgtaatctattttat

SEQ ID NO: 383517 - DNA, 3172 bp, Cannabis indica
ggtcccccagaaccagaattctgattgtgctgggaactcgaaaatcgaaccctacacttcaattcgaccccaaactttctaatattctccagtatacctgtatacactccaataaacccaaatcaagcaatagaactcaacaactcacacagaatttcatttcaccattaaagctcaaagcttgagcttccaaaccctaacctcacataaacacctcactttgcaaccaaatcagctctaacctacctaaacaatcacaacctaaccccagaatatcaatttgaacaatgccaatagaaacagcaactaaaaaccaaacttcaacatcaaaacctagctcaacatcaagaaacacaaaaaaagaaggcttagaaagtaattccttgaatcaaagtactcaattacaactagaaatccttgaactagatcaaataactccattcctaactactgcccagaaaaaatcgagagagaaagatagttatagagagagagagagagaggtaatttctagactttccctaatctttcttccaacttaaataactaaaaccttttgtttgttagattaatttctaatcagcccatactttccacaacgacaaaagagaataaatataacataaagactactttaccctcaacataaagattaaaagtttaagattatcaagggtaatttggtcattatctacccccgctaaactcccgacacctctaatgtctaacaatgatatcctgctatctaaaacattctaaatcatatgaaagcgtgactctctaatggcccaacgtcgcttttcaccgcttccgagcacaatcacagataaacgagaaatttacataaatagcataataaacatatattaacttaaataaatttccacaatatgcatattataaataatgtttaatctcatgaataaaccttagttattaattaacccaaagtgctaatcataagcggtctttacacatatgctgttgtggttatttaaaaatttaatattttaaattatttttaaactactataatattatttaatttaatattttaaactattcctattaatttttttaataattttctttacttattaatttcatagtttctttattacttcaaatttttctatgatagagtattttttttatggcttaaataataatccatatagataattgaaagataattattagaggtttataaaatgtgggagtctctcaacactaagattttttattgataagaaggttgtatgaaaattgttggtccttttaattctttgtcagttatttcacacttaatgagtcatataataattttttttttatattattatttccttaatttttaatttgtcaatcatattatactgaatgtgacatgtaatttattttacatgaaatttaatgcacaataaagaaaattttattatataagtttaagaactaattgaataacggttctttgcagatacaaaatttaaaaattattgcaaccacatgtgaatatagaccacttttaatgaatataaaatgttattttgcctacaacttcagttaagagaatagaagaagaaatagttaatattctattcaatgactttcaattcataactccaaatttaattaatttacgtattaatgatagcacaatattttgagatatttattcgattattaagttttattcatatttaagtttttattttaattaatctttattttctaacattgtcatattatttttatatcttatttagatgttattggatgtttatgcgatgtgggtgattttgagattgttgaagttcgtttaataaaacaaatttctaacaaattagcaagtagatatcttatttttctttcttttttattttaaaaaaaagttgatgtcatagtttatttgttttctttttaatacattattgttaatttttatgtcgagtacattaggtcacattaaaaattactaattcaattacttaaattattttatttttaaatcaataatataacgaccgcgcaaagtgtgatcacattacctaattattaataagaataatctttaaattgtaattaattatacatttttcaagtcccaaattaagaaagtatatctctatataagaataattatatctaaataaaaaatatataatttataaatttatttatgtagaattaataattttcatctaaattataacacatgtacacatattatatttactcaaaaatgattttattatgacattgtattaaggattgtttattattgtttttatatttttttggtgtttttgaatttttttcagtatacatttatttaattataacctttttattagaataaaatttgctgggtcctaaatgcatttttaaatagaggctttagtgtatttgatctattatccatttcggcaaaaattattcaagcagttattttccaacaaattcttgattgttgatttttaaataaagacaaatatagagacaagtcataggtttaagacaatgttttctctaaaatttgtgataataaatttagttttaaaatcttttaattttaatttaatgtttgttcaagttgcttttttaataaattatgcaaatcttttaataacaataagttattaaaataatacgttgcattctaatcgagacatctactttgttggaaacacgattaagatttgaattagaaaaacgagtcaaataatcaaccacttaatttctagagcgtttgacaaaaaaataaaagtaaaatcagattaaaaagattgcagcatcaccgttaaccttaaaatatcaatattcagtttcatttaccgtttggaagacacaacagtaaaaattgttgcaacagttcatttaatctcgtaatttgaacactcaactattgtgcaaggtgcctaactacactaataacaaccccttcagtcgcaagaacaaaattcccaaacatcaacaacgatttgatggcaaaccatcgaagaacaaataagaaccaacaacgaaacaaatcaaaataaaactatgtcacacaagcaagactaaaacatataaaattatgttacataaataagactaaaacactcaaaatcatatcacagagacaagactaactgctgtaacaccctaactaacataggcgtattacgtgatt

SEQ ID NO: 383518 - DNA, 1999 bp, Cannabis indica
tacccttctttctattcattgagtgcatggactatctctctagcaatcatagagttctctgctatatgtcttcctttaacgaatgacgcttgattgggagaaaaactttgttgagtatccatctcatcctagaggcaagaactttggagattaccttgtaagatatgttacaaagagctatcggtctgaagtcagtgacaagggccggagattccttcttaggaattagcacgatggatgtgtcgttgatagttttcggtagctcagttgtattaaagaagtgtagtaccatttcaatcaagtcggcttgaacagccttccaatggtgggcgtagaattctaagcacactaagatagatactaagcactaataataatgtctttttaacaattctccatataaatgttgtgaacaaatctaaaagctgtaatgaaagctaaaatatcgttgactaacctaaaattaggagagccaagtgttaatagtaataacttatttgcttgttaaagaaaaaccccttatttgcattacataaattgattacgtagatgggcatgcttaataataatatacaaattatgaataagacaattttaaattgcaaaaggtcacaaaatatatttcaaacttagaagccaaataataattagcataatattattataggtatgatttacgttttcaactacctaaatattataaatataatacacaaccaccatttcactaattattataaatatatatgatttattttaattaccaaatataaagacttatcaaagctgatcatttcacatatatggtgccttatatatgactacgagtctgtgactgggagtcaacagaaagcgatgttccaagaccaacttctcttaataaattaaagtgctacaatagcctaaaaattacaattaattatatattttagtaaaaaaagagaaagtatatgtctatatattaataataaatgtatatatatatatgtgttacgcatttatttatgtagaatcaagaattttatcttgaatcatacctaatatataggtatatcttatttactcaattataaacagtaaattaatgtgttaaataaccatatataatttgtttttcaaataaaatatgtattaaaaacttttattgttatcaattgttgttatactactggtattgtcttttactaatatagacatcatatactattatgtgatattcgggaaaaaatagaaattcaaacgtatggaacttatattactgagaatcattccaagattttgatttatatagtttttcaatatgattcgcttcgatcatatagtgtcgtaattaactcaaattccaaataaaaattctatttcccttttttaaattactagtttcattcaagatgaccaaggacaaaatttaatacaataattcattgataaaccaaattagcaaatcattttcaaaggggcaattaagtgcaggtaaaatgcaaactaataggttgttattatccaatttttattaggagatctttggccaataatcatcgatttgatttgttaatgtttatttagattagaaatctagcatttttcatgtttttttatgataaatcgctggcggcttattggtcttttagttgaaggtgttactagagtttttgtaatatctcgacaaacttaatggtaaataattaggatttatatatatattataggctaatcaggtaatgagtgggattatgatcctattaatctatcgtagcataaatttaaatcagttataagtggataaataagtgtaattaattaattacagaaatttatatagtatatatgaatataatatgagctattgtgaaataaaaataattttcaagttttgacgatcttagagactcgatcgaggaccaaaatatacataacaaggtaaaataaatgattttgatgatttggataggtttcggtggtggtttctgtagagtgcgaaactcgagatttttaccca

SEQ ID NO: 383519 - DNA, 2246 bp, Cannabis indica
tttgttttcttgaaaaacaagttctgtaatcaaactaactattttaaatatcaaaacttacaaaataatttcacttaatttactctagcaatcatgatgatcgcacagtgtaaatttatagttgttttgccatcataataatgatagtttatgatcgcatattataattcatgatcgtttctggaccatagaacattattttgctaattaaaatttttataaagttattttactaataaaaattttaaataatttataaatttgatgttgtacatatttggtaactaaaatcaaattttatcaatttaacaaactactctaagctatgtgtaattaaatatataaatttgaatttagatttcatataattgaagatagttgatcatagtcataaaatttatcgatcatattcgaagcgtactaagattaccaactgccgagtacacactttttttattattatgtttttgtattgaacagagtgatatatgaattgaatttttacttgtttttttttttcctttaaacagatttgatgacccagaagtagagaaagatatcaaatttttaccttataaggtagtcaacaatggtggtaaaccatatattgaagtgaaagtgaaaggtgaaacaaaggtgtttagtcctgaggaaattagcgctatggtgttgggaaagatgaaagagacggcagagcaatatttgggcaaggaaattacccatgctgtcatcactgttccaggtaattataaattagtttaagaggatgtatgtatgtatgtatgtgtgtgcatatggattatttaatcatatatgtgtttgtgtatatgtgtagcatatttcaatgatgctcagagacaagcaacaaaggatgcaggcaccatagctgggctcaatgtggctagaataatcaacgagcccactgctgcagcttttgcctatggtttagataagaaaggaggagaagagaatattttggtgtttgatcttggtggtggtacttttgatgtcagtatcttgaccattgataatggtgtctttgaagttttggctacaagtggagatacacatcttggtggagaagattttgatcacagagtcatggactatttcatcaaattgatcaagaaaaagtataacaaagacataagtaacaacagcaaagctcttgggaaacttagaaaagaatgtgaaagagctaagagagctttgagtaaccagcaccaagtgaggctcgaaatcgaatcccttttcgatggtattgatttctcagagccattaacaagggctagatttgaggaacttaatatggatctgtttaagaagacaatggggccagtgaaaaaggctttaaaagatgcaggccttaagaaaactgatattcatgagattgtgcttgttggagggagtactagaattcctaaggttcaacaattgttgaaggaattctttgatgggaaagaaccaaacaagggtgttaatcctgatgaggctgtggcctatggtgctgcagttcagggtgccataatcagtggtgaaggaggagataaaactaaaggtaattaaacttttctttttgggatttttgttgtgagtatttttatgctaagatataatatttatttgttgtttgatgtttgatgttttcagatgtggttgtgattgatgttactccactaagtttgggaattgaaacagctggtggggttatgacaaaattgattcctaggaactcagttttccctgccaaaaaatctcaaatattcacaacttactcagacaaacagagcacagttaccatcagagtatttgaaggtgaaagatccttggtaaaagattgtcatgagcttggcagatttgatctctctggcattccacctgctccaaggtaactaactaaaaataaaaattagtaacttttctcttcaaattagtaatataaagattagaataaaattagtaatatgtagcacataagacctggtttgcgcctagcgcccactcaatctaggctccccaaaaaaaaaatataattttagtgattttaaaaatactatccttgacccaaaatccaaaggaccacaaaatacacctatgttgatatttggagaaataatttagggctttttacactacgtactgaaagtttcaacttttttactatttttactgcgtgatggaatttttttaaaaaatattgtattttttttcaaaaatactgtgtatatattgtgttaagttttcac

SEQ ID NO: 383520 - DNA, 1472 bp, Cannabis indica
aatttatgcaaaatcccttgcatacacattggactgctgttaaacgcattctgaggtacattgcaggtaccttagattatgttatgctcctcaaacttgtttcagacttctctcttgatgtgttctgtgatgtagattgggcatctgatccagatgacaggcgatctacttatgggtactgcatctattttggtggaaatcttatagcctggatatcaagaaaacaagtcacaataagtaggtcctcctctgaagcagaatttcaaagccttgccaatgttgttgctaaagtgacctgggtttgatctcttcttcatgaacttcagattcctcaagcagttgttccatctgtgtggtgtgacaaccaaagcacagtcctccttgctacaaaccttgtgcttcatgctcatatcaaccacatatagattgacctctattttgttcgagacaaagtcctacatcagcacatcaatgttaagcatgttccagccactgctcagactgttgtttgtctcagtaagtcaatctccattaccaggttttctgaaattcgagaacaactgtgtgtgatttccaaaactacactcgatttgaagggggctgttaaggaagctagttagttagttacttgttactgttaactaactaactcggctgttgagtgttctttgactgtattgatcagaaggttgttatcttctttatgcctatataaactgttttgtaatcctcttcattaataaatgaatacggaacactctttttttaattcttctctctctgtttttgtcccgaaaccttacaagggcatttcacataagctagtagcgactggcccttttttttatttccacccttaatagtgccaaaaacccatattctgttgctaatatacaataagcagtgaagagtctctacggattataagtcttttgctactcaacattcatgctgtagtgtaacactaggatagactatatatatatttagccaaacgattcggtcacgcttattaagtagagtaacataatactctcctttaattataaccattaagtgttgtataattatatccaatggctcaaaacatttatagggaaattgattatgtttttttaaaaaaatctaacatggatttaataaatgagactagcaataggggtattgcactttcccctccaactaccgggaatttatttaacacttatgggtaattagaaaaagataaagataaaagtgaaaaaacacttaagaaaactctatctacttaagaaaacccatgtatcttattctcacaacaattgtcttaatctttgtggtaagtcgtatcctatctccgcttctattttcaaagaagtgatgccttacctgatggtctgagcgtgataaatgagaagctcaaggtccctaatcatgaattgaagttgaaaatcatgggtaacaaaagttgtatttgttgggaatattttacc

SEQ ID NO: 383521 - DNA, 1534 bp, Cannabis indica
cttttttaaataaaggacttgattgccaaggaacaaaagaaaaagtgaagaataatttgccagtttcactaaattcaaaggagtttgcttggaattttatttcaaactcaccagttttcatcattctgttgctccaacatatgctttaagctatatgtttcttctggcaatctttgttcacttgcagcacagtcatccaaccattgagattcaacaatatgtaaagtccgcttccggagaatacgtttttccattgcattgaaactgtttacaaaggatgaaaaacacaaagagattgtgatagtggtaaagaatgaataataattaacaccatagaaagcagcctaacatgccttaatatggtttctctacgctagtgcattgtggcacatatttgtgatataaggaacaaaagtttgcaactttctttttgaaatgctagaacacaacattaaccatcagtgattgttgaatactgttaaaatattagctataaattagctagaaacttaggttaattataaatgttttatttcctaatttctctcctatttttctagtttagtttctgttgtataaatgtgttatttacatgaataaaaaacacaattctttcaccattttctacatggtatcaaagccaattaggcttacaaaattcaaaatttgtgtcaagattagggttctttgggttttttgaaaaaaaaacataaattaggttgtcctttttaagggttcttctgggaaaccctatttctgctagtcctctattccacactgcccatactaggagattccccagctgtcgatcttccaaaccccaaaatccggtagccaccccacacatgggccccacgcacagccacaaatctctatctctcttcccgtgcgtcggtgcatgagagcgcgcggagccatctctggtggtcgtcttacgtcaggtaatttgtctcgggttttctgatcatttggtgctcgtgttttgccaacctcttttgcaaattagtggttctcaaagtttggtctagtgttttgttgtgaatctaccttggttttttggtttggtccaatgtacttatttcaaaagaagtatgtatttaatttgttaacttaaacaggaaaattaggagcaaattcttatagtactcaatgaatcctgttgtgcaccttacgagtgatggagagttgacagatttagggaaaaatgttttttctgtgttatattatttctgatataaagcagtatatataacatgtacaataagtctataaagagaaacatatcaaataataaagatacaatgaatccctaaactaattccctaaaaatatggtacaataaaaacagaattattattatacagctatactgaataataataataatttaggaaagctgattttccaacactccccctcaagctgggctaaaaatgttctccatagccagcttgctagtcagaaaatcaaattgttttttacacaatccttttgtgaaaatatccgccacctgatcttcactagaaacataagg

SEQ ID NO: 383522 - DNA, 1243 bp, Cannabis indica
cctcatttaactccttcatgcatgctctacttggcttgtgggatatagctcaaacagtagagctccactcttgcaatgggatcgttgccactaaaggttaggtatctaattgtcctggcgataatgatagtatgttttgtgactttctgttttgtttaaattattaatttttagccatagccattcgacagagagactttcttggaacaaatgcaaaccagctgtttcaccactcctttttaccactaggctaccccttcgggttttctatgttttatgacttatcaagaaaatagaagttcatttggtagaatgtatcagatagtattgtatttcataatataatattatattaaattgtattttatagaatattatattaaattttgatttatatcacaacattatatatttatgtgtacatacaaatcaatactaatataatattacataaaaattgtaaaacatggagcgtaagaggtaaaaggggagcacggaaacatgtacaaaaatgggctccctcatttggatttgatttacaaaggagaggatattaaagtaaaagaaaccagacctggatgaccttaacctgttaaggtccaaaaagctatctaaatcaatttttgttaattggcgcagtctctttggccattaagtttctccacttgtccttgagatcaactggagtgcgactgggatcaaatacaagacgtccgtactccaaaattttcttccatggcagaacaatgtttgtcatcattgaaaatttgtgaacaccatcctttattaaaaataggaatgcataacaaacttaaatgagtacatacaaacaaaattgaaaagaaaccacaaggccatttctacaaatttctcaaatcaatgacttgtaggtgaagcaagtgatgtaaaaattggtctgaaaaattgcctatttattaagagctattttgtaactatatgttatctccttcccattatcaccaagtgtagaagaaaagataaaataagaagtgcagatgtcatctatccttcaactatgaataaacgaccctagtctgcacgtatccacagcaataggaacaattactcagaaggttgaaaaggagaatgcagagagtttcaatgacaattcatgcagtaagagacaaagaaagggagagacagtaaagatggacattaacgtaaatccaaaagtttaaagtggtgaactttacggctgtgtttggaaagtttgatgggaaag

SEQ ID NO: 383523 - DNA, 1702 bp, Cannabis indica
tatatatatatatattgcagttttgattggttattaatttttcattgatcataaaagttgaaaatcccccaaagatggagcatgcatggatcagctgaggtgcttgtcttgtaagcatgatgatgcacatgtgaaatatatataaatatatttatgtggcaagtgagaggatgagttattttctaagtaagccacatgggtttgggacaggaacagactcatacacataaaatatgagttgaatttatagcaacttggtagatgtgaatagaaaggagaaccttttttgcaactggtccaagttgagaatttttttagataatggtattaatgtagagtgtgtgtcctataactcctcctggcactttggtgacgcatatagtactgatcatcttgggccatttgagaaggttagttatatactccatcgagtgtaaagttgaagttttattaaatccttagtatatatatagagagagatatacaacttataagttatatatagggtccataattaataaaagggggtcctatatatatttgcagcttttgcatgtgaaatatctgtgttgcataaacaatattgctatccagatatgagacacattaattaagagaacttcactttttgaacgtgcctatatatataaatatattatgtttagctgctaattaaacaagtcataatagatttttaacataaattcaatctcttagtccccatcttaggagccatttaagaatctagatctctagtcatcatgacccaggactgggtagtgggtaacccgtaaccccttctatttatctgcaaatattacattatatattatattataccatgtattgtgtacctttatgttgggttgtatttattatcctttttatgctaatcttctctttgtataaacaaaacatatttaaagaaactataattctcatcccattaaatagaaggatttaattctctcttaaaaaaatagaaggatttaaaagtaattaattaagaaaatcaatgacatttttgtcatttactttaaaaaagcccaaaagcaacatcctctcttttaatagagttatagatgtaatttttcttgttatgagttgtttgatattcctgttttctttttagaggtcgatgtgtgtcaaagaatgatagaacgaatcattattcggttagaggattaccattacgagactatatgttgaaaattttgtagtaaacgttttggtaaaccccatgtgtttaggagaagaatttttttaatttttttttattattgcgtactttataattatttaagattatttatacatttttaaaaaaattcaaaatagtttacatagacaaaattaaattaaagttaaatcaattacttgtcatgcctgcaacaaaaaagtagtcatacgtggaataaaatatttgaatcttatttttgatacttgtaattacaatgtacatgattatagaaaaaaaaaataaaaaattctccgagtgtaaactaaataagcgatctaccaaaaagggtgttactatattacaacatgttctgtagcaatcatctctaaaaatttaacactaatatttatttataggaaaatatgctgaaagaaaaatgagccaaaaacaaatataaaccaaaattatgcaaaggactattttttttttttcatatatattttttaatatatagatattggt

SEQ ID NO: 383524 - DNA, 4224 bp, Cannabis indica
aaaaattaatagtaagtaatactaaaaactaaaattttaaagttcatataatatgctcatagaacaaatagtaaatatacaaacttaatagaaaaagttaaaaatagaaataattaagaaaaaaaaaaaagaaaaaaaaaaaaagacgtgcaacaaaaaactgacattaattttttttaacataaatgacataattttaattattattgttttcgttaacaataaaggaaagttttgaattaattatttatttcttcaaaacaaagcatcacattcagattctcgtttcttagttgataaagacctttaccaaacccactctcactacctcacgtgccaataaatcatagcatcagacaattttaggagtgttcattaaatcgctcaaattgctcgtattgtaaaaaaaaaatagagattgaaattttttatagtgtagttacagtttgaatgtttcctaaactgcgtgataaaatgcatttgcagttttgaattgttaatacgatttaaacctaaagcccactaattattatattactgaaacttgaattttttttcatatttatttttaagccttgtggtatttttgacaagtgttgctcaaactttgttgtatttgtgatagtttaattattagtgatagtccaaaccataaaaaccgcaaaagaacgtactgcatcacactattttatgcagtacagtttttagtttcgcagtgcaagtgcaatttggaaaattagataaaccacatgtgcagattaatttgagaaaatagtaaaaaactacaccacccgcaccgcgaacactaagagaaacttttgtaaattataggagtgccatttacgcgccactaaaaggcgcgtgagtatttctatttctataatgtttgttaaaaacctgccaagttgataactgtgttggttaatgactttgattagaacactaaatgtcagtttagctgtctttgttttgttcttaattattattattattattaatattaatatttcttctattttctctctctctctctctttctttattgtaatctgagcttttctaacacaaatttcaagctatccactttctaaatctcacttcaattttttattttctgatttaaaataaaaatctgagctttccctgttcttcttcttcattttaattatttaattaattatttattttaataattcattaattaataataattcttaaataaaagcaaaaagtgggaattgggtgttttttattttcatgatttggtttattttctcactctttttatcatttttgcttgtaaagatgggaactttattagacccattaagaatctaaaactgaaacttcctcatttttatttgaaaaacccttaacaaaaaaaaaaatgaaggattttcctggtacaccagggactttgactgggcttcttcttaggatttcacaatgtgtttttgcagctgggtcaattgcttccatggctactacttcaagctttttcaatttcactgctttctggtatgactttaatactttcctttcttcttttatatttttaaagatcatatttttattgctagatttgattggttttggggtttgaaatatactctggtataataaaatgttgggaaagtttgattagatcatatgagctaattttgtagttgcagtacataataatattctctaattgttcttagattggtgtaaagatcatattttagttgagttttattacctatcacctcaaaaaaaacatgacttgggatttttgtaaagagaatcaaattattgtttacttgatttggcttcaggttcattgcatttcacttatgtcttattagttagctaattaggatttttgtcaccgagctttcaaagtcgttgaatgttactagaagaaagttcgggggacacgatttggtacttttattgttagcattattagttcttttcagccaagaatggctagtagtagccctagttgttggaaagtataagaataaaactagaaagatgcttgtaacttgttccaatgtggtatatattggtaaaattaacatgtttgtgatatagattgaattagggatattctcatgttgatataaaccactctgtgattatgaggaccagaccacaactagttgtttggcttcttatcttttctgttttctctttattccttgttttggatcccaaaacatggttccatggaataatggtaaatgaataatttcgagtaaagctaaaataaaaatctaatcttgatgaacatggtcttaaaatcacgatatgatctaaaaatcggttttgaaacatagctgtctaaccaaggattgcaatttggacagctgaaccactataaactttgtgtgcgatcggttgttcttttgttttgtttaattactctcggtgattaggtattaggggcgcgattagctatcctttttcttgaagctctctaagtctaatctacaattgatattaagatacagatcgtagtgttaacaacataatgtttctcatgttagagtgttagaccatgtcaaactgaaaaccattgttgacattgactcatcttgtttttgtttcattttttcagctatctcattgcttcaatgggtcttcaagtgatatggagttttgttcttgctttattagatgcatatgccttagtgagaaagaaggcctttcataaccctgttttggttagcctctttgtagttggagattgggttagaactctatattctctatcctttcttttattcatttcaaaaaactagtctttacccttttgagattagctaataaacacttaaaaagtcacaatctttagtccaaaaaaacaaatgttgtcattattggattagactctattcactatccttaaatttttcccttcatttcgaaaaactagtctctacccttttgagattaggtaatgaacacttaaaaagtcacaaactttactcaaaaaaatgtatttgtgatttgttttcaacctttgttaacattaaaacaatgaatgaaatgtacaacaggttacagcaacactgtctcttgcagctgcttcttcgtcggccggcataagtgtattgtactttagtgatttgggaagatgtaatttggaaatgaatgccaaaagtaccaaatgtcagttggtttagcctatctaagttggatcaccatagctacctcttctctaatcatgctttggcttttggctgcagggtagagaagaataagaagaagaaagtctttggtttttgtatatagaaaaattggatttgtttcattctacttgtattgttgtagattttctctagtagaaaatatttaaatcaattttgtcattttttttttcattttgagtcaataggaaacaatagcaaaagaagcataccattacaatattcatgttattccaatcaaagtgtcaaagttgggaaaatagtttagacaaaagaagtacaatgttggattaattttttaatagaatggtgatacatttgcctagtgaagtattttttttttctctttttaggtggaaggatttattctcagttgtttaaatgattaaattttttatctttctaatttttgtatgtaaaatagtatgttgggttttattttttgtatgtagtatttatcaaaattagtggcctcattaagttgggatcctagacacaaacatagcctacctatgtctaaagtcataattgattgcatggtcgactttgagttaaaatagactaggtctgagcttagaatctacttgttcagagcaaaaaaaaaaaaaaatagtaaatattatttaagatattgtaatttttattagattatttattttattaaatgacgaattagattttatattttttaaaataataaaaaataaaatactgagctcaattttcatggtaataaaatttaataaaaatctattttggaggtgtttatgactgcatttgtttgtactacaaactggctttggttgattatgttaaaaaaaaaattgatgaaaattaagcttaaaatattattttgtaccattttagataacatatagtccaatttgtcatttaataaaacagaagatctatttgataacttttttataaaataaaaaacccaaaatatttacaaatatttttataatatttttcaaaattatcatacagatccatttgttttctgtttatacaccttattttgctt

SEQ ID NO: 383525 - DNA, 2439 bp, Cannabis indica
gtttatgcaatgattggctttgaatggagtgttggtaaattcttatggtatctattctttaccacattcgcaatgttctacttcacattctatggaatgatggttgtggctgcaacaccagaccttgatgtcgccaccactgtttcgtccgccttttatggattgtggaacctcttttctggcttcatcatcccatactcagtatgaagtgttttcttacttatttcaacaaattcaattttcattttctttacatgggattaaagctaattttcttgtttggtttcttggaaaaataacagaggatacctgtgtggtggaagtggtactattggacatgtcctgtagcatggactatgtatggcatgttggtatcacaatatggagatgtaacagaaaagtttgatggcacagaggagactgttaaagaatttgtagaacgatttttcggatataaacatgattttcttggaatagttgcttttgttaatgttgtctttgcagtggcttttcctgtcatcttttccttgctgattaaggcatttaattttcaaaaacgatagaaatttcctttttttactctcttcttgttcttttgttggaaaatctgaaagctttcatttttataataacaatattaaataagattagttatgtcctcatactaatttaagaaattttcaaaatatatgaatgaaatgttgttcaagagagagctatgaatatcatttaggacttttttgatagaaatatttttaggacaagaataaataatcttgggttagatcgtctgtttggagttatacaactttaatttaactattaatatacacttctgtgagattttttctcacattgtttgtggcactagtgtttagaacactgttttgggaacattattatgtgtgtatatatagagagaaagtggtctaaattgatggagagaaaggtttgaaaaaaggaatgaaaatggaagctgcatgttagaatatttttgagaaattattcttattttttttaaaaaatttataatgattttttttttttatgtaggtcgctatgtggatttaggttatgatttaggttgctctgttagctgctaggaggatttttatatagaatttcgtaacaatatatataaaaaggctaattagcaatttttcctcccgaactttcacatgtactaaattatgcctctgaacttttttggccattaaaaattccccctgaactattaagattgttaaatttaaggacttttatttaattttagtaaataaattctaacatgaatgaaagttcagggggcatgacttagtacatatcaaagttggtcatgatttggtagatatcaaagtttgtgaagcatggtttagtacataaacaatcactaaaatagtaaaattgaatgaaattagacaaagtccttaaatttaacaatctcaatagttcagggaaaatttttaacggccaaaaaaattcagggggcatgatttggtatatgtcaaagttcggggaaaaaattgctaattagcctataaaaaaatattttgaagtgtaaaaatgaaaaaatgttaatatttttttttcttcttttttttttataataaatttatatatatttatgaataatttgatagtggtgacattagttttgccatatgctatacatacatttttttaaccacttatattttgagggtcaacattctttaaaatgtagttgtatatatagcatattaaatttttcattttcaattttttttaaaaaaaaaagaaaaaatatgacaaaattaaaaaaaaattaaaactagtattggttattaaataaattaaaactaaaattatccttatattttgaaaaaaaaaactttaataatttttcataatcatcgcagatctccatttctcacatttttttctcacaccaaatacaaatataagcaatctcttccctcccatttctatccgatctaattgtgggaaaaagcttgtataggacaaaaaaatttcttcttcaatctcaaaacttcctttctacaaaaaaacaaagaaagaaagcttgttgaggtcgaggatggtgtagcggctaacaatggaggaatcggtagcttggtaaatgagttttttcataatcactttctctgtgcttggtcctcatttatagtatttggtacatattctcatgtttattgttgtgatcgatgatcaccttgcaatcgagattgaacaataagaaccaataaacaaaagcaacagaactaacagcagcaatgctgtagcaatgttgcagcaatactggtataaaaccagtcaagagacaatgaacagaattaagaaaagattgaataatcttgagtgttttatttgatcttggagagaattacaacgagagagtatgtacaaggcttaccaaaagaaatgagttgacaagctatt

SEQ ID NO: 383526 - DNA, 3158 bp, Cannabis indica
tccaataatccaaaactaatttcatgtaaaatctaatcacaagttaaaacaagtttttctaatgtaattttctctaacacaaactatattaactgaacatgtgagcctcaaaaaccaaacaaagaaaaatgttgttattcatatcatggagataaaccaaatcaaatattccgaccaccaccatttttccgaccaccaaatttaccgccattattcgggttggcagaagtagaagcaattgctgttcttgtgttgtgttgtggtggttccgcctcaacaggcacagcattgtcggccctagcccgcaacgatttttcggtaccttgtctttttatgtcggttgtcatatggtatgaaacttccaaaaacaatctgtcatttaaaaacaaataaacatcatcaatataaaaacttattttttactaaaatgaaacaaacatttatagaatatgttttgttctcttgtattatattgtatagtattatattaaattatattaactaaaatagttttccgaactatttagagttacatgattagttgggaagcctatcaaatcacgaacctaattaggttcgggataaatagtaaagagaaattaaaaaaagctcgcctttataggactagcagctgttagtgtaccgacaagagcaccgccgatggcattgccattagaatcggcaaatgagacactcaggccaccggtcggacgtccggttgcatcagtagaagtgtatgatccagataaggacagtagctcaaaatggccctatcataataaaattcagacttgttcatatcaaatgacaaaatgtaaataaaattaacaataattataataccaataccattatgaggagtagaggaaaaagaaaagatccaaattttagtaaccaattctgtcctttttcatatttttttgttcatatgggaaaatgaataaagaaaaatattactaacccgttggattttagttggaaaagaaaaagataaaataaataaataaaataaattcttatatttgatatataaataaaaatattgtatataaaaaaaattaactcaacaaaattttccatactaaacgtgagaatttgatatttttttccttaactttttatttcctcactaaatataggttaaggttatgtttgaaagttaaattttaagtgaggaaaaaaaaagtgaaaactgtgaacacaaataaataaataaatttttcaattttttaagtttccatactaaatatgattcatattttttattttccatttttttttctatatttttcttttctcaccaaaattaagtttcaaacataaccgaagtgtttgaaaagagaggaattcatattactgttttttctggtaactatttagtacaacaatggtatcactagtaactatttagttattattatactatatatatatattatacctctcgtgtcagtgtctcatgatcagaagaagaatcaggtttacgaatgacaactttggaaacttgtccactagcagtgagaacacaaattcctctgggacccttcgcagcaaaagacataattttttgtacaacattctgcatgtttaaaaaaaataaaaaatcaaactttattactattaatacaaaacccaaatgatatttttcaaagatttgatctttaagtacatgaaaatgttcacttatttaatgttacctacctctccagaatcaatagtgatctcatgtgatttgaagtctctacaggctgtttctctaagcaatccaccttcatggatcaaatcaaagtatttggtcaaaaaatgttaaatttggaagaataaagaaaaaaatcataattttccaatcatttttcttggtaagcaaacagatattttacacaaaaaagagacatacacaaaacaaagacaacctgtgtttcaaaacaattcaccttcatggatctaatcaaagtattttgtcatatgagaattaaaaaaaaaagagcgctgttttaaagatatgattttgaagctttgtgatgtaacaaaaatgaatcttgggatcaaagtttgtgacattagaaagaagagaaagaaactcagaattttcccatcattttcttggtacacaaacagagctttcacaccccaaaaaaaaaacagagataacctagttgaactgagtatttgttcaaatgttaaatttagaagaaaaagaaagaaaaaaaaaaggatgaaaccctgttttgaagatatgattttgaagctttgtgttgcgaaaaaaagaatcttgggatcgaagtttttgactttagaaagaaactgaaaattttcccatcattttcttggtaaacaaacagaacttttacaccaaaaaagaaaaacagagacaaccgatttgagcagagtttaaccgagttgggtttcttgaactcacctatagcagcaagctgttggcggttaccagacccaggaggccttcctctccctcttttaggcgacggcagaagcagcggcggaggcggtgacggcggtggtgacggcggcggtgatgggggggcaaccttcctgggcctcccttttttcctggacaacccgagtcgacgtggaggtgacccagtagagacagtagtgttcgagtttccttgagacccagaaacgttgatcgaatccatgaaagttcaaacaaaattacagctgaaatattttatgcgatcgtcaaattcagtggtgaagtttcaaagaaatgttttttgattatggcgccagaacaagtttacaagaaggctcttgttattttcagttacttctgttatattaagaaagttgcttttacgaaactacccttctaaataatgggctaagaccatttgagactgtttttccaaaatttgtggataataacttcacttatcactcatgtatctacataagttatagaattgttagttaagtaatattacagtctaaaattaaatttatatatttattttttttgaaaaaaattatatatttatttcgagttaaatttagataactatgttataaattactctaataaatacatgtaatttggatgtgtttgctaatacttttttaatcagttttttgtttttaaaattagaaaagtgaaaatatttttaaaaattatgttctataaaactattttcaatttt

SEQ ID NO: 383527 - DNA, 1836 bp, Cannabis indica
cagactcgtcttcttcgttcttcttctccactccattgttgaacggcaaaagttcgctgatctctctctcctccgtctccatctctggcgctggattgtagaaatccatctcaggtgaccctttcttcctccccaatttcttctctctttctttctatatatatatatctgtgtgttactttgttttagcaatttgagaattagtttaggtttgtgttgctgtgctgatatgaaatggtgtcaaacttagatttggcgttttcttcagttggaatttatttttgatactgagtaaaagtcctagagttgaagcataatcgttaacaattttggtccatgctttttcaatttgagagtaaacttatttaatctagtagagcttgttcttttggggttatgtagagagattattcatttacagttactaatgttattgggaattcatccaatgacttctcattttcagaaacccagaatgaagaggtactgattttctttctttctttctttctttcttaaatgttagtttcaaagagtggggtttttaatggtttcttaagacttaaatagtttgtaattggaaatgttgtgtgtgtgtggacaatctgagaaaatattatctttgtttcaacagattttttcaatatgtgttatattatattatgcgaaatgtgaatgaaccattgtttacataattcaatagtgctactgattcaaaataagctgagtcaatattttatctgcttcacacacaacaattccttttttctttttcaattttctttttgttaatttatactaatatttataatacatacatgttcaaacagtttgcttgggcgcgaagaaaagtgctaacccagaatatcctaattggattcgtcagcttcaaatttctaatcatcacaaaatggtgaggaaaaatatcgaagttgttgcttttcgttttggttgattctaatttgggtcctctttgtgttgtttggtttctgggtcttgcactcttgcttttgtgggttttgttgcttaactgaacttctcgactaaattttgttttgattgactgaacttcttgacaaaattatcattttttgtatgtaaagtttggatcctttttcccatatgaggtgacggatatgtaaattttggttccagacttcagcattgatggcaggaattgcagtagctgctgcagcatatgctggtagatacagcattctggcttggcaggccttcaaagcaagaccaccctctgcaaaactacgaaaattttatgaaggtggttttcaacctgttatgaaccgaagagaggcggctttaatacttggagtcaggtactatttttatgtttttccttatgatcttttcgtaatatatgttatttgtccgtgctgatgaaagggcttaccattggattgttaagctctgtcttgttgtgtaggatggagtaactagctagataagaattttgtttctgagaaagtatgtgcatgctgatattcaaataatagaggttgatagcattgttgatattgttgtcttcaaacttcttagaagttagtgttttgaactttagtcttagatacattactttttttatttgctccggtgcgtggaatcaagcatttgcatctcctccctgttcgagttatatgaaaaattattagtatgctgtcatgatttctgatttaagataatgtgttcacatgattttcgtgtggtagcaatatcccaaccattagggggatatatatgtctagtttgtttttcttttgatcaagaaagaaagatctttataatcacaaccaaaatacaaaccaagcctgaacaaaggcc

SEQ ID NO: 383528 - DNA, 1207 bp, Cannabis indica
ttatactaaaatatcatatatttggtacaagttaatatcacatatagttttacatactatacaattcaatgtaccaaataagccctaaatggttttaccacccaaaaataatcacatcaactaagagaattgtagatagcataaaagagaatcagtgcttaaccgcatactaaataggaacactgacttctcctggatagctaaactagaagatcctatactttaagtccttcaaagaaaaccccaaattcaaaaactcaccatcagatgaagatctgctaactggagaatgacgcctatactttctgttagcagcatccgtagtaggcttgcggaaagctgttttaatatcggaattgtctggggacgaagactgtaagtttgcatccatggtatcaacaacctacctcataacagcagcaaaatcattttcatgagcgaagctatgaactgtaattttctaaattaaatttttcatcgacatccaaaatttccgaatcgataaaaaaaaattgagagaacatcaatataagtttacttagagaatgctaatcaggaattcattttcacttgcaagaatctaaaattttttcgaaaaccctatgaataaatgtatacaaacataaataatgaaatgaaaaacaaagagtatacctgatagcgatgaagagtagggaagcggcgaagtgggtttgccgtgcccgaggaaccaacaggagcggcgagagagagaaaagttagggttttatcagaaagaaagaataagtcttcagtgaaagaggaaagcccggaaaagaatcgggtgtttttggattagtgattgttaggcgaaagttttagacaaagagaagaagataaacaagtcgaatagagaacgaaatagggatgacggactacggagaccttcaagttcaactattcttgcaaaaaagaatcaaagctcaatcctacaataatttgcaatcaatatccttatgctatcacacaatttgcactttgatccctcatgcctaaatttatataggctcattgttttttttttttggctaattaagatttttacccctgaattttgacatgtaccaaatcatgctccctgaacttttaagatcgttaaaaatactccatgaactattgagattgttggatttaaggacttttgtctaattttattaaaaaaaaaatactaacatgatgaaagttcagg

SEQ ID NO: 383529 - DNA, 2542 bp, Cannabis indica
tacagtgtctattttgtcatttgacaaaatacaaggtccaattaataacgtttgtaaaacagaaggtctaaaatggtatttagcctaaaatttataattatattatttaaataaataagaccctttgttattattaatttatttcccaacaaaaaaaaaaaaaaacaatttccgacaaatattattcatccttagctaccccatatggtaaatcttaattattatttgtgtcattcatgatgtcatctccttacaataactatgtaaatactatacacatcttattatgggttattaataataggtatatatatatatctattacattatctaataagtatatcatataataaaaataaaaattgatcttatatataatgttactttttgtgttgtatgttggaatatatctatataatcaatttcccttataataaatacatttaaataaaataaaataaaacaaaagatggcttcccactagaacttatcatttgataaaatcaataacaataatataacatgaccctctttctctctctctctctctacctttcttaataattattaattaattaattaattaaaaatttaatcaaataataatcccaaatcacatgctactctcatcatcttcttccttatttaaaccccttcattcccaaaacacaaacacaaaaaaaactcaccaaatattcatcaaaaaacacaaaaatctcccatattcaaaatctcactacattacacacttatatatatacataaatattttgttcatataattatattattattattaatatatatcatcatgatgttgcaacacaccacttcatgtactctcaacatgataccaccaatactagacgatgaaaattaccaaaatacccctgacaacgaagacttcttctcccgccgttgtatttgggtaaacggaccggtcatcgtcggggccggaccatccggcctcgcggtggccgccggcctcaaaagacaaggtgtcccttttgttgtcatagagagagaagattgcattgcctctctatggacaaaaaaaggacatacaatcgcctcaaactccatctccctaaacaattttgccaacttcccaactttccattccccgaaaaattcccagaatacccttcaaagtttcaattcattgagtacttggaatcttatgccaaacattttgacataactcctcaattcaatgaaacagtccagtccgcaaagtacgacgagactttcggactgtggcgtgttaagactactaccgcgggtaatgacgcggtagtagtcgagtatctgtgccggtggttggttgtagccaccggcgagaatgccgagaaagttgtgccggaatttgatgggttggaggagttttgtggggatgttatgcatgcttgtgattatagatctggagaagggcatagagggaagagagttcttgttgttggttgtggaaattctggtatggaagtttctcttgatctttgtaatcacaatgctaagccttccatggtggttcggagctcggtgagtatatatatatatttgagtaatatttagaaataatatattgtgattttttactattttttatttaaaaaaaaaaacaaaacttatgttgtgatatatatatggtatttcgttactacatgttatcaatattggactttgataattctaatttagtaatttataatacagttgaaataatgtataaataatattacgaattataggggtttttatacgatttttttttgttacaaattaagttatgaaaaaaaaattgttttgaaatgtaaaaaatgaaaaaacacctttttaaaatgaaatttattaaaaattattttatatattattttttaatttcttttttattaatttactataatttagagtgctctgttaatagttatgtgagttgctatgtaaattttcgtaaaaatatataaaaaaaaattattttaaaatataaaaataaaaaactctaaaaattattcgataattactttatttatcataattaattcatatttttttcacagtttattgttaattaattagcattatttaagagctatagtagtgatagtaaatgaatatatataaggcaaaagaaataaggtgatttttaaatataaatatatatatttgactttgatatgtgttaatagattagtaatataaatatgtgtatgttgtgagaaataattaagtgtttaatgaatgaattatttacaggttcatgtgttgccaagagagatagttgggaagtcaacattcgaattagcagttgtattaatgaaatggttcccagtttgggttgtggacaagatactattgataatagcaagaataattttggtaaccttgaaaaacatgggcttaaaagccagaaattggaccaataaaattgaaaaacacacaaggaaggaccccagtacttgatattggagcactcaagaaaaataagatcaggtcaaatcaaagtggtccctggaattagaacttctctaaaaactagtgttca

SEQ ID NO: 383530 - DNA, 765 bp, Cannabis indica
tgtattctatataaacttattttgtactacaattttattaagtttatacgagaattttataagaaaaccatatagtataaattcaatacaataaccaaagttattgattattcttaaaaattttgttattttttttatctaaaagttaatgaataatatacttagaacaaatttacattacagatattttgatgtgttttttaaaaatactcataaagtaaccaaacaatattttaaacatcctagaattaattatattatgaaaactattatatccactaattttagtaataaattataagataagtgcttataagtatattgcaccttattaaattcttaaatatgttttttagtaatgaaaatgttgctaaaataacatataagtattttaaacaataatataacataaagtaaaataatattttgtaataaaatgaatcatgtgatgtttaagatattatttaatttccttaataagcttttataaaaaaattatcaaaattgctcgataaactctcactaactttgaaagtaattttaaaattgatacacaaagagagctaactaataccagcgacctaaaggtgtatttatatgctttaaaaaccctttaggtcgtggtcaaaaaacctagaaacaatcacgtcaataaataaaaaagtcaaaattagtttaaacagatagtcaatccacccaaacaggtacattgaacctagacagtttttcaataaagcttctataaacaaataagacaactttgac

SEQ ID NO: 383531 - DNA, 1994 bp, Cannabis indica
gattgcaactaagattttgagttctagaatcaagttagttttacctgatattatctctcactcacaaggaggttttataaaaggcactacaacaaaaactagttttcaccacacaaaattgatgacatttaatgtttaaagttgtaaaagtatatataagatgacaaagtatttttaaatgatattagaaaaagttattaaaagaattaatgtcatttattatttaaatgtcatgtaaattaatattaataacataataaaaatgttattaaataaatattaagtatgatatttttaaattgttattataatatttttaaggacattttattaatacttaattaaatttattgaatcttatactaaatttcttaatccacattcataattcaggttttaaatgtattacatatttattagtttaataagaaataaataaatcataccagtactaaaaagaaaaatgtattatttattcttgttgtgtttgaactcaacacctaatttgagtttgattttcaaagtagtgttaattaaactataaaaaaaaatatcatatgatgtaatttattagttaataaatagtacgtgtatagacagatgggtggaagtggacaattatttcatattatttaatttttttaaaacaaaactattaaggaagaaagtgtaaaataatattaacaatttattagcggcaaaatatttctcaaaaatatagcggaaataaattttttgagacaatttgttttttgttttgaaaactaactttcttttttaaacagaattcattcctcaaattaattatatctctcttatctcataaaagtctaaaaaaattctagtctttctttctcataacaggaaagaactcctctcttccaattttaatgtaagtttttatcattttaatgatatcaccaatttatggttccaataaagttgtttagttacaaaaaaaataaaaatattatcttctggatagttctctctctctgaaggatgcaactctagggttctcgatggttcgttgcttgtcgtcatcgtccccgttcatcggcgttacagtccgtctaggatcttccaatctaagtggcggtgtgaatgggtctgtcttccttcacttaatggagaagcttgctgtcaaatcatgagaggaagccttcaatgctctcttattctccaaagcaggtaacactcaactcagccattacttctccctttgtgtcccatctgttaataacttcatttgtatatcatcatttctgtatttatccccctccattagctcctactatcttcttatccaatctggcttattagatgccaaattagggatttctcacccttctgcgcccccttgggcgatcattgctactacctctttaggtaacctctacttccacccaagaacccctagattcgtaataggaggcactgatgctctagcttatctcattactctgtctgacatgggatatttattcccctctgcgaagttcccccttgagatattgatccctaacttcccttcatataaaaaggaatgtttggctttaatcctggtaccaatcgtacaacagccatttcaaaatttagaatatcctcctgacccctcttcaatctttctttctgcttggtcaatattgatttgtaccatggaagaccttaccaatacactctctgccaaccttcatcttactgaaatagaaacaaagatccactctttcactgaacccaccgaactgcctaaacatgagaatcaagaagagccttctgctatttcttgttgttaagcttctgaccactcggcatttcaatcctgatgctttcaagaagcgtttacgtgaaatgtggccagagcatttttccattaatatcatggaaaaagagcccaactttttcactgttaaatttggatgttttggcgaccgtaggcgtgtttgttgggttttatgccctaaataaaactctttacaatctgattagttatc

SEQ ID NO: 383532 - DNA, 1463 bp, Cannabis indica
aaaaaaaaaaaaaaaacgtttgagcgggggcgtgctggaatcccctttttttccttggaccggcccaacccaacctttttctataatctaaacaggataacctggaatctttcttcctcttcttctctctttcaaacagttaatgaaaaagatttatcttggtcttttccttcaatgctttttgatgttaatgaaaaagaaaaaagacagccaacaagatttgaagaagtcaaacaaggaccaatattctggcaggtctgttaatgctgaagaaaatggtgcaaaaaaaaaaactgttaagatgggttggagtagaagtagtagcaggagtactatctcactagccttaacgggaaatgacactctttgctttgcttcattctttctcagtttatgcttttagtgttagcaacaatggagaaagtcgttgaagtgggaggacaacgtgggtgctcggccaaggccacagtttgactcggaagagcttgttcagtggtactgatcattgctgagtttaagcagaggtttgggggcggcaatctgacttttgatatatgacagcatacatttagttaccacaattattttgcttattttcaatttttttgaatcatttatagtttccaaacaggatttaaactatcaatttcatgtgtctgtttttgtttttatacgtgagtgactacttattttgaacttgatttttagcaccataagttatttggccggacctggttcgtccgtgttaggcttaggccttactaccccctctataccttttatggggttggcgagtcttttcaggattaggactgatttgccctatttacattcttaaattaaaagtgcgttcatgttttggtctaatgcttttgtagctcccaaaatgtagagaagagcattgctattgggcaccagtagtgcctagcacctttaagacgtgtcgtcttgcgatttaatagcgatattccctaaaagctattatattaaactatatgggacccgatacttaattagatcaataacgatattgacacgtaggagggtgttgggcaccactgatgccttttagcatttctctgtagagaatggttaactgtagtttccttgtatgataccttcaaaattagccacctgctcagaactaaggcctatgccggccagggttccaaaactttgatagggccagctaggatcccatgacccatgcaagaaccggacagggtcataagacccatgcatgaatcagttagcctcctagggtgaaaccctagaaccggccaactcccatgaaaaaaccctaggctgatcgaggttagttttgaacaaaatatgcgtttttcaaaactcgaacatgttcttcatgttcttcgtgactcaaagagtcaagaatcacaacgaagactaaaattgaatctttttcgtctggaaatcacacattatgcattctaaaactatcatac

SEQ ID NO: 383533 - DNA, 1061 bp, Cannabis indica
ttttgttgctttttatgtggtttagtctgaaaattatttgatgtgaatgagtttgtttttagttaggtgtgttattaaattggtgtgggtggggtattgtatttggaagtatgtgtaagtggggtatttcacatgtacattgattgtgatgttttttatttagaataattttgactgatataaaacatcttgtaatgctttggtacatggaattttgacactattttataacctgcaaaattgttaaaagctgttgtgaagagtgtagtgtaatataaaagttttgattcacctacagaacaatcatgtgcatagacactacaaggtcacacttacattgtcataaaattttattacaaacatatagtggacaagcaatattgtgaagaaattaaatacaaaaacatacctaaaaatatcactttgaaaatatctctactaatccttgttctaaatcagtttaagtgtgtcaaaatatgcatcatagattgtcaaactgattaggaaatagcaagataacctcactgtttttagactgaaaggttcattattatttattaacagaagtaactttcaccatcaaaatgtctctactaatcatttctctaaattatcaatacaagtatgtcaaaaaaagcattagaaattattaaactgagatggaaattcaaaataacctcattgatttcaaaatgatatttagcctaaaatgatatacagatccaatccgtaattttacaaaacataaagtctaaaatgatatttaaacttatattatatatccttccctttaagttatttttcaaacacttagcgttcatttacataaagagtgtaaattatcatttatattacaaaggttcattatttacataacaaattctaccaaaaattttcaatttcactatgaaaatatctccactaatctttgatctaaatcaataccaatcattattcattttgtaaatatataaacatatatacatatatagatatattattccttccctttgttatttttacaaacagttagtattcattcatatagggctcgtttggaa

SEQ ID NO: 383534 - DNA, 2545 bp, Cannabis indica
gagaaatcaaaacagtcttttgagatagtattttcaaattacagagagaaaagaaaatatagtttttctctcaattattcttgctcatgtgttgataactcaacaagaacaaacatatacactttatcctaatagcccatactattccttgtgtgtggtggatcgatttggaagacaatagtgtgagtccaattgcattatcctcatcatctgtattaatggatacaacatacgataagttttgaggataccctaataggcttcaaaaagtatatattctaaacttgttattttatgttttgatttaatgtacacacatctagatatcctttgggatatggtacaatgataatcggcaatatgaaatccttctgtatttgatttagtaccataaaaccaatatttctttgactaacattaagaaacaactaggagaaaaccttaagaagtatatccagtgtatgatggatactgatgcaaaaataaaggttactaatgatatgaagatggtggctttaacatcaagaataaccactaaatccttgctatagggaaaacttctaaggaaaagggcagattctttatctaacttcacatccagagcccaatgattcataaacatagaagatgcttatgctcaggcttatggagtacttccagcaccatcaacaaacacttccacagcacaaacttcgcatatgaatgctctaaatatcttgcctctgatatctacattcacaaaacccactgtttatagacctagtactttcgtacagctgattgcacagacaagtttctcctattacagagtggcactaattggatacagtgccactcctcgacaagtgaaccaaaaaatggaagttccagaattgaacgtaagtcattcccagaacaaaagaagttctgaagctccaaggcaaagcgaatctgcaaagaaggaagaactcgagaactaagatattctaagtataccaacttagtggatactcgtgaaatgtttataaggctacttgtaatatggttcatgaaaaaagacctccacatatgtacaaaggtggaaaacaaaaaaaggactcgaataaaaggtgtgagtaccacggtgatatcacgcatacaataaatgaatgtgactacttgaaggacgaaatcaaagggttagtctgaaacagccatttatccaactaggtgaggataccggttatctatcccggacaaggagtatcacacggatgactttttattcctggacaacctagaactataaatcctcctcagggagtaggtctccagcaagcccctaaaatacaagctctgactatataggcccctcagggggtagaaaatgcccaagtggcaagatctgtagtcactccctaacctggaaatccatacccacctggagctactccgctagcattagatggccatgtaacaaccatatctacaggaccccatatttttggaagcaccagaaatacacaaaagaggtacctaaatgagctagaacaggataaagcatgtaatctaagacaatcacctacccaatgcccacggatgatgaatctcccaataacattcatagagggacgatgttaagcatgtacattttccacataatgatctattggtgatagaagcccaaattaaaaatcaaagagtgtctggagttctcggagataacgaaagctcagtcaacattctcttcaaaagaagcctttaaagccataggtctagtggaaacaaacgtaacatcctatctagttcaactccaaggcttcaatggagatacacttgtgtcaatgggaaagatacaactttcagttacatttaacagagcagttcctgtcagcaacatggtatcaactttcaaatactgtacttttatatatggtagtggattgctcaacaacctacaatctcatcctaggatgacctgtcttagtttactttagagttgtaatgtcaattcgtcacttatgcttgaagttcgtaagcgataccggaagcattggatcaatcagaggaaataaaaaaagtttaagaagctgttataatatctcaaccaaaactattttgatggtttgagaagaaatcatgaagaacctggaacattcacccagccagcactgggggtggtccaggacgaagatgaactagatccacgtttaggagtggaaagaaaaattcaacctatggaggaaataaagaagtatgtatcagtaatgaggattccactaaggtcattgaagtgggaaataatctacctcaagctattagggaaaaatcatctctatagtaaaagagaacagtgatgtgttagcctagattcatttaaacatgactgcaatcagccctcatgtgatttgtcatgctctaaacacagatctcgcagtggaaccagtctgtaagaagagagaccattagatccagttcgagcggaagcagtgaagacgaaagtagacaagctaactgttgggttttgtgccctaaataaaacccatatcaatataatcagatttacttattaataaagattagaaat

SEQ ID NO: 383535 - DNA, 1017 bp, Cannabis indica
atagatacaatggtttacctcaaaataaaatattacaatatataaataattagtaatattgatttatatatctttttttttcttataaattagacaccattgtatatattcaatatacccaacccctcttctaacccccaactactacccaccctcccccatcctaccataagaaaacgtgactattgattaagtttgcctaacctagtaaatcatgtttgaatatagacttcttatatttgtgttttaaactgacatccaactttttttttccttttttttaaaaaaaaaaaattaacatccaattatttttactataaacgctcaaataaaacatatattttatgtcaaaatactatgattattattattactacgtgtactcttattacggctgaagctttagccagccatccatgtcagaattggcctttgtgttcatcagtactctcatgtaggggcggagggagactttaaattaatggagggcaaaagaaagaaattaaaattaagaggaggctaaattataatttttgaaaaaattaaacaaaaaatacataagaaatagaatatttttttttcaattctttttggggaggggggcatggccaccctttgcataagggtggctcgatccctgctctcatgcatcaatgttgttaattcttttcaaaaaagaattatatgtcatttgtatttacggtgcattattggatatattatctctttttgtaattggtttagtgatatattattgcatctttacatgtagataaaaattcctagtatttttttccttttgagatttgtcccattgtccatggagtttactcaaaaagttttaatgaggccgttttctaaaaaaataataatgttgttgttgttgttgttagttgttgttgttgttgctattagttgttgttgttgctgttagttgttgttgttgttgttgttgttgttgttgttgttgttgttgttgttgttgctgttactgttgttgttgttgttattgttgtt

SEQ ID NO: 383536 - DNA, 993 bp, Cannabis indica
accaggtcatcatcatcctgttcatactcagtgtcatggtcgtattcatcttcttcaccactatcctcaccaaaatcagcaaacatacctgttccaaacatatcatgttcatcagccccattagttgtttcaactacagtctttcctctaacatttgaagctatttcagcagcatcgtttgttacaatttctaggtcaacacaagcagctacactgtcgtcaaattttgtcagatttcccttaccaaaaataagctcactttcatcaagttgtgaaagccaaatatcattatcttgtgtcccatttccatcacctaactcaaccccaacctcattattatctacccttgtaattggccctgtacaacaaacaaacaaaattataaagctattttttcaataaaaagaaagataaattattgctcctaaatcatgttttacaatatttaaaccattataagtatataaaagttaaaatacacattgtcactgtcactgtcactgtcactgtcactgtcacacacacataccccacccacacacagatacacacaaaccccacctacacatacaacctttcaatattaaaataaaaaagcttgaaaatattaccatgtgggttcacattatgaatggataaaataaatagcacaatgatcaaatccctaatttttttcctctataaatatcagttaaaaatgacacaaaaagagtgcctacaacctccttcttcgtcttcttcctttaaacattcaaaactctaaaactagctaatacaactcacaggaaaaaaaaaatgaaaaataacatcccataaaatagaatatcattaccttgattttcaaaaaatcccatgttctttccagtgatatccatctcttcagtcaataatactgtagaaccctaattttacaccttttctattttgaactgctaaaaaacgattgcaattattttaataaaattaatttttttaaaaggttatgaaattatt

SEQ ID NO: 383537 - DNA, 3233 bp, Cannabis indica
ttttgccacatttgtgtgatgagtaatatggaaatgagattgattgcaaccctgattttcttttcattcacttggggttgtgctccccttttcttgattgatcttgacctccttatccgtacccctcctcaacctaccaataggctggctgattcatacctacagcttgtgacaactttgctcaattatctatgttcttatctagaagtagaagtggctcctagagctttacctatcatttcaagtgttgtttgattgaagcatttgagtttagcaacaattttggatccagaaaagatcaacacaaattaatcattcactacaatataaggttacatttggttggaggtaatgacattgaatggaatggaaaagaatcaattttcgtttcattgttttgtttggttgcattttaaagtattagaatatcattggaatgatttttcaaccattttaatggaatgactattctattttgagataaagggaaagaccatttgcaagatgataaaaaatttttttatcaattgttttaacctcaaaaagtggttattgagtagagattcacaatatgaaatcctttttaagaagaggaatatgaaatggggtctaacctcttcagtttagtaaagtggctttcaaagcttgttctacttcggaggtaatctcagaccagaaatgtattctacatcaccaaataggagaaacgtctggttttgtttttgtccattgcatgctcttaattgcatctgtatttttcttgttattcatggacaagggatataatattgtccatttgaatgtggtgatttaattagtatgcactcaccaataccatgtttcaattggcatatttcccaaactgagcaattcttttcccttgatgcatttcattgaatttttagtagagattgtatacttttgttgtaataatgagtttattggactcctttcatattgaattttctagcttagatcaataatatgatgacatgaggaggccaatcttgtttatagttatagaatcaatggaagcttccatgtatgtatactagatgcttatgttatgaataagagagagtaagtttgggcaggtctcaagaatgttcagttatgcttttaatgtcttcactttacttgtgtttgtctttcaaatacttagagaaaactattttggcccttcttcttatctcacagtcagctggagcaagagatggaaaccgtggtaaatgtgttgcagcctggacctttaggaatcatagagcacaagttctctggtgaagagattcgcgaggcaagtgctacggttcatagagctgtagagaattggcgacgaaatgcaaaactggaaccaacagctcacatcttaaacgattacattaagaaatgaagggaagatattagctaaaaccattttccattgatggctcaagattcttatgtttttgtcggaggatgttgaagaacttggtgccttcgtttaacttttgtacatcaacgagtttgattgctgttgtttatattttttttttctatatatcactaccccctattttacaagataatgtttgtatattctctctttttctcaaattgaccgtcatttgttccttgtgttctgtccttatttatagagtttagagtcattgttattccattggagtcttatcactgaaactattcgtgaaacgtggacaattcccacattttatatttagattacatgagataataataaataattgctataacctttcattgtctttatttataaacggttatgttgactatgcttcatctcgcaatacaaacaatcctcttaggctgctttattatgaaggtagctttttgcaaggcaatgagatgaatatattgggagtatttctcatagtctttcaacatactcatgagtgagtttgttggtcaataagctgcaaactcttaaaataattcattatctactctttctaattactgttgttctgttgtgtatcctgtgtattccgagatagaacttctacgttagtttttcatctcactaatctcataaaatggtagttattattcacgactcacccttatctttgaaaggttaagttcgaatatttctactaattgtattcgaggcaagtttattgaatgcatttattgctttataacacgagttagtttatttttcatcttcttaatacgtgtcataactatattaattgttcaaaatatgagtataataattgcccctcaaaaagtatttttttagaattaaaaaagactttttaattaatagagggtatgatcgtattttcctttttaaaagaaaatgtgtgcttcattttggcaattcagtatttcgagaaaaatatcatttcaacatttattaatctgacccttctttttctaatagtttccatctattcgatcagtcatcattacaatcgaacggtttccattttttttgaatggaaaatagcaacttctaatcacacatcagcttttaaataagagtccttacctaagaagtgggccactttattcacaattcgcttaacaaaatgaattgaaacattaaacaattctgataacaaaagttttgatttgtggattaaaatgccgtatagagaaaacatactaactttactctttatagcatgcaccacgttgacacaatcagtttccaccatcacgtttgaccatccatgagcttttatccaacttaaggcctctttcataccgactgcctcaaaaaattttggattaataactcctggtttaaaagaatgaaaagcctcaataaaagatccatcatgatctcgagcaatgcatctgaatccatagctattagattgactgaagatggcaccatctacattaactttgatcatgtttaagcttggtttagtccattgctcatctttcactctaactagtcataagtttttccattttattacacaatgatttagagagtaagaagacattcatagcatagctaggtagggattgcacaacagattttatcattgtttccttcccagctcgagataagaatttgccatcccaactgtttattcttttttgtatcttgtcttggagatagccaaggatcacattcttttttctgttaagggtacttggcagattaaggtacttgttgttctcattagctagttaaatacctaggtcagagcagatttgagatcttgtggttgagagaacatgttgggttttatgcc

SEQ ID NO: 383538 - DNA, 2138 bp, Cannabis indica
tttgaagtttgcttttgagatattgaaatctgtcagtggagagagctttagtgaggagatcggccacctgatccacagcagggacatatctgacagataaagattgagcaagaatttgatcccgtacaaaatgtaaatcgatttcaatgtgttttgacctggcatggaagacaggatttgcagcaatggcagctgcactttgattgtctacccaaatgattggtggatgagaaatagagacttgaagctcggacaataaatggacaatccactttatctcagcagctgtgtttgctaaagctctgaactcgctttcagagcttgatcttgccacaacctgctgcttttttgcagaccaggagataaggttccctccaagaaaaacaacatacccgcctgttgatctcctatcatcaacacagctggcccaatcggcatcggaataagcgtaaagttccatagttgcagctggtttgagcagtaaaccatagctgagagtgcctttgaggtatcgaagaagcttcttgcaggcttcccaatgagtaactgtaggaacatgcaaaaattggctaagtttgttgatgatgtaggccacatcaggtcttgtaagagatagatactgtagtgctcctaaagtacttcggtagagagtgatatcatcaaaaggttcactgtcagttaaagataatttctggtgtgcacttgtcgggttgggacagcttttggcaccatcaagttgaactttaaccaaaagattagtaatgtacttgctttgagacaagtacatgccctcggaatttcgatggacttctatcccaagaaaatagtgaagagagcctaagtcctttaaagcaaatgagttgctgagatcatggataagcgttaggaaatcaaggctgagttaggtcccgttactaggatatcatcaacatatactagtaaaatgatgaagttgctgcccgagccaaaagtgaaaagagaggtatcagatttggaggcagcaaagccccattctaataatgtggttctcaacttttcattccaagcccgaggagcttgtttgagaccataaattgctttgtggagacgacaaacatgagtaggctttgtaggatcttcaaaaccatgaggttgcctcatgtaaacagtttcttgaaggtcaccattaagaaatgcattgctgacatcaagttgcttgacatcccaattagaagttacagcaagagttagaacagttcgcacggttgtcggctttaccacaggactataggtttcttgatagtctatgccaggtgtttgtagatagccttttgcaacaagtcttgatttataggtgttgagagatccatcagcattaagctttatcctataaacccacttgttatctatcacggtcatataaggctaaggaggaaccaaagtccatgttttggccttcaccaaggctttgttttctgtttgcatggattgaaaccacttgggatctttaattgcttgcttgaaggattttggttcacttggcaagagagactcctttagaggatgtttggttgaaagataggccttaggcttgcgaattccactttgagaccttgtttgcattgtgtgagtgcgagaactagtatgtgtttcaggtacagtagctgtttgactagtaggatgtgtttctggtgcaggacatgtagaagagtcatcgggtgtggggttgcaggggcaatttggttgctggattggggctgcaatggtagttggattgatattatctggttggtgaggtaatattggtggctgtattggtgtctgtatgggtgttgggttgggtatcatgggagagggattagtatttgggttgtgggaagtggtgatggctgctgatgtggggtcagtttgagatgatggtagtggagatatattctcacagaggggaggtgtagatgagaaagtaccagcaccagaaaaaaaagatgtattagtggcagtagcagtaggaaaataataggtagcaataggtaaattgtgagatgaagatagaggtacctgagtggatgttgtagtggaaattgcagggaattgttgctcattaaaaacaacattacgtgcaatgtatattctgccttgagagttctcacacatatatc

SEQ ID NO: 383539 - DNA, 1108 bp, Cannabis indica
attttattatatatattacttaatagtctttggttatgggtgatcatttgaaatctgtggtcggtcaaaaggtttaaagttttgtagacttcgaaaacgacatagatatataatgtacttttctatatatttaaaaaaaaaaaacctgtcctgtgtccaaacacaaataaatattaattaatatttagatcgatctttcaggtaaataaatctcttggtattagcaataggtgttttcacccgataatatgctctataccaaagttccaaattgaattgtaatactatatatatatttcacttagtggagtatatatatacaaaatcaatactcatattacgtgctgtacatatatatatataattattgtaatattaatgtataaattcaacagctagcatgatatatatatagagcaagtttagtggtatcaaatcttatatatatggaaaacattgtataattaattaaacagctagcatgtatagcaaatttagtagcattaaatcttatatatatacatgggtcgaagctagaatggaatatgtacaataaaaagaaaaaattataagtttcaatgacaaaaattcacgcatacatttatttaaaatttataatttaaaaatgttatattatgatataatgcttaaaatattatacaaaataccaacccaaatattaattaataggtaagaaaattaaattacatgtttcagcaacattgccaaatgccagttagtacatgcaaccatggtgttttaatttttcctatctaaaaataaaaacaatcacacaaaaaattaaaaacaaaaaaaaacattaaagaatatatacataatattaataatcaatagacaatcacgaatattaattaaatctaacctcaaaaaaaaaaaaaaaaacctacgaataataataataataataataataataataataataataataataataggacaagagatctaattaaaccaaaccgaaccaatttcatgaaattaacaaaaaaataatatatctaattataattagattggattggatttaatcttaaatttgatacaattcaattataattaatatatattaaatattatttatata

SEQ ID NO: 383540 - DNA, 3667 bp, Cannabis indica
aaaatataaagttcgaatatgtataattttacataaaaaaaaattcatatatataataaaatacagaaaagtcgtcgattatgctttattccaattaagacacacacatatcagaacgggtcccattttttttttccttatagtttttgtgccatttgtactaaagcatacacataaatcaacttatcatgagccaagaaaccttgcatattattctttcttcatcaaaagtgtccaaataatttaggcaaaagcatattgataattttttttctttaactaaatggcctctctaattagtcttattttagcatctcaatcctttttcaccagctatatatatataaaataaggaaaatgggaactttaactcatgacatattgttattaattattacattttaatattgtatttcatacattagtttaatttgataaataatataaataattgataattaatatacataaaatttcaattgatattgactacatagtacatactcaatattcctctatctctctctactgttacagatagttggatttgacactttaatactacgggtcaatattcaattcaatcgggttattactttgcaaattctattgaaaaggttgatctaaatctaattttactaaccataaaacttaatggaaatacttttggaatctgaaccttccttcactttccattgaagaggctgatctaacttctaattctactaaccataaaacttaatagacatacttttagaatctgaaccttccttcaaaagtgaatatattcgttgggaaggtgtttcacaatgctataccgtctgcctgcctccttgttttctcgaaaaattattaattctacaacttgcagcctctgtacaaatgcttaggaattggtgggacacgccatgtttaactgtaaacatgccagagtaatttgaaaaatagcaagaatttctattatgattaagcagctttctatctgcaaattggtgattatctcatgtttgtatatttcatgttaggcgagatgctaactaagctactcacggcttggctaaacatgctctggtgtcgaataatgattgtatgtgatctgatgaggaaatctcccctgccatcttctctgttgatgtaaatgattctttttaatttataataactgatctttctcaaaatagaatgtcacattaattgatatattattagactattgatatattattagactctttaaaatattaaataacaatgttgagaatataaaaagtccactaacactcaaaagagttggtatgaacgctaaattgtgtaaaaatctgatctttgcgttggctcataataaccatatctctgatagtggaaaacctactcaaatggatcttttttctagtatagtagtagtgcgtgattgttaattaagtactacagtatgtacgtacaatacacatcaatttactgataattattatcatataattcaaatgctttttgactttatatgcttcactggcctttcaagattaataatttgagcctctacctcgaccaaattattttaaatatttttttttttgatatatgatatttcaaatcaatatgatttgagtaaatattgaacttaattttaatacgtacgttcttacatatgtatagtatagatatatatataaattttgtatctgatcatgcattctatatttatataataatagaaacatttacatacttaattatataacatatatatttgcacgcatctcatacatatataagctagctgcatgcaagtacgtactagtcttatttaattttttattttgtcaggtatagctagctaattaatttgttattaataattacttatttaattacgatcaaacattaatataattaatacaattaattgtattataattaattgactacagtttataattaaatagatctataaatactacaaaaaaaatattagtaacacatactcagcacatcaaattaatatcaactttaacacaacaacgataataacaactttctagtaattattattcggaaaatattatgtaaaattatttaaaacattaattcactctttataattagagtttttgagaataataattgtaatttaacgaactttttaatttataaataactagacgttatagtagttctttatttgtgcagtgattttaaatttatttttatgtgggcgcaatttagatatattttttttaattatacattttttaattttattttaaatttttttgagttattattgatgaataaagattgtaaaattttgagggttaaaataaagacataaactaggacattactatataattattatagttttttgtcattaaaccctctcaattattattctatttgcacaacttaactttcaaagctcaaattttggtggtaaaatattgcaaagtactattaaacttatagcaaatttaaagtgatataactgctaacatggactgtttatgtgtacacatatcacgtttatactaatacacctaatattattatttaaaaattatttaaaatttataatattttttatgtgtacaagagtagacataagtagtccatcaaggcagctatctgtatgacactttaaatttactaatagcttaaacgattttaccattaaaattgaaattttgaatattaagtgcaaataaaacgataattaaataataaatttagccgctgaaaactctaattattatattgtatatagatgtagtactatgactgaatttttaacaaagatgtaattaatataaattaactgctgaccattaaattttatattataattactgatcatgtttagaatatatttttttaataataaatattaatcttacatatataagtttcctatagtaagttttactattttgtattttaataatgaattattatagcgcatgctcctttatccattaatatatatttatattttcgtagggagcatgtgaagtttgtcgtatgaatataagtattgactgtcgtcttcttccttttttatttaatattttgactgattcatttcctgaattcttcacgtgtgctacttggtagagcagatcatagttgtcatcatcatatatactctcaattctagtatatataatatctaataattaattttttattttaaatgtatgtatatatttgttaattaattaatataatttttttttaaaataagttaattaaatatcaattaatttggtactcactatacccgaaaatgtttattaattttcttattattattttaatctcaactctgcatctcatgaaataaatatgcaacaacggctaacaagagtagtacactcttaattatttaaagcttggatttatttatctgtctttcccaataaatagcagaaataatacgtatagaaagtctgtatcgatcgttggaagttgatgaaatcaataaagaaatattattgtaattaattgacaagctaatttaagacccttgttattactgcctgctgaagagaccactgcccatcctcaatattgtacgtagtacgataaaaaagaaaagaaaagaaatgactagcttaggttaaattttcatttaattagcttttactgtacttacttggaaccatctttc

SEQ ID NO: 383541 - DNA, 1778 bp, Cannabis indica
atgttactttgaaagaaacaaaaaaaggtgaagataactatgctatatgcaaaaggtggattttggtgaggaaaaacaaaagggtaagaaaaggggaaaaaagtgtattcaattatttttttcatagacaaagattctttaaaaatttatatttttaacaaataatggagcaaaaacatcttctaacaaataatgtaaattactctatttagagtatttctattttttttcaaatatttctctacatatagtattatagaaaagcactattcatccattaaacatattttaataatattctaattatattttatttcatttttattaatatgtattatatatatcaaaaaatatattatttaaataatataaagaagatacagaaaaatagagaagttgatatatgttgtgttgtatggggtgtttattggactatatttaatatttttaagtttattcagatccgatccaattatatattggaagttagattttaccatctaatccgatccaattaattttaatcatctaatcgatccaacatctatgagatgctggattggatcggttttatccattgagtgtatttcatgtacatctattggcttaatttggatttatccaatatttcaaacctaatattttttgcatcgggttagatccagtatgtattggattggattaaatctatcaaatcaaaaaaataaagagtaaaattttaggaaaacttacatacactgtaaaataggaaaaaattaacaaaaataactgtgagtactaaatattacatttataccatcctaggtctaattttttattttttattactgtgtctctgccaaaatagaggaaattctcattatcctcaacagccatggtcggaaacactgatcatactaaacaccgaataacacataaaaccaacttaacaaccgtacggtaaccacaattagaaaagcatggatctaattttttaaacaaaataaaaataaccaaaaggaagcttaagaagaagaagaaaatttcaaagataatggagatgagaataacaagaagtaatggtaactacaattgaaaaaacgggaaacaattttacaaacaatgaaaaaaaaaaaaaaactgaaaaaaggatgcttaagaacaactacaacccaccaaaaaataactaaaaacctatatcaaccctaaaatgacagaaacaaaaatagtataaagaatcatgattaaaataataaaattagagaatatactctaaaaaaatcctcaaatacatgtatacaatgcaaatgcagactcgatatatccttaaaacaaccgtaaaataactttaaacccctaaaagcacaactacttaaaaagcccgtataacttcaaaaaaatgtggttaaaaagccaacaatcacataattatacccttgtcactttgtttacttcgaaatctttatcttcaagctcaaaatcatcatgagaatcttcaataataagcttaacacgcttatatttcctcttcttcttagtagtatttggatatgttagataaggagaataatctttaaagtaatttgcggcataaacacttaagtttaacttctaattataaataaatatctaactttgattttttggtggtaataatacctaagttataattttaaaattgtgtaggtacctagatattaagtgttaagtaaattgtcacggggtaattcttaattggtccaagtcattaaatttttatttttttaaaaaaattagtttaaatatactaataagaaaat

SEQ ID NO: 383542 - DNA, 1291 bp, Cannabis indica
aatcttctcagcctaatgcactattgggtacccagaaatttgggccactctttaatgtctgagttgaactatacccactgaattgaaggcatcattttaagggtcagaaatgatatatatgactaatgttgttttttttctttttttttttttttttttgagatacaataacaatatataactatagttgaaccctgtaaagttttggataactaaaattaaaagtctagctaggtttgaacccttagggccaaactactaatgttattaggtgatttgggtttgttgtggatgaaatgatatggattggtgtattgcaagtagtcatctaatcaatgcagattttatatatgaattggcttatgcagtggatatgatgacgcctggggctaccatcaacctacgtaatgcaaagattgacatgttcaaggggacaatgaggctagcagttgacaaatggggacgtgttgaagtaactgaaccagctgactttgaagtgaaggaggacaataatctttccttggttgaatatgaattagttaatgttgataactaataatttaatgtctagagtgagagtgaacggtatattgtgggagtgaatattttttaagattgctgaaaagatggatttgtgtttcttacctttaacggttaactggggttggttgccatttttatatatgatttacccaaattttgttgaagatgttatatttatcaatgcaaaaggaagtctcatcttcactgatgattttatgagttgacatattaccgatttgtagaatgtaaacaacactgtttgctttactatcttgtaaatcttaatccaatttacatgtggactgatggggtctttactaacaatcaataattaaacttccatttaacaattactattctgtttcttccaattcaagtaatgcataatgtatctccatacgaagtgtaaatccaaataatacaaatgttggatcacacaatttcagtgcgattttagaagtgtaaagtgctagatttatattattagggatagaaatgtagtttatgatacaatgtgttgcttatggtgtgaacatagattggtaaccttatttccggccttggatcatattagaaggaatattttgcattggtagcattattaggctttgtcacattttcgtcgtcaatcaatactagttgggcgaaccacatttttatatgaagtgaaattaaaaggtgtgataataacatttttatataattattattaatagtttgtagtatttaaataattagattttaaaaa

SEQ ID NO: 383543 - DNA, 2580 bp, Cannabis indica
attatttaaatggtataaagaaaaaaaaaaaaaaaaaatattgatgtatgatgaaatataaatatgtgaagtaaattaaaaaaaattgaatttttgtgagatattttactggagagaaacggttgggagtgccctaagagcaatctgaactagtgagctagctctaaaggtaaatatataagctaatgggtaacaagtgagctaaatgtgtatatataaactcactttatttcctaagagcactcataataaagtagttaaaatggataagatcactcacatcagtttttttattctactttttaaaatacctcattaaaatctcattttctttattttacatcacatttttacattacatcatacatctgtttttctattatattttttaatatattttattttataaaccaaaaaaaatttaaaaattaaataaaaaagaattaaagatgagagataaattattaaaataatatttgaataataaatagtatttctctctacatgtagagaagcaatattcatgagctaaaattttaaactattttagctcacttgatggagtcctttttaacacttttctatatttttaccttttgtagttattttacctcatgagttgtgagtgcttttagaaatgtaaattatttagctaagatatcaaaaaatgatgaaaatattgctccatcaattaagctattatgttaaaagatttaactcatgagtagtgcttagctacatgtagaaaagcactattcattaagctataaaatattatatcagtacttcaaaactattttgtaatatatgtgtgatattagtgttattatattattttttaaaaatagtatagaaaagttgatatatgatttaatataactgtgtgaggtaaaataataattaaagactgctaaatcaccattctatcgacttctttaaaatacctaaatctgtaaaataatagctaagatcactcacaacagcttttctaaaatagagaagtttttttaaaagaaaataaaaaatcgtattaataatacgttacagcagatgatctaaactcctttattttaaattttttttaaaatactctattcatgctctacatttatagaatactatttattgctctaaacatattttattaattgttctaggttttaataattatttttgtatagggatgtatgtatatattaatattatatatttgaaatgaataaaatataataatttttttttaaaaaaaaatagagttttagttatgtattttaaagaagtaaatgtatggtgcaatgtaaaagtgtgttgtaaaatagtaaaagtatagttttggtgatgtattttaaatgatagagtgatgtatgatataatataaaagtgtgttataaaatagaaaatgtcgagttttggtgatgtattttaaaaaataaagtgacgttaattttttttgttgttgaaaagatgtatttatagattaaaactgaaatagttaaacctcatggtcgttacatatgatattgtttggtatagaagaaagttaaagttctaccatactggtaacattttaggcaaaagctcatttagccacattatgaactgcaaaattacagaatctaaaaataaacgaaaaattacaacttatcaaaagattagagagatttttacattgagttacatagttaccaataccccaactggagcaggttccttgtagcgtcttgataactatcgcagagtcattctcaattattacaaaaggatgattcaaagaagcggatgtctccatagctaacaaacaggatacagcttctccaacaagaggatcagagaagttaagcatgttggtagccattcacaaaacagatttcttatggtcctagccaaagctaccacacgcattgaactcaaccaactttaacatcacaattgattttgacccaatcttcaggggggagtcaagttggagactcaacagcctttgataaatcaaacaaacaagaaccataatctgcgaaacaaatagagatagaatcaatacaatgctttatgttactcagagaattattgtgtaccttgtcgatgcaggttatccaaatcgtgtccaataaacttaaatcataaaggaacagttcctgaacatccaccccttcagacttcaaactccacaaaaattggaactggtctcaaactgagctccaaaatccttaattggcatgaccccctaaggggatgacctacacaggtgaaaagcgaaattgcaataaaggaacagatgctccattgttttctctccctccccacaaaagggacataaaacttcctcaatatgtaatcttttagcgagaataaagcagataggcagagcatttgagagaatgctccactagaggaccttgtgacgctctaaaatttttgaattcgaaagcttattccacatacctagagcaacattgcacggcggggcacagttcaaatgagtgtgggcgtcgagaaagtcagactccacgaagaactcgagctcacaaagcttcgacttctaggaagtttgtttagagagtttgtgttggaaattatttt

SEQ ID NO: 383544 - DNA, 3353 bp, Cannabis indica
catatcacacataattgtatagattatacaaaaggaccttgattaaggtgttgttagttttaaatgttgtaattggttgtttgttgcaatgaaatttactgattcatcaaaaaaaaaaaaaaaaaaaattggctgcaaaaccatctggaaacttgacagattttatgaattcacaaaaatcctaacgctcggtgacactaagagtgtaactagtaggatgtttcttccacttgtccccaactttataagggtggagtttcttccttatcgtcatgtctgctagatcaagtcttgctttttcagtgtcttttgatttcccatcaatacttaaaagtgtacccaacacactatcataaacattcttctcaatatgcattacattcaaattgtgcctaagtgacaagtttttacaatattcaagttcgaagaaaatgcttcccttagacaagttgagctccataggagttcatttacgcttcacccccccctccagatttgttatgttttcttggtagtcttatttgtagattttacaattgcttcaatatatcttctaatgaatactccttaggggtaagttgaagttccttattaccatcaaacaatgcacgtttactcctccattcatgattcatattgagaaatctttgatgccgaatatatgaaattttattacgaattggaatggaaggagtttcctcgttgcaggtagggcatgccttatacccctttgtcctctaaccagacatcatagtgtatgttggataatcattaatagtccataaaattgatgctcgcatagtgaacaaggaattattgtctgcatctcgagtttcaacactgttctcccacagcatttgtaactcctcaattaaaggcctcataaagacatcaatatctatgccaagtgaattgggacccaaaatcagtagagacaataacaatgattacagtttcatacacttccatggtggcaagttgtaaggaacaaagataacaggccacatgctataagagttgctcatgtttctaaatggattgaaaccatctgttgctaaccctaaacttacatttctatgttctgctgcagagtctgggtacaactcatcaaaaaatttccaagacataccgtcagtagggtgtctcatcacaccatcttcttgcggccttttgcaatagtgccccctcatatcctctacagtatgcctagagctgtacatcctttttaatctcaatgtcagtggaaagtaacacaaattcttgtgagcaactttcttccctgtgccaccattatctttctaccgacattcaccacataccagataaaattcgaaagcgacgttctctttccaaaatagtgcacaatcatgtttgcaaacatcaatagattaataacctaatccaatattggacaacttagctttcaactcatagtgggaattaggtaaaattatcccctcaagcattgcattaattaataatgcgagtagaccatcaaaataatggttggtacacttattaataactttcaaatgcatcaaattcactaagacgttcaaagttgagtactttttacaaccaaggaacaactcacttgacatgtccttcaataaatgatcatacttatcatttttacactcatcatttaagggtgggtcattaaatgtcctagatggcgtattttgagacccgccatgtgcatcatcttctgccaaaatatcaacaatcacatgtgccatctcatccacttcatcatcaacagctacatctgactccatacttaagggttctccatggtaataccaaattaaacaaaataaatcatgaaacttaagtaaagtgttgaaccaggaaatgaaaagggttaagaatgattgaattgacaattaattcagatttaggtctgacattgaatgatgtaaagctttaaaaaaaaattcaattcattcttgagttcgatcggatgatccaggaaggtttagggttggattttgaagaaccgtgtttgggttagggacgaacctaatatggatagttgagacttgagagttgagagagaaatgagagagacagaaaacaaaaaaaaaatggagaaggaagaaagaaactcttaggggttagatctagacatggggtgttggtggtgggcaactagtaaggtgcttgaagttagagatgaagacagaaaaattttagggattacagatctgaagattgcagtaatagaaaccaaaaataatgtaaacatacttacagatctaaagaccgacattgtcggagagggagggacgttggggtcggagaaggaaggatgcacgatgtttgagtcggagagagagggacgtcaggactggataaggaaggtggcatgtattctaaaatagagagtgaaagtgaactatataatttgatgacaatcttttgctagtattttttaataaagaaaaaatacttttaccagtagtaattgtgaaaagtgctggtataaattgcaataagaaattagtaaaacattatatgccaacacattttaacacttttataattttaattatataaatatatattttttaataaatttattttaaaatttttccattaaaatataaatcataatatttattttaataaatatactctaaaactaaaaccattttattttgttaatattatgtgaaaaattaaaatattattcattcttataatactaataatataaaagattacaaaatttaaaaaaaatctaaaaaaataatatttatataaaactatgaatttttttaccaacgcagttcgtgtaatgtgctggtaaaagtgattagtgtattacactattacgttggcaaaatagtaacttttactaatacaattttacgctggtaaaaaagtgtcaaggggaagagttttatatagcttattatgccagcacaaatatgagacgctgctggtaaaagtatgatttttttttactagtacagttcacaagatgcgtcgataatatcagtacattaacaaattgcgctgaccaaagtaatattttttatagtgtatggacaattaatttggcagttggctaataaaaatagagaaaaattattaaatgttaacgagaatgtaaattttagaaattttgttgttaaaatttaaattttagaagttaattgctaaaaaagtaaaagtgttaggaattatgcaataatttactctggtataaacacatgtattcagtgacgatcttagatttttacttttttatatttgaaacatcttagatttttattttgtgggggtttatttatcaaaaaaatatttataattacattataattactcttattaaatttatctaattt

SEQ ID NO: 383545 - DNA, 668 bp, Cannabis indica
aaaaatacattttggagatttatgctatcttgaagaggacctattacctatcaataaaagcaccaataatataggtaatgagtcttctttgagataggacaaatctctaaatgcactcttcgagacagtttcaattaatctcttaattgaaccaaaattctaatttttcatttcatatccactaatagttacacatttatatatttataagttttcatactattttaaaattactaatacgcccttacactatttttaacaaattattaactaaatgactaactagagatttaacatacccctcaatctaggtcgaacaatcattttttttttctacttaagctggcgaaattggtcatacaaagagatgctaattggtgactatgtcatctagcttttggactgtgatttttggattaaaacagcctatagagaaaggaaaggaaaaaaaaatgaaatcacaataagatacgttgtcaaacattggcaacacaaagctagttggagacacacatggtgatgggtaatgattgtttttcaaccatgtaattttaacatatatattatgcacatacactacaagaaaatattgttggaaattattttaccaggatcttagatctactcacaagtatgtttattaatttcctaaatatgaactttctaaa

SEQ ID NO: 383546 - DNA, 1390 bp, Cannabis indica
cattgtcaaaaatttgagcaagatttttaactatgaaagaagaacaagatgggttcaaagcttcatagtaaactcccacatttactttctgagaaaccatctttaaatctttgtgtttctcatcataagcctcaacactattaatattatcatagtgaaatgtaaacaatagcaatgaaaatccaatggcatatgtgaaaaccaaacttctattataatcagattgagaacccatttttctgatatggattctactttgtttgtgcatctatatatttatatttatatatagagagagagtgagtcagagactcatattaatggacatttttcagtaacagttaacactgagaagtaattgcactctttgctataatgaccagagaagtattcatagtcaatattatctactacctttattagttactcaaataattgtgtaccttagtattgtttttaaagaaatatataattttcttgtcttttatttattattttgaccaaattcatttatttattgcaattggtaatgataataggtgaatttagtgcttgcaatttgtgtttacgggtcgagatttatgtattataaataaatgtcaaattaacctaattaatttagtaatcgtaccaaaaattaaaattaaaattaaaacatcatcagtaggttaaaactattttatgacacatttattagttatttagcatgattttgatctatttaactaacttgatatattttaagtgtactaaacatgagtgtgtatactcttaagtaggttgatatttatatatatttgataaattgaattttaattgttctctcatttttaagttaggtatgtaaactccaaaatgacttgtttaataaatatgttaggtatgttaattcgaaaataactaaaattcatttaagaaaatctaagcttatttatttagtgtgaatttcgaatcatattatcgtttcaaatttatttttctatccaaataattttgttattactaacaatcagctatatgtggttctcaagagatgtttgacttgagtttgttttgtttttttataaataaaatgaaaatatcataatgtcttgcaaagatctgtatattcaaataatggtaaatgagactaattacaaatgtagaggtagcaaaaatgatacataacacaacttgaacatgacacaaatttttgtaggttagggttgggaaattaagtgggtcaaaagttcatccacataattggtttgaaataaaaatagatcaaatatagcatgacccacttaacacaaaatctacatatttttgatgaataaaataatataaaaaatctcaaatatgatttttttatacatgcataaatatcttaaaaatgtttttttttttttat

SEQ ID NO: 383547 - DNA, 1275 bp, Cannabis indica
aatttgataaattatgtatgtatgtatgccccgagttgtacaatatgtatataatgtgataaaaaaaataattgaaatagtagcattctagttaactagtaaggagaaagtgattaaaacatgaggtccataaaaagatattaaacatagctgtagaaaataagaacttagggaaacaagtgtaacaatatataagtccagaaagacaaaacgtttatagaggttttgtcattaataagagatatgtctaagttatgtacagtactccatcaattctaataatattttggcagtcaaatctttgagtaataaaagttgctctagttaatttgtatccgaaaaataaaagtaaaaagaaagaatatagtgtatttaaacttttggatcttaaaactttaatatgtcatagtgtttactacagaaatttaatataaatattaaataatatttccattcaaaaccatgacttgtttcacaaaataaataataatcacttagctgctactttcacacagttaataaaactcagtggatatagttttctaggaaatacatctttaatatttgatctagtccatactctaaaaccaatgttctgcagaggccccccaattattacactttggtacctccaatgcatatacatatattcagattatatatatatattgatggaaatattcagataatattttcaattttaacttgtggataacattaagagccaaaggatatatgaattttttatttttattttttctttttcaacagtgaacagtaaaatgatgatttttctgcacaagaacatgtcaattgaacaattcatatgtaaagaaagaagagttcatctgaacacctttttcagctttccttttcaataaaagctcagataataactttgattatattccacactttcatgcaaaaaataataaaagcacacagtaacactcagttttcattttttaaaaggacggttgtagctaataaagcgtgaaagacattgtgaatctagatagaaaaagtctcagttttctattcatttgtttacattttcagaaagattctattaaagcagctgtcactgaaaaacaaaaagctttttttttcaatcatttaatgaatgagctgagctgattcttagtctcactcagctctttgcttagctatcaaatgtccatcatgtaaaaaaaaaaaaaaagttgggttatgatgattatgaaagaaacatacttgtatagagtgaatattgaaaatgttattgtaaagagttac

SEQ ID NO: 383548 - DNA, 2663 bp, Cannabis indica
tagcagaggccgaagacagagaagggggaaggatgtaattcatcctcttaaggtttctttggaagacctatacaatggcacatcaaagaagctatccctttcccgcaatgtactttgctctaagtgcaaggggttagtacttgtcgtctttctttatgtaaataaatacacccacgcacagtagggtagtcggggaatctagtttttggaaacaaaattatatagacgcacacactttttgaattgtttttactttatgtttacttaatttatataatgtatgcagcaagggctcaaagtccggtgcttcaatgaaatgccctgtctgtcaaggctctggaatgaagatttccattagacagcttggtccatctatgattcaacagatgcaacacccttgcaatgactgcaaaggtactggcgagaccattaacgacaaggatcgatgcacgcaatgtaagggtgagaaggttgtccaggagaagaaagtcttggaagttaatgtggataagggtatgcaaaatggacaaagaattactttccctggagaagctgatgaagctgtaagtcctattattttctactttttattgctgagtttcccttaagcttactttgttatcgtactaggtcgtatagtttaggttgttaatctactgtttttttttcttgcagcctgatactgttactggagatattgtatttatcttacaacagaaagagcaccccaagtataaaagaaagggagatgacatattttatgagcatacccttagccttacagaggcactatgtggctttcaatttattttaacacatttagatggcaggcagctccttattaagtctcaacctggagaagttgtcaagcctggtaagtgaaatatcattgcattacctcctgtcaattgtttgaaacttgtaatttgaaataatattgttgcagaaggtttttcttccgtttttgccatttcttagtgcaggcatgtcttttttgtctggtggaactagacttagctgaaagtaatgaatatgcgtttgattagttgattgttatttgacttgccttttggctttgtttatccagttagacttaacaatttataagggtatttatttagcatatgctacacagttcaaatgtttaatactgtaatgttccaactgagttaaggaatctgtttgattgtgatttaacctacgttttggcctggcctcattcagttaagacttagacagtttataagggtatttatataggataggttacctagtacaaatgtttagtactgttatattctcactgagttaaagagaaggtttgattgttatttaacttaccttgtggcctggccttagggcatttatttagtatatgttacttagttcaattgtttaataccgtaatgttccaactgagttaaggatgcagtttgttgcttatagataattgttaatggtaatgcaattggtaagccttttactctgttaggcaatagtcattacttactggccacccttctgctgcccttcctcttgtgctctctgggtatttctaagtatgattgagggaacattattgggggctgtatttttaacattgactattcacgacaaggtttgttcatttgttttaaaaggcttcacatgtattctttaagttattctcttgtaaaaggcttaatctagtggctcttggcagtgccatactagtgtttacgactagttgaaaaaacttgcattttatgtagttaatgcttatacatagtggtgaacttcaaattgtcattttagatacagagactcttccattgagtgtaatttaaaatacaggtcattgctctgttctgcttgatttagttagtgcttccttttttaggggtactctgtttagaatttttaggtttgttaagggcgccaactattgtgactatggttttggcttttcatggcaaatgcatgtactgctatgactctaaacttgtttgtgttctttttgtcgtgacagaccaattcaaggctataaatgacgagggcatgccaatgtaccagaggcccttcatgaagggcaaattgtacattcacttcaccgttgaattcccagactctttgagcccagaacaatgcaaggccctggagactgtgctgccaccaagggcaggagctcagcttaccgacatggagatagatgagtgtgaggagaccacaatgcacgatgtgaacattgaggaggagatgcgccgcaagcaagctcagtctcaagaagcttacgatgaagatgatgacatgcacggtggtggtgctcaaagggtgcaatgtgctcagcaatgatgagagcgaggtagtagtgtgagcggtgttttaacaaattatttgagagaaataaacagttaacattgtttctcctttccttataggttttgtttctttctttattctcttttttttttcttttttcttttttagtatttaaattcttctttgggaggttttcctccccttaaatgtttgcaaaacctttgtgctggagtctagaaatagtaactctcagacatattaagatatatgcttggtttgttcatctggccgtagaagacacgtgaatatgtttttagggaatgaacctattgcaacatactagtgaaactaagcttaactttggt

SEQ ID NO: 383549 - DNA, 1823 bp, Cannabis indica
tttaataacttagttatccttaaacactttacaaaaaaatcattattactaaataaaatataaccgaaagcaaaatacagttagttttctattaataataataaatgggacaagaatcagacaaatagacaagtagaaaatcctggatcgactactctctagtgcatgttacactactgtagtttattgtactattacaaacaattagtaattcctcgccgactcctgctccaacactatatttatgtatgtacggccgtgaaacgtgttcatacttggtcataataatcataaataataataacaatatataagccagcacaaaattgacaacaacattttctttattattttaatttttccctctctatatttgcttgaattatatataaaaagattgtaccaacggttctagctaggctcaaattcttatcatatatatgtacagctgataaaatcagaacagctcgtagcagtaattgacatatagtatattgatattatttttatagtatagttgttaagatgtatagattactccctcaaataaacaatcagatttgtgctttacccgaatctcaatcagggtcgtccccaacatctgaagataactttttaagcgaggcaattttcgctgggggtctctctctttagttcttcttctttatatatatcttcaccatgctctatttattttctatagtgatcaatatttcgtttatgtatgtttcagatagcttctgggatcttgaagctgcatttggacgtgtagacggagttttcaaaactgctactggatattatggaggtactctgaaaaaaccttcacacgcagaggtacatatatatatttaaaaaaattgaaaataaaaagaaaaaaggactcgataataacatttgtatcaagtgattcacaggtaattgaaggaagaactggccacactgaagctgtgaaggtcacatatgacaagagaaaaatatcgtacaaatctctgtgtgacattttttgggaaactcatgattcaaccaaccgaaattacctcgtaagtaactttggacacatttttgggattttcatgcaatttttggtttgtttgtatttgttttattttgagtaataatttatatttatatatatgttttaattatgttgtttcagaagtttggattaataggaaagcaccacagatctgccatattttgcaaaaatgaggaagagagaaagcagagtcaggaatcaaagattcgaaagcaaatgaagttgaacaaaaggattgttactaaaatcattggtatgaataataatgatcattgggagttctttctagcagagaatagaaatcagaagtattatttgcagcaaagacattggctttgccagagtttgggcctaagaagcactgatcattttgctcagtcaaccattgcttgcaaactcaatgggtacgtaattattctatttacacaaatctgactttcatttcatagtcgtctctcattattagaattgaggtcatgagtgagataagccaaataaaaaaataattaataatgtcaacataaaattcttgagaggatacattggggagaccacctcttttagtttagtgatatttacaatgtatactcttttctccaaaatttatatttataaagaatttttaccttttttttttttggttggaattactttatatactatttttttaatttttttttcttcagtttgagtttttaaagtggttgtagtgttagttgcaataagagtttctttacaattttttgttacaatttaaattgcagcgctagttgtaataggagtt

SEQ ID NO: 383550 - DNA, 1457 bp, Cannabis indica
tttttcaacttacagtacaaatgactaatgaacataacacaataataaaagtctagtcgtgtaaatctaataacaatcacagagtaaagatggattagtaagtaaacactagcacaagttgacttaaaaccaatagtccattaaccatgagaatcatgctcgtttcaagtgctaaacaaccaccacattacctcttttgttctttgctctggtgaattctttagccctttcaacttctgcaccagccttttttagtagtactttctcttttttctcaagcatttcaagtgtctgcgtgattaaaaaaaagacattgagaattaaagtaaataaaacgattcccgaaatcaaggtggaaaaaaaaaactctactctacttcactatgccagaaaaaaacacttaattgtttatatgttttgcagtctaagatacaagttacttctttaaatagtccagtaatctcattaactactcaaagaaaggcacaaccgcacaagaaaataaacaccgatcatttcattcttccatccctgaattccgaagctaccccacacgcaacccaatcaaaaggacataacagataaagacacgcccgaaaatttcagtcatataagaacaataccaataactctaatcatacaaccaaactcaaggaacaaacatcaattatacctcgtttaacttgtctaacgtggttagagcattggtttcctgtttaggctttccaaaaaggcgattcaacatggttgattgattctttacgcttattcaatcttcaatagaacaaatattatcccccaaaaatacctaaacaaatccacaatcgatccgttgatcagcgatcataatcttcacaaaatcaaacaaaataaattacaaattataggttatccgtacctcaaattaatggcagaaattatcagaggaaagagaaagggaatttagggtttggagaaaagaagggattggatctatgaagtatgagagggagagagagtgcagggcgattaggttcggtccctctgtgtgttgggttaatttgggatttcttaggcgtgttgcgttgggagagaagaagaagaaatggagagcgaaggtgctttgctttgctttgctttgccttttaaatacgtcgacttttaagtcattctttcatttacacgtggcatccactcgattgatttgtgtcagcaatataaataaatgaacggttggatgattctatcgctcttgaagcaaaaactacgtcgttttttatattctttatttattattattgttacacatttcaatctaaaatatctatctctcatccatcttttttttaaagaaaaaataataataataataatatcattttttaataataataataacatacgtgccaagtcccaaatcattaattttattttagtttttagtttttttttaatattataattttaaaattaataat

SEQ ID NO: 383551 - DNA, 2665 bp, Cannabis indica
cacttgtttcatctccctcacatgaatggttcttcactgttttacacgctttaagatctcatatgtaaaccaagtactgagacaaacatgtttcatatcagtggattaactgtaatttacttaatgttaatccctatttcaactagttaaattaacataacatacttggggcagtgtagtgtcatttatttgatggtcaataaatggtgaagaatccaataaaaatgcttcaagttcaactagtcttaaaatagtcagcaaaaagaacccttctcaactgaacttgttttttattttctttgactgccaaaacttttaagagacaaaaaaggggtaaaacaacagggaaagagaaggcaacacaacaatttaaaaataaagtaattcaaactgatatgttctttggaagtaagagaaagtgtaaacctaggctcactcttcaaaattatttttgcattggttctttccttaactcctctattaatagacctttgtttaagtgagtccacattgttgttatatgttaatctaatggtttcgttaacagaattctcttctgaaatgcaggggaaaaagaaagacatagacttgtaaaatataatgaaaaaagaaaagaaaaaacggaagaggaggtgaggggtcggggggaaaaggttatatagcaacttttacttttgttagtggaagaagagggaattgggggaagaggacaagaagtgtaataaagatataagatctttaatgggatactttgtctgccagaggacaagcattgtggccttctgtaccaacctttctacaagccaaggaaaagaaaactgagtgttaataaaagccttcaacttcaaggtcaaacaaggatggatcagttgtgtaaactagttgctctgggtgggaaaactctctatcttccccatagtctttaccttttttaccttttgttttctttttaagaatcccaaatgatttcaattcttcttttttaaaatttcaccctggtcttaaccaaaactctccctcttttccttttttatttttttgtttggtatagtttcccctttactcaaatatagattgtagtggtggagagtggagagagatgttaaacttttaagagtgggtttctctttgtagtaaccgaccacatctcctgagattaagattgattggtggacccattatagggactagttattggaggcaaaaaaaaaaaaagaagatttggcataattctttgtattcgggcactatgaaaatgtattatatgaaattggctttgtcatttttctcttcctttttggtcccgtgattgtttagtagatatagagcaatagaatttcaatcctttttctttctaattgtatattttatatgatgacccttttttgaattggatgtagctttttattgggcccttaattaatattttatcaaatgattagtgagtagtgttggatgttccttgaatggttcttgtgtattttagtactttaaaaagaaagataataataataatagaatatgaacattgaacaatggcgtatgggaccagagcagctatttgatactctactttcaagcatgctatgcctttcatcatagggttttgtatttatttgaataatcttcgcatgagctctctctttcttacaatctttttccttggaccaaaaagagaaaataacaacatttgactataaacccaaacaaataatacatggagattcatatccatttctcacttgaatttcaagtatagcccttgaatgagttctttattaaatgaattgtgaaggtgttaaaataccaataaactatttttcacttcgttgcaacttgcaaccttttgtcattctttctctttttaaatgggccatcttttttattaattgttatatgttatatatatgttctctccaatttaattaatgggactaatacaaactttagtcatgcattgtggtcacagggatttgaaccagtaaaaattaggttggcattactaggtataaactataataggtttggtatcccataggttgatatctatatttttggtattttagaacatctccatcaagtatataatagaaaaatttacatgatatactaacttttgacatgagctaaatttgttaatgttatatttgactcaaattttattttattaaaaaatataatataagatagtgtaataaaataatataataataaataatatttttagtatatgttagtattgtgattagaatagaaaaaaaaattaatgctaaattatattttttgatgttattttacactatatataaatttaagtattagagtttgcccttaaagatgcttttctatcaaatctatttctcttcatatttcaaacttttctcggtagcatacacaataggccaaatatccatagagtaccattgcctaatacctatatggtgaagagccatagggtaaggagctataaggtaagcttttaaatttattaaagatatgtattaaagggcactcatggtgcttcacatcaccatattcatatatacattattatatgattattagtataattctatatttgttctcatttactttatcttaatataattataaaaaggttaatttattatgaaataatataaaataatataaaatagatgagaag

SEQ ID NO: 383552 - DNA, 2213 bp, Cannabis indica
agatttgaatttggttcttagatatcaatttttatttttgtaaattcaagatttttttattgagtttttagtggctaaatctttcaaactatcattacacttacacttaatcatccaaaacttaaattttaacagtaaaatcttccaaactatcgaactgttagcaaatttaaggtatcatccagttaactgcaaccataaactacttatgtactgtaatgtccccgcttcaagtctccattgggccctggctcttatgcacgagtatatctactctggctgcctcctggattgggccctggctcttatgaatatatttttagttacaagactaaaactaaattaataataacttggatttaaatattatgttttagttataaatatttttttttgttgtaactacaagttatgatttaaaaattatcactaagtaactattactttatagtaaatgtatgtcatatttaattgagtttgttggtgaagatggcataaacatgtgaataatgagggtgttttgaagtactattgtcattttttctagtgtgacataaataaaaggtgaaaaagtagttttgactatatatgtgattagatggtgatgaatagtaataataattaattgatgactaagacatttatagatataattttctaaattattggatattttcagtatataataaagcattgcatatccatgcatgtgaaagaaaaagtgaacacaatattccagaaaatactcttttgtatgtatatatatgtctttattaaagacttttcatatacttccatccctagctatatttatatatattattgatttgtaataatatgattaattttcatataaaataaaattattacaaaagttaaagcatatatatataatttttctttttaattttgattattaaaaattatttttaatcccaacaaaagttgattaagaaaatgacattttggattttatgtctctaataaagatggttgcaatgtgtggtcattttctgaagtagagttttgaggtctctttaacattattaatgattcagagtactcatgaaaaagtattttggaggttatatatataaatgaaattgatctttatcacaaaagaatattgtgtggtatacatacattttttcaatttcataaaaaattaaaaatcattattatgattcatagaagaattttgtattagtttccaattaaaaaaagccaaaacattgtttggtggcatttcacatttagtcggtcacaatctagctaagtgttacttctcaatttaaaatacacatttattcatagtggtagagctatgttctccaaatatattttttagttaaaatataaagtgaattttttttttaaaaaaataaaagacaaaaacaaaaaaaaataacttcttataatagagaatagataagctccaagcttcctactttttggttaaattttttaatagtattttaataaaaaattattttattaaattaatttatatttgagtaaatactattttgtatcatgtattttacaaaagttatagattagactctttgttttattaaataacaaagtaataaacattttattttttaaaatagtacaaataagactctgggcttaattttcgataattttttttaaaaaaaaaccaacttgaagacaattcctaacatgatcaacagatacggaaaatttaaccagttttataacaaatctaggtcagattaattattattaagttttattttgataaaaatcagttcagggttctattgtactatttaaaaatacaaggtccattttattatttaacaaaacacaggatccaatctgtaacttttgcaaaacacagggtccaaaatggtatttacccattattttatgatgatttcaaaaaaaaaaattagtgataacccgtgaacacccctattcattttattatttaactaacaaaacagaaagttcaatctataacttttacaaaacatggtatttaccctaattagtttttaaaataattaattaatttaaatgagagaagccgggaaaggtgaacacaagataacccgggaaacccgaagccatgcatatatatatatattggttgtcttaacctaatgaacactcagtactctcactctccacggcctctcctctattgtccgcatcgatcatcgattggagcatcctgctctgcc

SEQ ID NO: 383553 - DNA, 2001 bp, Cannabis indica
tctgtatattatcttgctttgatttgtagaagatggtggataataataatatcaaaaggaccagacattcaccgtggataacaatgaggttctctaatttacaggtttctctgcctctcgaaatcgaatttgaaaatttagaaatgtaaaattgattaaaggctctccctcgcttatatttatatatggatttggcgatctgcgtgcttatggatcaagggtccatatattatctagataaattcaatactgatctaacaattggggagctagaagggcaacattaaataccccttacagtacttgaggcatttcttcattatcaatattctccttgatgtttgcactgatagaagatagccctcattatgatatcccaagcatcacgcgttttccaaggacacgtgaaactcacagatccataaaatgaggacacgtgtgcatggcaagcgataaccccaaaagtcctcaatctttcacattccatgatagggaagataaatgggtcgttgttccaaaataatccacgtgtccacggtgctaaaagtcatctgaaagctagactacaagcttccgccactctaaagtctcaaaagcttggggtaaatgttatctacatttctggataagcaacatgtggcatcctcaaagtttgattagtctacgtaattccaagcccaagccttcctgcgtacgaaggcccagtccaagtctaagatgggcataagctcttccaaactcccagagccttactttcgaagacacgatcctcccactcttggatgcccatccaaccttctatgagatggagcgataaagtcctctaatcaatcaacgaggcacatccaaataggaagctcaagaggtacatctagaagcccttatagggtgacgtggttgcccttagatgtctggacccaccaaatatgatcatgttccctatatcaggacatggtagtgagggtactgtaaaaagggatcaatatattccctttgtccaatgctgttcatttgacattcctgtctactatagcagcacccttccatgacactttttcagactgtatgggcctcctttagtacagatatttctgccccacgagccaaaatcctgatgtgggcctcaaagtcatgtattctgtaaatttacccgaatagtggatccattttgtacaaaaaccctagcggggggatgaagaacaacaaaaaagaaaatacttctatgttttctttgagctttcttcttctaagagaaaccaagagagaaaaacaatatagcaaaatttagggttcttcaaaatgcaagacccatttgtaacttcaagctttacaaggccaatacattgactcatggagtagggttcattaacacccaaatcgcgtaaaaatcttcatctcattcagtggcagagccagcccaacattttagtgagggcaaaaaaatttttgaaacattaataaaaaatataatttttattaaaaaaatgcaaattctatgagaataaaaataaatatatgcgagaataaaagtgaaaaatataaattttatggggataaatataaaaatatgtaaggacaaaaatgaaaaaaattatttttatggggtcaaaatataaaatacctaaaaaattatatacaaaatttatataaataaaaaattgagagggcaaatgaccccacatgtcccccttccccccgcctctgatctcattacttaattacctatttaacttcttaagctcttttgtaatttagtttccgaaaatctcgataaacatgcatgttaaatttttctaaattgctcaaaatttgtagaatatttttaaatgactataatgaacatgactatgaaaaaaaaattagactaaaaaaaacttctcagatgctaaagcagataaggtatcgatacactccttttagggagttgcattgtagaattttatttttaaactaataacttaattaattaagaaaaattctacaatgcaccccttgaaaggg

SEQ ID NO: 383554 - DNA, 3648 bp, Cannabis indica
tttgaatttcgatataggacgagagtacctatatggtttagatagcttatagggtttctgtgtttaatgcctgttgcatgttaaatttatcacgagagtagaaagtttgcatgtgattgagatttatatatctgagaagactataaattaccttagtaaacctgctattgcatagaaattgataataggaagataatcattttaggccataatcaaatgaaaaaattgaagtcgaagccctagtttttattaactattaatttccttattagtttaattgcttattcttgcgttgtttttatttttttagttttaatcatttcttaatttttattcaaccaaatagaagtaagtttaattttaacgtacttaattacaataagtttaattttaacgtacttaattacaattctcgtgggatcgaccttactcttggtgagtctattacttgtaaacgatacgtgtacttgagtgtgcaaaatatcacaacaaagtatgagcactctattcttttccatgaacaagtaagtcaagaatttccaacccatttgcatgaagcattcaagtatagtgttatagctacttaattaaaaaaattatcaaaaaaatatcttacacatttttcttaataaaagagagattacaattactgagaaatctttttttttttttttttttttctatttttgcgggttgtgatttatttttcatttatttactttttttaacctccaaataacatagttgctaaaacaattgtctctattgaaaacaccttaaatctaaacaaaatatgtacttttccttctaaaaatgtaaactttcctaatgggtaagtaggatagttaagcccagcccactttatttgggccaaattgtttaggcccattaaacagtagtaaataccatgggaccatttcctaatgtcggttccacagaatttccaagactattcccaatttcccactttgcccatagttcgccgttgattttcccggactttcttgcttagatcatagctccaatcaaaatcagttttttgaacaaacccaattcatttcacccctatatatatcaaccctttaactttgatttttctcattcgttttcttttcaactaaatcttcaaacttttcttaaactttcccggcaaccaaacgcgtggacagtttgagttttcgatagttttatgtgtcatttgctgctgttgcataattaatgtttgaaatgaagggtcagatgaaacgatggggttgggtaattggagctctaattgccattttcgttgctgtagctatgactactagaccttgtccaagaatttctctctttggacggactaataagccttgtctctgtgatcgggtatgtttcttcattttgggtcaattttgtttggttacctggaaaatgcggtggattattatgaatgtgatactaaattcttgtatgtttttcatttcattgaatttaggatcaacataagtttagtgggattgtggaggattgttgttgtgactatgaaactgtggatcatctgaacgaggaagttcttaatccatcactacaagagcttgtgaagactccattttttcgctatttcaaggttagttgatcttttacgagttagctgaatttgtatggtgaaaatgttttgttatctttattcatttagtttattaggactgatttaatcagcatgtatgtagataaagaagttgtattgatagaatggagatatacagtaatagtaatcagaatgttataggcttatgttttgttaggatatcaactattacattaagtaatttatttctcaaaaccaatttagttaaaacaaataggattatactctacttggaattattttcagccttgaactctatatggcattcggtttctgaaacctggttggtgcgattttcgcaggccaaattgtggtgtgactgccctttctggcctgatgatggtatgtgtcgcctgcgggattgcagtgtttgtgaatgtccagagaatgagttccctgaatcattcaagaattaccaaaggagcctttcagctgatgaccttgtttgtcaagagggaaagccacaggctgctgtggaccgcactctggatagtaacgcctttagaggctggacagaaacggacaacccttggacgaatgatgatgagaccgacaatagtacgcattactgctttcttgttgaactaattgtttgtttttttttcttttaatagtttagggaataaaattggaacttatagtttatcaaattttgatcttgaagctttgatttataacttttgctcatataaatttgcagccgagatgacatatgtgaatctacaacttaatcctgaacgatatactggctacacggggccatctgctagaaggatttgggatgccatttacgcagagaactgtcccaaatgtgagctgtttgttccttttttttatgtatatataattacttttctagttctttctttaagataaatttgtgacggataataggctttctttacagtttttttatgtgatttttcaacttgtccagatccttctgaagaagtatgccaggaagaaagaattttgtacaagttgatatctggtcttcactcttctatttcggtccacatagcttctgattatctacttgatgaagctaaaaatctggtacagatttgttttatttataattctaggcttgccattttactctttacagtataaattggtatatttcttgtttatatttcactgagatagtgttcatgttagcacctgaacattgtttgatttgagttgcttttaatgcattttaggataggacaaggaattctgcgtgcacacttgcccattacatctttcttaagtgcacaattagtacaagaaattttgaagttttttgacttgttattctctgtcaatttttcatttcagtggggtcaaaatatctcattactacatgatcgagtcctaagatatccggaccgtgtgagaaacttgtacttcacatatctctttgttctcagagctgtgactaaggtgtgtattcaactttcagtttttatgtagatgtaacacactctttttgtaaatctatgtatgaatgtattgatatttgatatttttactcttatgaactattcattgtttatcattaagaactaatttgccattgatgaagttctattttctcccctttaatgtattaggccgcaccttacttggaacatgctgagtatgaaaccggtaaccctgttgaggatctgaaaacacaatcattaatgaaacagctgctctttagtccaaaactacaagctgcttgccctgttccctttgatgaagctaaattgtggaaagggcaaaggggtcccgaactaaagcaaaacatacagaagcagttcagaaacattaggtattgtatcgacgtgtaattccatagaaatttgattagaaaatgtggttatctttttgtattagctacacttagaagttgaatgctcattttcaacttctttatttatttttctgaaacataataatcttgggttcatttcttgccattgcagttcgttgatggattgcgtaggatgtgagaagtgtcgactttggggaaagcttcaggttcttggtct

SEQ ID NO: 383555 - DNA, 1281 bp, Cannabis indica
ttttttattgttttttaatttcggttgggtaatggaattgtgaatattttgcatatttagatataatatatataatattttttaatggtaatctaacgactttcccactctcaatattctataattatttttttaatttggatttttaaatattttcgttttgtgggcttgaatattgttctttcttttcgtgaaaaatgcaatataaatatatttgatatgataatcttgagtcccgtttaaattttatttatttatttaattaaaaaaaaaacgtagtttcgttaattacaatctacaaataataacaataaaaaatcagatattattgttgtcgtttcaaccgacgtaactagacattgatatatttgtcatctttgcaataatataattttgattatattttatgttgatgttccatcattcatcaccatgaaattgcctattatttgattccaatatatatatacatatatttatatatgagtgagttgaaaataatactaattcatccaatcaatttcgattaacccgaaaaagatttaactatccgatctttttatgttgcttaacttaaattttgaattcaatttatatatattaaaatctcattattataactatagttggtttggattgataaaccgactaattttattaaacgggttattatttttgatcaaatttattgacgaacacctctaatttaaatgtatcattataacaaatcgtgcctctaaattttttttggccattaaaaattctcccaaattattgagattgataattttaagtattttaaaaaaaatctaacatgatgatgaaagttgcatgatttagtaaatgaccaaaaaaaaattcaggggcatgatttaatatatgttaaaattcgagaaaaaaattactaattagccttttaaaactatacattttcattgaatgtggtgggtggttaatggtgattacacaatttgtggttggaaagggtaatggttgtccatgttttcatcctcaattttgataaataatggagccgttatttagttagaaagtcggtcaaaattaaatgaaaaattatatataattaggcactctttgtcaataaatagctaagctatgttgggtagtggcccgttaatgacaaatttaggtgttgtttaacatctttatgatttatttaaataataaagtaatttaatttatatttaatatatataagtgcacatttttttatttgaataaatcatataattttattaatagtaattaattaaaataata

SEQ ID NO: 383556 - DNA, 2573 bp, Cannabis indica
tttatgccacatcatcaaataaatcgaaatctgttaaaaaacttaacagaaggggacattaatatagtggtaatatattggggagattttttaataaccagtatattttaaggtgcacaagtaggtagtgacataacttgagggagaaaatttgctaattattctaaaagtattagggaatttgccgcaatttactcatacaactataattttattcagaagattggctgcaaattacgtaatctttttagtcattttttacttttgttctcttagaaagttttactgttatagttctttcaaaaaaaaaaaaaaaattactgttacaaaattgtttataataggagtgaaaattagattaaaagtctttttttttttttttatgtagaatgggtgattgcacaaagactttatattaaaagattattttttttatcataatattttttttaataatgtatacataataaatattcataacaataaacatgcatttaataaaaaaaacaaaaaacaaaaagaaaaaaaaaactgttaaaaatttattccaaatgattataaaaactcaattttaattttccatccaagacctccaagccgcttaggccagccctttagttttcatacttcttgcaaattagattttatttaaaaatttaataaactgaccaagtattttcaactgcatatttaacaatgtgtgaagagcatttagcaaagaattatcaaaattgagccaagtgtaaattgacttggaaaaagaaagcattttattaagatccatatactattctattaccttaatttttttttttttgtctgaaaattctattaccttaaattattattattatatattatttatttatttatttattattattatgtgtatgtgacatgacaagatataacataacaatcataatcaaaccatttgcatcttctatgctcccatgtcctttacctcaccttatctcatatatctttttcattgcatttaataatacctttttatattctatttatatatacgtatgattttttttttctcactaggatttcgatcaaatctccaaatgttattttaatatgtaggggtgtggatgaattgatccaatctaattataattgtctaattcaattcaattacaatttacgattaaatattgaacattcaattgtgattgaaatggattgattattatttttaaatatttaattagatcgaatcagatgttgtatgacgtgttcgaaaatctaatacatttaatatccaatcaaactagttagtatttttgtttagtttagataaataattaaatgttatgttgttatacttaaatatatattatatatgaaaattaaaattaaattttttacaactttttgtcaaattggatggatccaattcaatctaataaatattagctctaaaatatgtggtggatctaattcgatccaaaaaattctacctttaaaatattagatagatccaaactaattcaatcaatatacatgaaatacattaaatggatagaactgatccaatccaatatttattggatgttggatatcgatcaaattactgaaattaattggatcgaattagatgacaaaatctaacatccaatatataattaaggcggaaaagaaataatattattaattttaaatggttgttctcataaaaacatggaacttgaaatatagtatcttttacatgtctggtttgacaaagcccaaaacaaaagcctattgacaaatgacccaagtgtgttggaccaaaccactcctttagtcgaagatacaagcagtgacccagccttctcaaccaaaggaaattacagtgactttatcatggttgtgagatgttggggagggaagtgaattctgttagcaagagaattgcatttcttcttttctttactggttaattatataaacactcttttgtaattttgaaaaccttgcctattgaattaaattgcaagaaattcatttggagacttgtcttgtctcgacgagggctgttacactaacaattggtgctttcattattttcttattcttctcaggattaaaaagtgaatcacatgcatatgtttgagggtgagaaagatataccaacacaacactatataaaaattatatcaattgttatacatattgttgtgattggtctttaagtgaggaaatattttttttttagctccaccaacttccaactgttttaactaactgtcaattatgacagttagtatcgagctctacaaccaaaggctatttatagccattaccttctactactttagacacaagttgagagagagttttcagagttttttgtgagctagttttgagagaaagaaagagagaaaagatgagtgttgtattggcctatggtttgtttgatccatagtgccacaagtgagattatttgtaattgaagttgtgcttattgagtgattgtgtcatgtacacattggggatcaacaagtgtaattctttcttctagctcaataaagattggagccattggggctgttctggccgaggagtaggcaggtgattca

SEQ ID NO: 383557 - DNA, 980 bp, Cannabis indica
ggtacattataatagtttagaaaagctaaaaatatgtatgaaaaccattcaacaatatactcatgtttgtttcttttattaaggtgtattggtgggaatcagaatcacctgtcctcatatacacatcacataaaaactggctctttgatttcacagcagactaaacatgatcacaaagcaggaaaatatttctattggtgaaagtgacattcctagcttctctttgtaaggtttttcataaacaaaaaataatacaccaatctgggtggcattaggtagggtcatcaatttgacaaaatcactttcttttttttttctttttttttttttactataatgagggaattctccctacaattggtacatatttttcccaacttataaaaaggacaagtgcccataactagaacaaatgtctatctatgtattacgcataggagaagaaattgttttcttggtgaaaagggtacgagaaaaatgggatgtcaaatgtgacaagatagagttatatattcaataatgataataataatagagtaggtagtcatttggtactttatttttttttttaatgcagaacaaccatttcattaaataaaggaaactgaaatcacttacattagtagaaacaaagggttacctctctcataccaagaaaaccagttaagtttgaagaagcaacccaagcaacaaacttatgagttgcttcatttagaaaaagaatccaaaaaacaacaaaatcaagcaatctatcaaaaataacaaacaattgagcaaataagcctctatcacaccaagaagggaaaacataattgttggctccagaaaccattgcgtgcagtcacaaatgaagatcaggcgggactagcccctagcctttgcactaaagctgcaaagaggagggcagaagcttcatcagctagagggttatccatctgggacttcgaagtaaaaaactttcatcacttgaccttcacaat

SEQ ID NO: 383558 - DNA, 4474 bp, Cannabis indica
ttcatataattttttttaatagttttgatgtattttatggtttttgtgccttttatgacttttatgctatttattatgatttgtcgctacttgtttatggtagttttgtcgtatagtgcaatgggcaaaagaattaatccattttgtgctcatgatttctacttcgacagttttcacttttaatagataagtattcaagtctttttaagtccttttatttaatatatattgatttaccatcgttttttcatatatatttttattttattttgtggtaatggagttttatttttattattttataggttgtttctggagggcctacaattacatacaattttaccgataagtataagtttaaatttaatttgtttattattattttcagcattttcaaatagggtgatagtaggttgttactagccaaagggtaatacctttggctagttatactttgaaatatttgttggtttttcagttttttagtaattttaagttagtgttataggttgtgtctcaaattctaagtatatatattaattgttattttaaaaattgtcattctaatataattgtgtttttagtttagtgttgtgatgtttttccagtttcgatagctctggtgacaattattaataatgggaaagtatttttcaatgggatgaggtgctatttgaagacgttataactttattgtctaaatttctaggagcagttttgtcctatggctcgcgataagatttctgcagcacatggtttagcaaaatatgcttttcggttagacgatagctatcctgattcgagaaggttcgactgccgattgtggtttattgcattattaatcatgtgtgacttagtacaccacatcaaaaaaaaaaattactttttagaattggaatcattaaattatagaatagatggctagtcaataccagattgaatagataaaggaataaaagaaaaaaatcataaaacttccattagttaaataatagaggttcaagtgaatccattaaaattctagaaaattaatttaattcctgacaaaaatataaacatccattaacgtaaatgaaaataaaataaaaagaagaaggagatgaaagagaaagaaggaaaatttaggagtggcaaaacaagttttgacatcgcacacgaacactacacaaattttatgagttagggttaagaaaattagacgttcgtaaaataggtcaacacaatttgacacgaaataaaaatgactcaaagataacacggaccacttaacctgaatttgacacgattttttaaataaaataaaataaaaattattaataataatacacctaagtaaaaatatatatttagtaatttaatgttgagttaaaaaattaattttaattttctgtaaaaagaatttaaaaatattttaatattttaaactttattatatatataaaaattatataaataaatgtacataagtttataatataaaatcgtaaatctatcattttctctacaacgtactccagctttagtaatagcaaaataagtcaaagtgggtaacacaaacacgatataattttttttatgggttgagttaggattgagaaaattagacgcaagttgaaaatgagtcgataatcctgatacaaaatatagaagcagatcaaataaaatatgacacgaacacgacatgatgacacattttgccactcctaaattggtgacgtctcgttggaggtaatgaaatggaatggagtagaaatgaatcatttttcactctatcattctatttggttgcatttaaaaatattctaccattatagtggaatgactttattctattttgaaataaaaaacaggccattctattttaataatttttttcttatcaatttttatttgaattttttaattctattctattccattcatattcttattcacattcctattcatgtatttttcgttcccatccaaacataccctatttttcttccaaagattgctctccaaagtttttctgagtttttagcgatgaaaaattgattaaaataatacttaatgatgtttaaatagtattcattgcgattctaggtgaaaagacaacttagcttccttaaaaattgagttttcgtgtgttgtacaaatattagcaccacaaccttccttaaaatcgtgccacgataactgataatattttgaccataactctcttgatatatatcagattcagaatgatgattcaaaatgttttaaaaatctaagtgaatacgtttaaatgttattcataaaatttttccaaaaaatgaaaggatcaacgcatgaggtttcaaacttgcattaccaagcacaaattaatacttggcatctgagattggtagtgtttctaataatgcaggtatttcaatcaacaataaaataattgaattagaacaagaagagcctaatcaacaatcagtacatcaaagggactcaaatcaaattagtaaacataatggccacaaaacataaaccaccacaaataagtgtatatttaccacttcaagatcaaagggactcaaatcttctgtcctagttgtgtatcttatgttcggtctgatgataaaaattaaaacattcctattaggcatcaatggtacctagtacctctcctcgatatgttgcattgcgatcggcatagcgatattccctaaaaactattatattaaactatatgggacccgatactcacaagaatggtactaggcactactggtgccctttaatatttctcggcgtgtcttcatattcaattatctgctgagactgtatgcaccaaacaaacttatgaaattcagtatactgaaactagtacaatatttcgtatagaactatttgatctgtatttcaacttaaagtaatatccacctgtgagttaaatatgaagttaaaactacatatgttgatcagtgagatttatagacaaaatattatgtctaaaagaaataaacatgtatagtactatacataaatacttgttggggtgcatgtaaactgtaaagacaaccttgtatgatacataaaatgcgcatgggttacataaacctacaccatactagatgacaatgaaacgtgcagtcctcactttacatctgtctattatgtcaaaatgagaggatactaagcatgggcaccaacaccatcattgcttttgtccttgtgctatgtatcacaacataatcactacctagcttctcctgtttggttgccaagaaaactatatgcactgaatcctaagcactaacccctttgaatcaatatcacatatattatggatcatgatgaataagttaattgatcacgtattagtattaatattgcagtttaattaaagcaatatatatatatatataaaaggtacgtatgtgagacatacttaattgcttaataatttatatattttatttaatgccattttcatatacctcatcatttcctctaaaacaacttatcgtagtaaatctattctgttttgagtaaaaagggtcaaaggaaaatgcaattatttcaattaaatgtttattaatttacataattatgttgactagaggagctaaactttctccttttagaacagtagatctaattaaaccttgatcaatcactatttaaccaatctcaatacaacttctcaaagagcttagggtacgtttgtttgggggataatagaaaacccctaaaaacacaaaataataaatctttttgtacatattagtttggttacatataagctatattataaataaaactctaaaaattattgatgagaaaagatctttcagtctcatacactaaaaactatttgttctgagttggatttgggacacttgatggtgccctcctgagactaggctccaaagctttcttgggttctttcatggctacagagctagtatttttgcttgaatctgccggaaatacagaaaccaccatggatgataaagagaagagaagctttctaggcaataagaagcttgtatctttatactgaagattgttctgttcgtggcaaagacacggtgaagaagagaggaagattttgatcagaatcagagccaagaaaaccgatgagcaattagttctgaaactcatcttgtttttcagttgagacttgagagatttgaaagagagtcaaagaaagttggaaaggaaggagttgaagtgggtttatataacaagtatatttatagatgaatgaatgaattataaagagaagaagattttaaaggcatgcatgattgcgtaggccacgtggtgtgatctaccaaataatacttgttaattacataccaaatgtttgtactcagaaaaagtataaataaataattcagattaatacttagtagaacttgcattattgtttctttggatcgtattttctattttttattggctttggttggttttgtttatgttgaccgaggttttcggcaactattaaaat

SEQ ID NO: 383559 - DNA, 1779 bp, Cannabis indica
gatattattgaaggcttaccttaacttgatagagtcatttttgtggtggtggattagctgagtaagtacaaacactatattcctttgaagcgcccttttaatgccaaggtagatgttgaagccttccacaagcatgtggtgaaactacatgccatcccacaccccatcaattttgaccgtgataaggtgtttcttagtcatttttaggtggagttgttccatctccaaggtatggagttacgacatagcaacacctatcatcctaagattgatggccaaactggggtagtcaatcattacttagaaacttatttacattattttgctttggagaagccacaagtttggacaaaatggctgccacgggcggagtattggtaacaatagttttctttcttccttggggtgtatactcctttccaggtgttgtattggtaacaatagttctctttattccttggggtgtatactcctttccaggtgttgtataatcgcaatacacccactcttgtcctttactcagtgaggtctacatacctctatggtcgctgaggatcaatggctggaggagcgcgactctttccttgatgatcttaagatgaattcgctccaagcacagcaaaagatgaaggcaacagctgatgtttcgcgttatcatgtggagcttcaagttaggaccatgtgtttttgaagttatacccctatcatcagaagtctttggtcgtccagaaaatgagaaattagctactcgctttaatggcccttttaagatgttgcgtcgcattagggcagtaacatctcattttgaatttcctacctcctttgtggtttatctggtgtgtcatatgtcacaactccgagctgcccacggtagcaaattcttctccaactttacctcctcaacatactggtaatatagaactgcaagtggaacctgttgaagtcttagaggttcggcatggcagttaacgcaccttcgaagttttaattaaatggaaggacctgcctctttttgaagcgacttgggagaattttgatgccattcaaagtcattttctagattttcacctcaaggacaaggtgaaatatattagagggtattattaggcctctcatacaattcatatgtgtgaggagggtaaaggacctacagcacgacaacgtttaaaataacgcttttaagccttgagaagttattctttctttttatttattattattattattattattatttgtgaggtaaggcgtaagcctcaaatatttaattgaaaaaatatttttaaagcacctaaaaatattaaggatgaataatatctcttataaagctcaaacatactatgaaaagtctcataaaactcaaacataccataaagtgtctcataaaactcaaaactaaaataaagttgaactctccttctactatgaaatgaagctttagcttgcaagaaagaagaagaagcttcaaccaacagctcgagaagaacactacatgcttgacaatttttttttgtgttctctggagttttaaaatcaaaattgagggaggagggaggggaagcaaatgacagctatttattggaactttttaaatttgttttgagttatattggactttttttcagttatttaaccaatgggcttaagttacttaagctgaaaactaaataacattagtttggccttttgagcattcaaaagtccaatacgatttttcttctttttttttctaaggtcccatgccttgatcatttctaggcgatcagtcagatcaaaggt

SEQ ID NO: 383560 - DNA, 2428 bp, Cannabis indica
aatttttttatttttttttggtgggttaattacaatgttaataactagctaaggaagattcatccactgactgatgagtttgttaatttaaaaccatatatttagaacaaaaattaaagctgttattaattgagtagtttatttaaacaatttttatcttaaccaaactttaaagtcattttgaggttgtatgagtaaaataggtaagaagaaaactaaaaaggaactttgtaaaagttggtacagagtctaatttccataatgggctagctcaaccaaaaattaaaggcccatattgggaaagcccaattgatgggttgggtagtagaagcccataaagtccaccgactttcctcatcgataaatggtaaatggtaataataataataaaattacctttgtaacgtgttctctgtacactggtctaccattttcatcagacaacaacaatggaatacgcgtaataaaagcggtgatttttattttattatataaattttcttatatataatcttctttcttggcttgtattttattaaagttctaatctttttgctcacttcttccattccattctccccaaacaaatatcttttgttactctctcatttgattttagtgtcaagaaatctgagatggatgatctcatgccagaaagagaagaagaaactaagcttcattttactcctttgaatgaagaaaatggtgatgagaaaaaaagtgggcttataaccaatttcatttccaacttagtctctccttcttctagtcccaaatctcaaaagggtgaaaatgaagctgaaacaacaccaaatggggattattccaagtctgaggaagaagaagaaaaaaatgatgtagatgatgagaaaaaaggtgggcttataaccaatttcttatccaacttagtctctccttcaagtcccaaaacagaggaggtttcagctcaaaatggtgacattccaaatggggtttctaagattgaagttgagaatgaaaaagaagtgaaaaaaccagattgtgaagaggagaatgatggtattggtggtggtattattgacaccattgtttcccatttcccaacttcaattccaggtaactattttgattttattttggtaaccatttaccattctttgttttctttcttgatgcataataataataataatacgacatcgtttttagtgtttgacattgtttttattcttaatatgactagatgatgttgttcctacagctgatgaggcctgtattctaattcactcccttgttaaagattagaatgtaaagaggaagaagaaaagagatcttgttttgttatggtttctttttttttttttatgaatattttagatatgtgttcttagttgtgatttgttattaaagggttgggtttgtgtgaatgtatataacaatttgcattggcatactatactattcacattttgcttgtaatgtttttagtcatagttaaaaataaaaagttacccatttgatccaatttgattttacttctccttttaaattcaaaagttttgaaaagaaaaaaatatatatgattggattaatgagtttatagttaattagcttttggttgttgcaatggtgtatttatgtaaattaattaggattctattgtattattattctttgaaaataaccccttcaatgtggatatagttgaaaattaattagttcctatgaaaatttcagttttattcattctaattccattatgatgtttgatcataattcaagcaatgtaaattaatagccacaactaaaacatggtacaagtttcaatttcaagtccaactatcacaaaatttgcatgtgaatttattccacatggttgtaccacacatcattgtaagcaaagataattccatataaagtaccattattttatttgaacagtataaatatatacacttgattgggatgcaatcaaattacacatattattttacacataatgatgctcattaatcttaatcatacaattaaaattgataaatttgatatggtggaaaattcttttgaagctgaatctcccgtctaagataaaaaaatttgtgtggaaggcacgtctgaatttcatcccggcttatgccaacttatctcgccatggtataaaggttttgacaatatgtccaatttgctcttagaataacgaaactactattcatgctctgtggctctgtccttctcttaagtctattcgttcgaattggttgttgagtggcctcagctccttgaaggacgcttcttgctattatgagttgttactagggtgtatgaatatcttgagaagacaggaacttgagtagtttataatgttagactatatatatagtgtatataatatagcatatacaatgatatgaaaatgcggaaaatataatgaaatcatatcaataatata

SEQ ID NO: 383561 - DNA, 2335 bp, Cannabis indica
gataagacaaattttttgcaccatgataagtcagtggaaaaaacagattgcccactatagcaaaagccagcaaacaaatttgactgatgtatatatttcgccactagtaattgtgacaaacattttgattagaaaaataagaattataagctatatttattcagagttgggactaaagccaaaatatgtttgttgtaatggtaaaaaatcttgtgtcttgtaatagtgaaactggttatatgacaaggatgatagtgatgttttggtcaataacatagatgacatgaaatcatgatcatgtaatgtatgcatttttggaaacttaagcttataaattgaccaagattatgatggttatacatacatatatgtatggccactagatcatcattaaaatgggatgaaaaatatgcctgttttgtactagatcattctataaaaaatatactatattatttatatttagtcttatctaaactaaatgacgttttcctttacttaaaacaaagatattaactttacaaatacactaactttatgttaacaccctcaatgaattttatatctatatttcttaggctacattttgtatctttgttatattataatgaccgataaaggagtgtgtaattgtatgttatcaaaaactaatatccaaaatatgacttgatgatgattagacattgattagagtgggtaattaatcttaattatatattagttaagggacccacaagtagtgcatgcacttgtttaaaattgttaaaaatttaggtaataatccctgttcatccactaaggtcacgtctgtgaatatcaaattaaagaagaaaagatctttcatttctttattaatcttttcaatcacaaatttaagctctaacttcttggcagtaaaagcaagattagcataccttaatcctaattatgacttaaaaacctcttaattgaaacacatctacagtattattacatctctaaatcacaaaatccagaaaccattttctttttttaagaaagaaaggaagaaattcatgttgacccatttgaatatatgcaaatataagttgaaattcaaagtgcagaacaagaaaatatatacttacagcgatgctgttctttatgcatggaaagctctagacccgaaacagcagagaatacttggggagagaaaagaaaagaaaacagagccaaattgaatcaattacaattatttatatcaaaatttcataattcaaaaccttgaattaaacaatacctgatattgcaggtgtgagaacaccatccccaataaccatacaagtcccaatcagagctaaaaccagtaagactgtctgcaacactctatacttctccaatgtcgatttaagagtcaacccagcagtagtcttagtgggagagacgaccccatctttggtgttatactcagaaaggtcttggtcagccacttgacaattgggcaaggagctaactcgggcatggcggcagagcaaagagtatagagcaaaagtcccaccttcaccattgtcattagctctaagcacaataaacacatatttaactaatggtataagagttagtgtccagaacacaaaagacagaaccccataaatctcttcattagtatctgagtgttgaatgtcttcagcgaaagtgctcttgtaaacatataaaggggatgtgcttaaatctccatacacaattcccaagctctgatatgccaaagttagtactgttttccatgaatccttcttctgcaaatacaaagaaagaaaattcataagaaaggtgtgaactttattagggtcttgtaacagagaaagagagtggtgcatgtgtttaccttgactggatgaatacctatcacactctccagatccatagctttcttactaataatcaaggaaaaaccatttttgaggagttttaagaagacccagatgaagaaacaccctccctagttatatcaagtgttgaggaaaaaataaagacttgaactttatattttaaaggaatgatttttttattcttatttttatgagtagaaaagtagttcacgacccaccaatgcagacaaacacaatactgaaaatagtgtttgaaaccagaaaaaagagctgtttagaattggagttggagaatagattattctgatataggtaagagaatagattactctgaattggtgttgttgatcttttaaataatggagggttttgattagtaaagattcttaatagaatatataaaaagaagtttatctttcttcattcacatccacttaagtttttttttcttttctttctttttcgtatatgagaaataagtaaagaag

SEQ ID NO: 383562 - DNA, 907 bp, Cannabis indica
aaaattagaggcccttctgaagttcttggcgacactcccatggtagaaggagctagtcgagagaaaaggcatgtgcctgagtaagagaagggtgagtctaatgacaacactcccttagtcaggattgccaagactatagcgggagggatcttgccctttgccagcccttggcatgagtggacactgctgagaatgcctccgtgctattcaggtccagaggataggattctgctaggcctactcgaccactgcctgcttctagagacaaatggaaggctaccgtctctaaagatagttccgaggatgacaggactctagattgtcctcaagatggtagtagtattttttttacttttacttgcaattagtaatgataacttctattctaacttttttactttccttcttgcaaacatggcctccaagatgaggaacatggaaggtggaacttctagtggtacttcttctggccgtcctcaggccaagatggcccagaccgccagatcatctgatgtgacttagtctatctttcttcttcctcctctagggtttgttctggccaaccagccggtaattatggacccaccctcgaggatcattccacccctcataggccattaggcaaggggcccagaggcctagttaggtagcttgatcgtccaagggtcagaaggagattgaggtagctcagaattaccttggcaagattttgtcaaatgttgatgaggagcttcaggagttagacactgagactcttaagtactggacatccaacaccctcgaggcctttcatctgtaactcatttattcgaggtgttcatttgtcaggggctggccagtctatagaatgttgggattttatgccctaaataaaacccatttcaatataatctgatttgttatcaat

SEQ ID NO: 383563 - DNA, 6882 bp, Cannabis indica
tgaccctctatatttttagtgaccaacattctgggtgacaaacaccgatcatttagagtctaattgtacgggtcactaaaaatctctcctaactctttagtgacccacacttttatgttgggatcccacttttaaaaattatattcatattcaaaataaactttacaaacatgtggcacagcgactacaaaatgaagcccaagtcgtcccgagatcgaactctccaggttaaaccatcttgacatgtacaatcatccccaagctcttgacttactggtgcttagccttagcctttccttcacctacacatataacaatatctgtcagtcaacagactcagtaagaaaaccatatagcatataatatatcaccaactagtatttaggtgctcatacacctatccacaaggctaaatagatcatcaagaatatttttaacagaagtacaacctttgtacatggactatgtaccgctattgtactagtgttagtagggctgaaccgtaccccgagtactactgagtgttgaaccatatgcaatacgtacttaaccgtactagtgttggtaacatcggatcgtaccctttgaacatcatatattgtaccaatgtactcaatacccttaccgtactagtgttggttgcatatgaatcacctaaacaacatgcatataataaacatacacatatacatgtatatattctatgctagtcgtacctttcaattcaagtgtgtcagtcgacctgaatggaaaattatgcgctcgacagaggccctatgtcataatcatataaacccgtaaacaacttgctaataccttttcgggaatttaaacaaaaaactagaagtttttctatcgataaatagcattaaaataccctaaaaattgaggaatcatcaaaaactaaggccctagaaacttcccaaatcggtaaactagattcccaaatggaaaactggtttctagggtcctgcttagagaaaaggttaaccggttctaggaactagcaaaacttgtttatcggttcactgcaggagaccctaaaaacatctaatctcacctaaattttccccaaattcaacaaaactttccagaacacctataataacacccaacaactaattccaagcagtagcgatagcataaacacacagaaacacaaatcaccattgttgagccaagtttgagtttcaaactcaaatatgctaaaaaacccatcaaaccagcaaaactagccgaaattaatctcaatcaacttaatttaacccaaaaaatataatcctaagctcaaataagctaaacagaacctaatcccaaacttgcatatataaaacagaagaaaaaccttaaaacttacataaaagcttgacaaaataaaattagggttttaccttggattaaattccttgaattcagctagattactctagaaatcttgaagaagttgggttgaatccctgctggttctcttgtggctgaaaaattagagagagagagcaagagttcagttttttgctcttacactatgttttgtttttaattacttaactttttacctaacataaacaatgataaacctaagttaactctatccaaaaaaaatcagctaccacttagtggaataatccacttgacactaaattaaaatgtcaaaatctccctttttaatgcttaagtagtagaatgacataggggtaaaaaggtccaacattgaaaccccacctaatccttatattccaaaatcaattgtatgattgtccccttaaataaaaggttctaagttcacctatgtgactctaatggccattcgttgtttctattgtcatcgagctaaaattataaaaattattaatttcacttatgacataaaaaatacacttagagtttaataaaatctccataattaagaaattataactgtaatgcctcttttctgaaaatgagacccacatcatatatatatatattcaaatataactattcaataacaatagttaatgctaattgccccactagtttatattttaatcatgcagccattacaattatccctctattaaaaggatttcgtcctcgaaatctaacctaaatgacttttgatattaagctctcatgccagactctaactcctaggtggagaataccttgaccaatgttgtggtcttgttctgaagaacctttttctcctatcgaggatttaaatttgttgttcctcatacgataaatctaactgtagttctagggcttggtaactaaagacatgagtcgggtctaacacatatttcctcaacattgaaatatgaaaaccatttgccacaactaataatgttggtggcaaggctagtcgatacgctacctccccgaccttctcgagtatctggaacagacctatgaacctagggcttaatttgccctgctttccaaaacgatacacccttcattggtgagactcatagaaaaacatgtactcccacttgaaattctatgtctctgcgtttgtaattagaataacatttcttcatgcattgtgaagtaagcatctgagccttaatcttgtccattgcttcattggtccttcgaactaactcagaactcaaatacttcctttccctgatctcgtcccaataaattggggagcgatatttcctaccttacaatatttcatagggagccatccctattgttttttgattgttatttttataggataattctattagaggcaagtatttactacatgaatccttaaaatccatgtcacagactcgtaataagtcctctagtatctgtattcttctctcggactgtctattggtctgagggtgaaaagttatactaaactttagctttgtaccaatagctctatgaagacttaaccaaaattttgatgtaagctttggatctctatctaaaatgatagatttcagaactccatggagacgaactatttctttcttatataattccgcatattggtccattgtatatgttatttttacttgcagaaagtgtgatgacttttttaaacggtcgagtatgagtcattctgaatcatacattcctgtggttctgagcaaaccaaccacgaagtccatcgtaatatccttccacttccattcaggaagagctaatggttgaagtaaccttaccagtttttgatgttctgccttaatttgatgacatgttaagcacttggatatgtattccactacatctcttttcattccgcaccaccaataatagggtttcagatcttggtggtacccagatgtaataagcaaggtgtagtatgagcctcatcaagtatttctttcccaagctcactactgctcggaacacaaactttagcattctaaattaacattccattgttggaggctgagacatccttagcccaactagctaacatctcctctatagtcttgactaactcagagtcttcaaattgcacctctcttatttttactaacaagtctgactgaactgtcagattatacagtttcctacaacgaactcaataccaactctaaccatatctgaagccagctaaggtgagaactatatagtactaaaaacctgcccgagaccttttttgcttaaaaaatctgccaccagatttgctttcctagggtgatacaaaatctcacagtcataatccttgactagctctaaccaccgcctatgcatcatattcaaatctttctgagtaaataagtacttgaggatcttgtggtcagtatagatgtcgcacttctccccatataggtaatatcaccatatttttagggcaaaaacagcaccaacaagctctaaatcatgtgtcggataacgctgcttatattccttcaattatcgagaagcataagtaatgactctatcagcttgcatcaaaatgcaccccagaccttgtctggatgcatcacaatagactacaaacttttctcaatcttatggcaaagttagcactggagccgtgatcaatcgctgcttcaactcttggaggcttgtttcacgcttattagaccatatgaagtgttgattctttttagtcaattttgtgagtggcattgaaatcttaaaaaattgttccatgaaactttggtaatatcctagcaatccaagcaaacttcaaatctcagtaactgtacttggcctcagctaatttttaattgattctattttcccttgatcaaccataattttgtccattttcatgatacaccctaggaaggacacttttgacaacaagagttcacactttttgaactttgcatacaacttatgagctttgagtcatcgcaaaaccatttgatggtgctgctcatgcttcgcttctctctaggagtatacaaagatgttatcgataaatactacaacacaattgtcgaggaatccttgaacaccctgttcataagatccataaagttcgtcaaagaatttatcaatcaaaatgacatcactgggaactcttagtgaccatacctattccaaaatgccatcttcgagatgtcttcctcccgaattctcaactgatggtaacccaaacacaagttaatcttggagaaagtagttttaccctgaagttgatcaaataagtcatcaattctggtcagtggatacttattcttgattgtcagcttgttcaattctcgataatcaataaacatataaagggatccatctttcttttttcacatacaaaatctgagctccccaagacgacaaactgggtcgggtaaatgctagatccagcatccctgaagttatttttttagctccttgagttctactggagccttctaataagtggcctttgaaataggctctgccctaggtgccatgtcaataatgaaatctatctgctgctgtggtggcaatcctagtaactccttgggaaatacatctagaaattcttttacaattttgacatgcttaggcccaaatgttttggatatgctagagtaaatcacaactgctaaaaatcctacacatccactgtgcaataaatctttagccctaaaaattgaaatgattggaatctgggaacgctaaacagacctgacataaagaaaaggttcctcactctctagttgaaaggttaccatctttcgtttacaattaatacttgtggaatacttggataggaagtccattctaagtgtaatattgaactcatttaaatctagctctaccaaataaacactcaacaccctattctcaactcttattggcacatacctaacttaccttttggagatagctaactctctgctaggtagtagcattccaaatccttcctctaaaatatcactgggcctatccaactgattaatcactctcgacgctacatatgaatgtgtagccccagaatcaaatagaattgtaaaatagaagttgttaacaagaatctaacctagaactattgaagcactggctgcaacatctgcttgagcaatagcaaatactcgtgctagagcggtctttgcttcttgctttggttcttctttctttagttgagggcaatctttcttcaggtgcccaaccaaacaaaactagaaactggctttccagttacattccacatggcgatgtttcttacaatgaaggcactcaagcttagaataaccctcacatccacctctaccttggttcccacagaacctcttactctgacatgagcttcctgatgtcgaaaaagtattcctcttttaatcaatgttggaatcaccaccatccctaccataataagaaaaaggtagagtggtggtcccactaacacttggagtctctcagggctcctaatgaaattccactacaccctcagctcaaagagccttctcaaccatcttagcataagttgttgtgtcatttgtggtgataatgagatcatgtctaatcttcacattcaaacctaccaagtatttatccttcttgctaaactctgtaggtactattccattactaacatattctcaccctgaaccagatcaataaattgtctccacttagcactacggacagcttcattataatattaagcgttgaacaaatctcaaaactcttcataggtcactgtagtgatgtctcgggcaagggacaccaaatcccaccacacgatagtgccctcctggaactaaaacggggcacaggtcacccgatcattctcagtgacaaccataaagttcaagattctctcaattactgtcagccactgctcgactttcataatatgtggacctcctagaaaaactagaggcccttgtttatgaaatctctcatacaaaggctccatacggttaccaacaataagttattttgctggcactgctggaacctaagccgccggcacttgctgtggaggtactgtaggaggaccctgctatttcagcctctaagtttcttcatcttgctcgttaattttggtttgtatttatgcaaacctttgctcccaatcctgaggagcttgtggtggattttcatgaccacccctttgaaaccttccatggcctttgtagcgtccatgaggacacgaaggattctgacctccccgactacctctggtctcgaccatattacatggactccttgtgtttttcttgcgtccatattataggacttagcctgcaaagccataagtctggtaggtccgacatcgatcacttatattcaaatactgcatttaaggattttacgcaacacctttaaataactaaaattttactaacatggttcctataatgtttttttaaacccataacttactaaccaagtataggcttactgaactgtgagtcaagcttatctctgacgatgattgtacatgtcttgaagatcttcgatgaacaacctagcagctttgataccaaaattgtaacgccctaa

SEQ ID NO: 383564 - DNA, 615 bp, Cannabis indica
cacccttgtttagccaaaagagcaatgttaaagtcacaaagatctctaaactccattccacccttctctttcttttttgttaacttttcatctcatccaatgaatactatctttgttagatgcttgccaccaaaaattacttattgcatgcttaacatcttggcaaatactaactagaaataaaaaattattcattgtatatgtaaggagtgattgaacgacggatttaatgagaacttctttgcctgctttagaaaagtacttgatatcccaagtccgaaaaactacgcctcgagctaattgaggaactatatgggcaacacccattagagttggccttatttagagttagactatgtccaacaaataattatatgaccaatcactcttcaacctaatgagtcgtgacctacttttaatataaccgtttactacaaagaatgagttgggttggccgaattaattggcttggctagggctagcaatatgggtcacaacatgacaacacaacttgaaaacaacatagaataaatgggttagggtgacgtttaataattgtgtcgtgtttgtgtttaagttactgacacgtttaataattgtattgtgttcgtgttt

SEQ ID NO: 383565 - DNA, 1513 bp, Cannabis indica
gttatattattttatataatataatgtttagatttaaataattaagtgtgacagattatttaattttatcaaattgtaacatatatagagttacaaaatgtgtgtagaatgattacaaaataaaagttataaattctttaatttggtgatcgagtaatatgtaactctcaccttttttcactcttaaatatgtgtaatatgttactaattatttatgaatgtgaatgaatgatagctattgaaaatatagatgttggagacttgatttattcatttataatgtgtataaatagttcaaaattaagtgagagtgatttgaaacactttagagaaaaattggccaaagttgaaaattattaactagtaactagttactttttttttccagcatgcaaatgcataagtttttgaaagcttgggagtctttctaattaatggcccaaaattcctccaaatcactcaattaataccataaacgttgcttgtaatctttgtgatcttgatttagtaatccttatccctatcctatcctacttggcttattgaggggtttaatgaagctcttgctgcttgtaatctttgtgatcttgatttagttggctatccttacacgtgggagaggggtagaggtactaataactgggtggaggtcaaattagatagagttgttgttaatcaaagatggctcgagaatttcaactctgcaaagcttttcaatatggaaatatctagctctgatcactgtcctatttttcttattccttgtgttcaagatgcttatcctaccaagaagagattcaggtttgaaacgcatggctgagagaacctatgtgtgcacaaattgtcaaagatagttgggagctatgtaacttgaaacctgtcactgagaagattgattactgtggcaagtctttggctgaatggggacaattctatacgggtaattttaagagcaaaattcaccaatgtaaaaaagaggttcggctatggaagaagggaagagatgctgtttctattgcaaagttccaagaagctgaaaaagagctattcgaagtatatgctcagcattaggtgttttggagacaacgatcaaagcaattatggctaagagaaggtgacaacaacaacaaatacttccatgcttcttctacttctcgaaaaaaaaaacaactcaatctctaagcttcgagattctgttggtaactggaaaggttggcatgatgggttatcatatgttattattaattattttgataacctctttagctctactggttttgatacatctggtgttattaacaatattcctagcactgttacagccactcaaaatgaagctttgcttgctccaatttcagacgaggaagtccgtaatgctttgttccaaatgcatcctgacaaagccccgaggttggatggcatgtgttaggatatttttagtatttaatttaggttaattttagcacatttttcggtttaatttaaattatggttggagcatttttacgctttt

SEQ ID NO: 383566 - DNA, 2183 bp, Cannabis indica
actagccttatttctgtcattttcttttaattattttactcttccttcactggaacgtacatgaaattagctttgagtttaggggtatatttttttagtgctgaagaaagcattcaccaaatgttttaggaaaaagatttaagactcattgaccaccctatacttgaggacttatttcattccagacacaaactattcttcaagtagaaaagagaattcacattgtgttttatttcttgtaaaacttggtcatgtgctccctctgttgcagggatatcatatgcattgacaagacagggacactaaccatgaacatagcaattatggttaatcatattgactgctggggtatgcccagagaaaaggttttatgttatgcctttctaaactcatattttaaaacggatcagaaatatcccctggatgacgccattttggcatatgtattcacaaatggatacaggtttcagccctccaagtggagaaagatagatgagattccttttgatttcataagaagacgagtatctattatcctagaaatggaggtctcagaaaacataaaccagcatttccatgaaaagttcatggtaacaaaaggagcactcgaagaagtattgagagtttgttcttttgtggagcatgttgataagggtgaaatcactattttcactccagaagactatcaaagaattttaggtatgagtgaagaaataagcaatgaaggtttaagagttattggggtagctacaaagagactgaaaacggtgtgcctgaatatcttatcttttgatcctacatcatttagtttttctcatttcttatgcaatgaataaaggtcggtttcctaatgccaatagctaacaatgcaatatttatcatgcagaagtcaacaactgagagcagcaacaattttgacaccttagaatctgatatggtattcctgggccttataacattttttgaccctcctaaagactcggcaaagcaggccctatggcggttagctgagaagggagtaaaagcaaaggtactgaccggtgattcactctctttggctagaaaggtttgcaaggaagttggcatcgaaaccacgcatgtggtcactggacctgaacttgagcagctccagcaggaaacctttcatgagactgtcaaaaaagccacagttcttgctaggcttactccaacacaaaaacttcgagttgttcagtcattgcagacagttggtggccatatcgttggatttctaggagatggaataaatgattcactagctttggatgctgccaatgtaggtatatcagttgattctggagcatctgtagccaaggacttttctgacattatattgcttgagaaagatctcaatgtcctcgttgctggagttgagcatgggcgacttactttcgggaacaccatgaagtacattaagatgtctgtcactgccaatataggaaatgtcatctcactcctgatagcaaatttggtcctcaagaatgagccattgactcctaggcagctcctaacacaaaacttcttgtatagtgttggccaaattgcaatcccatgggacaaaatggaagataattatgtcaaaatcccacaaaaatggtctgaaaaaggtttacctatgttcatcttatggaatgcacctgtgtgtactctttgtgatgtagccacccttcttttcatttggttttactacaaggcccgtaccctagaagaccttaaattcttccatacagcttggttcgttgaagggctcctgatgcagactctaatcatccacttgttccgaacagagaaggtcccattcattcaggagttcgcctcatggcccatagtttgctccacagtggtgatttctgccattggaatctcaatcccatttactccaattggtgcagttatggagtttgtttccttgccgttgtcatacttcaaatttttgttggtactttttgtgggatacttctttgttggtcacgtggtcaagaagatttatattttggtctataaaagatggctttagatttagagtgatcttaatgaaggatgctattcccaataatttttttttggaaagcaatgaacaaattcattggaaatataataatatgagtactatacgtctccagtttatcaaataaatactacatatgcatgatcatcaagataat

SEQ ID NO: 383567 - DNA, 908 bp, Cannabis indica
agatttgagatgatttcaaaaaataattattaaaaataaataatactgttactcttttggaaaaaaaaaagtaatgatttcgacttcttcctttgagcaaatcggaggtgtgctgccttgattgctcaaagtaattctaatattccctatttttcgatctgacaatgttgttaggaatctggaaaactcatttaagaatgagcaggttgctaaagcaaaagttaagatcaatttagaggacatagaagatgaagtggaatttcggagaccttctttagtatgctatgtgttaggagccaatcctcctttattagtgatatatggtttcattagaagggtctggaatggagaagtagatagggtgggaatgctcacttatggagtttttctggttcggtttgactctagacaaactagggacatgattttgaatggaggctgtgtcttttttaataaaagaccagtgatcatgaaggcttgggaccctgataccaattttaggaaggaggatatcgcaacaatacctatctggatccaagttaaagacctggaattgaaatactggggtgacaaatctttgttcaagattgttggtcaattggggaatcctttgcaggtagatgcaacaactaaagagaggaataagctcacctttccttgggttctcattgaggtttctgttgggttttgtgccctaaaaaaaacccatttcaatataatcagatttactaattaataaagatcagaaatgacattttctgttgcatggttcacatggtttacttcatgattacatttaaagtataaattctattaagtccagaacatatgtatttgttcgtgattacagtgttgtcaacacattggaatataatcatggttatatgttcaaaagtttaattccctga

SEQ ID NO: 383568 - DNA, 916 bp, Cannabis indica
aaaatgttttttttttcttttcacagagagaaaatctcaattattaaacatagaattactattttacgtctcctccctcctctagatcccatcccaaatgaactacaacccaagagagatgcagggagaattctcctcttcataccagtattagggatgactattaagagttagttggtaagggaagtttgttttagttagttgtgctcactagtttagctcagctagttggtcagaccaataactattttcagttactataatcatgtacttgagcttgagctatataaggctcactcacttgtaattacaattcatttaatacaatcatttcattgcttccatttctggtttagtgtttaatgttctgttttgtaatatagtatcagagccaccactctggtgtgcttttttcttcttcttcctcgattcagtttcccttatggtgttgttcatggctcgtggtggaatacgtactcgaagcataaccaacaaagaagatggatctgataattcaaataggttctttgttcttgagcttaccaatcaataacctggagataatccttgtagcccttattacatttctggtggagatcagttagtggtcaacatattttccaagatcttgactggttgtgaaaattacagcccctagaggcgatcaatgatcgtggctcttgtagctagaaacaaaattaagttcgtagatggtagattgccagaacctaaggaggatgatgaggaatacgtcatttggttcaggtgcaatagcttggtcatttcttagattcttcatgccatttctagtgaaaatgcagataatgtcatgaatctggataatgcagctagaatttggtctaaacttcaagaaagatatcatcaaaagaatgcacctagggtgtttgaagctaag

SEQ ID NO: 383569 - DNA, 1269 bp, Cannabis indica
aattatttttttttattaatagtttagaatctgatcagacttggacccaaactccactctaaccctggcactgaatctaactcctgactcggactcgaatccgactctggatctagacttaacttaaataaaatcaaaaaataaaaataaaaataaattttacacaacaaatttttattttctatttttaaaattgaaaaataaaaatttgaaaaatacaagtgagtataaaacctatttcttttcaaaaataaaatttttaataacaaaaattttactttaatttttgtaattaaaatattagaaaataaaaatattaacaaattgcacttaaagttttgcacatttgatcaaaatataaataagtagactactaatggatgattttggaactgcaatcagtttatctatatttaaatccttaattaaggtactagtagttaatttctaattgtattaatattggttcaatttttaacttaagacacaaatatgactacataatacatatccaataatatataattcataattaattatgtacgtatatattattaaactatataggatagtattgaattaattaaaggacaaaaatggagaattaattttctttttccattcgagcgcttgtttatacattatttttaagtataaagtagtcccacgagattacatctgtatgtatctgtatttttattttaatattttgaagtactaaagaagatctgttctgaatttaaaatatttaaaatttaaatcatatattaattacacgggttattaaagtaagagctgtaatttatataaattgatgacctcaaaagagaaatataatcttggattggaatgtccagaaaaccttctacagtctttgaaagtgatgaaattaagtctatattaccactcaaacactgactttaatgaatatattatatataagtatatagaatgcaatatcaattaaactaaagaataattagcttttttagtccctgtaattatgatactatactatgatgccccttaatttataagtgtagttaaaaatacccctaaaatatatcagttggaataatataatccttctatctaattctgttaaaattgactaaagttgactgttaaattaataatgtggcattatacatagatagtagttgaaaaattatataccattaggaaaataaattacaagtcataaaaattacaatagaaaaaaaatgaaaataacatcccaaaaatagaatatcattaccttaattttcc

SEQ ID NO: 383570 - DNA, 1395 bp, Cannabis indica
ctttcatgtgaattaatcccattatatctcaaacagtgctattcattggcacagatgtatgagtgtctaagatttccagcaataccacttcagggcccaaagtcaaaggtattctttttcaggtttcatatgttgtgttgtgttcattatgaattaaatatgcttcattttcagctttggagttctgcccgaatggactttaaatgttgtgttgtatcagtctccaatgtcattccagctgcacccatttatctccctgaaggtccttggacacaggtgattctcttttcacttcttcaaggacatgtaatgaaagtgtattaactattatttttcaatcatagattcctggtggagttactgctgcacaagggttcaaagctgcaggcatctatggtggattacgtgcaaaaggagataaacccgaccttgcacttgtcacctgtgatgttgatgctacttctgctggttgcccttctacttttcattttacttgattataattataatacactaacatattattgttctgaagattttgtcttttttgattcttgtgttgttttctccttctatttcagggtcatttactacaaatgttgttgcagctgcacctgtattatattgcaaaaatgccctcaacatttcagaaacggtatggttaatcatcatgctaattcttttgtgctgctctatctgtaaacttcaccctttcaaatccattatatatatacaattatatgagataggataaggatgttgtcgttttgtacttggtgagtcaaggtcatacctctcataatcttgaccattttttaatttgacaatatacaaaaaatatttgtaaaaaaaaatggctgcattaatatatatatatatatattgctaataactcttttgcatttcttttaggcacgtgctgtattaataaatgctggtcaagccaatgctgcaacggtgatcattaaactatgatgtaacttttggagttgacttggtatgtattatgtgactaagatttgctgcattgatgtcagggtgatgcaggttatcaagatgtcatagaatgtgtcaatgccgttgctaaggtatgtgattattttaagtttgttgtttgagtcaagtggattttcagcaactatgaaatttgacctgcagctactcaagatggggccggaagaagtgcttattgaatccactggtgtgataggccacaggataaagaaggtacttaactttgtgtgccattaaatcttttattatgtttgaatagtattagagttactctcagtggtgtttaattggaccacatataatgttttaggcctattcaaatccgattcgatccaattaattcagtcatccaattaatgattggatcggttttatccatta

SEQ ID NO: 383571 - DNA, 998 bp, Cannabis indica
aaaaaaaaagtagaaaacaaacagagccaataataagcaggttttcgtctgaagaaaggaataacaaatttaagattttacaagcacaaaaaactaatgtaactaatataacttaaaaactaaatgtagtacaataggttacaaccaattgacaatacatgaagctgacataagtgtcaataggttactccagagattaagacccatgacaagaagagaaaaatgtaatcaaatttaggagtaaatttattaaacgattacatgtggtaatacaaatgtgtccaaatttagtgcagtattatctgaaaagcacatcatttattattgggaattggatatggcaacgcataattaaaagtctagtaaaaaaaaatacacacttcttatcaattaatgagccacagcatatgtctgactataccatcaattattaactgaatgtaactctagcaaattgctaagtagatccccttgtgtaaccacaagatggacatcattgtaacaaatcacgaacctaaccaggggtccaagcccttataggttacctaaagcttcatagtataaagctcaaactgatggaaatatacttacagtaacatacatatgcacacatatacaaggagagagaagaaaataatacgtcaactgaatggatttcatacccagagtgagtaatgcagaaagttgtatcatttaattaggacatgcatataaatagttgaagagactatcatgttcataagaggccaaacacattaacacaaaccaactttttaaactgaaattttaaagtctagaactcgtgtataaaaagagcatatatttagaccgttttaaattaatttgcgaatgtgtaaaaatactccattctggctattcacaaagtagaatgagcagcgaccaccaaattggctgaaattctttcgttgttttcttgtatttatttatacctgcctagcaactatttataatatgtatatatacatgttcttttttaa

SEQ ID NO: 383572 - DNA, 5242 bp, Cannabis indica
tgggctcgcatgcaagcccctgaggctcacaacacacacacccttccaaccacacacactcacgcatatgcttgcatgcgagcccctcatctcgcatccctacaaccgtgcacacatatgcattcatacactcgagtgcacatactcacatgcacacatacatgcatccatgaattctccttcttatgccctcgcttttacgttctctcgttcgttaatcaccacagggttagtcattgaatcacatgggtgcatcttaggaatcgtaagtgtcgatgatgactttatgaaatacatgccaactaggtacactcgttgaatgcacttttgttagtcccttggggattagttaactaaccttaaaagttatttgtgctaattttcagggttaacacttgcccctaggatacaagaattcattcaagtgttcttgtcaactgagtgagtttgggaatatgccttgctaaagtgtgagaccctcttagtgttcttcgaggaggtgcctgctttgcattgggggcttcccttgcctgaattttactttgcgacaatatgttgaagtagtgatggattctcctcactttttctaatcattttttttaccaagtgacctcagccaccatgcggtcaagcatcattttaacctgatattggctgaacgactccaagggtcgatctttagccaagcaactttcgtaactgatattggccgagcgacttcgagggtcactctttggccaatcgacttttgtaattaatgttggttgagcaactccgagggtcactcttcagccaagcgaattttgtaactgatgttgaccaagaaaatctgagggtcactctttggccaagcgattgtttgtaattgacgttggccgaacgactttaaggttccctcttttgccaagcaactttcctcgcagtggtaagcaggcattcatttgagggagtattactctttgagcggtctcatcctcttattatttatccatccttccactcagatgtgaggaggcttgttgtacttaacagctcccctcttgacttgtaagtgttttcttacatttgggaggcaccctctcgttttagcgttaggccacaagtgtctttcaagacctcttttcgctcggcgacctttgtgaggaaaagtgtatttattttattaagcaaaggttgcttgtccttgctgacttcattttttttactcttcctcctttcctttctaagtgtgcagtgtttccaatggtgccttgcccttggggtttgtgcaattttttttttatatgtacataccttccttcttcattgttattattattatttttaatgaaagatgagatatattacttcatcatgtgataaggtgtgattgcctaattctaatgcaatatcatatattccaaagaacaatttgtaggctatctgggtggccttttgtttcatgacattagagtggaaacattgaaaaataagaggaaacttaaactcgtggagttgccttatgggcttcctccttgatttcaaaacacaaatggctaaaagatacattcgactcacatttatagcaatagaatttcttcaaatgccctgcgttccatgcccttgatattatcgtgtcatctatgcgggccaacttgtaggtccctggcgggatgactttggcaatctgatagggcccctcccaattggttcccaagaatcctgccctcggatccttagtttttgggaggactttccttagcaccaaaactttggtcttaaaggcatgcatgtggactcttgaattatagtatcatgttgccctttgttgatacaccaccaatctcatttgggctacatctcttctgtcctctaagagatccaagttttctgccattgctttttcattgacctctttgttgaaattcttcacacgaaacaagttgagtttcatctcgatggaaagtacagctttgcacctgtatgctagggagaaaggagtttcactcatggtggagtggggcgtggtcctgtatgcccagagtacattcggtagttcatccacttatctgcccttaagcttttctagctttgtttcgaggaactttttgattatctaggtttgctgcctcaacttgcccgttagcttaagtttgcactactgctgataatctcctctcaatgcctctctcagagaaataagaactcaacaaatctccttcaaattgggtcccattgtcagtcattattttgtaaggtactttaaaccttcatatcaagaacttgttgatgaatgataacacttgtttagcgatgatacaaaccaaggcctcaacctctacccatttggtgtaattgtctattgccaccacatcatatgttaccctgactcttcctgtcggtagggccccaattaaatcgatttcccacatggcgaatggccataggcttgtcatgcttatgagtttggcaagagggcgcctgctatagctagcctgcctctggcatttgtcacattttttttttgtgaatgccgttgcatctttctctaaactggccagtagtatccgtctttcaatactttccttgacattgaataacctcctgcatggctcccacattctccttcatgtatttttaataacacttgctgcacttcactttcttttatacaatgcatgagcggggtggagaagcctctctttcacagatttccatccatcaagccatatctaatgattttatattggattcttcaagcctccttcttatccaagggaaacttcccttcttggatgtacttaatgtacgacatcatctaggagggttcttccccttccacttgcaacacttgatcacactcaatagttggttaggctaagaaatctactagcacagactctagaatatcaaccttttgggtcaaccgtgaagtattgtagctattccaggtaactcctaacctaggctaggtatgccaccatccttggccctttcgcttgaaattctccttacttggaaaaccaccaattgcgagtagctaaaatctacagccgcataacttctaattccttggcgagtttcaatccaaccaacattgcttcatactcagcttcgttgttggaagccttgaagccaaaacttatcgcataatacattttagttcctccaagggctgtcatcacaaccccggctcctgccccgttatcattcaaggctctgtctacatgaaactcacaagtggcctctctttctccattctcttctaactgtccattggttttttgctctcaatccttcccatttggacgataggtgaattctgccatgaaatctgccatcacttgctcgttgagtgcttgatgaagatatttttatggtgcaacccctagctttgaagacactcaaaaaccacatcatgtgtgcaaattgcacaagtccatctatggtttaaaacaaaatccaagggtttggtatgaacaattaagaacaacatttatttagtggggcttcgagaattccaaggttgatttatctttcttcatacttgaaaactcaaagtttgtcatcatgactcttatttatgttgatgacatagtttttacaggaaacagcccaagccaaaccaccactttcatttccaagctcaacaaaacattctccccaaaggatctggggccactacaatactttctgggcattgaagtatacagggacaatacatgcatatacttgtcccatagtaagtatataacagaacttcttcaaagggttaaagtggaaaacacaaaacccaatgttactccaatcacagcaagaaaggcattgtccataacagatggcatacctatgagtgaaccaacaacctactgaagtgtaataggagccttgcaatatctcagtcataccaaacttgacatttcgtttgctctcaataaatttagctagctagtttctcaaacaacctactgatgtgcactggggagcagccaaaaggatacttaggtatctcaaagggacaatgcatcatgggctgcacatacctcctagcactaatctaaacttaattggctttattgatgctgactgggcctgctgcccagatgataggaagtctgttgcatgctattgtgtgtttttaggagatgctttgatctcttggtcatcaaagaaataaactgtcgtggctaggagcagcatggattctaaatacagagctcttgctcagttggctgcagagatttcatggctcccagagttgtcgaatgaactcaagttcaaatgcacttcaacaacagttgtgtgacaatatgagtgcaagtgcactggcagctaaccctgtttatcacgctcgaacgaaacacattgagattgatgtccactttgtgagaaataaggtctcacagtgggctatctgtttatcacgctcgaacgaaacaaggtgtgacaatatggtgtgacaatcaggaagtatgatttagtacatgtcccctctcatgatcagatagctaacagcttaacaaaagggcttactccaactcggtttcaatttcttgtcaacaaactcaatgtgattcaatcaccttattgtttgagaggtggtgttaaagaaattgaatccaataatatttaatcatgagcttacaaaagaagagtggcagtactgaatgagggaatcccaagatttaacaatcattgtgtaatcattacctttttgtaacaaactttaccattaggtctctttttctgtgctttagtctttacacgtgtattgccactattggcctctgtttttcctgtaaaatgcatccttactatataatgaaatccaactcattcactcatttttgtgttgagttttccattcaagaataagtacccaatgtatattattattaattgatctctgtacagacagtacttactaggagaacaaaatttccaaaccgaagaattttaatcccatgacatgtaaattattagaatagttttatggctaattaggatttttatccctcgaactttgacatgtatcaaatcatgctccctgaacttttatggccgttaaaaattctccctgaactattgaaattgttagatttaaagactcttaatttcattcaattttactatttcagtgattatttatgtactaaatcatgctccccacactttaaaatctaccaaatcatactcttcaaactttgacatgtactaaatcatacatcctgaactttcatccacgttagtttttttttttttt

SEQ ID NO: 383573 - DNA, 5973 bp, Cannabis indica
aaaattgatcaggcttttgggatcctttaaagaacagaaagatctaaatcaaagcaagtgcaattagtaagatcatgtttctatttgcacccaaaaattgagccaatgtgctgcatattaattttcattctaaaactatataaacattactaaataatttaatgaatagtgaaaagttataaattagtttaagtcttgacaataatgtaatttgaaaaagtgatatttgttacttattgcaaaatgtatgtttagtgcttgtgaatgcattaaatagctttaccctataacaagccaaattttggtactttgcttagattagtgacatttataggagtagatgttgtaataaaacaaaagcaagtagttctaagatatcaatgcatgaaagcatgtagacattattattatgctagataaatatatggttgtttatagtggagcaactccttgaagttctttgtactgtatgccaacaacttttgttgcaacctctcttagtacttgtacattctctatcattttcttgacgtaagaccacatccaaacaactttccattccttgttttgtgaatattccatcctcaattttgatctcgaattcccacacatcctctatcatccatccattaatcatatggtcaccaaacaatggcctacaaaccataggctatgaatacaaattggcctctatcatctgaatacatggaaaggtagtggcttgggcaccacaacaaatcatactatcccgaattcccacactcaaaatacaatttggatactctattttgtaaaagttaccaattagattttttgttttgttaaataataaattagatcctgtaatttttataatgatacaaaataatagtactctgaatgaggagtgcacatcaagtggattttgacgaattttaagttttcgaattcgagtgcatagaattagtaaatcgaacctgcccgtttgaatgaccgaatttttgggttttgggtgtggattggaccgggtccgggtgggttttgaccgagttttgagttgggctggaaaaaatattattttttataaattttttcattaaatgaaaaaacaaaaaagaaaatgaaaagaaagaaaataaaagaagaacaagaaaataaaaatgataaatcattgtttaaaattagtgtttttgggcaggttcaggtattatccaattttttcggatattaaattagtgaaactcgaacccgacctaatggataactgggtgtaacccgaacatgacttataattttttaaacccatttttttgggtttcaggtcgagtaggtttgctgagtgggtgtgttttcgggtgtaaatgtgacaccttaccctgaattgatttttgttaaaataaaaattaataataacccgttttagagtttttataataaatctttgtacattttctgtatctattcgtactagaaattatttacaatatagttatattaaacaaaaataatcgaaaattgagctctggataccattttaaaaaatacataatttaattaattattttactaaacagaaagtccaactagtatgcaaaatacaagatctgaaatattaaaattgttataataacttaatttaaattataatgaaagtgattgggtgatgagtgatgattgtaagttctaaaaagtcgtatgattatttatctttaactttatcacgtagctatcacatggatcaaattaaataattgaatttgaccaaaataaaaatgaaaaaatggatcttggtccctcggccacaataatgatatgtttatttaagggcagattgtaaagtgacaatcctcgggaagtagttttaagataccaatgcataaaaacatttaacattctttctcattattcaaaataaattctatttaacatgtgattgcactaactaagcaacactatggctatttatcaagtggagtagctctttgaaattctttgtactacttcctcctatgccaaccgcttctattgcaacctctttcagtacttgtatattctctctcattttctttcctttttcttgacataagaccacatccaaacaaactttcattccttgttttgtgaacactccaccctcaattttgatcccaaattcccacacatcctctaccatcctcccattcaacctttggtcaccgaaaaaaggcctacaaatcataggcacaccaccgacgatactctccaacaacgagttccaaccacaatgagacacgaacaccccaactgacttatgggacaatatgttcttttgtggtgcccaagcaactacctttccttgtgttttcgctttctccaaaaacccttttggtaaatttgcttttgcattgtccttaagtgaccatatgaatggaacaccattactttccaaggcttcagctatagccacaagctcttcttttggtggcaccgccaccgacccaaaactaatgtacacaactgacgcaacttcttgcttgtcaagccacgatagacaaccgctctcatcttgagcaggttggggcgtcggggacactaagtcgaatggcccaacattgaggaactttttgaatttggacttcaagtcattagtaaaggtcttgtctaactcttcaaaggagtttatgaaaattgcggttgctcttggtaacatcaaccccatttgatgtagcatagttgagaagtgggattccaaatctccaaacactactccttcaggcaaatcttggatttgtatctttgacattccttgtatgaaactaaggcttttatttccattaccaactacaaaccaaagaaaacatcatcatgatcatcacatataatatatacatattttagttgtctacaaatttttgtaattagacatcaacatgagataacaccttaccaatatggttaatgattcatacatactcaaattatgtacaattttcttacacacaataatgtacaattttaaccaactaattaaaattaataggatatcactaaaaaaatataaggcaaaaattaaatacacatcagtaatttgaatgtgtgtttaatattactcttaattaaaagagtaattggcggtgaaattttcttacgtttaattttggacacttaactcctttatttttgtttttgttaaaaaaacccgcttaagtatacttttctttgtaaatttgagatgccaaataaatattactgttaaataccaactggatgactattgtgtacacatgtgtatatgtgatagtaaatcttgaaatcaatatagtagtcatccagttggtacttaacgataatatttaactgatccctcaaatttgcaagagtaaacttaaagaaattttgccaaaaaaaaaaaataaaattaaaaagaagtaaataaaattaaaatgtaagaaaaaataattctaaaatatgtaaaatttaatattaaatcacactaataataatacaacaatataatatatctaagtacataacaaaagaaaaaatagaagagtaacaaagtataaatcaaatagcacatgtattatatatatatatgtatatagatacaaaccttgatgcctaataagatcagtgtaaagatgagcagagagtgcacaaggcccagcagtccaaaatggcacccaagacacacccatctcatgagccaaatcaccaccaaaccaaaagaaagcatcagtgaccaaacaagtcacctccttcccaatctcggccacggccttatcaatgctgcgcctcaagctctgaggcgcagctttcatgaagagctcaatgggctcctgatgccctctagtgaagatgtgtccctcagggacaccatgccatacctcatatggcttgatattcaattcgctaccacaatcaccgccactaccattagtggtagtgtttgtggtagtgaaaatagtgtgattggattgagaagtgttgaaaaaagagaaaatagtgttaggggccgaggctgcagccaagtgacggatgatagcgaggagcggtgcagcgtgtgagccgaaggggaatgcaactacacccacatgagactctattgctgcaaccattgttgtatctactaacttatattgtatcaaaataatgtagttttgtagatatatatagcacaatatatatgtatatttatataataagtgtagtactaagattatagtaatcctcttggtagctaggaatgggggttagcaatatttatggacatttttatttcaagcactaaaaagaactatttttagtaataatattttagtcaaaaatataaattttttgtgattaaatttgacttttagctatagcaaaaagttatttataagtaaaacataatatttagatacaaattgtcattaatttaattttagttacaattaatattgtgactaaaaacatatttaatcagagtaaattgtattttgttaattaatatttttagtcacggatcttttagtgctaatatcagaaactttgttatttagtcataatttttttttaataaacttttagttaggactaaaagtaagattttttatagtgaaaaataccacactaatgatacccgacatcacttaaatatgttatatcatttttggtataagttaattaacatggataattacatattttttgtaggtgggtggggaaatacttggctatagttaccaacattaaatgtatttattatgtatgtttgatttgtgtggtgaagaatgaagatgactttgttcctttaccaaactttcatcattggattattaatgtttcaactatgatgatcaccgcacgtgattacttcccatcctccattcctcacaatatataaatagtaatggtggttgggcgttggatagtgaactgactcatttttaacaagtattgttattgggtactagtagtgttcaatactttttataagtggcgccttatgattagttatcaatattttttctattttcttaagttatatgagacccgatacttaattatactaatagcagaatggtgttaggtaccaacattcaataatgttttttaacaatttctttttaatttttttttcttcaaaaattacttttataatgcaaaataagttttaggatgtttatacgatgcaccccttaaaaaaaatgtattgatgcaccttttgcctattttagcatctaaaataattttttaatatatttttttcatactcgtgtacgttataattatttaagatattttataaatttttgaaaaaattaaaataatttacaatatagaaaaaagtgttcaaacaatctatttctatttcacacgcatataaaataaaatagtcatcacacgtgcaacacagtgtttggatcttattttcggcatgttatatttttctgatttttcaaaattttgtaaaatatcttaaataattataatatacataataataacaaaaaaaattgaccaaaaaaattatttcgaatacaaaaaataaatagaaatacatccgtacaccctttttaaattgtacattgtataattttccaaaattctattaaccttaattgtgttgcactacgcagaactatggctatttatcaagtggagaaactccttaaaattctttgttgcaaacacttagaactatggctatttatcaagtggagaaactccttaaaattctttgttgcaaacactttcactacttggatactttctcacattttctttcttgacttaagaccacatccaaacaacattccattccttattttgtgagtactccaacctcattttttatcccaaattcccacacatcctttatcatcctcctattcactattcagcctatagtcactaaaaaatagatatttgcgcttaaactcttttaacatttataattattacacatataactctaataaaaaaagtagcagcaaaactacttattttacgattttgttgtaatcatac

SEQ ID NO: 383574 - DNA, 3634 bp, Cannabis indica
atatatatatatatatagttttgtaattagcatataaattgattaattgaatatgcatttatatatatttaatgtggttaattaacggaaacttttagtttaaccattttttttttgttaaacttaactgttaaaattaatacggataaatctaattttaaatatttaaatttaaattaaaaatataaaaaaatagataattatttcttttcatataattcttaatttaaatattaattagatgttataattcaattaattactaatactttatataataaatttcttaattatattatttaaaatatttaaacttatttacttatttttttttgtttaataaaactagttaggtatattttttttataaataaatttaaaattaaattagattttatatatttaaaaatatcataaaattgtattagattttattttattattattatttaaattaataattaggtaatagcaactctaatacaattttaagcaaacaagcattgtatgttactaatacttaatatatatataccaaacacaattgctggttaagaaaataaaaatctgattaaaagaatattaccaaacgccacctaaataattaaatatgttattattatgtatatgcatacctcatcaagagtcatgaatcctttgatctcacgttcaatcaattctgtggtgattgctgattctggtggcccatagatctctggatcaagtttactcttcattggccattcctttatataaaaaattatatattttttgtcaataataatttttgaagtaaaaaaaacaaaaattataatcttaaaattggaattatatatgattctttatgtataaaagtatgttattaattaaaatatataatcgaaagattaatactagctagtgggcttagaactattatgattacgatatgttatattgttatcgatgcaattaagaaattggttacaggtctcacatattatatactagccctcgtagaataaaacataccgtaactagttgaatgctatatggattgagacctgctagggtttgcctaccgaattcttcatctctaaaccaaaaaaatttgtcccctaaacacatccaacacaaatatgttagagaaatcaattaaatattttcaaatattaatattttagattaacgattatatatgtaccaaaatattatttgcagtaactttaacagttattttaaccaatcgctctacatatttacattatattactaataatgttatgtatatataatgtaagagtataagtagtagattattactgtccattggttctggaatttcgaattgcaaagcctcattagcatcagaaacagtctttactagtcgaggtaaaatgttcttgagaagtccttggttagtagacggaggtagtttgaggccattatcgaagagagaatcaatggccctaaaataagggaatccaagtgaagaatcagtcaaaactgtttgaagagaaggaaccaaggcatggagacctgaatatattgtctttgcttgaaatgtcagttgttttatttctgagaatgtttcatctcgagggacatatatagtcctacttggttgctcagacaatggatctgtatcacacataaaaattaaataaataaaatatttcagtagtttagggagatttttttaacatcttgaaaaactcaaaggcacaattttatacatgtcaaagtttaagaagaaaaatataattaactctaatcattcaactttaattttatgtaattacctctttgagtgggaggacgtccggtcctacaacgtctaggaaaagggcgatttttaccaccaagaacaggccttttgagatcttcactcttatcaggatcaccaagatcattgtatacatcgtaatcataaattcgttcgaaaaatttacgttctcctctcccattccctcttagggtttccaattcttcttctcttaaccttcttagtccacttggggtttgtgaaggcaaatatgactactccaattgcaaacaattaaccatatttaaaaaaaaaaagaaaaaaagaaaaaaagaataacatatcaaaactactattatcaaaacaattttggttttctataaaacataaataaataaataaatattagttataaaacaaatggagaaaaattcataaataaagatatcacttttgtctttattgtaagataattatttatttgggacacttgcaaaaattataatccaattatgtttataatatgacgacgtaaattataacatacctcgtgttagtttggagaaaattttgtaaaaacttaaattacattgcaagaatataggttcaaaatataatagttagttgcacacgttagctttattttttttaaagttgtggaactgatctattttgaactttattttcgacattgtattatattattcaaaaatttctcaaacattggtgggatgttataaccaaaatattcaaatatgcaataatttcttcaagtaatgctgaaaatagaaaacgctcctacaataaagacaaaagtgatcgatatcattagaagctcactataactatatatataacgtgaaattaaactaccttatttgtgaagaagattctcttttgaggattgtcaaacttagaatgcacccaagaattacaggtaacattaactggaccatttggaaaaccctgaagaacaatattcttgatgtacatctctttgtgatgctcattctcaactagaaccgcgccaacggttccaaaatccgcagaaacatctagatctgtttcgtattgaatcccttccttattccacatgctacttctatgtgcatatttgttaattgtcttcttttccaatccagtttcttaaccagacacaacaaataaagatgtattattcaggatatatatttatatatgtatatacaaagccgaccctgagacttgtggggtcttaaggaaaaaaaaattattaataaatcttgattaaaaatatatgtgatatttttaaatctctaagctgagtgggccctagatgcagacatagttcatcttagcccaagatcagctctatatatacatttaacttttgttgagtagcttgaagattgaataattaatatgtttattaaagctgtatttagactttaatatatataattgacaattttatatatctagggcataggaccacgatccattgatcaaaaactttaagtttgctagatctattaatgagtgtgtgaaaggaccacttgtgaattgaacttatcaattaacatgaggtactacaaattaattttatataatatataattaattaatatatgccattgaatttttctttttaattagttaatcacgtacgtaccacacattttatttttctttttgagcatgatgtaccatgatcatgatcatatctacatatcacattactacacaaattggatctattggttatatacatatactaacatattattaaactaacttattatatacatgaatttaaataatttattaattttttaaatattattttataatatatgctataaaataatacttttagggttcgtttggtaacgccgtattaaggtcgtattg

SEQ ID NO: 383575 - DNA, 1723 bp, Cannabis indica
tttcgtttcaacccatgttcagccctaaattatacatagctttctcatagtcactgaaatctgaaatctaaaagtctaagcacaacaactcaatcaaattaatatcatcatgactcgttctatgttgttctctgccctcatgctcttcctaatcttattggcccaaggcccaaccctaacccaagctcgaaagccccacataatcaatttccgatctccaaatctctacccggaaggaatcacatgggacccattagcccaacattttatcctcggttctgtacgtgaccgaaccattgtctctgtctctgatgctggcgtcgtcgaaactctaatttttgatcctgatttacctgagaacgtcaccatccttggcctcacctacgacactgtcaacaatcgccttctagccgctatcaatgctatcgaaccactccctaattttggtgctctagccgcctatgaccttcgcacacgccgccgagttttcctttctcaccttcccaccgacggagatgatctcaagagaccaggcccgaacgctgttgcagttgactttaagggcaacgcttatgtaaccaactcgattggtaactatatatggaaggttaacaatcaaggagaagcttcaattttctccaaatcgccactcttcactgcttatcccgtcgatcaagaatcaccgttcagcttttgcggcttaaacggcatcgtactcgagcaagggttaccttttagtggttcagaccaataccgggaaaatgttcaaagtcaacgaggacaacggtaacgccaggttggttctttttttcgaaataaattccaatcacacttataacatttatctaaatcatagagttacaacttggtagttatgactataatataaatctcacaaattactcacacgagaaatgtttgacaaaatacacacaaatttctatttttaatcattagtataaatttcaatcaaactcataacattttaacaccaggttggtcttactaaacgaagatatgcctatagccgatggaatggcgatccgaaaagacggtgtcgtcttggtgaactctcctaagaaggtttggatgttgaaaagccaagatagttggggagaaggagtggtatatgacaaaattgaccttgatgaagctaggtttcctacttctttgactatagggaatgatgggagggtatatgtggtatatggacatttgttggaggcttttatgggaaattcaggtagggataattttggaatagaagaagtgatttcagagaaagagaatagagaagatagtgtttggatatttgtgttacttggattgggattagcatatttcatgttttggagattccaaatgcgacaactaatcaccaatgttgacaagaagactaattgataatttatgttagaatgtgatttttggtttttttgtgtaatatgattagttttaatttaacaagacatttcatattttgcatttcttttttgatttttacagtgatagttttctatgttgttagggttgtcttatgctacaaactttcatgtttgttattatcaactaatactcaattgtaataataataagatcaattctttgtccaaattgaggtatgcactattgttgttgagtttctaaattggccaatatttattcatataaaaatttgcaagaaatcaatctcatttagtcaataagatttcgtgtgtgccac

SEQ ID NO: 383576 - DNA, 2741 bp, Cannabis indica
acgtcggaatcgatgactttgtccatgagatgagctcgtgtgacgctgttgaatcctcccgtgaaaagggaattcgaaacgtattgctcttcagccttgacagccacagaggagtccataggttgattgtccggagtgggaggaatgtggacagtgtagttcatgtaatcccccgagatttctccagacatgtcaaggtcttctcttgacaaactaacataccgaccgctcgatgttcgcctagcgaatttgacggtttggccgctagaactacggctggctgcagagttagagccaccaccgatcgagcttcgcattacccttttttgatggctggctagacaaggatgccattgttataaattaatgatgttgatcaatattaatatgacagtatacattaaagggtttcatgatgatattctagtccatattagagggagagttggtcatcaaaaagggaagagaagaagaaatgtgtgtgtaaatagaaagaaagaaagggtataattgaatgaaggttgtgtttgttaacttaatttaggagtgaaataattaagaaacaatgagaaaagaaagaagaaaaaaggattattattatttacggtgagagaccaagtcatatatatgggtgtttttagaattgagggcaatacgttttttaaggaggaaaaagttgaggaatgtattagggaattttttgaaagtactcaattaattaattctcatttctcaagctcaacccttgagtccaaagtacatgttctttctcaattaggttgcctgagccacacccacacacaccaaaatctctatttttggaaggtaaaaaacaaaccaaaaaaccaaataataataataataaagaaaattataacaaatttcgacgaatcatataaagaaatgatgtatggaaagactgagcacctccaagagcttatttaatctctattctttaattcagagtgctcttataaatgctacgtagtacgtacatcaaagtgggagtgcatatagaaaatatataaatatataatgagaagggagagataaaatttaaaagaaaatacatattttaatttgtatattttaatataaataatataaatacaattttaacacatgctaaactcaattgacaattaatttaattacatataaataatataatatgtacggatataatatataatagacataatatttgagacagaaatttatatgcatgaggtaggtactaatgtatattaatcggagattagaagtgataacatatgactaataatatgtattctaataagataaaactcattgttcttcaatatatatatatatatgtttaattattattaaattagatgcattcaaattcccttgagcattagtttctcccaaacaaatgcatgtttatctctctaatatttaaatagaaataaaatgaaatataatttaatatacataaaaatagattatgatgaatattgaaatcatttttcttctatttatattttttcattatatttttcgggtcttatataatggaatttttgattgctcatattataattataataaacacgtttttgaaaaatcttaaataattaaaagtaagacaaatagaattcaaaaacattttgataaatgcaaaattgtatttttacacacaatttgaacaaaaatttcagtattataaaaaaatagcagaaatcaagtattagcatatatattataatcatgagacatgattgggacacctttttaaaacacttaaatattctcaactatacaattaaaaatgatatatgatttcacttaaaaatataaataaaaataattacactctgtaatcttaatatacacaattatattattaattaaatcttttttttaatagaaaatacatctttattaaccatcaaaattcgctattaaagaaagtagcaaattgaatggaacagactccatatcgaaagtacaactaggaaaatatagaaactctaacacagttatgaccatatttgatgatcgtttaataaataaattaaatagaaacaattttcaactccgacaaaagttttttacatttataaatgacttgactgaataataatatcatgtcaatcgagcttcttattgcttgaaccatcgtaagacaatcaattttaagagtaacatatgctaccagttatggaaagagcaataaagaattaattgctctaagttttattatatcttcatgtttagtcttctatagagagaaagaacaataaggtcaaaatttgcaagttactactaatgcaaatatataatatgcatactcttttttatcttcttagaaattaataactttagagaacaccaccaaagaaaaagtatttaagagacctagagcccgaaattcagtggcgcttcacgattggttatcgatattgcttaaaaattattttcttaagttatatagcactcgatacttaattacaccaatagcagtgtgacattgatgagggtgctagacatcagtaatattttttagcaattctctttaagaaatcaggctaccaataaacaaaagttagaagttaaagtgtaaagcccgcttagttaatttggaaattatcagttggttatgattaattatgaaattatttatagctatttaaataatttattactgttatttatggaattcagtagttgcatattctgcatttccggtgtccggtattttggaactcggcgtt

SEQ ID NO: 383577 - DNA, 3057 bp, Cannabis indica
ttttttttttttttttgcaaatatacaagttactcaaatgcaaaaacgccacttttattactaaaccgactttcacatgaaaaacaacattagaaattcatacatttcactattatcggttctaggttctatataatcattttatacagaagatactttatatccaattaactgtaaaaaaaataccacttaagactttaaaattaagcgttttaaaaataagacaaattaaataccataaaaggaataaaaaaaaatgtaacagaagatgtataaacaaaaaataatatatttatttaaaatttcctcttaaatgaaagggtagttcattatcttgcttattatctagctactcgtggcatctccaatgcttacaaaatagaagttttttcatttttatattttaaaatatatatttttttatttttaggaaaattcacatagtaacttgtataacaattaacgaaacaatttaaattacaattaaaatccacataacaacctacataaaaattactggagcaaccaccaaaacaactcacactgtaaatttgaaagaaaaaataaaattaaaaaaaatgatatataaagtaatttttctataaaataaatatggaggaaattacactacataccttttttaacttgatgcctttaatttttaccatcttcatgcctttaatttttaccatctttttcaaaatatattatatttacctctttttttaatcattctactaattttacccctatcacaaatctattatatttgaaattatgtcttagttatatgagtgtgtgaggataatttggtataatactcataaaaagacgtataattaaattaaactttatttaaaggtaaatttagttaatgtatagaaaaagaaggtattttttaattttttgagtaaattgcggcataaataattaagttttattccgagtagtagataagtacttaagtagcattttttgcggtaaaaataccttccgttattagtgtggagcttacgtaggtacctcaccgtttacagccacgtaatgtgccacatgtcaccttataactgaaccacatcatttaaaaaaaaataccgtcgataattcatttaaaaatttgccaactcacttaaatattgccacatcactaaataaaaactcaaattaattaaaattaacaataataaaataaaaactaattaatttatatttttattaaactaaaataaatcatatcatcttcttcgtcatcgtcttttttttcttcatcttcttcgtttttttttttcgcaagaactacattcttttcttcatgtctcttcatcttctttgcatctagctgcaaaattagtctctttcactcttccatactcttctagatcctacaatagtagaatccccttcaaaaaccttaattcctcaagaatctcaatcgatctatgatagaactcctttgggtcgctgacgatctccgctcctgcacactggtcttcgctttccatttttctccctccaaggtgattttcctaaaacccttaattttaattttgttaggtaacgatttgggtttgggggtaaatataaaaacaaatagaggagttattagggttcttgagctaaatttgggcctcttgtaaatgtgtatcgaaggcttgttgtcgcttgaggaggaggagttgccatctccgatacactccatgtcgagattatcaacaaccattgactcgctctgctcctgaactctcaccgaaatggcctccctgcttccgatgaggacttccaacttgtcaatgaggcgtgaacatgtttgttaggtgcaatttcagtgccggagaacatgtttaaagctttagggtattgggtctccaaggggcagtaatgtatttgattgagtgggttttgtttatcttcatactagtttttaggagcaagctttttttttttttgaaatattttaggagcaagcttaattgttcatgtactgcaaaataatggtgtgttttggttttggtaatcatatatgataagctgttataaattagtcctttaatgtttttattaaactatctactacaactttaagaaagcatgaagaaatggaagagaattcctagattttaattattgagttgtttatgggttattattatttttaatttatttttgtaaagttatattaattttaattgttttatttattgtaagtctactttatatttttataaaatttaattaagagttatttttttatatataatttgaattgttattatggttgttaatttaaaagtttttatttttgttttaaaaggggtttatttaattttaagttttagaatagatgatgtggcaggagttaattttaaatggtgatagtggtgtgacatttattttaatgacatgacacgccatcagacacattataaggtagaaagcagagagataccaagaaagtttcacactagtaacagaaaatatttttatcataaaaaataagacttagacacttacttggaataaaactagtatttttgttgtaatttactctaacatctcccataaatatttctaatttagactaatactttgtaatcactagtacatttaatcaaaagactagagacttcatttttggtaaagaagtataataagtaacttaatgccaaatgttgtagcaaaaattaacttaccaactatattgatttgacgtggaaactaccaattaacctcgcaactttcattcagttctggcagctacctaggctaggcttaccactccaaatctgtcttcaaacaaaagtaaaaagttaaaaacatttggcatttagtttggaagaataaaaatgtaataatgaaaataagaataaaaatggaatggaataaaatttaaaatgcataaaaaaattgataaaaaaattataaatttttttctcaatggaatgatctttctttccatttcaaaatagaattgtctttataccaaaatggtgaaaaggctattccaacactttaatatgcaaccaaacaaagaaatgaaataaaaattgttttctttcc

SEQ ID NO: 383578 - DNA, 2841 bp, Cannabis indica
attattattattatttaattgtatgtgatatagtattagataattaagtttgattaatttagttgacgagcacactctcttataattattattaatgcattaatattagttacgagtggtgccaattattttgtataggtgacgtactatgatttgttagcgattattttttaaaagttaattttttaaagtatatgagatttgatacttaattacaccaacaatactataacaccgaaacaggtgctaggcacttgtaatacctttgagctatttttcttattgttattattatttggaaaataagataactcagtattactttgaactactaaatatgtataaatttcaatttaccctacacaatgtacacatacacctcgacaagtctttacctgtacaagtacaacactaaaaattctctgagaaacttcaaaagctacatgggaagtagacttaatatgcaatattggtttaggtataacaaacaaaatcttgatcaacaagtttagttgatcaagcttttcacccataagatctgcccgttttagcattcgtaatgtcaagaaatgaggtccagatggtttcgagtctactttcttcaaagagctttggctggaaatcaaggagcaagtttgcaaggatgttaatcatttctgtgatactagtaagatacgagctgaactgaatgaaacaactatttcttttgttcctaaatgtgaattgccaaccaaagtgtcaaaataaatccccacatgtattgcctagattagcataaaaacagttacaagaatataaaacctataagtggcctttggcctctaataacctattaagaaaataaaagttagttgtaaagtttgttaaaactattgtaactaactctcaactctctcaactactctctaagctataaatacaagctcataacaactgaaaaatatagatcagatcagaagaaaaagaaaaggaggagatttgggttagggctcggagatccaattcaagggagtaccatacacaaaaggaagaagaagaagttagtaatagaaagagagaaagacacagagagaaaaattctataaacacttcagaattaaaggattaccaattgtacctgtgatttggaatccatgcttgtaaactgctgatctagaagatctaatagtggaatcgagccaattttgaggcaagctcaaacgaggaagtacccaacaaaaattttggggaacctctttaaatctggtgctatatctctattgtttttctttgcttttatttctttatatgtttgtgtatctgcatttagagttctggttttgatttgggatgggaacaaggctggatcttgtgtattagcagccttcgagtttctttagaagaaactcgaagcgctgctagggtttggttcaattaggtcaggggagaagtgttttggggttcgagagagttctaaggattttgtttgggggttaaaatgacaatgttttgattgagtgaacttgtgtttgactcaggataaaaggcctgttatgtccttaatcaacttgattagtttatttgttgggtgtaggataaagtggtacaatcctacattggtatcaaagccaatcgaggcaacaaagttgcaacaaaaaatagggaagaaatcaatgaaggaacaagaaaactcagaacatcacgaataattctacatttcacataattacaagattaacattaggatatttctaaactcaatatctttacaattcttgatttaaatctttatatgcaaatatgagttccattaaaatggacaatgacaaatttgttggttttggtgtctatcgaatttggaggaagaaaattagagccttacttgcccaaaataaactactgatagttttaagtgatatctagttgaatggctagctgatacaacaaatgctcaacaagaagaactgcttgaaatagcaactggtttaataatttttataacttgtctgattccataatcaaactagttgataatgaagatacaccagcaaaaatatggaagaagttggaagaacaatttcaaaagaagtctttgatcaacaagatttatccaaaggaaagaatctttggttttaaaatgagtcattcaaagaatctggaacaaaacctagatgagttcttaaggttgcatattgagttggcaaactcaggggagaatgaggctttgagtgattagaatcaagcaatattataattctcaactcactacccaattcttacaaggaagtaaaaaaaataataaagtatggaagaattgagattactcttgaggaagtaatctcagcactaaagtccaaagacttggagattaaagtggaaagacctaaaaactcaaacggggatctaaatataagtagggaaaggtctacacaatagtccttagaaaaacagaggcagaagcactagcagatagaatctcaaaagggaaacatcaatcataacaaagaaagatcatattctaaaggctcatcactatggtaaactaggacatttcaaaagaaattttggggtctacttgttaattaagagacattgtcaagtctaattaataaataacataaataggaatttatatgataattaattatgattattaaataaatagttttcacatttataggattgaaattagaaaatatggaattattgaaagaaaagataaattgtttaaataaagtggcaaaattgtgtaactagtgagacccattaagtggccgaccactggaagggttttttgtctattattttattctttttttaatccatataattaaatcctaaaccctagttgaaatactataa

SEQ ID NO: 383579 - DNA, 3696 bp, Cannabis indica
gtaaggagttaattaattaatatgagatttaggattacctaaatatatttaatttaattaattataaaatataaataaataaacttaggattttccatctaaactaaacatagttctacactcacataatatactaatttaatatttcaattaattaattaatattaatattaatattaatatatagctgttgttttttacccaaaaatggattttttttgaacgattgaacgaacgagagttcagctatatatatacatattatatatatataaacacacagactatatatatagatcaaacccagaaaggaaagagagagaaagaggtatagagagagatgggaatggcgagagatgagaaagaggaagaagaagaagaaggagtagcaatggccaccgactttttctggtcttacactgatgaaccccatgcttctagacgccgtcagattctctccaaataccctcaaatcaaagacctttttggtcctgatccctttgctttactcaaggtatttatacattgtagatctgtgattaaagtttgaatttttaacatctgaatcgttctgcattgtggtttttggtggtgggtagatcttactttttcatggggtttgggttttgattttgatttgattgaattgagatgtgtttttctacttggcttgagttttactctttaggaatgaaattgattgtttttgttagaataataatgattagtgttggtaatgtgcttttccaaattatggttatccaaacatctgttaaaattatagatatattttaacttgctaaagagaatattgttaaagggccaacacttgaagtttgtgtgtaatttaatatcgggtcctatcagaacccctaaccatttgtaaagcgctacctatcagaacccctaaccatttgtaaagcgctaccttgggattctattggtaatttttgcaaaataacttcaagactaggtgtctagtacgatgttagtgtgtgttatgatagttagtttggttattttgggatgtaatgtgagaaaaaaaatagatttgtaaaagcttttgcaatttcatatcgggtcctataagaaccattaagtacttgtaagatgctattgctagcttgtggtggtgttgggcactactgatgactaataatcgagaatttcaataaggtgtcgagtatgttaatgtgtgttttgaaagatcattctacaaaagaattgtgcaaagtacccaaaaaattagctctttagccaaacacccttaatcatatattgtaaagggtccttggcaaaatggttgttttagtcactttgctttgaagaggctctttcgaagtttcacaaaaaattatcttttcgaaaaaagaagatcatcttagaaagtgatgtgaatctattttttttcatctctaactaatattgaattggtacttcttcctgttttaatgtggaagaagtattgtgatttgtacatacccaacaacacaaccatttttgtactattgcagttataacattcatgttgtggtagttggtactccttaatgaacctttaaaagtgtctttcaaacaaaattttcactcttgatgcagttcctaactattcatattttccaaaatttgagaccatgtcatgtcatgtacataaatgacttagaagatatgtaactatcattgaaatataaactttgagtgtccctaccaagttacctatcaacaactttcataggtctaggacttatttgttgaccatagaaagtataagagaacctgattagtttgtgtggtccttgtacttagtttcttatttgttttaaaactattttttggttgtaatcctaggtggcttaagtcattaatgacctttcttgattcgatattagaagtgtactgatttttcagtaataattgaattcttttgtgtgtaactataaaatatttgattccattcataaattttattccctatgagttttagtctcaatcaaactgtcatcttactttcgtgtttgttggaccccacaaattactttttactcaaattaaccaagcctaactttgtttgattttcgtttgcaatgatagacataaacttagtaggaatatctctcccactgaaaattcgatctggaaaagaacatgaaactgtagtaaaattatgagtaactctgttagtagaatgataaacaaaagagagtacaacaccgcttaattcagcaaaagactttcatcaatcatcaaccaacccaaatggagagatcaaaaaactttgtttgattttaataaaaaactagagaggaaattcattgattcttgtgtattgttgtctacctatactcattctaatatctaagaaaagtctatcattgccctttgaatttaatatatttccttggctatatttgttgttttcatgcagattggtgtggttgttctgcttcagctttgtacagcaatctccctcaacaatgcaggatggctaaagatacttgcaatcgcctacttcttcggttcatttctcaaccacaacctattcttagcaatccacgagctcagtcacaatctcgccttctcaactcccgtctacaatcgctggctaggcattttcgccaaccttccaattggggttcccatgtcagtcaccttccaaaagtaccacctcgaacaccatcgattccaaggagtagatggcattgacatggacatcccaagtcaaaccgaagcacacttagtcaccaatgtaatagctaaatccatctgggttctcttacaactcttcttctacgcgtttagaccactctttctcaaaccgaaaccacctggcttatgggaattcattaacttctcaatccaaatagctcttgatgttgccatggtttattttcggggatggaaatcgttggcttatctgatcttatccacatttgttggaggtggaatgcaccctatggctggtcacttcatctcagagcattatgtattcaatcctaaacaagagacatattcttattatggtccactgaatcttctgacatggagtgttggataccataatgaacaccatgattttccaaggattcctggtaacaaactccataaggtgaaggagattgcatcagagtactatgatggtttagactcatataaatcttggagccaagttatatatatgtatgttatggatcatacagttggaccctttagcagaatgaaaaggaaagcaaagaattctgagtaggtttggtttagtatttactttctttctctctttgattgtttctccttttgttttggttgattatatttacatataaatatgagttattttctaatatgagctttttattttcataaagatctgatttttattgtaatattctttgaaatagttgattttttttattgtaatattttttggggttccattgggttgtttttaatatcattttggacccttggtttcaaataattacaaatgaaccctttcgatttgtagactacttttagctaggcatatgggtgaaattaaatattggattctacgtgatttaatttaaataattattacgagaatatcgctagtcatttacaatgtaccatcttgtagtggtgtggtgttaggcactagtacctaatagactaagaatttatttggcacagcttttaaaaaaattgtgataaaaatgtgtt

SEQ ID NO: 383580 - DNA, 1284 bp, Cannabis indica
aatataggtatcaagccatttcaattctttaattactgattggagcaccctcagtacaaagcctctgctctttagaactggaataggcagataaataggagagggttgagatgtatcattggtaaattgaatggggtcaaacactgtttaaagagttttaatagaagggaaccgggggatattcctaagaagtttcaaattgctaaagaattggtaattaaggctcaatcaaatctagtggctaatactcttgatactgatctccaagttgcagaaaagtaggcccaaacttgttttttaatagccaaaaaaagatatgctagcttcttacaacaaactagcaaaatcacttggctcaaatttggtgatgaaaactctagtttttttcatgctagtatcaagaaaagaaaaatcagaacaaatcacatcctatatggaagatgggcagctcttcgactcttacgatcaagtcattcaacattttgtgtgtcatttcaggaacttcttaggaagaaaaagttcagacactcgaactattaatagtgactgcttggcttggaaaagttctcaatgtccggcaacaacttctgttgacaatgcccttctctaaaaaggatgtctgtgtatgctctttttagtatccattctagtaagagtctgagtccgaatgatggagcttaattttttttaaaggtccttttggttttgagattggagatgagatttctaatgctatcttggggtttttcaaagagggaaagattcctaatgatttgaatataactattattgctttgatacctaagatcgataccctttccttagcggtggactatagacccatagtctgaagtaacaccttgtaaaaatgtatttaaaaaatgatgtgatctcgattgagtgaagttttttccaacttgatccattgtaaccatgtgcttgcatcaaaaatagagtgttggtccacaacactctcctcttccaagatctcattaaaggttatacaagattgagtagctcggctagatgtctaataaaagtagatttaagcaaggcttatgataatgtggattggaattttgtggccaatcttctaaaaggtttgtgttttccccaaaagttcatcaattgggttttggctttcttatgtggtacatcttacacgcttatgttgaatggaagatgttagagattttataacaatggaagaaaatcaagatttattacaactctattgtaaaataatacaaggactaaaataagagattgattaaatatatgtta

SEQ ID NO: 383581 - DNA, 1366 bp, Cannabis indica
gtaactcgttcttcatcaactccttcccctgtaaaaatatattataatatttaatttttttaggaaaaaatacctttttaggtgcacattttaagaagaaaggtgcctatgaattccaatacaatcacggacgaattgcatttaatgcgcctgggagattttttgtagtagcataattgtgggcgcacgaggatgctgttttctgcatctatgaagaatttccaggcgcaaattatgacttttggagacgcaaatatgcgcctgcaaaacactcattttttgtagtgccagcactaatacactaatattttaaattctatttataactatgtattgcgtcatacatgggatttgaatcaggggacagccataagatctgtattgatttgaatcagtttgagtgtcacgatttgatccaactggagatctgtaatggcatttcttccagcaagatttgcttgcattttcactgataaatcagtaacggaattgtggtgttcaattcaagtctcgtgagagagtagaaaagcttgaacttcctcgaaggtgaggaagttgcttcttgaagttataccagacacgacagcatcgaattcaggcccaaggccattgaggagttgcagaattagatcttgtgttgtgataggggaaccaataatcaagctttgtcgacatattcagagattgagaggttgctcttgagaagatgtgagaactagcctttaagttgtaacagacgagctttggtttgacttgagaagcatttttcaagggcacgccatgcggtaaacgaagtgtggaagtggccacaaatgcaagaactggtttagacatagatgcacgaagccatgaaaggaggatctgatccttctttttccactgagcatattcaggattcgaagctcctgtaacaagatttgctgggggaacacatcggagaagaggatctgatccaggtcatgtccgatgaccgtgggaaccacctgagacttccaagaaaggaagttgttgcgatcatgtttcagagtgagagatgtcgtcaacgagttggagaacggattccaattgttgacgatttggttcagaggggcagcaggagcagtagtgtgaggattggaggtggaagactccatggacgctagtcaggggacaatgataccatgtagaagatgaagtgttaaagagtaaaaaaagaaaaaacagagaatagtaaaaggagccttaactcaactaagtaggccttagctttatttatattaatccagtctcatacaaacaagaattagaagcagaaaacaaccaactataactaacacaatataacagacaagttagttatttaggtgacatcagcaagaagtttgtt

SEQ ID NO: 383582 - DNA, 1061 bp, Cannabis indica
agaccaaatataataaataagttttgacatatggaagtttgaactttttatttttgaatttaattttttttctttcacctcattattatactaagaaaaaggttttaggtcatcgttgttttaaaccgtcgcctataatattactgtctgcttataagaccaacaattatgttaccgatgtaaaatgagatgaaataagtctcggtttgaaacaattaattattgaacattattaattgattgtttaaaattaacgttatagaagagcgttagttatgagcaaaaagtattacagtcgatttagaagcaacgataataaaaaaaaattaaaaaaaaaacattacaaccaaaaaacgaacttagatccaaaacacacgaaaccctaattaatcaataaacacaatatattatcaacaaaaaatagtatattcaatttataatccaaaaaaaaaatgaaacatccacgaactcaaaactgcagtgaatcgaaaacacaaaaaattacaaacaaaaaaagagatttcgttgtgagtgaaagagagaaatatatgaggattactcagttttttttttaaaaaaagtgatattatcatagttatcatataaaatctaaaattctaataaataaaatggaatcattcatattacaatttattaattacataaatgatgaaaataattaactagtaaatttgcctttttattttatttttatatgcagttaattagtcaaattcagatccttacaaaaaaaaaagtcaaaaattgagatggcaacattttgtcaacaaaatcacccattaattacatgtattaattacataaaatatgtgactattatataactataactatagataaaaacatagagtaatgcttaaaattaaatacacattttttaaatttaatattataactatataatatattagctaattaaaatttttaccaccaaactttgatatgtactaaattatgtttattgagttttaaagaccgttaaaaatttcccttaaactattgatattgttggatttgaggacttttgtctaattttagta

SEQ ID NO: 383583 - DNA, 3431 bp, Cannabis indica
ataagtgtaatctctttttctatataaatatatgtatatataaatatatatatatatataataaaaaaatgtagtctctttttattgtaatttatatatttatcatcttcttctttttttttaccctgtgatttgttattcaaatatttatttttccctaggaaattcattgttcttacaggagagatctcatggaaactcaagccagacaattaccaactaataatttatatgagaaactatagttccctgaagtacatcactaagtaccaccaaaggaagggggatttcaaaatttcagagcacttagaataatacaattaattttatgctgctaataaagttcaaattcatatacaataataatcaaagaagaaaaactcccctagcaaagacctcccccaaaaaaatgtaaatgaatataggcaaaaagaaaagttttaatttacctgataatagtaagagggcaaagaccacttctgcagttgggcaccattgtttctctaaaattgagattagagagattgaagtctaagtttaatgagacaaaacgtgtgcaattttttctctgctaatggggatagatagttggtttttgtctatcatgtcatctagaatagagagtatgtttagggaaaaaagaaaaaaagaaaaattgcatcaacatgatctcacaaaatcataaaataaaatttcatcaaatttatttacatagatacatttaatagacaaaaaattccagaaaaaacaataaatcaataaacaagcactatctaattttatcccacaaataaaccagaaagtagtagctacattccatagaattacactcttttattaaaaggaggtacataacccatatcctatatgctaagctatagattgacatggaaactttcttatacaaaaacctaaaaatacaagaaaaattaatgggcagttgataaatattcatcactatgtaacctaccatgaaatgttgagttgaatgtgattcaacatatatcacatatacaaaatataaaataaaagaaagggacagaagtatttatcaagttcttacatttttccttggttgtttcgttgaaattttcctacaagcatccagcagctataccagcccatattatagtgacttataagagttttaacaaaactacagagaatgtaaagtttaatttccataaccgttcgccttaaagactcatctttctatgcagatgtatgcacaagagtaaaatccctcatataaatttgaataaattaaaccaaaactaaaaaacacagcaaaaccataacattaaaaacaaattattcatacattaagggcatttgaaaaaaaatgaaatgtggaatcaatggctgcgaccattgcaaagatttcccctattccattttcattctataggttacaattacactacccttaattaatttatgaacaaaccccaccaacccaatcattgcatctgagtacccctttatcgaccctaaagtttagttttttttttcatatacaattaaaacttattaaagaataaaactcaagattatataactaccccacctcaagaagatgaagcagccttgatagccttctccaattcagattccaagtcactcgtctgattggtagaacaattcttcaaatctcttttaccattctcatctttagaagtctttttattcttcttccactgctcaaacccgctagtgctctcccctgaagacaactgcattaccttcccgccattatcactcccacctcgaaaatgtttgccagaagctccaaacttcattttctccaagctctgcttcatctcattattctctttctccaacaactccaaatcccttttcatccaaaaacacatacctttcaacaactccaaatcactcacagtactctcctcactctttttcttgctcttattcttattattcttctcctcttcactttcctcctcaactctctcaatcccaattttattcaaagtcaaacaaggcaatttcgatcccaaattcgagggtaaacccacaccccatctcatattcattgacacccgtttagtcaccggcaacagagtcttcgccattacagctatcccagtaaaaaagctatctttttcaggctccttccatgaaagagacctttcagacttaccctcatcagaatcaaccccaattttgccactacaaggctccaatttcagctcctgccatccagaagatcctccgggaacaaacccatctcctgacgcaccagaatccaaagggatatcccgaacgaaggcagacccaccagaaactcgatcgccgccattagggtttgagaaagtggtcttcctaagagagaaatttccgaactggggtttgaaatggagagagaaagagggattggttgaggaaaaattgaagtgggctttgaaaacgagaggggactggtctgctgatccgaataggccgagaccggacttgagggaaagagagaaaggtggggaaatggcggaggtgggagaataggtgaacttgatagaaggaccagatttgaagaaggatgagagagagaaagagaggtgagaagagggtgaggtggttgtggcggttggggttgtggagacggaggtgaggaatggttggttgaaaatggaaatgggtaccttggctgttagcagaggggtttggtgatgaaggagggtggtctggtcatggtggtcgccttggagcttaagagagagcttcatcacttctgcagagtttggtgaataggaaagaagaagcttaagaagccattgatgatgatggttgagcttgaggaagagagagaatagcttccaaaaataaatgatttttatttttttaacagaaaaattgggaaaatattttggttattttcttttcttgtaactaaaatataagctatattcctattcctcagcttcatgttgaaaagctgaattgtgatctcaagctggtactatgtgcattgttgtggttgtaaggaattattttggcagagtaattagagttcaggcagctcgggaagatttctcggatgctctgtgcggagaagctgcggcctgctgcttagctgtgtctgttgctttagatatcggatccaagtttgcgattgtggagaatgactcgaggatggttatcaatgctctcaatgggactgattttcattggtctattgaaaactatgtctcattttgtactaattcttctcctttatttattagttgtaatttttcttatattcgcagaacttgtaattttgccgctcataatgtggctagatgggctttgctcatcaggtgtttgggactatcctgatgtcctctatacctgacaatatattttgtaacgaccgagaggtctaactatttgattttatgataacaaatgcttttttctaaaaaaaaaaaaaa

SEQ ID NO: 383584 - DNA, 1405 bp, Cannabis indica
gtatggtatttagatttttttttcttttcgttagggttggtgtaaaactatttttggataccaattgcgtcaattttaaaccgataataataacattttgatttgttagttgaaaactgatgccaattagtaattgcatacacgtcaattctatcggatgcttttgccataaatgttgctccgaaacggacggttttcggttgtagtgtttactccttttataactcctgtgggaagaggtgtagtgtactatgaccatcgttttagatataatatgttgtaggtgtataaataatgtattaatatatattacttttaataggaatctttagagttacacaattacacttatgaaactagaatttggtcagattggagctatatatatattgactttgctacataccataccagtatcattatggcatttatggcagtctatgatcatcatgtgcaaacgaatcaagttgaaataaatcaaatatataaatttatgccttcatacctgtttctttttcatttattattacctatatatttcacgtaccattttctatgacaaagaaatgaaaaagtcagctacagcctacagtacagctgcagagaattagatataatttagaacaaagtcgtatatgtatcccaaaatttgggttgattttaagaattttcgtagtaggtttcttctttcaattccaatccccaaaatggcaacttgattcggaaaccatttaaatatttatatatatatataccattgacacgttcactagtgattactacaactctctccctctctatctatttatatatatctttccttataaaacttatcattataaacatacgtatcaagatacaaagaaagccgagagtagagagagagagctgggagagagtttattatcagttctatcactgaaaaaaaaaaatcatcatgtacgtgacaaaggctctgtctttgcttagaaggtgtcctgagttagtgagttcagcaccaaacgagggtccgagttctggttatctggttctcttcgaccaagaatgcgaaacgacaacatgttttggattgtgtaaagaaacgtcaatggagggcttgccgtttcctcagaacaaggatctatctgtaactcatacaacaagcaatggaaacaataacagcagccaaacctcttacgatcaagtggttttcattccagtgcttgatcaacctttgtcttccaatcgttactacgtcattcgccgccaaggaactcataaagggtattctttaaaggcttttttcgtaaatgtacaacaaaaacaaaaggaaaattttatttacaccccaaaattttctagaggcaccccattttaataaattttattttatataaaatttatatctttaattgtactaaatttt

SEQ ID NO: 383585 - DNA, 2091 bp, Cannabis indica
ttttttttttttttttgtgattcaacttttgtttttgtagaaaagtaaaataaaaaatgaaaaagaagaggggggttgctctactttttgggggtggtatggtggtggttgatgatgtatctaatcggaagccatgcctaattaaagaaagggtttttaatttattggcttcacgcgagtatgagtatgaggctggctgaggccaaggctgctaacaccgacccccacctaaattccaagcattcccacacaattataccttttctatttattttttcagatctacagtcaatctgttcacaattgccaatgcaaaatgtgggcttcaaattatacaaccatactcaaatgaaagagaccctttttaagaaataaattatgtatattaaaagaaatattgagtaaagagctactactcaacagttgaactaaaaattcaaataactaatattgacattaattagtaatgtatggtctacctattatcactacattgactcaagaagtgtgttttgtgagtgtattcccttttaaaataatggtttgtttgtttttccatatattctcttgttttttttccaccaatcttgccaaaccctatgtgctaatcactaaatcactaaaaagtcaaaaaagccactcacattttcattgttattattattattttaagggggaaaaaagcagtcttggatcttagtcatttacccggatccgaaaataatggcccgattgagtaaatttcgaggggtcggtcccttcaataataattatattaggcacaaaaaccattgttaaatcatggattgtgtcaaatgtcaatcactatatgcgtactactactagccagttagaccatagttttgcccaaacaaagaactcctttcggctcaaattatagaattacttaaaagtctctcgaagtttggtgatcatcaatatagaggcccgttcatatatatcctgttttagcactaattatattacagggagcataggctttttttaacgagtattagagctaaaacctttattttctgctccaataaatgagataaacctttttctattttagctagctatttgtttaccaaaatgtagctacaaattatggctaaaatattttataattattttataccttttacctctgttttttttaaagaattaattttttattttattattatttttttaatatttaattaataaaaataaatatataatacttttttggcttattaggatttttacccctcggactttgacatgtaccaaatcatgcgcccctgaacttttaaggtagttaaaaatgtcacatgaactattgagattgtctaatttaaggaattttatctaatataggaatttcggcagagattttgtaagtaaaaattgttcaccttttatacatgaaaaatatgggtatttataaacacatgtatggaagagggcattcccttcacccacctagggtttcttattcagcacgtctcattagctagactttacagcttggcgatctgactgttggtagataggaaacctcctcattgtgtggtgcacgactattgctatccaacttgcggagctaaacacccaaaggtttcaccttgcaaaattagtgtatatacaagttgttagataagaaggagctacagagcacgtactcacactaccaaggtctgacgcatgggacaagatttaatttggtgttagaagatatgcaaccgtcgggtttagctgcagattaggcatcagggagttccaagaacgtctggctaaggctttcccaaaccaaactaatttgctactatcctagagcacatgtgacttctactcccttctagtagaagcattattatgagaatcctagagtcctttccgccttcactagcaggaagagccttcgggtactacatcgcctttcgtaaccccgagaagcgatgggcatataataacaatgtgtaatctaatgtggcatctttccgtgattgccatgtacacttcattcgataacacagataatagttagctttaatgaagtaaaaaaatacaaataatacagttaagctagaacctaaccatctc

SEQ ID NO: 383586 - DNA, 1262 bp, Cannabis indica
acacatgacatatatatatatatagagtaatactattaaagaatatgtagaaaacttcatgagtggcctcaatttgatgccatattcttctttaatttattcatcgacaactactgttcacgaatagattttaccttcttgtttttaaatactatctatatggccttctttataagtgtttaaaagcatggtagctctagttaaggattaagtctcaatcccacctctaatatcaacatctatctatatatatatataaatatattaagaaaattataaatataattagtatcatcatggtgaagatcaaataccttgtttggctcttcttcataattatgatccttgcttcttcatgcaaatctgatgatcaagatcagaacaaacaacacaagtgtaagcatatatatcttattattatttgtcccatgttattatttcttcattattaataacaataataatctcctttttttgtagatgatgatgagaatggttctgaattatcaagaagagaaaagtactacaaccatattcatggtgatggtaaattgagtactattagaaaagcaaaggcagtgtatggtggatctaatgaccttgtgaggcgccctaagaacagccaaagtgcaccattaataatttcaagccctaaacaactctttcttcttggatttcttccctgtgttataatgttctttccactaatttgagactagctttttgggattatatatacatatatattatgtgtatatgtacttttatgatcactttgaaaatttgtatgatgaaagttgtcctttcccttgttctacacttttttattaattgcttatagtttcatgcaaccatatatgtgtaattaaatatatatgtgcaagtaatatataaatatatatgcccttaattgtaagtaatattatctctctcaattacttttttattttttatcgtgtgattaatttatagcctgatatatatatatattgcaatgaaaataattattgcagcaaaattttattcataataattgacaaaattatatatttaatttgaaactaaacactatataaaagtaatattatgggcattatatatagtcttgaattacacatatatcaattaactagcaaaaagctacgtgcaaggcacgtatactaaattttatgctagtttttctctatgttagttgaaagtgatacaatttaaaattaaagaaaaaatattattagttattaggtgagattattattatgtgt

SEQ ID NO: 383587 - DNA, 1950 bp, Cannabis indica
aaaaaaaaaaaaactattataactatggttatttaaataagaaataaggcttacagctcaaataaattaatgttgatgaggcacgtaaacatgatgaatgaaaatcatacgtatcccacgtggcttatgatgcgcacaacttgtttagaaataataacaaattaagcgcgaggaatattccaataattataatatattagtgtactcttagaataacttaaaaattgaaaaacgtttatgttgaagggagaaataagccaattaatatataattccatgaaagtatacataaaattagtgatacatatacatatggcacatgtgctttcggataccatcaaaacaaattgatgttaaaaaacagaaatgagctcctttaagttttaacggtgcatgtagctatagcttacggcatggatggttttctcttttttgaaatcaggcatggatggttttgaaagctgcgtatatatgtttcattgtacaaaactaattaacggtagaattcagtcattatatatacagattcagcccaaataagcgctatataaattatgcatatgatctattcaacgtttaccttgggtcctgggatggatggatctaaacctaattctgctgtattaaaatgttaaggttgtgtcattcgttcatctgatccttagcatgtggcttgacatgatcattgggcttaatgttttgggcttattgggcataagacacatactttaatgacccctttttttcatcttacactttggttttttttctaagtagagtagtgtagagtagccaataaccatggttgaatcattcaaatggcaacaacttttcaaatggtccttatccaccaaacatgataacaaacgcacctatatataatttttgcttttggaaatttaaagtgttataattatttttttttagaataaaaatcaaaatctgtttcctaatttttatttttattttttaaggaagagagtaagtaaattgagagattaaagaaagtgcggaaatatgatgatagaaaaaataaaatgagtattttttaaaagtgacaaaatatattataattacaaaatgtttaaataaattttaaaagtaatttattgttgtttttaaaatttaatttttaaaatattttattttttttaatttaaaaaattgaatattgtttaaataatgattaagtagaaaagaaaaaacaacaacaatttaagtagagagaacaattatgttggtggctaatatccatcacaacaggtgttttatgcattatatgaggtgatgattggggtccacttgatctacaatattaattaaactacgaacatattattggtcgatcgcacatattattaacaaaaaaatttataattaaaatatttcttggtcttatcttggctagaatatacatcaatattttccaacaagtccaacaagtaatactaaagaacaggaatttcgcctaattattagatagccatttatgacaaaattattatataatatgaaaaaaaatatataaataaaaaagtattgccatatggccaagcaaagacagctatgcgtaatgttcgtgacaaatgtttgtttattcgctccaaattactataaattggtgctcaaactaagtgtttgatgtactaagctaattaacatttatagttatcaaacaactatatagagtttccatctttaatttctctgtttgagtaattaaaatggcaagtcaaaaggttttaatatgtttcgctttacaattgatttttatattctcagtccttcaccacacagcaaacgctcagggattgaaagttgggttctataaaaatacatgcccaaaagcagaggcaattgtagcacaaatcacacacgatactgtgaaagttgcacccacattggctgcccctttgatgagaatgcattatcatgattgttttgttaggg

SEQ ID NO: 383588 - DNA, 2011 bp, Cannabis indica
cacactcccctctcaatatctccatatctctccattcctcctttttacctcaatctctcctttttctattattccctcactcaaacaccctcccaagtcactacctcatgccctcatctaaacaagggagctcacatagatccaacactaagctaaattttctataagtgtaatacttgcatcatgagtgtaagttataaaaagagagatgccaaaggaatgtacaacaaagaataaagtcgtcaaagcatgcacatctttgaggaagaagtggttgtacgacaagtacaagtagtgaagacactatttattggagtactaattgaaactcaaccaccacatctccactatactcatatgatgcactactcttcatggtacataaaaaattttgtcctccaacttttaggaccgcttatattttagagtcattagagctccctataaatattcttctattccattgaagaaggggttgaaaaatcatttcttgtaagaagagctctaatattattttactccattgatgactgtgttcttaacttttcttaaactagttttcatactcagttctttgcatttgattgtataactaaagtttaatttacaaattcttactgtcaacagaagcatgaggtcattttctatatatatataaactaattggacacaagtgacaaaccccaactgatatattgaagtaatatataatatattatcctattttttaaaataaataatttaatttttagaaaaacaaaaaatgttttctggtgcgagaaggcgcacagtaaagagctcctcattagtcatgcgcatgccacttgcatagtgcaccaatgaggcacacaatataaacctctcctataaatgttttattatgcatagtaaataatttaaagagtatattggggtctaaagctttccaccaacataaagaattcttaatatatctactatttttgtaatttcctattattaattaaatatatacaaaaatgaaaaaaaaaattacaaaaatacagttgtgaaattttaaatatttttacgatttttacgattttatttacagaatatacggtctttttatgctgtactcttattaatttgttgttaattttttgttaataaatttgtatgttattttttgttgttatttggatattattttcttattagttttatgtagttttttttattattttcatattgtttttatgaaaaaaaaaacgtaaaaatataaaaaaaaatctttaaacataaaattataattttttttataaaaatgatacattatgtaataatcctttaataataatgaaagagacttcgaagttccaataattacatacctaatatataagttgtacagattaattaatatatttatatatataggtaacatataaggcataggaacatgtccaatttcaaaggaaagtcactagaaatttcctcaaagtaatattttcaagatatattaattgaaagtatgttttatatatgcaaagttgccattaattatatttttgttaatatataataatcatagagtactgaaaagacatatggattaatttggactgaatcaaattctcacttttaccatcttatggagctatactgagtaatatattctagtaaaaaattatataactcttcaattgtagtatcataaactatatatatgtatacagaatattatatggatatatctaaatagaatataacgatgggatgatcattattagaattattagtgaatgggacaaagagagagaaagggacattaaattttagtttttattgcttgacatatttgatatatcgaagacaagaatttatatcatgatcatgacaatgatgaagatatatatatataggcagctgattttgtgcccatatatgcaaaacacggattggaatccgttgtacggcaggggggccccaccgtacttttaaatgtgttttaaatttttgaaatgtaagtggtaaccggttgttgtaggtg

SEQ ID NO: 383589 - DNA, 1397 bp, Cannabis indica
aaagctatatattgtaatttaaattgagagtaatagttaggtttaatacattggttatttgtagttttataaagaatgtaactattatatggtatatataattaatgttgtaatgttatctataaattttgagtttaaaaaattaaatttatgattatagtttgtatgcttaaaattaaataaaaatatattttaagtttccactattttaagttttagaaaacgataagattgcttttaaatcctatccctatcagagcgataagaaacgtgtaatttgaaaataaaatattttactcaaacaaaccagcaccacgaattatttaattatataaatgcattattttcattgattacattacaaatttctaaatacattattttcaattatttgtgtgagatattttgttccaaactaataaatgcacacacataataattattcgacaaataaacccttataaattagataattttgtccaaaaatgtgaatgagtaatttgacataataatgtgtgtggaatatatatactacaagctttgactctatctctctttatattttatatttatattatatatgtacgtattaatttaattaatacaaacccacttagaaaacgaactttgataacaaatagctaaaagaacttgagttattacaaaaacataagtaattatataatacactaaagtcatccaaaacatcatcacaaaacgacagtgttttatccataacatctacttgccttgtccacatattatatacaatagaattttgcaaaagtaccccctaactttactttatttacactttgttgttgaattctttcaattattttcattaacataataacatgataattggtactcataattaaactacctcatttatgaataatactatttcaaactttgaattaagatcgttagatgttgatttgtgtgaccccacactatttaattaattaaataatttaaaaccctaactacacacgtgtgagtggcacgcttacatgggcgctaaatctccatgtacgtacgtacgtaacgttcccatataattttttttcgttaattaattaatctttttattaataaaaataagagtacgtataatgtgaaaccaacaaaatgtatacatatatatagattatataataatgacatcattggagtttaaacttgcgtaattaaatagtaaattaaagagtcgtattaataacactacaactaattaatacatattttattatataaaaataaatattaaagatactatataatataagagtctagaaaaacaataatgttaatattattaaaaagttacaaatccaattagttttaactaaccttaagtcactacaaactccatagcatggatccatgtggcc

SEQ ID NO: 383590 - DNA, 1322 bp, Cannabis indica
ttaaactcaagctactttggggaaagaataattttcaacattgtacactttgcaggctcaagactcaagaggtgtcacctctacttttttttttcttttgttcaaacattcacctttctctgacttcttccacactcactaagtttgcatagccaacctttttcctcaacatttctgccaagccagctgcatcaacaattccctctccaattacttctatttgatttttgctttcccccttgaaagctactgaggtaacacctaaaaacaatacaaagaaacacaaagataagaacaaaaacaggccaatcatgtctttctttctctccattgataagaatggatgaatctaatttgaatttcttttaaattaaatatgtttctcaagagatgatagggacctttcttcccaactgctatcgccaaggccttggaccgacatttcttgcatttcatcttcacctcaatgattactttttgctgcaaacattcattgataaatacatttgaggaatctttgactccaaattatttttgaatatgatagacagaagaagatgagcatcaaactgaataaagaaatttaatatatatagttttttaaaaaatgaagttagtttaatcataccatcatttttcaggcccgccaaaaaaaaaatgttgttattcctctgtagactgctttatgcaactgaaatgtaatggttaggactttctgcacaatgaaaactgaatgacattatattttatatggttcgaacttcgaagacttgtaacattacaagttgttaaacatgtgattgttgtttgttaataataggctaagaacaaagtttttgatccactatttctgggttttgcaatttattatactctgtcaaattacatgccatggtagttttttctaagttttttcttagaagtcaacaatacttgaattaaatagtaagtaccgagtcaatattattcaaatacgaaattcttctttctttgtaaagaatccctgatacagcgaaaattgtaatagtgaagaggtgtaagtcaaatgctttgaagtaatttgagtactttaaaaagtgcaagtaatcttcacatgattcttgttcatgaagtcttaaagaatgagctgactattcacttattgttattttatcatgttatgtgccaattgatcatattaatattatttttattattattatattttctgccaagcttcttaaatgtcaaagttacaaaaaataaaaaataaatgtcaatgttatataattatgattaaatttttttttattttagtaatatatagagtcaaagtaactttt

SEQ ID NO: 383591 - DNA, 3138 bp, Cannabis indica
aaacacaaaaaataagtattttttttaatttatctctaatattttatcgtaaatttacctattataataacaagcacctagctattggggacttcatgtgaaacctctaggttgtactttgatcaaaccttcaacacgtaattgaaccaatttaatttgcaacatgacattattttctataatatttgttactttgtatgcttgcctatttaatttgcaatatgtcttgccttagtcaaaaaaaaaaaaaaaaaaaggaaaaaaagacaatattacatattatatttaataacatattttaactttagtattagatcccatttcaaaaaaaaaaactttagtattagatccaaattttgtaaaggattgtgcatattattgtaaatgcctttcgataatccatgattctttagcagtaaaaaacataccaggccaaattaataattcagagttattaattagtaactgcattaattctatatgtaaaaattgttcaaaaagaaatatcaaattacaaagtaataaaaaaaactatatgtatggttaatcaattaagagtagtagaaggaccaagtagaatatccttgtaaggagttgggacagggactggagatggtgggaatatattttgggttggccattatcacgaggactagtttgccttcttctcctcctgtggctttgtcgatctcttcttcttctaagatgagtggaacttgtccatctctttcttggaacaacctctcttgtgctcctcctcttagtttctccaatcgaattcggccaccgtcgctactgctctgcatatgaaacactttaaccacattcatcaacccccattacaagaaacaagctcccaaatatgctcacccaaatccacctcctcccctgaaatttatattgtaaattataactcatcagtacttttatccataaaatagtatgttaacatatattaatggggagggattgagggggtactgaccagtagttggagaccatggaagagttgtccagcaacagcatgctcacgagcgttgagaatggaggcaactgtgagtaaaatgctgcctatcaagaaaggaatgtggacactttgttgtaagatttggacatgtccatcggctctctcgtacacttggcatgagttgtgaattgatcccactacccataaaactggccctgctattaacatattcattccatgcttttccatcttcatgtacctataacccttctcttcctacatatatgcatatacaagtgtcatattcatcatcaaatttatataattaattcaattaggataaagccataatgtggaagttaatgtaaattttcgtattttgtcttcttttattgtagtagatttattattgtattggacaatgatatgatatgatatgaccatggaaaatggttaaggtgccattttaaaatggcaatattatattatctttctaacatatattagagaggtaagattgctattttatttgcaaaatatttttttttgactttgggtcttgggtcttgaattagagagtttttttttttttcaatctgatatgatgttagaatataaaaaaatcaattaacaatcactacaatacgttggcaaaaggtaaaaattttaacccgccttgaaaaaatcatttttggcaacgcttttcattttgtgttagcaaaaatttttaatatcaaaaaaatgtactggcaaaagtgatgattaacgactccatttactttcaaacgacccttgatcatcttcaacatcaatatatataataactaacacacagccacaaataaatagctagtgaaaaataaaactacatatattaattactgttaaattattacgtacctgaagaaaaagaaagagaattcccaagaagaggagaatggaaccgattgcttgaacaagagggacaaagaactcaacgagaaagagctgtacatcgtactccattaaggagaatcggtaatcgtaggaagcaaggtgggcgagggcgtcgtggaagttgatggtggcgattaggactaaggcaatgagcaataggaccagaccagacttgggttcgcccgagagctgagccacgaacccacccagaagcaccactgttgcgaacaggtacagcccagcgtttatgtactctgctctgttcttagatatcctcggtccgtacactcggctctcacgagccgaagctagctttaccattttctctctctctctctcttctttttgttttttgtagagattcaaagttcgatcgagtgaaagaaagagagaattggtcaaatactagaaggaagaaggagaaggatgagagagaaattaaatgaaatttgagttaaatgcgggtacgtgtccttttgcatggagttcaagtttggatttgctgaacacgtggcattatttagtgtgtatgtaaattattatatataaaaaattatttggttgttgtcattatatgttattaaaagattgatttataaacgtggtgatttaggcactaatttatattttatcaactaatttactgttataaaaataattcacacatttatttatattttgagatacagaattagcgttgttacttttctaattcagttgctatcatattgagtttttaacaaactatctattggcattttcacaatcacatcaacgtagtttgttgagtaatgctttgctttggttgtgaaaatgccaaagagagatattgtggagtggacacagggccaaaatacgtcttaggaaaaaagtaaatttgtgggttcttattaaaagttaattttcttttatgtagcgctaagataggtagattctaggcacggatgtaatctaaggttggtctgttagacatttatatatataaactgaaatgtatatgtttaagtattaagtgcggaattaatcaaacatatatacactatgaataaggatcgaaatacctccagccattgaatcttgagcttcaaacccacataagctttgatctgcaaaggaaattgactaccatgggtaatcgggcttcctcgctctctcaactctctttagatggaatttgctgttatgaacagaatgagtgaggagctcggggaccgagaccctatatttataggtga

SEQ ID NO: 383592 - DNA, 852 bp, Cannabis indica
tgttcataattttcgtaacacctcctcacgacccaagaaaatggagtccaagctggtctagtaatacttaagggagaaactctgccagaaggccatagccaaaaagtgctcgcagacagtagactccctttgggaggagaagaaggcgaagtcagccaccactgatctgcgggaaaagtttactaggagaatgaaagagttagacaaagagatggaagccctatgatggagaatatcctcaactgcatctgaagataattgggaagaggacgactttgacgaggagtcccctttcttaagggagattcaagcggagcccttgcccataaatttcaaataacctaatatggtcccgtatgaatgtttgacaaacctaaaataccacctggacgccttcaacgagataacgtaaatgaagagggtcacaagcaaagcgaggtgctagtgttttgcggtgatgctcaagggggcagcatacaagtggttcaaaaggttggcgcccagatccatcacgtcttggaagtaattcattgatgaattcttggcccaacactatgcgtcctaggaatatactatccctagaatgagcctggaaaatatcaagcaaggagagactgagagccttaagagctacatccagtgcttcaatgctgaagcagccagggtaggaaggctgacaaaagatgagcacaagatggacatcgcggcaggcatccgtccaaagagtaagttgtgtaacaacaaggttaaaagaaaaaaattggaggacctagaagatttacacgaaagggccaaaaaatacatccaggtcgaagatgggcacgaaaatctcaccaagggaaagagcgagcc

SEQ ID NO: 383593 - DNA, 3666 bp, Cannabis indica
atatataatatatgtgcttatttgaagtggtcacatcataagtagttttttttttttttttgagatggaatgacccaagagtgattacaaaggcatggggtaggggtcatagccattccaacaccaagtgttatctaatcctatagccatttgtgccaagttgtgcgcgcctgagttcccttgtcgacgtatatgacgaagggagacagtgggaaaagaagataacacctctagaattgaatttacaatagctccatagctcgatagaatactatcatcgtagagctttaagtaaagcccatccttctgcagtttttggtggcatctgtccttgacgactcatagctgtagcagctactacttgtcccaacgaatctcgaactaaagcgcccatgcatgttttgcctctttttccagaaacagctccgtccacattgagtttaaggttgcctgcagctggaggtgaccattgtgtttccttctgatggtcgggtttctgagactggatcatgttgtatttttaagattgctggtaaaaggccaagtattcttctgcttcctactgaatcctgctagggttcccacactggtacctaaaaacaaatgcattcctgctattccaacacttccacagcatacaaattaaaaggttaaaaaaagattcaggtggaaaacttgtctgaatatataaaagtatatctagcacatgtgaacctcttaaattattcagagcgtgtataaagggcttacttgaccacacctttttcatatccttacaatcaaacaaaacatgtttgacagactcaaagtatatgtgacaacgagagcaaatgggagattggagacattttctattataaaggttttcactagtaggtacggtattatgagacagacgatagatgaagtgttttattttagggggagtatgaaggccctaaagggatttccaccagcgtctaagggtgtcagaattggaagaggagggttgggctatgtatgtggaggtttttgcaacatgataaccggttttgactgagtaatggcccgagggggtgtgctgccaaaagtaagtgtcaacttggctattattaggagggggagagagaggatctcactgataatgtcctgcgggaagtgtctatggagaagggggatgttccagtcaccatttgagagtagtagatcagagacatgggtaagatgacttgggagggagatggggagaaaacgacaattcagaatccaatagtcttctagaattttagtggtatctccattaccaattcttttacagagaccaacttttaggagggacttaccctaatgtaagctctgccaaacatatgaaggctagtggcctaaggaggattccaaaaaagtagaccgaggaaagtatttggccttgaatagtgtagcaaggagggatgattggtttgtttggattctccatgcttgtttagcaaacatggctttgttgaaaggtttcagcgatctgaaccctagtcctcctatgctctttgaattgcaaagggatctccaatatttccaatgaagttttcgttctccatccttagcaccccaccaaaaattagccatttctttctcaacaaaactgtagaaagaatcaggaagtttaaaaacagacattgcataggtgggtatagcttggataacactttaagaaggatttccttttccccttttgaaagaaatttaccttgccattttgacagataagaccaaattccgttcttgagggggttgaaggaatgactttttgatctaccaaaacattggggaaatctgagatacttgtccatatgattggtagtaggtatctgtaggtagtcttggatgagggtctggtacgtgaggctagtatttggggaaaaaagatggaggatttctgaaaattaacaagttgccctgatgtattctgatactgggctagggcctctttgatagcattgcaagcttggatattcgatctacaaaatagaaggctatcatcagcgaagaggagatgagaaatctttggtgcagtgcgagtaagttttagaccaaaagcatcttcagtgagctcatcgtgctttaaaatagatgaaagacccttagagcaaagaaggaagagatacggcgaaagagggtttccttgcctaattcccctagagggaaccacatgccccaaagaatgaccatttaggttgaacttgaaggtagcagtggttaggcatttcatgattaaggaagtgaatttgggagtgaatccaaacttaaccatgattttgctcagaaagatccattccactctatcaaaggctttagccatatctaacttctgtttttaatagagtgtaagatttcttgagccatgaggatgttgtctgatatgaggcgaccctttagaaaagcactttagttgggagagattagggggttaaggactaacttgagtctgttagctaggactttagagataattttgtaaacaatagtgcacaagcttataggtctataatccttgagggtgacaggatttttcatattatgaatcaaggtgacaagagtggtgttgaagtgggaaatatcagaaagattattgagaaaatttaggacagcctcagtgacatctttccccaccacatgcaaattctttttataaaattgattattgaaaccatcaatacctggggatttatcaggggccatttgaaaaagggcctttttaacctcagtgggagagaagtcttcatctaaaatttcataatgtgatggatcaattctaggaaaagagccagagagggcagcatcaatgtcagcttcctgagggcactgagaggtgaaaagatcaaaatagtatgactcaatgagtgaaagaattgaattagtgtcgtcgaggaaaacaccatcctcagtagtaagggaatttatatgattggcccgtttcctgtttgaagtcgacttatgaaagaaacgagtgtttttatctccagagtggagccattgtacgcgagatcgttacttccagtaagtttcttctttaaaaagaagagtgtcaaggtttgcttaaaacagcttttgtcgagacagagtctcgggggaactgtcattcaagtttttggcatgttcaagctctttttgggctttccaaattctttgttggaaaccaaagaaagctttgttcttccagtttgagagaaactgggcacaagccaattgggtagattggagagtttggatgggagaggcattgagagcattagatccccaagattttaacaaaacatcattctaggtgggttcagtgagccaaacgtttttgaaaaggaaccgtttagtcttgttgtcttgggttgggggctgatgagggctattcaagaggatttgaatggctctgtgatccaagccaaaaaatccaagtgattaaggatgttatttgggtggtgcatatgccatagagcatttccaaccgcccagtccagcctctcatgactggtactactaccctgattattattagtccacgtcatacggggtccattgggacttaatgttgggttttatgccgtaaataaaactccatttcaatgtaatccattttattcaacatcaataaagaaacagaagtatttttcattcatttgtgtatgttttggttcatct

SEQ ID NO: 383594 - DNA, 1065 bp, Cannabis indica
taaaaaaaaaaattgaaatcaattttcatagattataaatgtatattttatttgaaagtaaatgttgaagagttattatttaaatgtgatacatattatatatataatgacaactcttatcaccaaatcaacatgttatatatgatcatgaatgaatccatgaatatgcacgtgctaacagacttaagtgttatatttatttaacaaaataattatgaagtgctgcactcatgcaatttcgtgaaataatatatatagttaaatattttataacttccactaattaatagaatctattactgtacaataatttaattgttttgatatcatcagctccacagatatacgtacactatactccctttttgtctccaattatttattctggtcttccaaaagtaacaacccaacttgcttattatttaaagaaaaaaaaacagtaaattatatttattaatatcaataaaagatacaacaatttatatactatatacaattaataaagaaatatacataaattcagttaattaatatttgttctcaaacaattaggaaatgaaaatttggcatcagtacgtacttgtagttcttacctggtgctatggtatactgtcactatatgattattttatgattgtgtggtttgcagtgataacaaattctttgatatttctgttagaatattctttaaaatattgttatgtaatgattttagtatgagatgtcatatctagaatttttttataattttctttatatataaattcaatagtagccaacctcacaaaaattgaactgagctttttcatttattgagtatattcgtgtaaacctaattttttttttatattttgaaatttggtatcagagcattctacatcggtggtgtattaacctcgctccatggctaaccacactcctccccgtgatagtcaagacgactcagttgcaaagataacttctagtgcgattgctcagccctcaactccatccatgacagttcttggacccagggtcggccctaggctaaggcggactaggcccgtgttgggttttgtgccctaa

SEQ ID NO: 383595 - DNA, 1962 bp, Cannabis indica
taataataatataattaaactattaattttccattttcaatattttatcttaatgcatgaaaacattataattatgagagagtactacatatattatatatagtggtaagtatataacaaaattgatagtaggacactatatgaaatatttgtagatataaaagaaatgctaaattatataaatgaatacatatttaatactccattacaaatgctcttaacacttaataatgaaagtatatgcatgaaaaaaattatattgttacataccgtaacagaaaagttgccttgcacaatcacattggttgaaaacattcgatcgactgaagaagcagcaacacaaagagaccatggctcggacgttggtgacaagacctggattcggtccatcatttccaccagcaaaaacaacactaactccaagttgcatggcatggaatgagccaatggaattacttgattcaaatagctcaggcaacggcggagatgccccaattgaggctgagatcacgtgcacaccatcatgcaaagcgtcatcgaaggctgccaaaacgtcagcctcagtgcattgtccaacatagtcctttccccaacatgccttgtagatagccaaacgtgccctaggggcaccacctcttgctgtgcctaaacctaaccctaacaaacttgcttcttcaactatggaccccacagcgatggatgctgtgtgggtcccgtgtccaagaaaatctctggctgagcggtactcagggtttccactcttgtttaaagagccataggtattttcaaagccttggagatagtaacgagctccgataagcttattgttacatgctttttctggattaaactgatctcctctaacgcattttcctttccatgttgaagggattggattcattccagtctcttcttggaaacttttagattctggccatacacctgtctctcagaacaattgctaaaggggttagagtataatatgcaatagtaattatcagggccgaccctgagtaataatgggcccaaatttttttttagtgtggagtattattggatctctttctataaaatttatcaaaaatattatttttttcaatgtaaaaaagtaaattatataaaaaatttggaccctgagtttgagtggaccctagctaggcacgggcctaacccgccttagcctaggaccgagcctagtaactatatggtgttcacattttcatatttaaattgtttggttacaaatacctttaataatttataatgtatgagtgatattattatttgactgaaaaacacttaaaacaataagaaaagtgattacttcacaaataaaaaataataagaaaacatatttttttttttacaaatttatatttttacattattttaataaatattttacaaaaatatgaaggattgttttttcgtacgttattttcatattgctattacaaaatgcaacatgaaaacaatgttttttttttcctgaaaaaaatctgtataaattagaattcatacaaatatatatatatatatataaaaaaatctttaaaaatatattaaaaaaaagtccatgtactctgtaaattttcctaaaagaaaatgagaattatgagagtagatattcctactattttatgtttttagtacttaaagaaattataagtcaaaataaaaaaaattataatttttcaagtatcaaaaataattattaaaaaatccatatgattttcttacatgtctaatttttttcatataaacatcattaaaaattctcttacaaaatgagattttaattaggttataaattatagttgatagttactttacctgaatcaataactccaacaataatattttcaccataggcaagctgcaaaggagtgatggcttctttattattattattattaattattattattattattattattattattattatcattattatta

SEQ ID NO: 383596 - DNA, 2033 bp, Cannabis indica
tataacaagctgggcatgattaagatctatgctccagcttcagggagagtgttagaatattagctatatattagttgtaaaaattagggtaacttctattagtagttttctatttgtatttaattgtttcccatttagtctcccaactttatatataaatacgattctataaaatacaatgtataattttgttcaccattctttataatatttatatgtatacactatatgttttttattttataaaaatttatttttatttatttatttttaatttaaattacctttttaaatatcttaaaactaattttaataaagttctatgtgtatatttgtgcatacatgtacacatgtctatttggcagttaatacttttagatagatggaaaagtaaaaactaaacagaataataatttgaagggttttacaactaaaatatcaggtcgtgaggttaagtgtcacaaatagtgtagttcagataattttactaccaataacccattatacatttattgatatcccattgattttgttttaggtaatgatatatgatacagagattttgtttttacatatgtcatagtgtgaactttggtctgtctttagcttttgtggttacattctatattagaatttacagtttaaaaaattatcaattacaatcttataatacaccaggtcaagtgtaattatggaaaaaagaagaaaaagaaaaaagaaaagaaaagtctccttcccacattgtcacattcaagtgggatttgtgaatgaaggataggttggcattgacattgacattgacattgacattggttttcaattgtcttttattattactattcaaacattgatttttatcatatatattaattgtacatatgtagagagagatgtggtttagaacattctgatgtatgaaggaagatatttgtattttgttataaggataaaaaatgatcacatgctcatgtgggcctacatattgttgtttgttctcttcttttagaatcaaaactcttcttgtttgatttttttagtctttgtttgagtagaattagggtagcaaaatctcgagatatttgttgttggtgttggtgttggtgttggtgttggtgtaagagaaatacatatacattgtattgtattgtgtgtatatattattaaattcttcttagtattgttagtattgttgtgacatgattcttggttatatgattagagtgtgaatatgtatgtgtataatatggagagataagacttttttttataggaccgagatgtaaaataactttaaatttaaaaactaagtgaataaatattttttcttcttttcaaaatttagtaaaataactaaatataataaataagctaataaaaattataaaaatacatataatacatattaattttgttttttttaaaaaaatatattataattaaattaagttatataaaaattttagtattacatattaatatattgtaaaaaaacaaataaatatattagataattaaatatatacagcagtatttgatatattgtatcactataaaaattaatatattgaagtaataaaattttatatcacacagaaattataactaaaactagtatattaatactgaaaaaatatatatcatgctaacaaaattatatataccactatataaaatatgtataccatacaaatttttttttatataatcattatgtataataaaatagaaattaaataaaatagaaataaatgataaactatacacaacaaaaaatatataccatacaacaaaacatatacatatattaaaaaataaaacaaaatgatatactatatttaacaatattacatacaactataaaataattatacatacttacaaaattatataccacttttatataataataaaataaaaacctaaatatgatctaaaataaaaatgatatactatataataaaacttatataccatataacaaaaaataatatatcttacaaaaataatatataataataacaaataaaaaataa

SEQ ID NO: 383597 - DNA, 3728 bp, Cannabis indica
gtcgcgactaggaaaaagggtcgtgactagcattatgcctggcgcgactactgactcccattgagcagctttggccaatttttcactagtttgccccgtattttcgtcaattgactaaatttgaactctaacgcaccgagaaccagaaacaaggaaaattaagcgtaaaaccgctccaaaagacaataataatcaagaaaatgcttatctataagacccgagacataggctaaaaatagcctaacacctctttgtcattgagatattttctgcgaatttctttggatatactattcaatcttaggacttctcaaaatatcgcgtaactctcatcaacttcagttgcaaagctttcgccatgtgaaaacccatcttcgaatagtaagtgattcattcatttctctctggtcttttctttttcctgagttatgatccttatctattaattaattgcatatttgtttgcttcgtttggttttagtaatttcggtttaattttttgggtaatttttagggtttaatcaaagtaaaacttaagttgatcgtatttataagtttctggttttgataaatttcctccaggaattgggatttctcattttgtaaaaatttcccaatcttttattgaagtttattctccaaaattcttaaaaatagagtgtcctaaagaataagccctcccattcaaacccagaacttttaaaccttaatctaaattggagataaatgatgcaaaaattagggaccatttaataaaaatcaatcaagatgaagttgctagtcgccataggcattttcttcaagaggtaaccgagagtaaacttcagttttttgcgagatgcagcctgacctgaacctttatctttatcttctattcctttggctaaatcactatttttacccagagtcactattactttttcaccaccttgattttgaaatcatgtctaccaagtctcgtaagtcaaagactccacaggaccctaatgtcacctttgaggccgaactcattgaatccaaggtcagaaccattggagggtatgtggacgtgttttaaagtcctgcaacataaagcaaaggcgaggttgtcatatcagatctgttgctctaggggagtttagttgcttccccctagaaagagttatttgtgaggagtgtggtggtacaagtactagtggctcgtctagaataggcgcttggagctcgagcacatcaaggctggagcagttctccacttgagagattacttaaaggagttcattaactattttggaatcgccccctttcagttggttccaatttcctacagaattcttgcgagtctaaaggttctgtatcacattttaggatgggagtgctccactcctctaaaaatagtgtatttctactccgttaaagcagttcctgcgaggaagcgatgtgcaaggggcttttattatctcggaacccatacaaatgacaataaaattattgtgaggctgccaaataagactgagtttaaggagaattttttctggacaactagtctttctcctatcaacacaactacattccgcataatacgtaagtaaactttgtctcaaaaaacttagttttgagtggttttcctatttatggctttgagctcgctaacttatttcatttattgtgttgacaacaatttctaagagaccaattcccactcctcagatggccgatcatcgtaaaatcctgttacgtcttcctttcggaatgcgatcgtcagatttcctcttaaatgaagccaatcttaagactgatggcctttttgccttggacgagtacacttgtgattaaaagtttccaaagtactcttcgtgggagaaggtccaagttccagccgacaaagagagccaggattacgttgctcgcatacagtatctcaagagaatagcccctcgggaagctaaagaatgagcctcccaagataatcaatgtggatggtcacccactgtgtttagggtagaacgtactttgttagtaacttttaaagatagtcaatataaattttatacttggaaccctttcctcatagatcgcataaccctaggtttgatagttggcacccaagaattttcatccaacttagttgtactagctcatactatgggattgtcgagaagtatgggaccaacttcgataaggcgagccacctagattcagattgggatttagatccaattaacccttacgacatattcatgatcatagaatctagggaatttagtgaatactatagtcctccttcttcatcatctgatgaatatggtaaccttcttcaagtgggactttgttccccattttctttaatttattttgattaagtgttgatgtatttcctatgtctcgtagatatggatcttgacttgaagaatatgtttggtagcccccaacttgttgacaaaagggccaaaaagtgagctgcccatgatgccttgggttctacaaaaaatccaaaagaactaaaataactgccaacaagaagaagtcctcaagccaactcaccatcaagccggcaaaatctccagagaaggtggcacctactgtggtgagcgccaacaaataacctactaggtcagtacacaaagtaaatttttctagttctcgctcagagatggttcttctcgagccctcttgccctttgcccctagaagccaggacaaaaggttcacatatctgctcgctacatgctacaaacgactggcgacgttatcaaacctttgagtccagcaattgggatctacttacaaagggtaattttgagggtcttgcgcaaagaagttacgaccttatgcatcgggttagtctcttttctcttcttgttccttttccttctcgtctttatacctctgtcttatttgtatgtctttttcttgcaggcatctcttctttcctttgctactcaacatagaggacttcagcgaattgaaatgctcgagactgaactttgccagactagagagcatagggacacgatggccaaaaaatggaacaacttaaaatctgaactttctcgcgtcagggaggaagctgaaaagcaacgtcaagttgatcagaagaagaataaagagcttgaggattccatcaagaccatctaggccgaggttgataaaaagcttgaggatgccaaagttgacaccaaaaatagggtcaacagcattgctaggagaaccatttatcaaacctggtcagccaatcctgacatggacttcagctttttgggccaaggaactgaagatatgcttgctttttgcgagaagaccagaagagaagaggtcggcgaggaagaagagattaggcgaaccaagaagatccatccaagtctcccactatgtagactttttttattattatatttagaaagatggccttttggtcgagacagtggtttgccccttatggctttagttattgtaaagacaatttgcattgttgaatggccaactttactttttttaatatctatcttcactttattgtctcgtatgttatgtttaaacttaatacatttgtttatttgcattttatttctcaaccaaaacaattttattttgattcaacttaagatattattaagagactatttccatcgatctcgcttttaaagtagttatttattatacccgaaattcagatagaggacatgtgtcaaggtaaagggaatgtgaatcgatgtcatatctttttatgaaataactcattaattgcgt

SEQ ID NO: 383598 - DNA, 1018 bp, Cannabis indica
atatattatgcttctgtcttcctttatttctgggttttttcaacaccaatcgtctccttggtatttggtagctacttgtacatctgcattaactggcttcatatacactttgatgaagccttctcctcactccgcattgcaaactataagtcgttcactcggttccacataactaaagatggtgatctcgaggtttatacgcttgcagtagataaggtaagatataagaagtcactttatggtttgtgtttccctgcactatttgatatatttatggccaattctattcaattgctcctgcttaaagatgatatcagagcacatagaagcagagataactatttgccattttaacatgcaggttccaaaagaatggaagctggacccagactgggacagagagccaaagctgccacagcagcagagccatagcagaagatttccaagcaaatggagtgccgctgttcctcttcaggaccctattcatactgttaagattgttgaccactttgttattaaacaaacagatgattctagtacaactgccagcaatgggtcaattgctcactgacttcattgctccaatttgtattattagtgtagtttcctttgatttaggaagtaaatagaatggaggaagaaaaaaaaagtgttataacatttgagtagcctgatattatggacccagggtggtaggttttacagagtatagaagtaaagcaatgaaggggtttttttttttttttttcactggtggagtagagtatatatatattcgcagagaatggtgaatagaattgtggattatattccattgaatagtatatatttatatacaaagttaggagattaaatgtgaaactactaagtacaaataggaaactactaaatacaagttactttaatttttacaactaatatacaattaatattctaacacctcctcaagccggagcatagatgttacaaagataatcaactcgcaccccattcaaagcctttgtaaaaatatctctta

SEQ ID NO: 383599 - DNA, 2269 bp, Cannabis indica
caaaaaaaaaaatgaaagaaccaaaattgggaaatgagttgcgaaaacaatagtacaccacaactcgtacgtaaggaaatggaccaagggaaaccatatataattggaaaacgacgaaaatttacgaacaacgaggctatatagaaactaaaacgacaataactttgttcgatgagaggagaataacatcagacattacgacaaactaaaaacaacaagataagtataaatgttgagaaacgttaaaatttaatgtaattgtcttcatcgtaatcagtaccaaaacactatctactattagtaatacttcttttttatttaataattatttgttgtaccttaatttaattatatatgtagtagtttagttaaggaaaaaaaaaacaaaaaatatatatgtagtttagaatacatcgtaaaaagcaatttccttcccttctaggtaaaattatctctgaaaacttataagtgttgatttgatatgtataaaggctttattaattattatactgacatattgtaatatctataattattagtgaatttactctattaaaatttttgttattaatttaaattttatctcttaatttttcacatatatatagtattcctttttatatatattaaacgttaaatggggcaaattcactaattgctctaattcgaaagtagccgtggacgatttttgcccttttgttttgtatacaattagtatgctttctttattttattaattttttataattctagtcaaatctaagtatatattacaaggcaaacttaatctagctatatggtcccattgtatttaccattaataattatgagtcaactcaattcatgatgtgttagctaagcaaatacatgactcgcactaggtggaattaatgagaaatttgatattaaatgaaagactaatttttatttttattgcttaaaattgaatgtaatcatgtataaaattgatggtctaactaaaagcaaagactatatatagatgactagattttagcatattataaaaacgtcggcagaatgtataattctagttaagttaataatttttcaaaaatttatatatgtattgatcatatataaactatatcatatgctacagcttgcatgcattagggtgtcaaaattaagtgtatgattgtaatgttataccaactaattaaaataatgctattaattaattaatgagctgatcagagcggacaatattacacgtctttttctttatatatttagccaagaaataataaaaccaacatataatattttaatgaattagtagaaatgtgcccacactataaaataaatatattaatgatcttatattttattggtcttattattaatttttgtacgtatttatagcatctagccatgatagattgttaaattatttctccaaatgagatcatgaaagcagtaaatataattacctagttcagttcataatcattataactcggttatatatataatacttctgctctggtaaaaaataaaccaatattatttatatataatttattatatacatgttattaaattaaataataacaatgactgattgagtcttctttaaaaaaaagtgtctgatcagagccaaacaagatctacacttgtaatatattaaattaagtgggattcgtagaagtttcaattgctgtaatttgaaatttagttgatcaaagtcgactaatgctttctttgaatagcttctgtttgttccaattcttaccaaacgaaaaattaaagtaatcctaaaaaaatgttttaaatgataataggtcatatatcataattatatatataaaagcactgttgcagcaaatcaaataatttatatatcattattgaaaaacactgtccaatatttctgttaattaatcatttttatattatatatgattgtccatatgacccgaccgttatagatgcatgcaaaatttaagtagttgtgagacatgtgaccttatgcttaatgccaaagtctgatgtccgatcaatcaaaatcctaattctttgattaataatttctgattcactactcatatatatatatgaagaccacagtactactcatatatatactaagtaatgctagaatttagtactgtatatatttattgtagtgtaataaattgcaagttggagttctttctttaattaattattaaatacttgatccatcacaatttggaaaacaattattttaaaaatgtcgatacaatccaataaagatttcgttggagat

SEQ ID NO: 383600 - DNA, 1982 bp, Cannabis indica
ttaacttaaacgtttttttaaaaaaaaaaaaattataacttgatttttatgaggttattatgtgctattcaatttttactcagttttgttgtgaaactagttttgattttaatttatgtttcaatgatttataaactgatttcttctattttttttttaactataactagtttgagttattgcgtgttacttgtttatattcattatattatagaacacgttctattttcatttatatttgagacatctaactctggtgacttttctaatgacgacacaactctgttgacttttttgatgattatttcattgacgtgacttttcgataattttttcggcgacaatgacttttttagcgatgataacttttttagcgactttttcggcttttacttatgttcttttgtttaatttctcatatttgaactttgattcatatcttatttttttttatgtcatataaaataaactccattatttttaacaaatttttatgaaaaaatctcttatttattttcattcctattacccattcgtttttacatatttttttccaccaacaagcaagctagaaacattaacgtaagctatgtttgcttaataaaaaaaaaaaaactaaagctatttttgaaaattgaattttggttggaagagaaaattgtcaaaaattaaaaattgaaaaaaaaaaatcttatgtttcataattgatatagaaagaaaaattgtatggtcaaaattttccatacccaatattgaaaattgattttttttattcttccacattttttttttcttacattttcctctcctcacataaatccaactttacactacattcatagctactaaatcccaaaataaaatataaatgctgtgtctcattgaagtggaaatataagtcccattttttatagttttatagtattccagactatggttgtagcatgggatgaggagaaatccacatgattttacaaattagagtattctcaaggcaggagaaaaagttgatagagctgttacatgtgatcatgctttatggttttctcttccctcaagcagcttcgttttgttccaggcatctcaatgtaaaaatgaagttctatctttcatcttcaaaccacaaggtggtttcctaagacatggatgagatgacaaaaatgttgcttaagtccaatataaaggccataataagaacaacttcgaactcttcacttgtgtggctgatcagaaacaagagcctaacaaggtcagtgagaattacttcatcatgcttgttaattccaccttcccacagaaatttctgacacttcaattttggagatcaatcaacagatcctgtttaaggcacaaagcaagggaataatacaactcatttaaactccaatgaaagatacatacagtgcacagaaacttactctagatagtaataaacaggtaatacaatccccacttggtcaacaattcacaaaagttacaatggcatgaatgagaagggaaattaacaaaaacatcaattctaccgtaaccaaataggagatgccataataggaaagttaactaagtctttagcactcaagccaaaaaaaaactagaacttcaatataagttgaagaacgtaaaacctatacggcttgaaagctctgaggttatcaaatggagcttatgaagaaaattaatccatacacaggagatagtactagttattatctttgtgtgcagtagtttagtttaagtatctgtttacttgatagccagttacatggttttcccatatcattggttgtgattagtgtgggtttccaatggtatatggtatatgggcatgggtggctacatttatcttctaatttttcctgtcgtcccattagaccaaatctactaaggacaaggttattgttaatactggtaattcctttctcattatcaaaaatcacttattcacaaacttcctatggggctaatagttttcatttcccatc

SEQ ID NO: 383601 - DNA, 1993 bp, Cannabis indica
ttgctcaatcaataaaaagatttcggtggtgttagagccatagatcacatcactcaattggacttgaaccagtatatatctattctaggtgacagccccttctggtaaggtggtagcaactaatttagaaaaaaagacatgctcttgcaaattatttgacctcagaggtatcccatgtggtcatggcatgcatatggtattcaaaggttcagatgtatgattttgttgctacatgttacaagaaggaagccttcataggcacttatgcacgggaaattgcacctatgctaggtcctaaacgctagctcaaaaatccaatccttccaccaccagaaactgttttacctggtaggcccaataaatctagaaaaagagaagtggacgaacctccccctagtgcaactaaaatgaggagatttggacagtccaacaactgttctaattgcaaaatagtatggacatacaaggaaagtttgtaagaaaccagtacaagaacatgtatatttatttcttataattgatatttatgatacattatccatgtttaagaaccttctgacactaatacttgtttatgaattaggaacctctccagaagaaaaagataggtcgtcctcccaaaaagactttagaccctaaaactataaagaaaaacattaaaagaagaaagcaaaaggcaagagatgcaagttcaagccaatcaccctctagaccaaattagttgttgttctaaatctattttgtaatctacaacatgtttttttgttgaattgtcaagggttcttgtacccaaattaggtgttgatctaaatctattttgttagtagtggttgtttttttgttcaaatgtaaaggacagttcttgtacttaaactttaagctattataatttcatttgtaactattttggttgcacattttatcttatgttatgcattatatttatttgtatacttgttattaatgtataattatacgatcgtttgagtcagatttgtattctttgctgatataatattgaaattttgctgataaatcaaggaaaattctaaaatgtggttttactaacacattgtcactaatatcatttcaccaaaatagaattgttccacacttcaattacatcaacaataactttgattcaatgaaaacaatgctattacaaataatttaattcaaagaaggtaatatcattacaaagtatttgatacaaaaaaggtaatgccattacaaacaattagattcaaaaaaggcaatgtcattacaaactatttgatacaaaataaaaaaagacaatgctattacaaactcaatgattaacactactacttaaatataaaaaatactaaggcaaaaacacaaatagtaatcaaaatgtttttcaagtttttcaacaaccatatatggccacattcacactcatgaatattgctaccgtaagaatcctccccgtccattctaaccttccacgaatgaatctttaaagctctctctcgatttacagaaccctcctttcaattttccgttcgacctattcctctcgattaatttttttttgaactcacttctccattataaactagggattagtttatgattttttataaatagattttagttttgggttttatttatttttaatttagtaatttaatttacatttcatttttattattcaaaagaaagaaataaaacaaaataaaaaggagattaaatcataagcgtacacatgtactgttagtcactctaacggacagggtatgaatgaacaaacaagaaagtccagcttatgaactattgtcgctatttttagagattaaggactaatctatattgtaaaattttagagatgttgtcgtaaattttcctacttaatactacatactaagggtgttcgcggtgcgggtggtgcgggttttgactattttttcaaaccaaaccacacatgcggtttttttaatttctcaaattgcacccgcaccgcgaaactaaa

SEQ ID NO: 383602 - DNA, 3892 bp, Cannabis indica
tagttttattatgggatcatgcgaattagtttggactaaactagtatttattatgtatgttggattattaggttttaaattatattatatatatatatatattttaatgaaatcaacttaactggtagttaaaattgattggatggatccattctgatccaatagaaaactagttaatgcatctaatggtttgaaccgatccaatccaatacatccattagatcagatcagatcaaatgactcaattcaattggattggatcgaatgacaaaatctaatatctaataagtagttggattggatcgattgggtccaaattcattagatgtgatccaatgaacacccctattagggctgagcaaacatcattagttcaatctagagataaccaatataacttctatatcttgaactgcgtagacctcacttctcataggtttgatagttggtaacctgaacaccacgttctgttaagctgtaacaattcttattttgggattgctagtcaatacgacactaattttgatagggtcggatgttcagattgggacttgtctccacttaattctttcgaccttttcatgaatactggttctaggaaatttagcaactattatagctcttcttcctcgtctgatgattatgataaaaactcttaagtgggagattaactcaccaccttctttctattttaattattcaagagttgatgtttcgtttcttgtcttgcagtctaaacagttggggaccatccacaagcaccaaagtcattaccttaggaggcatcatctttggcttcttgaggggtcacattcctcagataatggttgtgagccacgtagtctcgatcttcctcgttagcaggtattggaacttgctgccagtctaaaaactctgggaccttaaagtcatttgtagactgttctctatcgagaagggcgcaagccttcaaattgttctcatgcagcaggaagtcagccgctcgcaacccatagggaaggccaagaatgtgccttttcttaatctcaggagttgtgataggtctcctagtaatcgatgttaacataacaaaaaacaaaattagtaaagtataaaaaaatatcgaactaaaactcaaaaccaagaatttaagaagagttatacttacttataatttgaaatttcgttgtgttgataggaaaagaccagaggtccaaaagaagtcatccttgaactcttttttgttgggcaacctcacaacaatcttatgatcattagtatgggtcccgaggtagtaaaagcctcccgctttacgcttcctcgcaagacaagctttgataaagtaaaaataaagaatttttagtggagtcggacattcccactttagaatgtggtagagaaatttcaaataggccaagatcctgtatgaatttggtgccaactgaaatggggcaataccgaggtagttgcaaaatactttaaagtagtccttgagtgaaagaattgccccagctcttatatgttcgagattccaagcgcctattctagaaggctcgctggtactataaccttcatctcggactagatgtttaggggataacagctgaattccccctaagcaacagacctaatgtgacatccctactcattcatgatgccacgtgatcttaaaacgtccttaacataaggtccaatggacctaactttggattctattaactcgacttcaaaggtgattgtgggatccagagggatctttgatttgttgggaggataccttgattgaccaaaaggagatcacatggttcctcctttatattgtaatttcttgggatttgggaacatgcgcaaaacacttcgttgtggcagtctcgcaggtcacctctctacgcatggtaccttcctcctagtcttgtgaacaccattcttgacctagtgtaaacactgggggaacgtctattagtcctcgaggaagaggaataagactctacgtcgtttacctaaatttgcggttgtgcatgactacgcatgttgcatcgtttaggatcttcatcttcctacggtctctccatcttatggctaggctgttgatttgtgttgggaacaacaagacctctaccgcgtatggggtcgtgaataggttaattcaagtcgattccagtgtagtcattttcaccgaaacattccctgtaattacgagtagtgttacaatgttcattatgatgcctagtatcattaattacctgattatcagtacgacattaatttgggactcatggtggacgtcaagcttgcatttggtctcttactgcgatctctgcttgtaatgttcgtagttgttcctacaaagctgtaaactgtgaggttgttagttggatgattccctcagaggcgatgatgggtgtgattggtgagtagctcctgatgtcgaggtttatccagcatgccctgagaattgaggaaacaggttgaggggagccacattggtgcgctctactcctcctataacgacatcaaccgagattattactcctctagaaataggaacattgatagtgccaacgttgaaatattcattgttgttgttcgtgttattctaatttgtagccatttcgattctcctccaaaatctcaaaaatataacgagtttcccacagacgacgccaaatgttgtcggaggaatttagacaacaccaaatattgcaaatatttaaacaaagttagatatctaacagcagttatgcgagtactcacttagaatagcaagtactcaaagtataggctaccaaatggacaaaaacgaaagcagaaataaagagaagacaatataattatagtggttcagtcagagcttggcctgcttagtctacttttgataatgatttcagcctagtttatttgatgatcccctttatatagaaagcaagtgtcctttaggattacataagcaacctgattagtctgtttttacaataaatgacaatattaaatcaaaataaacgtataaagaataaatgaagaacaattttgtctattcttaacttaattgcagcaacgtatgcgacttgataagccgcgacttgtccattcatattccaacacatgagcttgcgggtttttcagtgttgtactcacaggatgggcctttgggcctattttgtttgaatgtttgcattcatctttgattggatagttggatattctatgcgttgacaacgtaggatatgcgagtccttggcgagtcttcgagcacattagttattcagaccaaacctatgtaaagagtcgatctttactcatcgcaggagagatatacttaatcattgcatataattggtatatgcacggccaatattaacttctcttggttctgcttattctttaactatgcgggacatagtatgcgactagaccctgtctcaatcgcatcttctcgcaagttcacatcaagcgaggtgagccgatcattctctctgttcacattggttgccgtgtccatactccttcttcctacgaagattggctccacgtggcccgatcctttgtatcttttgtgaattgacgataataggctatatcattggtgtcagttttgtgataatttaaaatcaaccaaaataataaaaatggagtgtctatttataagtgacgcaattgattaatgtttattaattgcctcaaatttttactgaacccatacagaaaagctcgacaataatactttattgaaaaattaaaaatatatctaattagagtaaaattcttcaaataaattaggggagttatatttgcaccacataaaattataaatacaccctattattaaaaaaaatataaacttaaataatttttaaaaattactcttaatacttttttaaaattttttccatcattattttatgttaattttaat

SEQ ID NO: 383603 - DNA, 1477 bp, Cannabis indica
aattttatataaatgaaatctaaaaacttgtaaaaaaatattaaaaattcggtacaaaccatatttttgtaatttttttttttttgtgtgtgtgtgtttaagttttttttttttttaaaaaaaaaaaattaatccctttattttactatgaccctatgttatctatcatgtaaaaaacttgtttataatttggtacgtgtgtaaattagaatgtgggattatacactaccgtataaaatatttatatttcttagattcatagactaatcaaatggatggagacatatatttcattcacatatggtaacttaatttcatatcttttttagtccattatgttttagtgatgtgtattaattggattaaaattttgaatatatgaaaggcatggaatattccaacttcagagtggatgggccgatggcccagaatatgtgacccaatgtcccataggaagtggtgacagctatacatacaaatttaatatcattggacaagaaggcactctttggtggcatgcacactcctcttggctcagggcaacagtctttggagctctcatcatatatcctaaacctaatccattgagaccaactccttacccatttcctacaccctacaaggatgttcctatactattgggtaagacatatatacatatttggatacaatgatagaaatggaatatccaaaacctctaaaatcaaaaagaaagaaaaaaaaaaattaaatgtatgataatacacgaagattgggaattaattagatatgattaattaatttataatttcttttaaatgaatgattaatagattgatatatgtttttaatgtatattctcttctaactacatcatcaaaatataaacaataaacgaccactccaatcattttttttcttctgacattccaattaccatttagtcacatataacacgctattttaagttttacctttatctttaaacctaatgttagagatgcacaaaaattgcatacacttttgacacatatacagataattatatataggggtgtgtattacactatcatttttaattatgtaattgagatgagttacacatcattgtgtataaatagtatgtgaaatttaaatgtatgacaatagttattctaatcatttatacatgattttaattgattcatatcatttgtatattccaatatacaaatatcattttgtatattattcataagtaatcaaagtggctatatagcgggataagttgaaaactatctctttttattacacattaattaaatataactctaaaataattttaattgataaataccctcttttataatcaaagtaccaaatataacctcacaaaacttatcaaaattagacttcttaatgcatataatgggaatataacttataaaaatgggtataaattaaagagtagtaaaataaaagtaaaaatcaaaatgtgaaacaaaaaatgagtatagag

SEQ ID NO: 383604 - DNA, 1504 bp, Cannabis indica
gatgtcatatgaattatttggctgactaattatttgtaagacactaaagagaatattttatatatttattaattcactacttgaaatcgaatttgaagaataattctctagttctctttattagggtaattttacaagaaaaaatggatattaaaggaggctattaatttggtcactatctagttgtatagaccctcacacacattataatttacatcttcaataggtaaatgcaaaaaataactaaattccaaaatggtaaaaaaaaacaagtattagtaggtgaaactctgtacgataataggataaggccagtactaataaaattagaaaatttgatccactgatctgtaaaaaaatttcacaacactaaacagtatttattatatttttttattatttaatattttatttatatactaataattttttcttttataatttcaggatgagcgtttggaacttaaagcacacgtctagttcgcctaccttcaaagtcggtctcaagaagataaacattagatatagaatatatgtatttataaacaaaatattagactatgttattttacaaactaaaaatacaaacaaagtgacatcttaaattacatcttaaacagatgcttttgtctagggatgatatttttttgtattttaggaaaatgcaacaaataaatttgaaaatggtaataggaagattttttgtaattttcccttagtaatactattctattcacttggtcatggctattttttgttatcaacaacagattttttttttttcctcatgtgatcaacttcagagaaatttaacttgagatttgtcgtattccaaaactcatagtgaagatattatcattacagtgtgaccttaaaataataataataataaataaataaataaaaattagtggaaggaatctgtagttttcaaactaaatccaactacaagatattgttatactaaaatagtgtcatttaataataataaataataataataataatactataaattatagctatatatattatttaattgttacaagtgaagtcaattgtaattttgtttaattttatgtaagtagcattcaatgctaaattgaacttgtccaaatccattgtttattacatatctcttcttgggaaggttgagtcatatatggaccaaccaataattaatatattaattactcattttaaaaaaaataaaattaaacattactaatgattatatagcttacaatattaattttattagaagaaatgtacacaccaccaaattgtttagccactaaatattgtcccttttttttctacttgctcaatcttacaaattttatttgaaaattctacgattccttttcaatatcttcataactatagttttaatttctgtttttgttttataacagtatacaatatagttatttaatgtattaaataaatttttaaaaaattaaaaaaaaaaattatcataccaaaaataaaattcaaacaattt

SEQ ID NO: 383605 - DNA, 1206 bp, Cannabis indica
gaagcaacaacattctcctcggtggacacaacaacacgctttcggccagctttctgagtgtggaacactgcttgtttcaccttccctatgtattgttggtgcctgcgtgtcacaagaaacatactataatacacaaataataaaacaagtgccgatacattcaactttgctgataatgaataagaaatcattcaaaatcgacgacctaagtacaaattaaattacttgatcccattgaagacaattaacatggagttcgtggatacaaaaatcaacaacccctgtgtggattcataattcaaaattttcaacgaataatcaacaaaaatcccatcttaaacaattagattgtacatactctgtgaataatataagattgattcgaactccaaatttgatcaatcagtaaattagtgtcattcggatttagagaaaaaacaaaattcataaaatttacatatactcaagtaggatttccaatacgaaaagaattttgatcgagtttccaacgggttttatagcaagaaaaattaggagtgaatatggaatctgagagcttaccaatccattagaccaacttgatctccgaaaagtgaaaagcttggcttggcgtaaaataaaaataggacacaaaacagtagcaaaaccctaatcgccatagccatggcaaatctggcagtctgtgtctcagtgacgagtcaaagacagatctcggagtgagactgccgaagagagaagggcgataagagtaagaaagagagagttcgtatcgtaataacggactatactccaaatcttgggccggttgtccaaaatcaaatggagcccggcccaattgttttgtgggctagctttaattttaagaaaaattacatcaagatacataattttgtaaataattataattataatgtatatttcttttatttacatttatacatttttttttttatattgttaaatggtcataccagaaaatagttgttattatcattagtaacataataaaaaaaaaaaaccgttaaatattagtctgtgcttaatttataattagtttctataaattatatattggaataattacataaggcactattttttgtaaaatatttacatttttacgttcaaagaatatttttttttacaatttttacggttttctaaaaaataacacgaaaacaatataaaatcaacaagaaaacaaca

SEQ ID NO: 383606 - DNA, 2790 bp, Cannabis indica
aaaaaccctttgactaaattcctaaattaatcttattataatagatatttttttatatatgtttcataaaattcttaataaattacaatatacatccatacacatataaaacattaggattataacttctccattttttttttattttttttgcaatgatataaagtttatttgataaattgatataatttatagtttttttttttgagataagatatactttgataaagaacatggtgtccccaatattgattcacatcacatggactctagaaaattgatagtattatctaccagctttattaattagtgtttttacttcaccaattatgtacatgcaattatgcatgataaagttaaaaaaatattgtgcttcaagagtgcactccaaaaataggcatatggatgtctaaataattattttatatatgatgatatatattataattatttatgatattttgtaatgtttttaaaaaatttaaataatttacaatatagaaaggttcaaattatttgtttattttcaaaaaaactccaaaaaaaaatttaaaaaaaaatttatatatatgataagtgattcaatgtgtgaatagtttataatatcaatttttagaatattatacgaagaagcaaggtgaaaaaaaatgaattactctatacaataagcttgtgactgcatctccaataaatcgacaaaaaatacttagaatgtagccataatttggaagcgatatagcttgtcaaagcataaattcgtaacttggttggcaacctggaatagattaagaacgggagatcatttgcagaatcaaggaatgcaaggaataggtacctgttacatttgtggatagaatcaggagactcatgagcatttatttttcagttgcatatacaaaacagtaagcaatgtctatcacaaattctttataggattggcatttgcaccaaacaatatagattcctgggtctcttgaattggatatgtatattatataaaaattaatacattaagttatatgagacttgatatttaattgtactaataaagttataatacgttagaatgtgttaaatacaggctcaaccctaagtataagcaggctagacctgtgcctagagcccacttagctcaagggcccaaaagaaaattcccttttcaaaatatataattttatcttactaattttttaaaatacaatttgtttttttttttttgaataaggacctaaaattattttttttccgacccactaaatttcatattggtccttgttaaacatcagtacattttcacatttctctatttttaagtaaccaattcaagtttactttttttagggtaaaaattacccaaaatcaattagttgcaataccaaaagtatttgctattaactttgtctttaaattgtcacatagaaaattgatttagaaagatattttaggtgaaaataatttatcttcttagcatccatatatatttaattaggtacttaagtacaacttttagtatgatttagtggatttttattacaaatattttaaaatcaatttgtcacatcaccatctaacaataaaattaacaataataaagtgcaattaaaagttgattttagatatttttgcaccaaaatataatttgaagttagaaatgtaaaccaatgtaatataatgatgattttattacaaatttagcaaataaatacaaactataatgatggatcaaaaaattaagaattcattgtgaaaacttgtggatgataattaattcttaatttggatgtttaggctttattaacgtaactcttatgatcctcccaaaagtataatatatgaattcatatacgtacggtgtaataataataagtttttttttttttttggaagtaattggtccatcaattgactagacaacatattaaatttataggaaattctaattaattatttttatatgtaaataaatatattttttaatattagtctcatgcgtgtatgtagagccggccttgagttaaaataggtcgtaggcaaaacaatttttttaggacccttactatttaaagataaatggtaattttaaaaattattaaaaaaaaatatatacattcttcttttcaaggtaaattttgataagttttttccttattcttacactcgttagtgttctcttaaatcctcaccttacacatgtcaaaaaatcattaaatttcatggagacgaagctaagatcgttgcatcacttttctattggacacattgagagaaaaagtaattttcaagacttaacaattattttaatcgaaatagtgaaaatcttacatttcacatagtggttcccttttgtgaaatgtggcccgaactcatctcgaaatatgtttctccactagtcacaattaattcgtactactaatacgtgaatttgacgattggtttcgcgataaatttggttaaaatagcccctaatacaaaaattgaaaatattcttactttcatgataaattttaaaaaaatttcttccttactcttatactcgttagtgttttcttaaaatctcaccctacacatctcgaaaaattataaaatttcactggaatagagccaagaccgttggacacgttgagagaaaatataattttcaagcactaacaattaatttaatcgaaatagtaaaaatctcacatttctcatagtggaacccctctgtgaaatgtggcccgaacccatctcagaatattttttcccactagtcacaatgaatttgtactgctaagacatgaatataaagat

SEQ ID NO: 383607 - DNA, 2202 bp, Cannabis indica
tttgaatccctttcagcttttgggttctttcaagcttttactcttgtttcgaagaaaacgacgtcggtttgttgaaggaaatcgacgagaatgtcgtcttctgaggaagaagttggtcaggctccgagtcaagtttccggcaccgttcgcaaattatcctgctcggcctgctttgactctctctggttctgttattgtaagtcttcgtttttcctctgcgtaattttctcgaacaccttctcttcattcccaaatttttttaatttccactacttttcttggtacaccgaattagacttgattacaattcaatataatactatagaattggtctgatgccagctccagttcatcagatgcagcaatactatagacttgggtcacttgataactgttctaataaatggagtgctgtggtggattgtttaaccttgaagaccaaaggctctgctcaagttcaggtttcttactaaattctcttgtgattggttttctttaaattttcttttcttttaaatttaatgatttatattttatgttttttcccactttttggagtgaaaacattgagcaattggctatagttgaaattgatatgaactgaaataataatggaatggctaggcaacttgtgcgttttagattaaattttaagaaaatggtataagttttgagtattgaagttgactctttgtagactgcatttagttcataatcaattctcatgtggttggttttttaaattctgttcttttaacattaatgctataatcaatgattcatattcatgtttgttgatgttgagaaattttttcactttttggaatgacaacatcgagaaattggctaaagtttgaaattggtatgactgaaatatacgtatcaaacatcccaaataggcttaataataatgaaatggttaggcaacttgggtgttttggacgaaattttaagaaattggtataagttttgagtagtgaaatggactctttgtagactgaatttgttatgtgtgtaaagagtcttattctattggatgatgataattttgctgaatttgagtatgggtgctagaaagagaattagagagttcatgatagatgagatgtggatttttcgcattggggtgatccactttaactgtaaatcttgtgtgggtgtgtaattgctttctagtttttaatcgcggtaggaaagggttagagtgttaatctatgacaagattgagatgcattggtatagaaaatgatggtgtgatcaaattggataatcgtagacaagcaattgatagtatcatgaatgaaacaacttgatttggacctaagcaacaatttcggttggagacaattgcgttgtgctttggccattcttgctaaagatcaagcaacattaattgagattatgtcaaatccgagtatgaggatagctggctagggtaagtcgatcaagatggttgtgaacacacagtttaaaaccttttgatgtagaagtttgttacatgacacagaccaacttgattcgactttgtctactgaacttgaaacaagaaattgttagttatcttttaacacacaatgttgacacagataatactgaaagtaactgaatattaaattcgacaattattattaggcaattttttagtagttcaaagtttttataatgcatattcaagatagattcatctgagtgctttgtttcgtttttgtttttgttatttcctctcttgaaaaacagagctaaaactatatgggactgctcgaatttcattctctgtgtgcccctttcgcaagattttcttagacaattcatttctctattcttgttttgatttctggataatactctagacctttatgtcagcattttatcttattataatctttgtacaattgttaagagtaagtaactaaacaagctgaattctgtgaatgcaggagattttagaaactcgtgagaaagacaaacctcatatttggactctccggacaccggaggaagcatcgtctcactggagagacctatatggacatttggatgaagttgaatgatgaagtttaaggtgaactggtttttgtttttaaagcaaataaactgattatgagagtatatatacatagattcgggagctgattcaatgagagttttcttttatcatgttttgttttgttttgttagttaattaactaaatactgtttatt

SEQ ID NO: 383608 - DNA, 1014 bp, Cannabis indica
ttttttttttttgctgaatacatagaactatactttaatacacaaaactgggaaacatatttacatattgttgtatgtaatcaaaagttatacaatgattacaaatataacctactatcactactatagtaattttatattccttattacaattgcaaatctatctcttcttttctttttttcttctttgtttataatataagaaaacctcaaatcttgatcattaattaaggagaagaagctaggcagctgctaaacccttcatgattctcagattcattgcacccttttgtctctgagtaataattaatacacattctttcaaaaaataaaattaccaatacacaaacccaacatattctccaaagccttcacagcaacttaccgtaacttttgtacaccttcacattgatattgtaagaaaatcttaaatttcagtaagaaaatcttatttttaatatcaaaattcacacatactacaatgaattccaacaactcccaaaattaattatccaataaaataacatgtcattagaattaatatttaaacaaaaaaccagatctgaatatttctattaatgcaaagatgagcagaattaaagaagaaaagaagtatgagatggtgggaaatgtaccgatgttgttctgagtcattcatcgacatcagccacacgaagaagactgaaacttgacttgacctcaatcgcagtcgtccaccagcggcggttcttcgaagggttggcaaagcagagagcaggagtggtggaccggttatctggtgcgaagtcttggctcaggcggaggacatcgatttggtgaacgcagagggaagagcgatttgttgcaagagtgttgatttggggaaagcagagggcatgagtcgtacgaagtattgtttgaggattttttttttttttagtaacttaaagaaatattcggtataatatcctttgggtaaataaaatagggttgtggtttttcaaaaacaataatataataataatataatataat

SEQ ID NO: 383609 - DNA, 805 bp, Cannabis indica
atatgtatatatatatataatagtgattcattatatattaattggatgaattattgagttgagctaactaccttatctagatatgtataatagacatataagcatggtctattattatttataactttatttggaatatttatatatatataacataattaaaatgtgaagaaagaaaacaagacaaaaaaagtagttatatagttttatgtatataataataattttatttctcaattattcgaacagctatgaatgtattataatattagataaatgttaagatatacattatggtgtcatgaagcattaaaagaggtaacaattattggtataaattaatattgagttacagatattttaatttaataaataatataaaaaactgctaattaactattagtaacgtgccacatccgtaaccaacaatgaaaattctctttacctagaaaaagaaaatgaaaattctcaaaatggttgttttcatacaattttttaatctgttttggcattaaaaaaaaaaactcagtgttgagttgtggtctagaaactaaggcttagtttggttgtttaggcacattccctataactatctttgcctaattgtttttattattgttggttagttttaacagtcaggttagttatgtttattatgtctataaatagatataaccattctatacatgataagttcagttaatgtgtattagttttaaagtcatatatatagtgttttactttatgatatttttaatttatctttttaatttttattgattttgactttaaaactaaaaaaaaa

SEQ ID NO: 383610 - DNA, 1875 bp, Cannabis indica
acatgcagatttccatttgttcaaagctggggttgaacccaagtgggaagatcctgaatgtgctaatggaggaaagtggactgttatcagcagtagaaaatctacccttgacactatgtggttagaaactgtaatcatcttaaccactccttatcttttatttgtgtagatattgtacttgtgcatctcttttttgttatgaaaaggttacttggtgcaagtttgtaacttagggttgtttgatttgattgattgattgggcagttgatggctttgattggagagcaatttgatgaggctgatgagatttgtggtgtggtcgcaagcgtgcgccagaggcaggacaaacttgcgctctggacaaagacagctgccaatgaggctgttcaggtctgttctttcaacccttgaaagtgtgtgttgtaggtggattttctctgctgtactgctgtgtgagtagattcgatatactagttaattacactcacggtttgtttgtgttaaggtctttgttgataactccacgattgagatgtggttaaatcattttataatttcagttttgttttgataagtttgtaactatctgtgatttgaatattgaaatgagtttatatatcttcatgttggtatgatacgctatctaaaacagcctaagtgcaataaaagcatataattacgatgatttctagattaaaacattcgatacatgctctgcccaatgcttgatctttcaccaagtaaatttgcatgcatcattagtaagatttataaaagaaatgggaacttcacaccatccttacaaacttgcattttaatttacttgttaaatatgttatttcttcaaatttgtttgcagaattcttcgcttgtatggaaaccgatcattttttcttcattgtcgaagtcaatgaacttttttcatgtctttgtatctatttgctattgctcaaattcagtttatggttgcttaatattgtttattctttgttgttttatagatgagcattggaaagaagtggaaggagatactagacacaactgacaaaatcacttacagcttccatgtaaagtttaatatattggtaatttctgatttcaggctgcacttttctttctctattcctcaccacttcttgtttttgcaggatgattcgaaaagagagagatctgcgaagggtcgttacactataccatgaacattactcgacattttgaggcttgatcctttacttagttacttgcaattttacaaaatactagcagcggcaactcattgcagattttgatgtttctgtctattgaggaaaaccaattagatcaaatattttttgtggtgttttttgattgtaatatgacaaccgctctttatttttttgtattgcaaattttttatcaaaaaaaatgattacttaaatttgtttcttacctctggtggttcaaacacaaaatgcagctcatacttgaaaactaaaaagagattgcaaacttaatagaagatgtgttgggaatttgtggagcccttatagttttacaagcttatcttccaatgcttgattgtgacctctttgaaatttgaatgtgtgttgtgattatctccctagcagaaatcatgggtattactcatagcaaatgatcttattttggtgtgttgtgaaaacattcataaatctagagggctttgggagtgactatagcaattttgcttttggtagggtattaataaatagtcaatccaatatattcaaaatcttacattgtggggcttaaatgttgattgacatgtaaaagtaactgatcaaatttttaattcacatttacttttgtaaattttaaaaaaaaattatatatgtaactaatattttattgtaaaaa

SEQ ID NO: 383611 - DNA, 2979 bp, Cannabis indica
acaactacgctactttaatatgcaaataaacaaaatatcaaaatactaagtccacaacttaaaaataatacaaaaaaatcttaataaaacaaagaaatatcttgtataagtatagattaattttttatggtttcattaataattacataaaattttaacaaacttttaataataatgagaaaacagaagaaaaactaaaaaaaaaaaatttaacaaacgtatgctaataattgcatataattttatgctctaatgataaactaatcaagaaagaaaatatgatatttttgacaaatttatactactaataatcacataaaattttatgttctattgataaactaaagggataataatagtaaaattttaaataacagttgtactttctagttgagaatatagtgattgaagaagcaactccaacaattggtaatgatgatgttgaaaacatcaagatttgtcatttgagatttggacatgttagtaaaagatcgctttaagagatggacaaattcagcactggtgtgcatactattaaggagaggttggcctatatactactaaggatctatggtgtccttctatagttaaagcctttcatgagtattataattattcaaggaaagtttggatgtttctgttgaaaagcaaagatgaggcttttaatacctttgtcacatggaagaagctgattgaaaatcaaaccagatgcaagattaagaagttgagaactgacaatggttgggaattttgctcaaactagttttatatagcatggaatagctaggcatgtaactgttcgagacacacctcaacaaaatggacttgctatgaggatgaataaaactctcatagagagagtgaggtgcatgctcaaatgagcaggtcttgaaagcccattttggggaaaagttttcaaaataacttgttatttggtgattagatatccttctgtcccattgaattttaggactccacaagttgtggacatgtaagtacctaagttggaacacaagagtgtttgaatgcaccgcctatgctcatattacgcaggacaagctttaacatagagcactcaagttcttgtttctaggctatcctaatggtgtgaaggggtgtaaattatggtgtttagaacctggctacaagaagtgcataatcaacagagatgccgtcatcaatgaagatgaaatgaccatggtaaagaagacagatattacttcaactcaagaagcaaggagtagtagacctcaaattgaggtggactcagtgtctaaatttgtaattgatgaatcacaagatgatctagatgaatctaccaccacaaaagatgctcaaacagccctgagaggttatcaattgactagggacagtgaaagaaggatcaccaaagcaccgaaaaattatggatatactgagttcacatcatttgcactatcagtagctaaagatcttgagagtttagaacctaagagctacctaaaagccataacagaaaaagatggtgtaaaatggctgcaatccattaaagaggaaaatgtgtcatttgagaagaacaaaacctggattatagtcaagagacttataagatgtaaatggatttttaagtgaaaagaaagaattccaggagtggaaagaacaagttacaaggcaaggttagttgccaaaggatttactcgaaaggagggcattgactacaatgatattttttcccatgtggtcaagcaaacatcaataagagtaattatttccttagctacagaatttgatcttcaggtgaatcaaatggatgtaagaactgcattcttacatgggaatgtagaagaaaatatatgcatagaaattccagaaggctatgagaatgatgatctagataatgtttgccttttaaacatgtctctatgtgggttgaagtaggctccaagataatagaacttgaggtttgatgaattcatgatgaaagttgactataccagaagcaattatgtcctttgttgtatttcaacaatctgatttacctcttattgtatgtagatgacatactaattattgttaaagataggaccaacattgataaacttaagtctcaactcaagagtgagtttgagatgaggaatatgtgaggccaagaagattttagggattgacataaagagcgacagaccctatacaacatgttaagccaaggcagctacctcaagaaggtagtagagaaatttgggatgactgatgctaaaccagttgcaactcctctagctcaagactttaaattgtctcaagagaaatctcccaaaattgagacaaagagaagaaaaatagacgatgtgccttatgctagtggagttggtaccttcatgtatgccatggtctgcaccaaaccttccctgtcacattgcatgagtttagtgaactaattcattgtagatcctggagaagaacatttggataacatttaaatggatgttgaggtacatcaaagggactcttaacactggtctagtattggaaaacccagtaatttcaaagaaaatgtgacttgttatgttgactcaaattatgctgctaacctagacactagaagatccttaaccagatatgtgtttactgtgtttggaggttatgtgagttggaaatctaaccttcaaaaggttgttgctctatcatccactgaggctgcatatatggcagcaacaaaggcaataaagaagatagatgagttgattgttgattatgacaatcaaagcgctattcaccttatgaagaattatatgtttcatgaacggtcaaagcacgtagatatcaagttgtattttataagagatatcattgttagcaaagaaatttaagtcaagaagtgttaatgcaaattttcgttaaccaaattaaagcctatttaatgattaattggcataaaaataatagtaataaaagaaataaaaagaacacaaagctttttttacgtggttttgtagttaaaat

SEQ ID NO: 383612 - DNA, 2877 bp, Cannabis indica
tacattcatttttgatgagtggaaagtccaaagcgtcaaacttgatgaaagcaaattctaactaagtaagtaagtagatttaattaactaattaattaatcacatccatccatacataataacaatatatatttatttatttttataaataataaaaaaaaataataagtaatagtcactttctctttctctttctcttccaccaagagagagaaaccaagtacaatgagtttaattaattaattaatttatatatatttatttatttttctctttcttcttcttcattatcatatctctctctctctctctaaaaaaaccccaaactcttctctgtctttcctgtactcatctcatttcatttcatttctctaattaatctctctctctccatctcttttctctctctgtcaaatccatattattaattataattaattgtattttagaagaagaaaaaatggatattaaagtgaatataataaataatggaggaggaagatcaaggtctacaacaacaacaacaacaacaacaaactcatcatcaaattcatcttataataataattcatcaagtgatgaacaagatcatgatcaagagatgaataattcagaccttagaagaggtccatggactgttgaagaagacctcactctcattaattacattgctattcatggtgaaggtcgctggaattcccttgctcgctgtgcaggtacatacatatatatatatatatttatatatttatattattagatgcaaatcccccttctaattttctttttaataattaattaatcataattaaggatatataaattaattcttgcttcttttgggggttaaatttctgggttattcttaatttgtctatattttgattttgattcgaatttgtcctttggatcactccaaaggataagttgtagtaataagtagtagtagtgaaaggttccaatattgatgttttttttctttaagaaagaaaaacgtgtggtacttatattatgcactaaaattataaaacattactcttcatcaccattactattattcaactatctatctatttatatactatatatgtatatatgaacatgttaaataattgaggggtatatactacatatatatatatatatataaggtgcatgatttaattgttcttaatttaccggaatatctaggattttatttattaattttgaggtaagaaaagaaaagttatatttatgaattgagatgtgtgatgaaaatgaagcttttgtagctttattaatttccactttctctctctctctatctattccctttcttttccttttttatatttttatgcttcttcgggtatattatatcaactttaccaataaatatataaatttataaattaataaaattatatttatatatatacaggtttgaagagaactggaaagagctgtagattaagatggctaaactatcttcgtccagatgttagacgtggaaatatcactcttgaagaacaactccttatccttgagctccattctcgttggggaaataggtaaattattactcgattaattaataatctcgattaaattattttttaaaaaaaatagtaattaataattgtcaatatttatgtaaaaatagatggtctaaaatagctcaacacttgcctggaagaactgacaatgagataaaaaattattggcgaacaagagttcaaaagcatgccaaacaactcaaatgcgacgtcaacagcaagcaattcaaagacaccatgcgctatctttggatgccgaggcttgttgagagaattcaagccgcctcatcttcctcctcctccaccgcaaccccagcgagcgtcggccctacccccgcgaccacctccactactcttcctaataatgataataatattcaattcaacgcttttctcaataatcagtctacaccactaccaccaccgccgccaccatcagggtcagggatcatgccaatggtaagtagtaataataataataataataataattacacgccagacaattcaagcacggcggcttcttcagactcgttcggggctcaagtttcgccggataataataataattattacgttccaacaatggtgaatactaataataataacaatgatcattacagcttccaagttggtaattacatgagtactgattattataatcatcatcatcaacaacaacaggctaccatgatgagtgatcataataataatcaagtaattcatcaattagggtttgatgatcatcatcatcatcatcagcattattataatcaaggttcaacgttggagcaaaataacaataataataattattacaacaattggaacagttctactactactactactactgatcatctagaccaatgcatggacccttctgatgagaatttatgggatgctgaggatatttggcttcttcaacaagctcacttcaacataaatggcaattaataattataataatatatattttcttcttcttcttcttcttttaatttaattagagagaaaaaaaaaggttaataaattaattaattagatgaatatataaatatatggaggggagagtaatttaagggagtacttaatattagtgtgatcatctcgatcgatcatggatatttttcaatttcattgtagaaaaaaaaaaacaaattaagataaaatgaaaatatcttaatttatagtacatatattcaaaactcatgtggattattattagtactatactactactactcacacagtgatcagattgtactttgtataccccttgattttttttttttttttctttcttcctatttttaaattgggtggggaaatttttaat

SEQ ID NO: 383613 - DNA, 1303 bp, Cannabis indica
taattagattttttggtccaaggccctcaattggcttgaaactagggatagacacggggtgtggaattagcagggagtgctcccacgtccccatccccgcttattttccatcggggatggggcaaagaatctcctaataggggcgaaaactgggcgaggaatctcttataaaaaaaataaagtttcaaaattatatataaaaataaaaatattattacacattaataattattcaaaatataatttaaaattcataaaaaagataatatacgaaaaaatgcaaacataaattataaaatattattaaaaatataaaataaaatactaaaggagtccccatcagggcagaaagtgtaatcctcgtccccgtcccatttaacattcgaggaaaaaaataatccccctccctgccacgttttcctatttagacagagaaacccaatctcattaggggcgggtccccacgagacccatccccataagaaaaatgtgcatttctatttgatacgggcctgaccgaaagtaaacataaaatttatgtatttttgcctagcatgttttgtagtttttgccaacttaaatgaattccttttccttttttctttcttcaaaaaataaaataaaatataaaagtaaggcactaataatatctaatattaacacgaagtgacgtctttgactaaataaatttgataactaattgtgattaatgaataataaaataatcaaggtagttatacctaagtgagtatggattgtacgttttatcttgtccattaagtactagctactactatttaataaaccacgttcatttcaaacatagctagctatatatatagatgctttatacacctttaattttgtgcctaccattttgtacattcttatgttcatatactgtactataaaatctagaggcttggagttggagttgccagaacagaaacatagctaattaaggttgatattttgttgagtgaaattaaactcaagaaatagacatccattgtaagttttctcatcatttttctgttttgtgtgtgatagtgagaagagaatacattataattagttatgattgtgtatttgtgtatgtgtatataacaaatccctttccaataagaaaaaccaatagaaagatctatctgtgccttaaaactgtttatatttacgaatgtactttcttttttaaaaaaatttaggagaattatcatgtattttttttaattttttttttaatttttataaaatctgtttttgttttaaagttatgttatttttatttcgagattacaatatt

SEQ ID NO: 383614 - DNA, 2245 bp, Cannabis indica
tttttttttttttgcttgaattattagtttattgttgatattgacttttacttgcttgtagcccaaaagtgtagacctttctttatacagattctgtattatttcataaacatgcgacatcatgttgaaactcaataaagtgaaatttcgtcagtagtgatactcaaaagctggtaggtgtcaatgctgacatttacgtactacaaccatagactcggtctctcttcctaacacctatgctgctctctgctctcttcagttcttgccttaacccccccacgaaaaaaattactatctttacattcaataataacaaagaaagaataaatctggtactatatctaagtttgatttgttatgttaaaaactttgagcagacattgctgtggctgttggggtatatggcttcatttagggccagttaaattgttcccataaatcccaaagaggctgctgattcatttcccaatcagtactactccctccagccattgggttatctacaagttctcctgagcttgaggttgcagacgaactttgagctctttcgatcattgcagcattctgattagatggtcctgcttcatccctttgttgttctcgtatgactcttgttaattctgttgggcgtcggtcaaatgctcgaaaactcccagatataatgtacactcggcacaagctaaattcatgtctcaactgaaaagaaagaatgacatggtagagatgatcagcaacaattagatatggaaggtgtttcatagttagtattgttatatagctatacattaccgttggagtagtgatgttgtttgagctgtttacttcctcaatggctctatactcgttcatcttccacttggttttccttcctgtaggagcttttcctttatagaaaaccattgtttttttcaccccaataactctgttatccgaggagtaaacatagctaggtgaaccagttgccttccaatatccggaagctgtagtacgattgggtctaccccctctagcttctctttcttgtcttggtgtaaagaagaaccactgctcagtatctccctgacacaactcacctgaatgctctgcaaaaaacaagaaaatgtatgtaagtttatgtatcacaacaaacaatctatatagaaaagaattggctgaattgtgtacttggtagatcccatggttctatgctgtaaatgtctatgactttgatgacacgattcacttcctcgcgttttgaatccagcttgttgcgcagatagaaagaaaccaactcctcttcggttgggtagaagcgaaaacccggtggcagctcctgctcatgcattggtgtcatttggattggaagtttcagtgtgttgttgtttagttttttaagagttgttgtgtctagttcttgtttggtttggtttggtttgatttaagttatttatatagatatgtagatttggaggaaatgagcaatttatgtgatacaggggcaggatttgccgagtgaaatgataggcaggcatagggcaaggaaaacttagacttggtacgcttgacgcggttatgttggaaattatgtacttttgtctcttgcgaaattattatatttgtattttgtatccaattaaaactctttttgaatcggtcagtgaatatatcttttgtatccaaagtgaccactcacatcatatattatatatagtataggcccaaatccatcttcttttctcgtgctctagtaaaggccgacaaaatgtacggacatacgacacctatatttatatttaaagtggagttattacatgtggcatgtaatcttttgtccttttgtgggacaattacagaatttagatataagaagggaaatttgacattttatgcttaaaaatgtttaatggtgttaaattatacctaattataacacatagaaaaaatataccaatttttttcttttcttccaaaaatactcctctcatttcaaacttcccacattccctctaactacattctctctcttctttccctctcccaaactcacgaacccacacccgcacgacccctcgacccagacgacccagacgaacccagcgccacccgcacgacccctcgacccagacgaacccagcgccacccgcacgacccctcgaacccacagccacccgcacgacccaaacgacccagacgaacccacgaccatacgcagtcgaacccacgacgaccgaggagacccgcgaacccacccacgactggaaaaacc

SEQ ID NO: 383615 - DNA, 2457 bp, Cannabis indica
aaaaaaaaaaaaaacttttaagacttttatttaaaaggaattttttttttggcttttggactaagtaggccctaagcacaggcctaagcccaaaaccacccatttggatgcagtacctaatggaatttgatcactgtcattagaaagtgaggaaacacacaccaacaaaaatattagttccgatcttaaagaattgtctataaatggattcaagagcttcattttgttttgaaaacttaatcaaactaacaatgtgaaacagtaaaatttataaaataactacacttaatttacacataatggtcattttaagtggcagatgtaacttatagtcgattgttggaagctgtttgtttgaggaccatgatggataagacaacaactccatcattatcatcatcaacttctcttcctctcctcttgaagatttttcaatttgtagttgatcaattagttgggatactattaagaatctcagtcactattgttttcatcatccgaccctcctcagctgctgcacatacaaaaaaagaaaagaaaaacagtaacaaattagtaatgatcattcaaaatttatgttcaaacaaagttggtatgaattgtaaatagaaataattacataaaatactaatttttatagtataaaattaacaataaaataacaagagtacaacataaaaaagaaagaaaaggtaaaaataaaatttgggataaaaaaaatagatatacagtgcaattttctctagttaattagtgtatctttagagagagctgaaatactagagttgttgtaacaaaccagttaactaaccaactgtggaaactactctaacaaccatgcaaacattgctgcaatgcaatgcaattgaaaaagaaagaaagaggcaattgatttacctgagtagcaagcaatgtatcatttactgaaaataggtcccaaatctcttctagaaatatacttaatcttttcccaatcagcaccaattaatgtcctcttcacacctttttaatagcatgttacattctttaatctccagtgtacgtattttaaggctgtctaattctgcagaaaactttttataataggggcatacccgaatcacaagtttttcaagcttttcgagtttgctgatccatcctgggattttcttgatagtacagcaccaaacatagagttcttccaagctccaaacattttgaagatcactaggaagattcttcagcttcggtagacaatcaaatgtcaaggaaggtagatttttgaaggccccccactcaattttaactgcatcgaaatctttaatgcctgcaatacgcatattcttcaaatttgaaagaggagcagaaccagatgatgatgcaatgtgggttatggtcttctctaacatctccaaactaatcctgtccataattaggccttcatctagattcggaaagagtggcatggaagacaaaaaggacaatcatgaataacaagttaagatagacttttgaatgatgaggatgatgcattatcgttgacttcatttttccaccatgtctttagcttaggcagttctgtgagccagagttcttcaaggctagacaagagctttggtagtgatgatgaggatgaaatatcttctagattgggaagatcgtccaacaccaacacctcgagatttgatatctgatcaagtttatctagatttgtcaaatttgcacatctgttcaatgaaagcttcaccaacttgcaaagctgtggacatcttattaattcaccctggaatccagttatagacatatcggttacacttgtacacaatgtaagctcttgcgttgtgcacttgcaattataaattttccattctatggtcaaggattgaatttcttttggcacttcattcaaataattatccaaatgatctttatcttccaagttaagtctccactttcgaatgtgaaatttttttgagagccttttcaagtattacacgtctttaatcagaagagagtttaaacttcgcaaaacttgtggcgataactcaaagcttttccatctcatctaactttggaggaagactagtcaagtcaatgcaaccatcaatctccagatgttgtagtgttggataaattcccatactattgtcccataaataaagttacaaggaaaataatttagacctctttataaagcctcaacagaccattataactcatagagttgtcggttctgttttcctaggcttaagtcttttatttcttaacaataaaaggaagcaaataaatatctcaagactctaacaactttcagctattcaagggaaaatatctcaacagattacaacaaactttctcagatcagaaacaaacacaacaacaacaacaacattataaataagtggttcaaccttccactttgagcaagagaccatttcggccagcagaggaaaaatacaaggcagcccttgtttgttt

SEQ ID NO: 383616 - DNA, 3400 bp, Cannabis indica
gatggagtacttattaatggaaaaggcccttacagatacaatgatacactcgtcgcagacggaattgattttgaaactattgatgttcacccaggtaatggcagtggcatattagagctcaatttttgttcagtcatcaagtggtattgccaaccaatgtttttatttagttacatgatacattaccttttgttttccatgcattttatatggttgcactttgctaagtctatcccctgaattggcatattgttgattaagtctgtggttcctcattggccccttaaccttttaccattagttgaaacatgcaagaggtttttaggactgttgtatctgtgttaaatttagtttttcgtattgttttacatatgtttaacattccactttccatgcattccttgtcattggttagtacttagtatctagtccttccttgacaattttgttactcatttttaaatttgaattttttgacaggaagaacttatcgtgttcgtgtccacaatgttggaatctcgactagtcttaatttcaggatccaagggcataatctgctgttagccgagacagagggttcatacacagtgcaacagaattatactagcctggatatacatgttgggcaatcttactcatttttgctgactacagatcagaatgcaagtacggattactacatagtagcaagtgctaggtttgtaaatgaatctatatggaaaagagtaactggagttggcatcttgcgctattccaattcaaaaggcaaggcaaagggcccccttccagagggaccaaaagatgaatttgacaaaacattttcaatgaatcaagcaagatctatcaggtttgtatagacattatctcaattcattaaaatgtgttttccatatgaaacaagtgcacatctgtgtgtgtgtttattggtatcttatactggaagtatgacatttggggtctacattgcttgtttccatcaatctagttttgactgttcgataaattttgcttctcttgtcaataaaaaagtttttgttgatttatctaccaaattgccttttaagaggctggatttcgagcgttattttgaggtttctgtgatcatttacttgccaagaaagcactaattgatagatattttgtttatttgttataaatttctttgttttcatgctacaaagtattgaatattcctaccaagttggataaatttggatgtaattaaaggttgctgaaaatccatattccatgctagttcacttttcataggttgtatattcacactttgcagatggaacgtaacagccagcggtgctcgcccgaatccacagggatcttttagatatggctctatcaatgtcactgaagtttatgtgttgaaaaacaagccaccagtgacaattaatgggagacgacgagcaactctgaatggaatttcattcgtcaatcctaccacacccatcaggcttgctgactggtacaaagtgaaaggagactataagcttgactttccaaccaggccacttacaggagcacctaagatggaaacatcaatcattaatggaacatttagagggtttatggaaatcattctacaaaacaatgagaccaagatgcagacctatcacttggatggatatgcattttttgttgttgggtaagtaaaacaaattgatttgtttctcatttgtctctgagtattgttttcttaacagcgattcttacatttagttatcacctcttgcaggatggattatggcgaatggtcagagaatagccgaggcacatacaacaagtgggatggaatagcccgtaccacagcacaggtatagttcaagaactctgtcttagtactgttttatgttggtagtaaatcatttggagttatcttttgagttttgttattccattttagaatgtgggtgtactaaaaaaagatgtttatagttaggtatgtgaagaaatttagtgtgtattattacttagcatgttattatattatctactagcgaattctcttggtccttgattgattacataacatgagatgatcaatgaaatccttaaaacgtgttcttgcaagcagtcatgtaatggttaccatacaaggatgtgacaaggaaccaagttctcagttgtaggccacttcatctgaaaaaagttttgtatattgtagtgtatactcaccgggattaactgatgatagctagcctgattaactaaattgctttcctattacttcatatcctttgtgattatgctgccctttgatgcttacatgacatgacaattacaaatcaatttgttgtaggaaaaaggtgtcaagaacatttgtaacagtcatttactctttcacatgtgtttcttattgtgttaatcctaaaaatataaacatgcttccctactcaatgtatgtttaggtttatcctggagcatggacatcaattctagtgtctctagacaatgttggtatctggaacctacgaactgaaaatctcgactcgtggtatcttggtcaagaaacatatatcaaagttgtcaatccagaacctactaacaagactgagttacctataccagacaatgccctcttctgtggcgctctcaaaaaattgcagaagtatgttcccttatactgtcatattaaaaaaatgatcaaactttgtcactctcttaacaaggagaaactcacatatactttgtcactcatttcaggccagaagacatttcttttgcaacatcaatcataggcaacaaatcaaacttcttcctcacattgctgatgattttatcatccgctgcgattcatattttccactaaaaggagtttcgtttagagtgttcactcctgtatggtttgttttatcactatcatcgcggcttcttagcgaggtttgtgatctgtgtgttagtaggcttgtaagtttagtcttgttgatatgaatctttcagtgattttgaccaccgcattcttttctcagtagatcttctgaaacagctcccctcctccaccacttcttgcttgtttaatttatttggtttatcattcttttaatacctatgatttatgtattaataacaatacttcaattaattgcagaccttctatttggttcttctatagccaagcaatgattgtcacaatttatattctctatgtattcaaatactacaaatcaaagaatctgctatacatattacatatatttgagattttaaaaggtgacacaaattgacaaaagggtccagctgattttcacatgctcctacttagtactttgtcctcatattaaccaaccaacaaaccttgcctcttctattccatcagcacaacactctctctaccttcttttactctgtttttgttttcttttatattgttactctctctctctctctc

SEQ ID NO: 383617 - DNA, 1142 bp, Cannabis indica
gagacagcttgtcaattatatagcacatattaataatttatattaatattcaaatattttatcaaacaatataacttaattaacaaaaatttaatcaaattgcatgcacaactaaacatatataatttatccacattgtagggtcagctctaaattttgagtggacatataatttttttttttaagtttttattttagagtaaaatattgtattttataaaaaaaatatatataatcttaaaaagaatttttatttttgaccactagactaggtgagtcttaagcacaaacctaacctgtttatgctcagggccaaagctgccacatcagttgtatgtagattttaggcatggcaaaatagaatttagaaatcggatcgaaacatgggaaacgataaatttacatataataattatattattttccttaatattcaaattaaacagattattattattgttttaaacttttcgtaccaattgcagctgagtatattcctagctatataagattaagatgtgtaattatatattctaatatatattaattataataattacatagtcaatatataatacattaatttgagtgtgtgtggttggttttgaaacttaatattctttctttgtgcgtggagacgacaataattaagacatgacttcacttaggttttcgtccataattttatctaattaatggcggcgcttatttaattatcacttaataacaaaaataaaagaaaaaagtttaatattcacactatatattaatatctatatgggaatttattttgtctttgtagtctaaaataatattaatacaataaataataaataaaaacaattggtgataagaatctatacaaagtttagcaaaacatgcaataaatatcttcggacaattaaaaaaaatagtaataatattttaatcataatatagatttttagcaattaaatatcattaattttaattacaacaaatatacttactaaaaaataataattgaatatagaaatttttacatgaaaaatccattttgcacaatttattacctaaatacctctacacgcctatgtctacatttttacttacaaagttggttttattacacaaataccacttagtcatcattccatccatca

SEQ ID NO: 383618 - DNA, 1108 bp, Cannabis indica
taaaaatgtcatatttaacataaaaattttaaaatcccgtagtaattgtaatttcatcttttcctattttaattacaaatttatctcaccattaactatttacaaccttaagcttaactaatcaatacatatgcctcctaatcaaaatcaatacatatgcattctaaacaaaaatctttaccacaaaatacatgaaaccaaacccaaaaatcctgattcccctacccaaaagaaaaatgaaaaacaacaaaacactgataaattcaacatcaaaaaatgaggaaaaaaaaacattaaaatcgatatcattctctgctatcaatcatttcataaaatcaccaaaaaaactaacatcataacatagaaccaaattattccatctacgactgctccgatttcttactactttcgattattgagaaactgtacaattaatcataaaatcgatgcttaaaatcatgttttatgaaaacattcaacctaaaatcgatacataaaataaaaagcatttcatgtaaaatatgagcaccaaaaaacttctcctaaaacgtttaggaaaaacccataaaataaaaaaagaaagaaaagtaaacattagcaataattatatgtttctcaacaatctgccaattaataaaacttgcttacatgtcgctttattattttcttataaccgcaacgaggtgtgaccatcggtggtgacattttcggtgtcaccaccaaagaaatcttatgggagcgtttggtataagtttaaaataatttgattataggaaaatatgtaaattgagcttggctatgtagggtgatatataatcatgttcctgttaattaaattatattatttggtaggagtgttcgcggtgcgagtagtgcggcttttgactatttttccaaaccaacttgcaaatgcgatttttttaatttctcaaacggcacccgcaccgtgaaactaaaaaacgcaaaaaccgcaccgcaaaaaattgtgcattgcggtgcgatttatgcggtttggactatcactaaataataaaactatcacaatacaacaaagtttgagcaacacttgtcaaaaatacaataagacttgaaaataaatatgaaaaaa

SEQ ID NO: 383619 - DNA, 3372 bp, Cannabis indica
aatatataaggtaattccctaaatgtgtaacactttagctttgtttctgttatcatgtttgcataaaaaaaataaaaatgataaacatagaataaatagataaatattttgcttaattgaacatattctagtaattttataaaaatgttagaaaaaatcattagtgaaaactaaaaagatataaatggtgtttggtaacatttatatttttaaatttttaatcacaaatataaaaataaaaatatgttttataaccatttttgctttaaattttaaaaacaaaaataaaagtatgttctataaattttattttcattttatttattgattttatttaagtcgagtccgaagtcggaaccgggggcaggtccggggccaaatcctaattcagtttctaatgtctaagttggggtcggtgttcaaaatattaattagaaaaaattgtttaaaaaaattttgaaagtattttttttttattttttttaaaatttagattcttaattaaaaattaaaaagtaaaaacgattttatagaacttgattttaaaaaatattttaactttttaattttaacaataaaaaactaatagaaaaatattatcaaacgcacccctaattaaaatgtaattaatgaagaagaggaaataatcttgtgcaagaaaaataaaaaaagaactatgtgacattatttaacatcctaagtacaacaagttctaaaaacaatactttcactcatcatcatatgctacaaaaaggggatgattgtttgattgttttcttttttatatgactttacatacaatctatttacaaaatgtacaaatcttattatataacattcttcttttcctttctttaatctcttctctagtttgagtttgagcataacaaagttcccaaatggcgtctcatgtcgcggcctgtgttagcaaatttgatggttgcaacagcctcgatagcctttgatggacttttaagctcatttcccatgtaaagctttgattgagttctcaccgtggtgcgaattaggatatcggttgagaacaaggcatcctaataggcgagaacaccacggtgagtcttgcgtgatcagagagcgaatagtcatctggccactttcctttctcaacttcagaaggaaagagaactgcattttttacactaaaaccaattgtttgttgttgcttactatctttcacaccatccttttcaacaacttcttcgatatattcatcgcgttgctcagatgctgcagggttccaaatccgttgctgcaatgacataataatttgacaacataagtacttattgtttcttgtatagttcttctaaggacgcgtttggttgggagtaataaaatagaaatggaacggtctttcttcctattttaaaacagaagaactattcaaccaaacaaatgaattgaatgaaaattgattcctttctattccactacctgcaaccgaacacaccctttttaagattaagctcggttgagaagatggtttttacctgaaattctttaaagtcaataactccattgccatctatatcaactaaatcccacaaatcctttgtctcttcatcacttagtccatagcaatggccaatcaaatttagctgcaggagaaaacacaaacaaaacttgtcatatgtttgaaagtcactatgtaattactaagtcatataattattaaggtagtaattatactaaaaattttgagagagtaattaggagccctcaattacttgcagttatactgttattatgtaattacatggtcagataaacatactaaactgtataaatacctctaattacacctaaatccaatttcaccgtgactttccaaacacactctgaagattataatgtaattgaatttgatcaaagatcaaacctgtcttagtgcttcacaaaaaccagcatagtttatgcaatcactgttgatatcagccttaagaaaggaaaatgcatcatgttctgtcattgaagctcttcttaaaagatactgaaaccattaaagacataacaaaagatagttatttcacttcaagaaaaatctcaaacacacaaaatgaaaaacagaatgaaaggccaaaaaaactgaccttaaacatgccaaatactgcttcagtccaacttgttctaaggaattttcgatagctattcgggttaagaagccaaatgaaatcaacaccgcatatgttgccacgatggttgcgatggctaacccactaagacaagaaatttgaagagaaaattgagcaagaaaatccccatcaagaatacaaaataaaaaactcttttttgagtgaaattcatgaaactatggtaccttgtgcgcgtctgcatcgtcgtactgatgcgcggtatcataagaagaaacgaagccaagagacctaaggaacttgtaaacatgtcctcttttgcttccattccaatcactagaaaaaacataacatagaatagcattgcaatagagaagttaggagtgagttgtgttcaaaatctttggtatgaacaaagtgttataaattacccgcaaagtataattggcatggaatttagattgttctccttctgatatgattcaacacattgcaggattttgtagacctgttcattcaagaacaaagacacataattggtaaaaaaattagaactttgaaataatgttttctaaagtgaccctttaaacaaggtgttagtattcttattaggaaagttattggatctaactcaacctaacaaaaccgacttgttaagggttttcgagtagttataaaccactaactaatcccatacttaaaagaacaaagaatcaaaagtggattcattacctgatgtaatctaacaagacacaagcttgaatcatgagggaatagcaagtgagtattgactaatgagaatctcttggttggtgatgggatcattatttcgacattgtgaaattggtgaagctaattcaacatgtaacaattgagcaactctatctccacaatcattgaaatgcaattctctactgttaagtactctgaagaaatccttatgaacagcagtgagtaaccctattaagagaaatgaacaaaaatacacaaaatttagcaaaatcaaaagccaatatttgtagaaagaaaaaataacaaaaacccagaaatgggaaaacagaattattcaaaaatagaaaaaaaaaaaaatccaaactttaaaaatagcatgttgatgttgtttttcttaaaataaagtttgattttttaagaaaggttcatattaatattaatgtgggaatgaaagatttagaattgaaaacaaaaaggggaaataataattaagagagcatatatacaaaaaactatatatatatatata

SEQ ID NO: 383620 - DNA, 2018 bp, Cannabis indica
aaatattattttataatttaaataatgtgttaaatataaagctttttcttttaaaaaaaaagaaaagaatgaagagaaattctcatcaaaagaccaaactccaacaaacatagtacaattcaaatcacgtctggactactcaaccactaagttttagtattttcaagcgaaatggccaatttagccatgttacaggtataacaattggcgtttcttttacaatgagaaaacataaaaaccttaacagaaataatacaattataaatgtcattaagaatattacgaaatacagcaaagaagtactcctttctattaagaactttgacaacacactcacagtcaaactcaacctctatatatagtagaatagcctagcctcaagcaaagaagaaggccctgaaggacagcaatagcttcagctatcgataatgagaggaaagccgatataggtactacccctgatgcaagggtcacgccaagatgattacagagaactacactgattctcactttcctattaatactatcaatactggtatcaacatcaaccttcaactttccaacattaggaggagtccaagtcagaggatcggcatgagtatttaacgtccgagggataggataatgagaaaaaattagcccattagcatcttagaaccttaaaagaaattctttagaccaacccaccacaccctcaatatctaacaacttcttatgacggaactattaatcacgacgaaatcaacaaacctaactcatctttagtatgaaaagttgcatgttttttgataaaccctataagatttgttctaggaagaattgacattgtaagaacaaatctatacttgggaagccaccgaatggagacaagatcaattgcataaggcatggaaagatgtctctttccccacaccacaaactaggcaaccaacatcaatgaaattcatcccttgcatgaccaagttacatttagttagaaactaatctaagcaagcgtgctaaataaatactttaacctttgattgggaaatttatttttgagggaggtgaagtgaagtgaaggcacaaaaccaacatgtagtctcgatttccctctctttactctctgttttctggtttgattctttacatcatatctctttaactctctctttgtttttctcttttctttcttagtatttctctctcaatgagagccttttttactctctctctaactctagagtcgaagccacaatgcaggttgtaaaatattcactctttctgatatggttttcttttcttttatacaattttaatttgatagttgagaataagctattatgaagtttgttagaatcttgagagagtattgagttgtttgttgtaactgtaatcccttttgttgggagttggttgtgttgttgtgttgtagagttataatgagttgttgagcctcctctgttatttatattccttgtatttttaattgagattgataaaagagataacttgtgtgggaatttatgcaacaatttctacctaaatttgcatacaagtagtctaaaaaagaggtctctttcttttatgttattctatatttttgtatttgagggtcatatttgtttttacagttaccatcctttgtcaacttccaataagttcatctagtgtttgaactttttgagagtcaccaccttagttctcatgtctgctaggttctcttatgtaggaactttttctacttgaatctctccttgtgtcactttatgccagataaagtaatatttgatctttacatgtttagtcctgtcgtggaacacaaagtttctacacatgtgtacacaattatatcttactatagagtaaactataagaacctatttaattagcttaatctctaagtgtcctttcatctattaattagcttctttaatagtttttgtggttgatatgtacttagattctattgtcgatagtgcaaccactggttctagttggactttccaactcacacagttactgttgggttttatgcc

SEQ ID NO: 383621 - DNA, 2165 bp, Cannabis indica
tttcttgaaaggagtggtcctcttattgattttcgatgaagccgggactccaatatcccctccaatcttacgaatctcatacaagtccagctccccaaaatttttaagatcatataataatttttcttgagcatgaaaaaatttagttagtgccttctcttcatcagagtgcactttggtgccacaaacaacatcaggttcgatagagggaactaacgaagtgggcttctcagcttgcccgattcctttctgagcattccctccattattaattactaatgaagaacaacctttatcccttggtttcccattaccaccttcatttgatgcaaatccattgctctctttcaactcaggcccatacggtttaaaagaaccatctggcaaggaaggcccaattgtaagagaggtaacacaaagattggtctgctcattagttgacaaacacggcccaagaggggtcggcccaatacccagttcattaatcccattcgggttggaagccacaccatcagaaataacaagagtaggcccaccattatcccccaacctcgacccattagaactaggcccagcacatagaccattatctccaacggtctcttcattcaaatcttgtatacctttctttggccggtctttttcattcaacaccacaataggaaaacaagcaggtgcctttccttcatccaggccctccgtattttttcccctcccaaaagaggcaattgctttgacggatcgaaaagggccggacttgggaagccacgccctacgctaggacttcccgaggattgcatcgccacgagaggtcaccatcgcagggcgcctcggccttctcacctggttagagttgatgagcttcgggtcttctccaccacccgccatggtcgctggcaacgagatcaattttccagtcgccttcctttgagtcgcagccaacaaacgatgagaacctaaaggtttcggcccagagaacacgtcacggtacgcaaaggctgtggagagccagggtccgaacataggaaatggagtgccattaacattcgtaaccataaccggcgacgacaagctacaccccctccgttgatgtcccagcctgccacaaaaatagcagaaaattcctattttatcatacttcacttgtaccagccatatcaaagaaaaaaccagaaacaagggggttgttgatgtcgatatcaacctgcactttcaaaaaatcatcccacagagcaggtttttcttcctgcaaatctaccttcacaacctttccaaccaaccctcccaacagattgtcattagagatagaaaagtattcatggggcagattgtgaagatggatccccacacgcaagagatgaaacactaccggcccatcagtagccggtgtccacgctcagagaactagcatataccctcggatgcaccaggggccatggagaagagcccagttcctatcctccgcagaggcaaagccgaacctaaaaacgttagaatcctttgaaccatcccccttggccaaaacagagacttgtttattccacacttttgccacaaactccacaacatatggttcttccacaaccataagagcaatgactttcccatatagacagcaggatgctagagcatttagcgatgaagcacacggagctaagttgacagaagtttcattgcaggaaaaacacttgccttttaaaggagagttggtagcaataatggactccataaatacccgacaaaaagcatacaaaaggaagaaagcaagaatctttaccaaccccaccaacccacagaaacctaataaacaaactggactaagcacaaacaccaaatctcccacactgccccacaagagtcaacgcaagagaaaccaaaacacaaaccggcaaagagaataaaacacaagcagcacaaacactcccttaagaaatagataagacacagcaaaggagaagggaaaggaccttcccttaagaaacacaaacagacagcatatcgatacaccagacacaaaactctctcactctcactctctctaccgccttttagtcttagttattataatactttttgaaaaatattatactcatctgttatagaagggtaatttcttgtagtgtctcgcctaaacgggacactaatatcagtttgttgaaaacctt

SEQ ID NO: 383622 - DNA, 3762 bp, Cannabis indica
ttagttttttttttcctttttaaatataacatatataattcctgttagagatatatatacacactggtgaggtaccgattccaagatctatatttaaatattgcttaagatcaaccttagccaaactcattggaacttctttattaattagagtgaagatttaagtatagggttgtctctcacatattttaatttgacagagtaataatgaataaggagtatgtcactttatcattcacacagactttaatagagtgatctacaattcaaccaccataaatctaccctatgtagttgcatatataattaaatatatatatatatataaaatgtggagaagaattataatttatgaaattgtcaacttatattatattattaattatttgcattgagagaaaacacttttacttgttcttagattgtttgttagaccaattctacatgactatttattataatattcatataagcacgtggggtaaactgatcaaagataagtttaatttatattattactgcatggatatgcaggcttcatttcaaatcttgcgtactacgtattctgtcaaaaattattcctctcgtcttgtatatctacatttggtttaaaagttaaacccagaaacaattttttaatttgtcattctaattattgttggggtctaagtgtttgatagtgaatagagtccatctggtacttgggatcagttgaggccaacccaattttgtgtgaatatatgggtgaggacacccatttgaccaccatgcacaactcctccacggcaaaagcaacatagtccaccatctgcaagaaatttctatctataatttgtcctaatttttatttcaatttaagtacaacaactatgtatataaattaaatcgttctaactaaatactaatcctttgcaaaattatataattaataaattaataagtttacagtaaaaagaaatgaattaaggcatttatttatatatgcatcttcaaatgtattttgtgtaatatataggttatctagaattgtgaattaaattttaaattttattattattcaatactttaaaatgttaaacactatatgcgtgtattgcattattaattgttaaaaaatttcttatattatttattaaaaaaattgtggggaatttaatgctaaaatacaccgataacttcagataaaaatactataaaaaataaaaattaaaatataatgtcacattttgtggtgttggcaccttatctaaatattaaattctaataacattacacctataatatatgattacaaatgttagaagggacccatatatatttcaagatttaaagattatgatcaagcaaatattaatttttacttacgtacatatatttattaataaataataaatgcaatatatttacaaataatattgtgttgatttagtcagtacgcatatagtttatgtttgcgttatatattacgtaactctttttatctttcttttttcatgtgacgtactttttcatattgttttttcccaagaaacgttttcatcaaaattaattattagagtaatatactgtcaatccatataatctactatatctcccatgtatttttaaagtgcgtgtacaattaattaggaatacttccctatcatggattaacaatgatattatctctcaaattaattcgtgatatctaattataaaatttatcaagaaaaaaaaagttaataattatcagttataccattgattgtttcaagcttaatttaaatcattatttggtgaactaaaattgttttttgtttcccatagggtgtcttcatccctttctctacaatacattatacaaaatttattttcgagaacaaaaaaaatttatttgttcagaatttagaaaggaagtttacaacattcataattatatatttcgatcgatttttggcaatttctaagttgcttttgtaaaatttccacgaataaaattctatcattttacatttacccaaaaaaatttacttaattatgtggacaccatttataacatgcacactactaaagtgttacttgtaaggtgttgagttggttacaattctgttattagatgagttattggttattactgaattgtgtgtatataatgcactgtacctcctctgttttcgagttaatgaaatgagcattcattcattctcaattcttcttttctttctcttctgaaactaaaatggtatcagagccaaccgattgttgagctcttcttccgcttctgttcttcttctttgtttcctcttctccatggctcgaggaggaggaactcaaattcggagtaacaacaacaatggagttgctgctggttccaatcgattctctgctttggatgaaagcaataagcttcctactactgatccacgaagcccttattttcccgtccaatggcgataatgcctcttcttcactggttcctaaaattctcactagtattgcttatcttataaatagaactcccacacctaatctcaaacataaatccccctttgagattctgaattctaaagctcctagttatcaacatttaaagagttttggatgtttggcctatgcttcaacattaggagctgggagatctaagttctctccaaaggctactgcttgcattttcttagggtatccccctcgaatgaaggcatataaattgcttgatcttagcacaaacaacatttttttactctagaaatgtaatatttcatgagcacattttcccttttttaaatgaaagcaatttgccttctaatttttccaatttttttgctgctgatgcttctcacaaacatattgatgctttcaattcacatccccatatttcactagcttctgaacctagtcccaattatcatgatattcataatgctcctgaagacgatacaccagatttcaatttactaccaactgttcctaattctgatgctcctaatacaccaatttccatttctaatcctgatattgttgccattctcacacctgttgctaataccaaaattataagacatactcaaagacctacctatttacaagattatcattgctttttgtccactaacaatgttcaatctcatgtcactaaagcttctacaaatcatctcatttctgatataattgtttacagcaggctgtgtcctcaatttcgtgctctggttcttgccatctctagccactttgagcaattgtatcaccaagccaaaggaatccctgtgtgggataatgctatgaaccatgagatcacaacccttgaatatctaatgggacttggatcattgctagtcttcctgctggtcatcatgcaatcgggtgcaaataggtttataggataaaatacaatgctgatgggtccaatgaaaggttcaaagcaaggcttgttgcaaagggttttagtcaacaagaaggcattgattccaatcagacttttgccccagttgctaagcttgtttctttcaaattaatacttgctcttgctaccattaatggcttgtttttgcagcaattggatgtcaataatgcttttctgcatggagatttgtatgaggaggtttatatgactatacctcaagggtatagtcctaagggagagtttccacctaatgttgtttgcaagttacacaaattaatcatggcctaaaagcttctaggcaatggtttgaaaaattttctacagcatcactcattattcatacaacaacaaggatcaagcatcataatccttcttgtttatgt

SEQ ID NO: 383623 - DNA, 836 bp, Cannabis indica
atttttttaaaaaaatatgatttacaaagaaaaaaaaatatatataattaaatatatattttaaaaaattaaaattttttttaaaaaaccatctatttgtctaggttccgggctgattatgggccaagtctttcgacaagagtgggagcccaatagtgtgtttagaaggttagacacagtccatttactctgtcgtttaaaaagcccttgcctacagaaaaccctcgaaaccctagcagttgttgtggtcttggagagacgatacgcagaggagattgcggcgaggcaacacaaagatacatctcatctcttcaggtctctttttcaattcaattcaaatgcgaacatttctttctttgttttctttgtatgaaattgaactgcaattctgtactaaaataggatttttttttcctggtgtttcagaacattaaataaccatgtcgatcggagagctagcttgcagctacgccgtcatggccctccatgacgatggagtccctgtcactgtaattttctctaattcttcaaacctttccaattgtgttatgtgtttctgtatacatatatatatatatatgtgtgtgtctcttgcttaatttgatctttaggattgtttttatgtgtttaaaaagtagataatttatcttaaaataattattcggattgttaaataatctgtgtcttgttgtgttctcttctaataaaaattgcaattgttttaattaaaggctagcatttgctcttcgttttcactgtctttagttttttggtctttgatttatttttattactttagattactatttttgattggagaagatagataggattta

SEQ ID NO: 383624 - DNA, 972 bp, Cannabis indica
tttttttttttttttttgaaagccttctttctatagttttaaaacaaaagtgtaaagtattaaagaaaaccattcaacaaaaaaaaataaaaaaaacggattaaatgtactttctaaattttattttactagtttctctatataatatttaaaagcattgtctgactgtatcaatcatggtttgcactttatttatgtgataattttcttttccttcctttactaatgtgaggattttctatataagttatgtgacactatgaaaaaagttgtcataacatagtcaatcagtagggatattctttaacagcgtctaatcttcttcatttcctcttgctaagtggtggtgtgctttgtggcttttaaaagtttcaagcaaatttaagatttttgcttagcaaattttccaaaatatccttcttactagttctttctcttatcgattgcatgccccaatttgaagttgttgtttctattgtagttggtattgtaataatttgctacatgtcttcttcctttgtcctctatatcaattcaaatttggaaactttttgatttttggaaactttttgatttttggaaactaatcatacagatcttcaatcgtgagattattacattgaggacttctcccaaacattgcacatgcaacctcccgtcccaactcctgaatctttggttctgataccattaggtcaccacctcaccttaacatgatattgtcatatactattgtctgctttggttttataatgtaggactttagttgcacacccaatattttcgaatgtatattttctacatgttatacaaataccgcggcatatggattagcaagatatgcactacttataaaaaacgagatcacttgattgaaagaaattcttccttgtattataaccaatatattatcaaatttttatcaataaattagttattatatagggaaatttcactttttgaccctaataa

SEQ ID NO: 383625 - DNA, 1404 bp, Cannabis indica
aactttattatttttttaaaattataatgtgttgcagaataaatcaataatttttaattttgtaagctcgttatattgagatttgtgaatttataaaaatttgacaaaacattcaatgcagattttagtcactatataattttatttttacatgtatttttattgtaactataagtctctgatttgttttacatttttttttcttttcatgaaaagttattctccccatattattgatctatgatatattttattaaaaataacggaataaactaggtcaatatttttgtgtcaaacttgacaactaattatacatatttatgttatcatatgtgcttagtttgtctacccaatttatattacagtattaattagtattattttaagtaatgattaaagaaagactactataaatttatatatatgtacatccctgagacttattgtttaaaaaagactagttgcattattttgtctttataagtagttaagttacatatggaacttttgcagttgaagtcgattctcgtccatgaaatataatttggcttgattaaagtttatcaatcaattaaataataaatagtaatgttagatgttggtacagtaatggtagctgagacgatttgagcactaatcttaggaaattaagggagtgattttagaaactcattaatatatgccggaaaagggcaggcatataaattaaattaagcaagtgtacccttttcgccagtattttatattatttatgtgccaactcagcagtgacgtgtcgtaccttttactttgccatgtttttataggaacgtgcaacacacaagcttcaaaataaggctgttttcttccacaaattaatctaattgccaccttctccaatgtatagatttggtataacattttatacttaagaaattgaaactagtggagtgaggttgtgctttctcatctcaaaccccttttctctttctcttttcctttccacatgttcttcactttttgcctaataatttcgttgtcttgacctcttcaactcctctacaacataaacttattcatatatacatatgtatgtatgggttaggtgatagtccttcatggacattccttattacttattctatcttgcacttttcaatttttgtttcacaaattaaattgtacactcatctacaaaaaaaattaaattgtacactgaaatatacattagcgtatataataatgatggtacgtggtacacagttgttactacctagtaaatataaatatgcatcagctgtatataatagttagaaaaattagcgttaaaaatacacagattttcaatttactaacacttaatttatatgtaaatgttagaacatgtttgatattgttttctgttttttgttttaaaaaattgtt

SEQ ID NO: 383626 - DNA, 1397 bp, Cannabis indica
gttaaaagaaataaaagttttcgacagtccttcaccactttcccaagcggtgaaactataataatgttgatgcgaatagcttgaacaattgagagacaatctgactcaagtttaactttaggccacccatattaatccttgattcaacttatggctaaagcttcagccatgtctggtgccattgtacccctacgatagaccgttttggcctgaatcaaatagccatgatgatcccttgccaccaacccgaaaccataagatgaactgtgataaaaaaattgctgcattaatagagattttgattacattatcactaggcttaacccaagaaaccgtcccatcacttgtaaaatctgagggatagtgaataagttgcagtgttaattatgtataattaaataaattgcagactaattaaatgcactttgtttattattatgtcaatttacaaaactagagggtctaaatagttatggataatctttattatgttatcatatatattattaattaattaattaatgatctaattttataactttttttttacaatgtataaatatttttatgttcactacaaggaaatatgcatatgggttgattaagaaaatatatgtaaaacttaattaaaccggtgaaatatctcattaattagtccaaatacttgataaaaagctatattaatattttaacttaagtcttaagggaaatagatataatagaagaatattatatatatttgtgtgcatgggttgattaagaagtaattgattgcttttactggataatatatcaactaattctaactttataatcagtttttgaaaagtcaaattattaatttttttcaaaataaaagttaatttatatattataacgggacctaactaattaattacttttattgaaagttactatcattatgcatataataaaataaattatattacaaattaattaataagatgaaagttaagctagataatagttaattaagttcgtgcttaattaagaacatcaacaaattaattaaatatatatatatctaatcataattttttcaatctaatgatcatcaggaaaaggccaaaacagagattgatgacgtggcttgagttgggtaggagcacatgggcaaagccttgttttatggagtgggagacttgttctctcttatcacataaacacaataatatataattttccagtgtttttcattaattttaagttattttatatactaactttcagtgacggattttactttgttggggcttatttaccattcaaaaatatttatatttatattataattattcttactagatttatttaattttatgtgggctttttttacgattttgatctataattatcaaatttaaaaattaacattt

SEQ ID NO: 383627 - DNA, 1474 bp, Cannabis indica
acattgtctatatcacaaagcatatgtatatgctaataaattatctctcactaccacacacacacacaaccatacatctctcagtaagtagtgactttttccattgccatttatataaaatcattagcataccataatactggtatcaaaatgcgaatgttaatctacaaagcatgtttttaatattcaaatcgactagttttatacggtttaaaaatgagcttgattgctttacaagtgttactttagaccaccacaccaagagtcatcataaccgatgtacagccacttaaattattgtgggataaaagtaataataacaacactcacggattggctatgcatatcctaaagctagacaatgagcttatttggatgaaaaaaatctcccttcctatttgtaatctttttcttctacgtcataaaagtgataatctgttttgagcccaaaaaagatcaatgtgggatgatggtttctgtggaaaaatattataccacaccaccactcaaagataggggaagcaagaatttgaagggagagtaatgacatgttcatggaataaatttgaaaattaaataccatttcaggatctagacacacagtatgccaaccactgaacattgtagcaagcatggaattaggctcacgttgagtcaaagtatcaacagtagtgtaatatttcttccctcctgcaaccaatagtaaattacattcaattacagattggttttaactcatgtttaaataaaaaagaaaacatgtaaagcatcacaaacacaccaaacaacaacaataataaactcgggcagtgctacacaggtcaattcagtaatcacagcagctcagagaccaaaacaggaaccttataatggcagttggatggtgccttaacatgctcatataatgtgtaaagaaagacaagtatgattttgtatttgattggttaatattgttgttcactgaccttttttgtttataataagatacaattaaaagagcaaatcacttgtattgttcctcctgattgaattttccatgtttagatactttgaccaagttctaactcaaattaacgaatgaatgttatatttatttactaataatttataagagagaaagagtatgagttttcctaacaattctgaaactcagaagaaaaaaattgatcacctaatctccatactcttactactaaaacagatgatcaatacagctaattagctgaattagagagtaagctattgcttctatcctccaagtggatctgatcataatctgtgaatgttaataaggtaatcaaaattgagggggtttttactttgagatgaacattcattcaagtaattaatgtaccaaagattatacaatatagaaaattaagcaaaggtatagatataacagagagaaggagctaacctatattgagacgaaccgtggaagacgagtctgaacccatgagagagagagagagag

SEQ ID NO: 383628 - DNA, 1385 bp, Cannabis indica
caaaaataaaacatgcttaaatttttctaataatacccattcataaggatacccatgacatattatagatgaacatgggaactgtgtgcaacaagcatttctgatgtattatcagaacttgttggggatagctatggatggaagacttagagttaatcagacagttgtggaccttggtccaaagatcactaatttgcacagaaatattatccaggcagaattcacagctcaagaggttaaagaagctttcatctcaattcttggaatcaaatctccaagacctgatggctttggcagtgcattttttcaagataattggcagttggttggctttgaagttgagaatgctgttctttctttcttaagctcatggtaaatttgcaaggagattaacactaccacaatcacactcattcccaagacaaattgtcctgtgaatgtatctaatttttgtccaatctcctgctgtaatgttttatatatgactatagcaaaagttatatgtaataggctgagaaaagtgtttttagattttatagctgtgaactagaaaggctttgtatatggtagatacattgctcacaatgtaatggtatgtcaagacctaatgaggctgtatggaaggaaaaattgtaaacctagctgcatgatcaaaattgaactgaggaagacatatgatattatcgaatgggggtttattgagaaaatgctttatgcttatggattatctcattactttattcagctcataatgacctgcatcaaaacttctaaatttttcttactcctttatggttctatatgtggcttctttaatgcaaagagaggactaaggcaaggcgatcccatgtctcccttactctttgtgctaggaatgaaatatctatcttgaattttatgaagagttagggaatggccaggttttaaattccatgatagatgttcaattctgaaactgaaccatatgtgttttgtagaagacttgttgtgttgagcaatgaagatttcttatcaattatgctcttatcgaaaggcctgaagcattttttctcaacttcacgattgctgcctaatgaaataaagacaacaatctaccgctctagcatggctgaagttgaggttaatatataggatcctggatgcatctggattcacacgaagctccttgccattcaggtaccttggcatcgctatatgctctaagaaaattttgactgttgaatgtaaatgtattgggaaaaatggttaacaaatgtaacgccctgatttcccgagacgtcacacttgctagtccgtttaaaaccatttataataataacaataaactaatttattgaaaataactaaagcatgagatctcattattttaaaacaaaaacacttga

SEQ ID NO: 383629 - DNA, 3952 bp, Cannabis indica
tgcgcctcactgttttaccgcgtctttgaagatgatttcaatcactacaacaaccatctaaattgttgttttccttctccttttcgttttacagcccatccaagcatcattcactgcttccatctacggttattgcctccttccagcagatccaggtttacttatttttttcacttacagtcttttttagttattcaaatttgctgcagtttcatatagcatagtgtaaacttatttgggttttttttttttttttttgtagttattgttgtggattactgcattgtttggttttcattctcattttatttaaatcatggtttattttcgatctaaggatggtgatgtgatattccaatgtttcaataaagcctctgtgctagtcaaagtatatgtagttaaagttgcaatccactccactgtattacataaatattaatatagatagaatgtgttcttacttcttaatccctagcaatattttttattttatttctttttgaagaagaattaggtaggacattagaccatcattgtttacaatagcaaattgataggtttgaaaaacttctattcatgcctcttgaaagaggtttttatggctgattagttagtaatagcagaattttggattgcaattttgaaatgtctcatggccatactctctagcgtattttgacttttattctggattgttgttctgctggcaatgttttaatggccctcctctcggcagttcgattgtgttttaacaacatccacactataatgtatgtgtaaactatggatattctaaatgcttaaaagctatattgtaattatgcgtgtaatctgatcgggtatcagaaacttcaactcatgaataaatcaatttgaaataagctattagcagtttggcttattgcaaggcttgcaatattgccatatccatcaccatattgtcgcaagacttaatagcaatttctttgtattatcaagtagtgtgacgtgcgtttagttaaactagtgtgtattcctttgcttttttttgcaagtaaaagttagagtgggagggatctaagaattattttgatgtgttaacttatgattgtgaatttcatttgatagagtttcaatcaatgtattcaatattgaatgcttaaatcctgaaatttttaaaatgagaattctgtatttgtaggccgctcactatttgtgtttttgaattgataaggttgtttccaaatctacaagcaaccagcccctaataatttttgctaagacaattctcgtaaggtactgctcgagtttggtatactaggtaacacctttaggacattttgttcattatttttagtttaatttataatggacacattctatggcattgtccaactgggtattacctaaatctctctctctttctttcttgagaagatttcactcattcaattcatttcaaaaacacacacacaaaaaaaaaatgatgtcaagcaagccaaaaacaaaatgtgttttttaattatgtatgtgtaaatattttaaggacattttcaaattgaggtcttttgttgcaggacaggagaacaggatgaaggtcaatgtcttgcgtatccttattgatatataatatgtttgactagtttgacttaaaaattcagattatgcaatgtatataactgctccttatctctattctctgctctctcattaaattagatttatgatgtcaacttcatgtaagtttgcctattagagaggcctataactgatagtcctaaagaactttagaagatcattatgaatgtatttgctttgaagattctctctgtctattattaattctggtacactaattggaaaagccttttatcttcttgaacaaattatgagacagaacatccattttcccctttactaaatgcacctacaatggatttcttagttttttggctgttagtaaccagtctaaatgtttttctttcagtcactttctcattagtttgtattttagttaaacagtggaaaagccctttccttctatttggaagttgcctgattggtaatattaacaccagaagttctgttgtaaattcaatctcagttaccatgcactatatacgaacagtttttcccttgactcagcttgtttgaaatatctgctgctgtataaaacagagtaagtattgttattatttcaatttatagtgtgggttataaatatttacttgaaacacatgctagaaatctctagtagaacaaatcataattgatttcacgaactggatatgttgatcttccaacactactaatttgcttatttttcatttaacattcaattcatgggctgatttattttgtctcattttattggagataatttgtgttccctctttcattcataggtggcatgctgttgcttcatggacttgggatgcacaggacgaaacatgtggaatttgcaggatggcatttgatggttgttgtcctgattgtaaacttcccggagatgattgcccattaagtaagtttttactcgctacaattaatcgactagcttcttcatgctcctaatgaattcaataactagtttcgtcttaatatatatcttacttagtagttggtgctcattgtctatcctaagaagttgatacttggttggaacaaactgatcaataattagatgggattgtcatactggttgtaattcatcttttaccttttagacctgagaagagaccaattagaattacctcaatcttcattctttaagcattttgaaaccattatatgaatattttgtgtttataaacctaaatatttttcttacttgtaaaatggttggttttgctgcagtatggggtgcatgtaaccatgctttccatcttcattgtatcttaaaatgggtgaattcacaaacatctcaggctcattgccccatgtgccgtagggaatggcaattcaaaggataagacttcttcttttcatcttcatctttttgtatctttgtgaaataaatgccaacattgttattttactgttaaatgcctcaaatatcacctgttccagttgtctccatcttctcttttttcttaaattaaaaacaaagtaaaaacttatcaatttggatttggtttcttttgctttacacggggggtaggaaaggagtagctttctcccactttaagggccccaatccaaacgaaatttcctaaataatatatatttttttatagattgaattgaattgaagagacatcaaagtcttggagtatatatgatatgggttttagagtgtattttaattttgtatatagcaacacggcatggacagttggccatagcactctccttgaagatccaaaaaagattttaaataacgatattgttttttttttttaaaactgttgtttgaagaggaggcaaaggaagctttcctaggtcgtgtactataaggttatattgttccttaacatatatttcgtacaaactaatttgggcattaacaaaagacttctctggctaactactgaagctcgaaattttaattggagaaagaaattataaataaataattaaaggaaatgaaaacatttggtgtgtaccacgccatagttaactaatttgtagtggtagagacgtgtttgaattttggttctaaaagtgtaaaagtaaaatttcacgttaaattcgtgatttttttatttttttaattttttataactgctaagggttactttgaaaaataaaaatctgctaaaaatgtttggaaaattctataatgcattcctttaaaaggaatacactaatatatctctattgttttagaattcgaaataattttttggtcaaattttttctcatggtcatataaattatacttatttaagacatcctgcaaaattttaataaattttaaaaagtttaacacgccgaaaattgcgttcaaatagtgtgttgcacgcgtgactat

SEQ ID NO: 383630 - DNA, 1357 bp, Cannabis indica
gccaaaaaaggactttacatctaaaaatagggctaacgatgatctttcttatacagagactaccataaaattcttctacattacttattaaattatgacaattaaaatctgattttagatttaatcacactaagtgtcacattttataggttttatttgggatgccttagagcaactcctgagagactccttatatttgagctaaaattttattttaggacgaacttttgttcagcgctctctccaaccaaactccctatatattttaactcaagtaattgtacaatgttaatctatttatttatttttttaatggaagaattgtataatgttatttaaataaaatcataaagtaaaagttagctctttaatatattgaaacaatgtttttttttttttattgtaattgcattaaaatatttggaaagaatttagagaactccccacatttagctagttccttaacattccttggaggatagtattttcaaaggagctccctaaaatagctaaggagccactttgcgattattatgttgcccaaaaactaaagtccaatataggaatatttgttgggtacattggtcaatctaatgtgaatgtgatttaagtctgttgtccttgatgggttaacagttgtttaatttgttaaacatgtcattttcaacaaaatgtagtggtgagtagcgtttcttacttatataatcgggcaataacatctaacaagtaacaatcataaatgagcagcattagattaagggtaaaaaataacaatatgagatgcatcataagacacataacttgaaaaaaatatgataacctgacaaatcataggcaaaatatgctttattttagaaaataggaaagaaaaaccaatggttgcaatataggtcataacatgataacacacttcgaaaacaatataaaattagtaagttgagtaaaacataaataagtgtacatcaaaacaggttaaacaaccataatttcattaaatttcaggttaaacacacgttaatttacagtagccaaaattgacgcgtttaatacaattaggtgcatattaataaatatattataaatatgttgacatgaaattagcaagtgtattaataaagctataacaggttatacatgttaaaataataaatttgaacctattgattttttttaggttatacatgttaaaataatttctcttttttgggacttttttatttttacacttttaaaacagtttttttttttttttttattagtgttattttacgaattctacatagaactcctattgcaactacgctcgactaacctaatgacaaacaaaatcgtatagaactcctattgcaactagcgc

SEQ ID NO: 383631 - DNA, 3272 bp, Cannabis indica
ctatcttaaaagcataaattgtactatatttatattacaatcctaagaaagataggttctttacccttttagtaatggagtgagaaggtggattaggacacttgcatatttttaactttgttttgagcttcctctttttatattatttagaaacatggtgagtgacagaagtttgatgactttaaacagacggcttgtagagtttcatagggttgtggatgagtttattggaattgctcgaatgcaaataaattttgctggagttactcaatgcccttgcatgagatgtctgaatgtgaacttcgagactccaaataatgttagggtgcatctatttatgcatgtcatccgatgatcgtaaacgacctggtattttcatgggaagtcgttcacgcaactggttgtaaaaatagtagacaacgataaagaaaaaatatcggatgtgatagttgatattttaagagaagatcttaattttgacaatacaagtactaccactgattccttcaatgacccccactgaatggtagtggtaagtacgacaatatgttcaaggatataaaaagttactgggttacaaaaaatcagcactcaatgctttggtgaagctaatgcactgtaaagttctcaataagtggagtaactattcttttgatatgatgttgatgatgatgattattatgatgacttgtagactttaaagtattgtaatatttaaatctaccgttaatgaaatcaaatacatattccttttgttaatagatcgattaattaattatttctatattaataaatatagcttgtatgtgtagaatggctgatgcatgcgcaagcaacaataagaaaaagggagctagggaaaaatacaaggaaaaaatattaaagaagaactcgacaaggagcctgcaggacagaatttgaaatttaaatatcataaggggactggggccccatagacgactatgacaacaagtttaataattatgtcaagttgttcgcaataccattcctatgaacaagtttaatattgaggacgttaacgaaggggacattcagactacttgtgatagactagccgtaaattttaaatttttattgtaataaatcaaacaaaactattctataaaaaattatatatgattttaatttttatttttttaggaccaaatttgagtttccaactgacaatcctatgttaaagaactacagtcttaaatcaatgtcaaaaggactacgtggctggagagcggacatgaaaaatgtatggaaggagaatattaagaaatatagagaagcgactaggagatcacgtctagatgtggttataccagaggtgtaggcagaggttattgcttttgggaaagatccaaaacatcaggtataaaataaaagttgtaaaattgaatatctattaacttaaactttttcgctcattttgctaacgataaatttactttaaattacaagcaacagccgaacaaaatgtaaaaaactgagcctagatgaggcttcaaggtagataggggtctaagaccatagtcggccacatcgtcagcggggtatgatattgtcagcaaatttatctaaaaattaatatttttggaataatatatttctaagttttttattatataaaaataggttgatccctagacgggagaacttcccagtactgtggacacttttcaaaagtttcactgtaagaacaacaaatggcgcgatgaacacacaataacttcatgtaagtaattttaaattcttaattaactcgttctatatttaatttatattcaactataacagtttgttcaaatttttttgtaggcaaaaatggttaagatttgtgaaactcaaccagcgtcgaccaatatctccttgtagtacaatattgaccccacccagttttccacagacatgcctattatgacacagatgatgggtgagcggtcacgctacttgaggggattgtgcccgttgtcaaggcttagggcaggggctaagagggaaactcccaaggtaggtccttccggccaacctactatctcctagaaggaatataataactaaaagcgaagggtggaagaccaagaagcacagaacgactggcagcaacaaatgatgtagactcggaatcaaatcctgagcacatttcagcaacaaatgatgcatatggtcgacgtcgttctaggatacaacatgcccctaatggcttcgattccaccatttcggtctcctaccactgggtcttcttcacaggctacccctccaacatttcacctgatttcatctttttgacggcgcttaaagtagatgatactcctctggtacgtatccttaacaagttacactattattttcatatttttatccttgctctaaggaatgcatggggtattatattggcgtggaaagctgactttgtctttgaaagcatgatggtttctagtaaccacattttgagtcttgtctacttggaccccctgaccaatctgtggctcctttcctgtgtgtatgggcctatgtatgccaatgcaaaaaagaaattttggttggagttaatgaagttaggggatcggtttggaggttcgcggtttattattggtgatgtaaactttgtgcttaatggatctgaaagagtagggtcaaaaggttttgatcattttgctccttttatttctaatctggtgttttcctgtggtcttatcaacttgccaatccagggtgacaagtttacttgggaaaatcaccgggagggtagggctcatgtgaaatccgcacttgacaagggattagtcaatgtggggtggctaaatttgttccctaaggctacgttgtgctcctcccagacttgtaactctgaccaccgccctttatgtttgaatttcaaaggtatagaggagagttttaaaattttttaaatttgaggaggggtgggcccgtgatgataggagtaagcttgttgtcgcccatgcttggtcgaactcctatcacccatgggccccaactcaaatctttaagaatatcggtgctacttgggtcaccctattgcaatggaataggctctagtttgggaagattgacaactttatctattctttggaaaaaagacttaaccatctgcagagtttgcctgcaggaactagggattggaagcatgagtgtgagatccgcaatacacttagttaggcccctcaacaaatcataaattaacttatggtatctacacattatttccatgacaatttaatacccttttgatacccataacataa

SEQ ID NO: 383632 - DNA, 2375 bp, Cannabis indica
attaaaaagaatttagtctataccacatatgataaattaatgttactacttactatactgcttgagctagtgtgtcgtgagttttaatttaggtatattgcatagaatcgcatcatatatttttcaagttatttactaataaacaacttttcccctaacaaatgaacattggtcaagacagccactttgtaaggtggggggctgtagccctccaaacaaaaagaattatatgtattttgtatacattaaattggtaaaaagaaaaaattatagttagttatttataatttgcccccaaacttatttttttctttacaattgcccctattgaatatttctccctctcactagctaagacacatattatattatttgtatatattggatcaaatatattaagttataaggatccttaccaaattcataatttacatacgaatacaaattattattagtacattgatgtgatcacatcatgcatgcatggctgagtttttttatttatttttatttcacgtggtaataattttacttaaacaaaattcaaacttaacaacttatgataaatattgtatgtaatagtatattcatgatataaataattaaattaatgaaaatattcaaaacaccatcatccatgctgtccataataattaaaagggaaaaagattagtgaaatggcactatgattaataacccaaattggcaagggtatttccaatatttcatatatacacataagaatagccaacacagtatcttaagatagacatatataataaatgtgaatatattacaacacacagccaaagtagaccaagttttatcttgttcttgtgttcatcttttataatgactacaagaaaccctcttccttcaccataaaaaaataaaaaaggagaattttctgggttttgtctttctatagtcactacaaaactcatcttttcgctgttacaattttatctctttctaagcaagagaagaatattaagtgagaaagaaacaaagagtttttggcaagaaaaaaaagacaaagacaacatatataaatatatatatatatatatatataattaaaaaaaacaagtgtcttttgtattttatctttttgttggctccaaaaatgtcaattatcacaggttgtgaagatcatggtggtagaagcagcttttcttcagggaattttggtagagaatcaggagcaggagttgaaaaagaagaagttctggaaaacttgaataataataataacaataatggttctaactctttttcttcaaccacaaccagcaatggctcttccactcatcaagtccttgaacaaccttccccactagctaataagaagaagagaaaccctccaggaaacccaggtacatacatacatatatatttatatatatatacatacctacctaaattactgcctctctatttatatatatagtataatttcactctatagaatcactgcagtcacacaaaattcatagttctttttttattattattatttaaagaagctagttcattagtatgttaataacttcttttttttccttttcttgattattattttcaaacaaagtaaattaaatgaatacttcagtggaattcttgctctattttgtgctctttttcttttcatgcttaaaagttgagaattatgatgtatattgagcataaaaatgagttattatattcttatttatgttaattacatgcttatatatataagcttgaaactaatttgttccaaaaaaaaaaaagcttgaaattaattaataattttcagttcgttgaatcaattattatgttgttggccgactgcaactgatcatatggccattgtatatagtttatagctatatggaaaagagaatagaacaaaaaatttattactctaacatctttccttttcttttttgaatttataatttttgaaaaaaaaatcaaaattaaaattgtaagctttttcccaagcttataagctcacgtgttactgggcctactactgttcatatttttggtaggaaaataaattaagatcgtgagaggggggtagctagctcagctcagctgatcacctcatgatcttgattcagaagtacaattcaaaaaccatgtaggatatagcaaaatacaaaaacttctcatcagatttttgtttttcttcccgtttcggtataaaaataattgatatatatttgtattttctcatttaaaataaaaattaaaaacaaaaatgagatgaattattgatggtctaagtagttgaaggagaaggggggagttcaattattggcttggcattgcaataattgccttatactgtaccattttctctctcttttcttttcttttgttttttt

SEQ ID NO: 383633 - DNA, 2291 bp, Cannabis indica
tcgttgaccaggtgggataggataaacatttaattatgcgaccgaaaaaggaagatctaggatataatatggcccatgggggtccttgacctctaagatgactttgccttctaggaagactaagggactctagtcttgaatggatctgacttggaaatagggaaagcatgtttggacagtacattaggtgccctcattgtaccttaaatgaaagaatattttagcttgtctccaccatacaaaaagtaaaggtaagaaatcagaataaacatgctgctagatacgtacgtccactactcatacatccacatttccaaagcataaagtggtattttacccgaaaactagactatatgacgaggacatcatttttgacatgtgtcaagaaggaagacaatctcgtaatcccacatcccgagacaagatagtcaacctgtgagctaagcacaagcccagtgcctaggttcacataagggggcattcgggtaggtacttagatcatgcaaagtcatttccaaagtaccttcccttagaagtctaagaaaaaaggtcaagtaaaccttaaacaatgaactgggaagttgagggtgtcaactcgatatcttagaaattaactaggagctaggggctaagcccagcacccaggttaatattttgtgcattaaaattcatcaattttgattctagaaatcaatatcttcgtgccaactgctcaacctttcaactcagacacatgagagacatgccacaagcatgttacaagaccaagaaccaatattagaacatttctgatttggagtacgagcacccaacgcccaggttaacattctcaatcaacttgggagacacgacaactagggtttggcttattagaacttctttggaccttgaatccttaaacccaacaaggaaggatgctaggacttaagtttttaataaaaatagtgcccaggaggggcaaaccttggcccagcatccaggttgacgaaatgtgtcacccgggagcaagtcaccgactcttatttcctgagtaacgatcgtgtgagttagaaaaaactcaatctacatgagtattttccaccaaaaagaacaacgagcatcaaaaagacgaatttcaggtacctttaatctagacccagcgcccaagttcataatcacccaactacaacgcccaagttgacatgttgttgacctgggatgcttctaatgagttttccaaagatgttttcctggcatttactcagtgtttttggataacaaatgagacaatctagtggtctgaaacccaaccagtgcccaggttcacattcaacctagcgtgtgtggtttcatcagtcaaatgccaattctattttgggcattcttcgtactttagttcaaaatagggaaagagtcctcgtgttcgaaccaattcatcactagaataccaaaacgaatcttgaagggcccaagagttgctcctaatgcctatgctgacactcaacctggtgtgcatggttctattgatctgagttcacttttgtgtcagacattatgttagttttctaccataaataagatattaaaattgtggaaagtcaaacaaatactttgatatttcacattatgacaatgttgaatattggaaaactagtcacaaatcaggtggtcgcaaatcatcacctgggccacccaatttatgaacgagaaaaatcttcaaaagccaatgaacaactttaccaatatcaagaaattatcaaagtggtgcgattatatcacttagacgactcaaaatatgctacgaacaagtttttcaaaatctctagctctcatgttgacatcaaacatcatctaagccacaggaatgtcaccctgtcgcaggctatcgatcttcacgtagtaaatcatccataactcactcattacaactttgattgacgcaattttaagtgcattaaaaaattattttcaagatctttctattcatgtgtaatagtcccatcgcaattctaaatatttctagtccaaaaatttcttccatttcacaatgcaatttttgtagtaaataagctgaaaatgatccaacgaatgcgatccaatcttccaaaattgaagatcaccatctataatatatgagtatttcttaaaataaatttgtttacctaaattttgacgggagtgatgtggcgagtatgataacacgtggcacgagactatccgagactaaattaatgagaaatatgtaaagttgctacccctaggggatgagattaagtaacaaactcccaagggtatgtttaagcaatcacccc

SEQ ID NO: 383634 - DNA, 1446 bp, Cannabis indica
gttatatgaaccatgtcgggcttccattataacaaagagattttgtacttacatattataagctgacccatttgtacacctaatttttcatattattcaaataaaaattatataaaaattaataatattaatttttttaaaacttccgccgcaaagcacgggttgttaacttatatatataaaggagaaatatgaggcggtgacattacactctaaaataattcaaaatagtttcatctcttctctccttaattctctcttttttaattttttattctgtttataaaacttgatgaattaaaaaatatatttatatacaatctaaaatctttatttactaacattaaataataattaaagttttaaaaatatctatataactaccgtatcctaatgaattataaataaacaaataaaaaatttacctaactaaccctaccttatatcacaatctatataaatcttaactttaattcaaaatattaaaccttaacatactctctcacacatatagctatcattggtttactttttcttttcttttttcttttagttacaccatcaccattacaaagttctagcattcacagtaataatactctctcatatatagctttacaaagttctaacattctcaataatatataaatatatatacatatattgatattgtatttttatttaaatagtacatgcataaatatattatattttagtgttatcatacactagtgaggctatacctgctccgcacgtggatagcatataagatgtaaaatattgacattataataatttacttcatagtaatttaggtgacaaaattttttaatgctataacatgatagtagcttttaaagttgtggcttacatattcatttcaagttgtaatggaacttaaaagactgattaagtgttcccaatttgtggcctatttatttacatattcattccatctagtagtgatggagctttcaaaagtggaagtctatgataagagttccaacaagtggcctatttacatatgtattccatcatggaactttcaaaagaacaacaagcctatttagaaaagatgcactgccaagctttctgctgcatctgatctttattagaagcgttgtggttcttttcatcttcgtcaatagcttcatgtttcttcttttcatcatttgctaactttgtgtttcttttttggaagagtcagaagttgagttggattaggatgggaagttgaagcattaaaaattaattcttcatttgagactagagttgtattaagtgatgttgaatttccatccttcacttaaattttgttttactgccttggtctaagctattattttttgggcaatttacggtaatatatacattattgttataaatattaataattatgtggatgtctaaatcttttatttattaccatgaattgtaatcaacatt

SEQ ID NO: 383635 - DNA, 3241 bp, Cannabis indica
caatgtagccttaaatcagtatacaatgtagaaaatatacaaaatcaaaaagacacattggtgaaaatgggcatattaatgtaaaccaaaggagaaggggctgagttttagagatttggaattgttcgataaaatgtttcttgcaaaacaaatttggtgctgcattcgacatcccgaaaacttgtgtagcaaagtgctcaaggctagttattttcccagggctgttataaaggctaagtgtggctttcaagattcatttgtttggctaagtttggtgtggggaaaggagattatctttaatgtttatagataacagacatgtaggtatttagatttttcaatacaatcacgaatacttacactttatagattgaattgaattggattgtgcagattgaattggatagagtatgaaaaactgaatttttgcaaatatcaataattattacagaaatataaaaaatatatgattgtaatagtctgcaccaataaaatgtaattctattactggagaaaatagttttgcagaatcaaactagaaccagcaaaatattaaaaataatcgcaaaaaataaaatcacttgacacaagagatttgtacgtggtatcggtattctttcgaacactcctagttcacagggtcacgctcagagaaagaaatcaattaataaagtatcaataattacaaagacaactgacttaaacaagtttagagtccctctaatttattaccgcaatcctttgaagtgcaaatctgatttgatcagaactactttcaaacagcgaactcccttcatgtttgaggtgagtgcttacttcctctcgaagtaaggcttgcacaaatcttctatagtaaaaaaattaagtttatttgttctgaaaaaaaaaattaatactttatttatttaagaccaattactatagtgaaaaaatatattatttttgcaagtaatatatatgatatgatggttaaaaaaatgtacacatatatactagtaattataactggctatatatggcacacgtatatggtaataataataaaaaaaattatatagtaagcactagctgtcttaactaaatatgctcatatatcatcattaatatatattagcatgtatttaggaagtatttagccaaataatttaatgatttttttttcatacatatcaaaatatcaataagattcattgtaactgataatatattatgtaataaaaatggccaaaaaagatgatattttcatcctattattagatatagggttggattttcttctatttgtggacaattccattataactttaatttttaattttatttggttttttatatttttgaatttttttttggctctccatgttgtttgtcatatttattatgaacgttacacaaatgaactgttaatgatttattatgctaaattttgaaatatgtgtttcaatatgtccatgtatacaatgtgtaattcacaattacaaaaataaataaatagttaccatatttgattgttaacatttattcccacattgaaaccctaataccaccttcactatgatttttgtgagtaaatagtaccacaaatagaactaggaagaacacaaaagtattatatttaggatatgttgtctccattttagcacactagctagcttctctccttaggatcttattttttctttttcaactcaacaagccaagccatgacaagaaagaaggtgaagttggcttacatcaacaatgactcgtctcgaaaagccacttataagaagagaaagaaaggcctgataaagaaggtgagcgagctgagtacactgtgtggcgtagatgcatgtgcaatcatttacaacccgtacgacactcagcctgaggtgtacccatctccagcaggagtacatcgtatagtgaaaaagctcaaaaagatgcctgaggtcgagcagagcaagaagatgatgaaccaagaagttttcttaaagcagaagattggcaaggtgagcgagcaggtgaaaaagttgaagaaagagaatcgtgacaaagagatgaatcgactcttgtatggcaaaaccccccgggaaagatgaaccttcaaggcttgactgtcactgatttgaatgatctcacttggctcattgaccagaatttgaaggatattaataagagaatggaaaaaatagctaaggataccaagtctgctcgaatggctgcagctgctgcagctgcaatgcatccacttatgaatggaaaagtgaatgttaatgtgactgcttctgctactgcgtttgtggcggataacaatggccgcagtaataataataataatccagtgaattttggaggaaaagatgtgatttttccattgggaaacaacaacaacatgaactttaactaaatattgtttactcatggcgattatttgtgtttcattttcttagttcttattctcaatcataatgagttatttgtgtttggtgttatactttattctcttgattttgttgttggtcataatcattcttaatattgtctttatgtttttttattatttagtaatgtgagtgttattggtgtggttattatgtagtttcaatgatgtttctattggagtttttcttttgttgtttcgattaatttcatggttttattatatcattataaatttatatatatttaatatatttcatttattctcaaggccattgtaaaaatcaataaataaataaataaaaatcttatattttatattgatacaagacatttcgaagaagcacacctcaaaaataattttacccattttgaaataattaacgtacttaattattactagacaactattgcacatatgcaattaaaggataataagatatgataataaagcttttaactaacagcaataatgccaccagaatcacaaaatatggtaatattaatataattaattagaagttatacaggcctatttggttttgttaaatgtatttactatatagtgaaaattacatgaaatatgggatttcataacaaagttagaaaaatatggcatttttaggtttgccacttttctatggcattttttcacatttaagttttttatggtatttgatatgccatatttttataaacttattattcaatcccatattttatgtttttgtttttagcttaattagttttatttatttttttaatttattttacacttacattttagggcttctttttatttgaaaaatttacaccaaat

SEQ ID NO: 383636 - DNA, 1677 bp, Cannabis indica
taaaaattgtgtcaaatttaatataaaaaataacacgtaccaaattttaattcacaataaatgctatttttttaattacctatttattactcattaatattatttattaattaaaaatatttttatatttatatattattaaaataacataaataaattttattatttttatatttttaatgagtattaatgatattattgatttttagatttttagagttaatttgcactttgtgtattagatcacaaatataaaaattgagctaattataattttatggcatattttaaaccaaatttaattcaaaatacagatgatttattggatggtctcacgtaatctttctagtttctatttaaaatatttaattacttttcaaatataaatagttaaataaataatatttaatactcaaaaatactcctctctcacctaaaactcttcactattttctgtctcttcctttcttttctctttaatttatttcattttcctatatcttatctttctctctttccctctcattttcctctctactatgtagatttgtcaaaagaaaaaaagaaaaagttatccatgaagattcaaaggaaaattctagatgatattttttgaacttattaaactcaccagtaagttcaaattagacactaatctatgcattttaaattgatcatataagttgaaatttgtagaaaattgagtaataaaagtgcttttgctagtaaaaaaaaactaattttcagacttctgcacttacaaagattattccttcaatactatttattaaaaatagtctcacattattagaaatataaagcatatttaagatgaataagacttagttagttaattgcttttgctcacgatgtttaggaataaacctacaaaaattaatataatgagcgggtgaaaactaaattagggatgtctcagcttagaatttattagaaatttgttcagaattaactagttagatgttattatgttacgatagctaagatcttgattagttagttatacttaatcagttgtgtacataaaatttgtaattaattatttcaaagcaatacaatagatacaatattcatacactttacaataatgtcaccacttgaggctagcttaagtgactatagaagagtatacgtgtgtgttagatgttttaggttcgagtttacagtgatctcctcttcataagcctcaagttctcagccttcaagtttgcaatcaattgcttttgctcgatgctaaccattattaagctagtaacttgactctcagcatgcattttgctctcttcactctctacaagggctttcccgatttcatttaccttcgcttcgaattgggctatattctcattatgcttcatctaaagaaataagtattcattgaagagagtatagcacttaataagttatacataaatactcccattatgcttcatctcaagctaacataatgtttttggccctcctcacaaggtatttagtagtaatctacaaaagctcaccttttgttcagatttcacttcctcaatttgctgcttcaattttgcattttccttttcaatatcttgcactttcttcttttctaattattattatatatttaacaaaacaaacacattatatataagtccaacaagcacatttgatgcttctattagagtc

SEQ ID NO: 383637 - DNA, 1962 bp, Cannabis indica
agcacaccacacgtggcgagctatggtttgtgtggagctgatggtggtctgaggtggcaactggagggagttgatggggcgggaccacagggatgtgcagtacgagctgagaggttgagtactgctcgtgggtcacacgtggtcaagtagagggaggcagaaaataggggcccacgttcctttagttggggtgtatgtcacacgcgagctagctggacctgcggatcaggacgtggatagctgcgatgggcaactgactttgaccgtaagtgggccttgcataagagttgattagatttaaattgtatttttggcctcatttctttaatatttttctaatttaatcctaacttcaccaccaattacacctaaaaatacataaaataaattagaaaactaaaatgaacttaaaaataaataacactcaacatattatgacaaaataattataaaaaccaataaaaattaaataaagctaataaatttaaaattaattaaaaacttattaaattaattacaaactcaaagactaaagcaattttagttaaaaaaaatgtgaaaaataagtctaatttttagagttatcaattattacctactatagggagttagtatcatttctagtagatggattaggtctttaattaccattatggatagacggttgtaagttaattgctggtctaatcaaattgtgtatgggtgactctgatattattttgagaatgaattatattttagcgaaatacagggcaaccatagactgtaatgaaagatgtcgactttcaatcttgagagtgccaccaacccaggtgtgttggtgggtatatggggaaaacgatccttttattctaattataaatattaacgatatatcattagatcaattcttaaaaaaacaaagaaaattatagaagaattgttttcttggtgacaatagttcctaatatgttggggggatggaaatgggttcatgtgtggggcatatatatatgttacgtgttactatttaagataaaatgttgagggtagggattaattgatttgcaacaaaagattttgcttcctaaaaataatattatattttaaaaataataaaattaaattattatatatgcacataagaaacattactaaaattatgaatattagtagaaatgctaaaacacactagtagtgtctaactttgtataattaagtatcgtaaagactattccaaaaaaaaaaagtatcgtaaagacttgtctcaagcttattggaggtcttgagcttaaaaaaatctaattggacttttttgatatgaaaatctttattttttttttatataaaaatttaaaatatagtattttaaaaatataattgaactttttttcttaataaaattaaatgtagtatcttaaaaaaaattaggtatttcttttttagaaaataagtatatctttaaataaataatagttaaaatacaaaatatagtatttttaacaaataaatttgggggctttttgtttagaggttttttgggcctgggtggatgtctcacgtccctgctacccatcccttaagtcggccctaagtatcaggtctcgtataatttaatataataatttttaaagaatatctctaaccaatcacaaaacaacacgtctagaagatactaagtaccactggtacttaataataatgctgcttcataattgtctttgtaatctagacaaaaaaaaagttatgtacattctttatagaatagatgatagatgatagattagttgatttttttttctgtggcaagtgatctaaagtaattaagtaatattaattgcttaactcatcctctcttccatgttaatatcgttatttgtgtaattaaatatcgtagaaacatgtctcaagctaattggggctctagggctaaaaaaaatctaattagactttttttatatgaaaatctttatttatttattt

SEQ ID NO: 383638 - DNA, 1931 bp, Cannabis indica
acataatggaggtttaaatcctactaagagtaacttttttttaaaaaaaaaaatcacttttaccccttttactttataaaaaaaaaattatactccctcacttcaaattctgaatccgccactccacctatcaaaactcattttgccgtaccatacataatacattttccaaaatgaataattaacattcagctgaattataaatgataagctttataggttctctttgtgctcgatcattttattaattcaaaaccagcagccgggacacccatacatataacatacttttctgatcataaaggtaaagcttttcgaatatataagttcatgttcatcattagcaatcattagttaaatcattattcttctttaatttactcgttaattggtgacaattgtctagcactgctacaccaacatgtatatatatatatatgtatataatacatatttaaaaataattacatacagctaaaacataaataaaatatgaattccgattctgggaaaaagatttactccactcgattgaagataacagcttataataacttagtagttttttaatactaaaaaactgtgttatattaaagaatgtacataatgctgttccaaaaatggaatagacgaatttcaatccatagtacatgatttcagtaattaccatatttataataagtctaattattttaattagggaggctaatgtggtaattaattacacatcttaattatggtaagtcttcacttatcataaactttccttcaaagggctgctgaggctttttataaattaatgaagttagaggtgacaaagaatatatttgatataagaattttggcatactaataatgaaaagaaaaaggtcccacacaacttttgagtcctaaattcaaatttcaatctctaatttaaatgtggtacatatataattggcagaaggtggttgacatgttttttttttctttgcttttctttctttttaaaatctctgtaatcaaatctctacaaaaagtggcatatataagaaaagctaaaaagaaaaggacgactttaatccttattaagggtccttactcaccttttctcttcattttaagatctcacacactcatcattttggacaatttgatgctttaaagaatcaagaaaagcaaagctagggagtctcttcttctttttcattatctttctttgcctccttgctgtgtcttcatctttattattatcatgatctaatcaatccatcctgtccgtccattaattattgatctaataaagcacgatgtgattgccagctaaacattggtagaacccacaacattgtatctattgatgatatataatgatcatcattaaagaaagaaaaaaaagtaacataaccctaaaaataaaccattcatttaatcccttgatttttccaccgcgatgataaagcagctcagtcagcctgcgttttatattatatagaaaagcattcttgttaggcagccaaccaaagttagtttctaaaattccatacttaattaagagttggtattatattgtattgtaattatattgaattatattttatataatattttttttagggtaaattgcggcataaatacctaatgtttccgattttatacacttaaatacctaatgtttattttttgtggtaaaaatacctaatgttacaattctcttacaccgttactaccacttccgttattaactcataaatataaacatgtggagggcccaaatgcattacatttatttattttattttaaaatttaatattcttaaatataaaaaattaaatattacttgtttttttaaaaaaaataagtagagatgcaaatactaaattaccatagctgagtgaaccggtgtagtatatggaacatgattattgaattgaagtgccaatatcatgtg

SEQ ID NO: 383639 - DNA, 1605 bp, Cannabis indica
ttttctgttttagtaagaaatggataaaaatttgggggaataataattgccaatttatatagggacaacacagtcctttgttgggattatgatataattgattgttatagattattcaaagctaagcttttcaaaagggtcaagaattatatggtggggcatgaataaagttttaaactttgttgaaaattctccataagaatgtggattatagtgggacatgcaaagctattatcatcacaatcacctctcataatgaattttagataaatttgtttatatgggtattttgtgtttaatagtgtaatgattattttgacttgttttgtaaatttatataaattgggttttttttatttttaatttgtgattataattaaccatttaaacattctatgatttaaggttcttctacatggagggcaggttgtttcttggaagaatgatagaagagaagaacttctatttatgagcagcaaggtaaaaaataaccaaaaccacgatttgtggccaaactttcattgttgagtatgaaatttctttcctttaacttaacacaaattttgttccataggcaattcggaaaacatcaaaagctataaggggaggtataccagtttgctttccacaggttcgtttacaagaagcttgttctgtttttgatcttgttgagatgtgattattaggccttaacttctgctaaattttgcagtttgggactatgggttcgctagagcagcatggatttgcaaggaacaggttatggtcattggataatgatccctctcctttggctgcagttaacactcagtcatcagtggatttgatcctcagaccctcagaagaggattctaagacctggccgcgcaggtattctatgatatgctatgctatgctcgagaagaatgtgataactaaaatcattttgcagtatatgtgaaaggacagcttttacttaacgtttcaatggtgcttctgaagatttgaactgcggcttagagtcactctcggttctggaaagctcacactcataccccgagtgagaaacttggataacaagccgttctcttttacatttgctctgcgtaactacttgtctgtatctgatatcaggtaaggtagttgacatagatgttataatttacctctgcttttaggcctcaatagaatttgcatgtgcctcaaaattgtgtaactaagctggagaagtaggctgtaggtagcatgatgctgtttaatttgcagtgaagtgcgtatagagggcttggaaacgcttgattacttcgataatctgatacgcaaagaaaggtttacagaacaagctgatgcaattacattcgatggagaggtaacaaaatgatctttctgctttttatgactttgaatggtaatttctgaggccaatgtgttattatttcttatcagattgatagagtttatttgagctctccaacaaagattgccattatagatcatgagaagaaaagaacctttgtactcaggaaggttggcatgccagatgcaggttcttataatgatgaaaactattatggagaaatatatatatatatatttgatgattttattgtaatactgaattctgtg

SEQ ID NO: 383640 - DNA, 3080 bp, Cannabis indica
aattatatagtttatttatttacaaaaataattaattttagttggtcagaacactagagaatcaatattcaggaaaaaaatattgttactggtatagttattagtgctagctggggattatggcctttaaattttctttaactaatgttgtaacaggctcttttattaatttatttttatctttccaattaattggggttatgggaaattccaaagtttgcactttcttgataaatccaaacttcgcatttatcattttaacaaatgtgataacataatgatttggaaatacttgcgccgatttgtgtatgttgatgtcatattttactttaaatataaataaaaaactaagttattaaaattagtttttcgatgtagacacatgcagccagtgaaaaccgacaatgatttttattttattactatagtttttttcatatctatctctgtctatgcaaattgagggcgcaacttgcaaaagttatgatgtcactaataatatggacactatcaaaaattgttattttgaataataaatttttagtgatataaaaaaatattacttataattaaaatatattatttagttataagtgtcactaatttaattttagtcacactaattattttaattaaaaatatatttagttaaaatactgaatgtgtttgtactaacgcggtatgaaactacaggaggaggaaagaaggtgacacgtgtggaagttacaatggacgggggtgagacgtggcacgtgtgcacgttggaccatcctgagaagcctaacaagtacggcaaatactggtgttggtgtttttggtctttggaagtggaagttctcaaccttttggtggccaaggaaatagccgttcgagcctgggatgagtcccacaatacccaacccgagaagctcatctggaatgtcatggtacgtcagccttttattaatttttctaattctttagtcaaataaatcgttctcatcagaacatcaactaattacgacacagtaaattgtagcctaaaataactcatttattaaaattatgaaaacctcaagtgtgtttgtcgtgtctgtactgtggaccaaattggtccactgtcaagtcagttacactgaataatatatatgcccctagttgatgatattttttttgtgccttagtgaaatttaatgatcatggaaactcaattttttttttattatcttactttattaaatatatgcacaataattttgcggtaactgattaatatttattatggtatccaactatagggaatgatgaacaactgttggttcagagtgaagacgagtgtgtgcaagccccacaagggtgaaattggaattatatttgagcacccgacccaacccggaaaccaatcgggcgggtggatggcgaaggagcgacatttggagtccaccgatacaaaccacactctcaaaaagagtgtgtcatcaccattcatgaacaccacttcaaagacttactccttatccgaagttaggaagcacaactcagcccagtcttgctggatcatcgtccacggccacatctacgactgcacacgctttgtcaaagaccaccctggcggcgcagacagcattctcatcaacgccggtacagactgtacggaagagttcgaagccatccactccgataaggccaagaaaatgctcgaagactaccgtatcggcgaacttatcacctccggctacgcttccgacggctcttcaccgaacaactctgttcacggctcgtctaatgcgctctcccacttggcgcctatcaaagaggcgccgacaatgatgacacgtgcagtggcattggtacctagggagaaaatcccatgcaaactcgtcgaaaagacatctatctcccatgacgtgagagtttttaagttcgctcttccttccgaggatcagttattgggcctccccgttggcaagcacatctttttatgtgccaccattgatgagaagctctgtatgagagcctacactccgacgagctcggtggacgaagtgggcttcttcgagctcgtggtgaagatctacttcaagaatgttcatcctagattccccaacggtgggatgatgtctcagtatttggactcgttgagtttgggatcaatgttggacgtgaaaggcccattgggccacattgagtatttgggccgaggtcagttttcggtccatggtaaacccaaatttgctaagaagcttgctatgctggcgggtgggaccgggatcacgccgatttatcaggtggtccaggccatccttaaggacccagaagacgagactgagatgtttgtcgtttatgccaaccggactgaggatgatatactgttgaaagaggaacttgacggttgggccaggaagtgtgacaggttcaaagtgtggtatgtggtggagagtgctaaggaagggtgggaatacagcacgggcttcatcacggagggtatactgagggagcacattcctgaagggtccattgacactttggcattgacttgtggaccaccacctatgatccagtttgctgtgcagcctaatctggagaagatgaattatgagaaggattccttgttaatcttttagagtgagcgagagatatatgataaagaaaaaaagaagaggaggaagaagaagaagaatgaaactgtatatatattaataatatatatatttgggtaacaagtgcttctagacatgatatatatgttgtattctagactactgttggtaattacatattctttcttatttaagtgttcttttttttagtcgtacgtgaacaagctaatgtatatacttgtattaaagtttattatattttaatgcgaaaaagtcaacttcgttttcttaaatttggcaaaatcataccaatatagcgcattatgagtccctagcaatttcggaactgatattatatcaccttcatagtagtatacccaaaattttatttattgggaccagagtttaaaaatatatacataataaacataaagttgaagagaaattcaatttttcatacttataattggccaataatttacttaaaaaaaaaaaaccaaa

SEQ ID NO: 383641 - DNA, 1224 bp, Cannabis indica
atgagttattagtagatatgcatataaactctctctatctacaaatatgatgtaatttacatgcataaaaatcatatctttatatgtatatgaatggaatgtgataattggaagcaattttgtttgattctacttaatacttatgtcacggaagatatgcctagatttaactatattgagttattaaatagtgagatagggttgttgatagtgatcatgacatgaggaagaaataattaatggttgggagttacatgtgtggtgtgtgtagggatgtgatggttcggtgttattggatggctcggcaagtgggccgagcgagagaacgcacccccgaacttgaccttgcgagccaaggccttcaagatcatcaatgaccttcgagccataatccaccaaaaatgtggaagggtcgtctcttgttctgatattactgctcttgctgcacgtgatgctgtttttctggtaaatcacaaccgttgaaataagatctaacaaaagaagtttaaattttttatttttcttctctttatttttatcaaaaatattaataattatgcacattttatacattattttgtgaatttaatataacatattttgttgtttttagggatgttattatatatttaaataggtatgacctatattaatggatgagggttggtaatgttcaaatgtagttggtgatgtttatttaagtattaaaaaatactaattaatagagtatggaattggtgtgtgtaagggagggaccaaatattttggtccaacttgttttataatatctaaagattccactttagtcttacaaagtggtttctaataatgacttaatataagcttaatactttttgtgcaatttggtttattttatgtacttgaacttttcaagttgattcttactaggtgcccttttgatttaaaattatattaactctaatgaccctaatttcatgtttaaatcatatctagtatcaaactcaccaattgtctaaggagtagatgtgtcatagcttgtcaaaaagaacttatatcaaattatgtcatagtatttgttaagggagaaaaaaaaacatatttagttaaacctagtagattattgtacttcacaaacgtacttaattttcaccattacaagtaaattaagtgttaatttaaattcaaagtagttgtataaatcatacaatgataataattatttatattaattttgaatattat

SEQ ID NO: 383642 - DNA, 2991 bp, Cannabis indica
gatttgtttaccactttggtagctgaatttaatggttaataaaatgttgatttccattacaaaaaaaaaatagaaatgtagagaaagaccattttgaaatgtacgaaagactttcccaataacatgtgctattaggccataaaatttagattttagaaagatgacaggagaaaaggtgaagttgagccgaaatgagaattggaattgagtttgtagtgggtaataaaataaaactactcatttcatatcattcataataactgcttttatacaaatttttcttaaaatgaagaagaaattgatgaaaaagtataaataatacaatcaagtcatgttttttaaaataaccttgtaaacaatgctatgatacttttctacatgtaatatataagtagtactttattattattctgttatgtgttattatattaaagaaaagttattacttaaatgatattaaaaaaatagaaaaattgatgtatataaaataaaatttaaatagaattttgataatctattttaaaaaataaataaagaagctattgtgatactctaagagtacttccaagtgatgagtttctattttttggtgctccaacaagtgagctaaatggatatatataatagctcacttcatttccttagctacattttagctattttagctaaagtatgaaagtgagctaaatatattttaattatttatttatttctattttttctaataaatatttgtttatttgctttgcttggttattgttatttgtaaagaatagaaaaatagtgcctttaatttaatttaaggggggcaacactatagaaacgttggtccacttcaaccttcttaatagtatccattgtggttagtagttaaactcacaaatcacaatcacatacactcactttacataagaaatatcgaaaatacacggcaaaaaatgaatacactttattacaatgtttggctaagtttgtttttaagtttgttttttttttttttttttgaagagaagctagagtacttgcctaggttctattaaaatcaattttttagatgctatttttaaactaaaataaattttaacagatataatatacaaatatttgataaataatatttattaacaaaaaaataaaagaaaaaagtatataataattcaaacaaaaataataatttttttttgtattatttatattatacgtttaactatataagtaaatgcatgtttagccaatcattatgtcatataagatagaagaagtagagtttaatgttttcattttgaatgatataatgagaaactaagagtttttaaattatgtatgtagtacattaattcaaagttcaacaattctaaaagaaaaaataataataaattcattttaaactgtcaaagttttctgtgaaaaaaagaaaataagagtgtaactgttggaaggttaaatttaaagttgtagaaaggaaaacagaagaaatgatattaattaattaatatgtgtgactataaaaccaaaatatatgtataataagaaagttacgaatattagcttacatcagctactaaattcaggtcggtatttctgtatccaagttctttgagtacttctctcaggtgtagaaaagggctggagatctctgttaaccataacgctgcaaccatttctgatccacactgcataataataataataataataataataataataataataataataataataataataataattaatagcatataaataaataaataaataaataaattataatttgtaaagaataataaatatatactttagcataggcaaggccagctcctattccaataatgctgaccaaatggtggacggaattgtcaatactaatctttttgtcaaagagacaacaaatcagatcatatatgagataagagaggctgattgctagtgttctcatctgggttttcaaaattcaagccaaaccaaaacaattattaattaactgtcagaaattgatgaattataataataatatatagagcccataaattaatactgtgtaataataatattttatgagacaataatatatattctttgttttacctgtttaggagaagaagttgaagccattggacaaagtggacatttccaatcttgaacggagagggaagctaaagtaacagccacaattgcatgaatagtagaaacaagacgattagagaactcaaatgaacgatttggaaatgttttccttatcaacacaaaacctactgaccatgaaataactcccaccacaaccagatctcttatgcaaatctcttccatatatatatatatatatgttttcaccaactaattaaagtgaaaagaaaaatacccttcccaacaaaaacaatgtatttctttctttcttttcccaaaagctaatagaagaaacctcctatatatatatatatatatattgagttttgtaaatgaaatcctaataaattaattacctattaaataattagatttttatatagagataggtggatagatgtgtaatttgaaaggcccaaatcttgtcacatatgcttttggaaaaagaaattgttgtcacatatggctagctactatattattatattatattataattattatgtgttggtggatacgtgggctgggcaaacgatgcccactggcactgagtctccataaatgtagctgatgatccttttatgcattaattctcagtttctcacggttagattaattgcaggtcaattaattcgcaagtggatttatatattactgcatccccattccccaccaccactcactcaaattttaacttatacaatatgtgatgtttggactacacatataataaataaatgtatttatttaccctaaaaacaaggatgtatatattttatgttacttttatttttagattaatttgctgcgaaattttttcttgttttaatttttatacatttaatctttttatttttt

SEQ ID NO: 383643 - DNA, 1470 bp, Cannabis indica
aaaccagcagaagcagcttcggcaccagcctcggccagcttttcggcgagcgtattgctgaaatcggcgggagttttctggaggaggaacgcggtagacttgatctttcggaatctgaatgacgtaagttccaggcggtggtactggtttttcgggagaaaaaggaggaagtggtttcagaggcatttccgatgagtcgtttggagacatcgtaagaggcgagtcacgaggatggattcgatcggccattgattcttcttctctgctgaattgaatcgaaactcagtgaattgaagctctttctttcgtttttctctctacaaagaaaattgagcgagtgttaatggaagagaggaaaagagtgaagacttttttcttgttaagaacagagacagaccgcgtaagtaagataaaggaagaccgcgtaatggaaaaagttgagaacgtgaaactaaaatacccttcttatcacttaagtctttgcttctaagactagggttatgagtgtcaattggctgttgttacgcgaaatgttcaaaggatagtcactgacagctaagagaaagtagctcttttatgaatttactaatataccccttatacgtttattgttgttgaggtaaacatgtaaaatgaggccatatatgtaatcaaacaacaacaacaatttttctttttaatacttttataatttatcttaacaaatttttattttaggtttatttgttttgaatttttaacaaacatagaataaagttgtaattaaataaacaatttagtggaacgcacgtcaaactaatctgctgctaatagcatgcacatcttatatatattttttaaatagtaaaataaatattttatcaaataataaatgcataataattgatagaagattttttttttttggagtaaaaagtgccagttttgacacacaaaaaataatatctaattaatacaatatcttatttaaacttttcattaatgatgactggcgtgtacatatttaaaacagcataaatcacaaactattgatgagttttaggtattaattaagaaaaaaaaatgaaatttattgtgtatatgttgtaataaaataaaaacacaataagaaaaagtttttaacagcttataatatgtattttaatttctgctgtcatttgataaaaatttaatttttttttatgaaaaaatttaatttaatgtcatactataaattcatagtttgatattcaggctttttttttttttttaattatcattttacaatgtacatatacgggagaagtctacactaattaacaaacattgaatttgtatccccaacaactcaaatttttataatgtttcttacagaaacaagagttgaagaagtctaccacagattctaaagattaaagtttaagttaaattgttttatatatatatggttaatattaggggcaataaatgtatattttgctacaggccgtc

SEQ ID NO: 383644 - DNA, 1717 bp, Cannabis indica
atacgttacctttttcatttcgtgaaaggtgtttataacttgaccgttgacccatgaagtggaagcagagacagctgcggcttcaatatcagcaaccaaatttttaatggcgtcgagggaaagagagctctgaacaagcttccttaagcgaacatggtaatcgccttggtggaagaacaaggccgatggcccaattaaacgttccttgcttttggggtaagtgggcttgaataggtgagcttctgtcaccaacacgaactttgctgcctctggactcgccagcatcacacttgggcaccccagaatatgggtcttaaaaatatccccgtacctaaatatacacatatattatatatattgtaatgaaaaaaaaaaaaacaaaaaccatttcgagtactaccccaattagaagaatttcacaaaccttttctgtttggaggcaaagaaagtgtttgggtcttgagaatagagttgaagagtctcgcctatgtaaggccaacccattgagccaggaggaagcttggctgatgatcggtttttggatccattgttggatgtgaatttggttattaggaaatgagagaagaacagagtaagaagaaatatgaatacgtaaaagagaaatgcatccattatttttgagagggaggaataataagtgatgaggtcccctttatataatatttagaccaatgaattttgtgttcaaatattgtgtttctatttggtatagattaattaagacaaaagagagacagtgattttttatttaagtatttttcgattttgggctctaattattcttatcttttcacaaattaacacaacatcctgaaatttgaaaggtaatatatgaaaataatttattattgggattctcatacatccttctcaaacatttatttatgggtgtgaatcagtttcaatttttttttgctatttatgtttaatattaatcgatttatttattatttattaatacacatataaacaaatcttattaacgtttttcaaaatgaatggaaaaaggacacaagtttgccaggctggcatatccttcttgattttgctagaaacaaaatttattgttcatggatagcaaaagaaaaattccaaactttttacaatcactaagaattacacaaaaatctaaataatataatttcctgaaacagaaataattcaggtttcagttgagtcaaaaggatttttacagggtccttctagaagtttatatttttatctaatattagggcaattctaatgcatggtaatttagtaaatgtaaaatttggtattaaaccaacatacaaaaattatcctaaaaatatattctttattattatattattttataaaattataaataaacacaaataatatatatatacaaaagtttaattataaatatattatataaatattaaaatctaataaaaaagatttggtgtagtttatattgtcacactattattagtaagaaactggacacaccggcataaatagaatgacttttaatttttaaagttatgttggagcattttagtggagaaactttaccaattttaggttaatttataccttatcattatttggagatggccttacaacttcttatttctcaactatttggccttcaccaattggcaatgagaggagtagctcattcatcttatatatcactaatttatttccactacattagcaatgtgggact

SEQ ID NO: 383645 - DNA, 1363 bp, Cannabis indica
aacatttccaattgtggagtaccgatttaatattatttaaaatagataaagcacaaatagtaaattagtacacacatggtaacattgcatttgcatcttctttatattattttactaagtctctcacattctaaaataaaacaactaataacgtttagatatgttagttttactttttacagtgagtaaaatcggaaaataagacaaattaaccagtaaccacgaaataaaattgatgcaaataataaaaattaaaaacacaataaggaaactgtttgaataaaataaaaatgaagtaaaattaagaaagaatagacaaatgatctttaaacatggtcaatatacacacagagtcgccagtgccacgtcacatctacatctaatcactaatcagagtcgtccaatagcaggacacacagtaagaaaagcaacaccctcacgcacccaatctttgtttttctctctcatcaaattcagagatgaaaacgagaaccgttgataattagacaggcgacccgaaaacccgaaagcaaggaagaaaaccctaggaatagaaacccggcaaatccgagggctatggatatgtcagcctgcatacagaaccagctggatgtgttacacgtggcctggtcctctttcagcaccctcgccagcgctgttcccgccgactgagcagacattaacaggtacgcgaacacctacacaatcattacccatttcttcttaataaatcaaatttgaatatgaagaagatcgaatggagaagtagtgaacctggtcgtggctaaagtcaaaccacacttgtaaggcttcgggaaagatagtgagtccccaagaaatttcccaaacggataccaccatttcgaataaagagtacaacgctactattgcatttgctgcgaatacgaatctgcctccgcaacgcaaccacagtacgaaactatattattgttttgtttgtttgtttgtttactgagaaaatcgaatcatgtaaaaaaactaaaataaaaaattaacatcggaaagactgacctgaaagcatcgaaatcgtaccagtgagaggagccgtgggagttagtaagcatgaagacggaggaaggacaggagaagaagaaagcggcgagacgaaagatgaatatgagccagttgaatcgacggagcttttgtacggcgagtgtggagtgaaagggagtctggttgtagtggtgatggttgtgacgctgctgtggcggcgacggcgacggcgtctcaccgttacgcgctgcctggaattgaggagatcgcatggtagtgagagaagaaacagaagaagaggaggagaagagaggttggaatcatgaggagaggaaatcgaagtcacggg

SEQ ID NO: 383646 - DNA, 1254 bp, Cannabis indica
agaaaaaagaaaaaaatgaagtacaatcataaacaaatcaaagggatagcttctctaaacaattcaaagtacaaaactcaatctcacaagtacaatatatgactgcgacaaaaacctaaaccccttttcctcaggttgcaatttaacagagatgatttttgggaaaaatgcagagaaaatgaaactgggtgaaatgaatcatgtattattgatttcagaaacagaggtaatatcttcatgtaactgattcagctatattactaacaaaacagcctttctagaacagttcagtttaaataaagtacttatgcagtaggagtaggacttagcataaatagtaagtaacctaccaactaacttaaccgctttcctgaaagaaagtttacattcttgaataagttcacaagagactgaaatctagggtttggaggattaatctccacaattttctcttattgagatttatgttaaataaagtattttcgtattttgatatgttcggttcagtcagtcccaattaatgtctttattcaatacaaaatcatcactagtctcaataggtttgggagcattgattaaggaattaagtttgggggtgcttctgtgcagtcatgtaattaagcttgcattacagattaaaatttgcagattattttctctatgaaaatgcaagaactgtatttctgccaaacagtatggtttacttaaaacacttattcatgccacagcagccattggtaatgtgaacaagggtttcaacttactttgccgaatagggaagaggggtcatgttcctaacattactaaacataatattgttcttataaatggcttgttttgtcagggcatttgggatgagcgcagaaggctcttgttcctaagtattatatggtactatacaattatgtaagcctactacataatggattgatggttatatatataatacaaaagctggtgatatagatgtagtgatataattagctgtatattgttgatgaaatataaatagactaaaataataaaactatatattggatcttacaaattaatatcaatacaaaagtaaggggagcccacatgtgtgcccgggtgatcttgcataagtagaaggagcaagtagtaagtactaagtattccactcatcaacacaccattcactcatcgatcatctaggtctagccactaaactcaactatcaaactgttagactatatatatagtgtatgtaatatagcatatacaaatgatatg

SEQ ID NO: 383647 - DNA, 2186 bp, Cannabis indica
ggtactttcattgagagcctttgataattaaattcgaaaacacatccctctaactaatttcttttaccatggagaacaatccacatgatgttcatgtcgaacaagatggaaccactcataagcctaggaaggctcctcatggaacctaacctgcaagtactgcaaagcagaaagtgccccctccaattatgcctctaaaaggcctctcattggtgccaccaagatgaagagaagggacagtggggcctatgaccccacgagatatgtcccaattgtcgaattagagaatttccactctgaacagaggttggccaaatccaagcagaagaatgtaaaactagaacatgaggcgcccgaggcttgtgctaccgcaaacaatgcacatgcaaatgaggcagagcctcaaatgcgatgtccatgagggaggacttagggatctcaaactaggaggaatcaacacatcccccgtgaaaataagaacacacaaaactcaacttgccttcaggatcaacaactaggggcaacaagagatgtgccaattgatcagagaagaagggaaatgcgaccagacattcccgaaccttccaacaggaacataggaccacctccatcgcgaattttctaccttacatctctaatcagacatccacctctcagagatgcccatagattgaccaaaagttgcatgccatacatattttctcgaagagtgccaaggcaagaaactcattctcacaggttgatttcggagaatgttagtgatagacgaaggagtagtcaatctcgaagataaacacatctaggtccaaactaggaaaactgtgcacgaaagatgtaattctgttagaatttatctcctaaaagtaagtatttaatggataataaattaaaggacatataaaatataattataagataaatgatactttaataaacatagtgtaactattaaacatatgataattccttattcatatggagagggtataatcttataaggacatacaagataattaacgatatgaataaaataagtcggtagtgtattaaagcaatgaaaatctttaacatggaactagtaagtatgatttactatacactatacttctagtgtatgattttaattcgaatcacatatgaggatagatatgtagtaaatgtgctatgtataattagattatacacaactggaccgatatgtaattacatctttcattaacatatcgtttaccatgaaagagttattcatattacaatgatgatcattagaagatcagccttaattatgagtatacatgaactcctgtttgtgttcattgagttctttcattcacatgttaaagtttctcagataaggtgattcttacaatttatattttaggagctcaataacatgagtggttgagaacatgttatacaaaagtgaaatgtaaactttcctaacagatcaaatattagttctcttatagtgttaatttaatttggaaatgctaacagttggatccaatccaaatctataacataaattaactatttacattgaattaatggtacataaggagtcaagagataattagaagggtaaaatagtaattttgaccaactcgaattatgaactacttatattgattattggagggcaaactacttatattgattatttcaatggactacaaattataagaattctgtaaatataattttatattgtacaagagtacaattttatatttataggggagtaataatagagtaaataaattagattattctaatgatgagatcgataataatcaagtgtttattggagctttgaaatatagattcatggtccccgagtcacttctatataacactgtataggggaatattttatttgatgagtaaatttaagtgagaattaatttctgtgaaaaataaattcttaagggcaaaataataatttatgaaatctacagatgggtaactgaatctcatatttattttacgatctttatattgcgacatacccttagtcaaggatgtgcgatcactcaatttaatattgcatgatgaatgaccacttatcatgcctctttatggctaaatacttaatgtcgatatgctagtttcgaccagtactcttatagttcttaaccataaatattgttactgaatttgttgcaaaattttcttaatggcctaat

SEQ ID NO: 383648 - DNA, 1343 bp, Cannabis indica
agggtttcctaggtatcaaaagattcttcaagaggaaagaaccaagtaaattatttaacctccaaaagagaattttcaacaatggatttctacccaagtgttcaaactaacccttcttcacttcagccttgagttttcaggtaattgctctaattgtttattttattttcaaaatagaatatgacttaaattgtactattggatttcacccacccacccatgtgactagattacaagttggtcaaaaatgactcaacaacacatcggataccaacaactgttcaagttctgatttttttcttttttacttttttggcagatttatttaaaggaatcagtgaactcaggagtgtgtgtataatatataattatatatagtaaaaaaaaaactagggaaagcagacagagcagagaaggtgaccacttgaatatgtcgaataagcttaaaatgtatttgacgtgtaactggtgattgcttatatagagaggctgccgtctgccatatctcgacacatattttttttcttttattttttggaggcttcttttatttctttaacaattgtacagttactttcattcatttagaaaaaaataaggatagattgtaagttgggaaataggactctgttgttttcttctttgagcttgtggtgtgaacttgtacctatgtcctctacaaaagagtgacctttttagtgatataatgttaatgtatgcatagtgtctttgtaaaatgaaaaaagaagaaaagtgggatgtagatatctaatatactttttaaaccaacaagaaaatgagaacctcttatttataaggatgaagaaggatacaaagtacaaactcaatcctatactataggttacaagtaaatagcactgaaaagtactaaagaaagaggagaagaagataacacaagacttgaacaagttttaaggggtttccaaaagaaacttgtttcttctctcacaagaatactattagaatgtttttttaaaacagattactattagaatgtttattaaatgattattacaatttctatattttaacagaaattattagaagttctaatctttcattatgtttctattcctatacaatcgattattgtatacaacatccttactatattgtgtcatatatacttaacaacatgatagattgtcatgtccaacacaataaataggttgtgctcataatcttaattaatatttgttcacgcagtttttcatcaaataatctaagaaaatcgtacaaacaaggggactgcgatgaattaatttatctaaataaaattgtaataaataaaaaaggacaccaggaatttatagtagttcacc

SEQ ID NO: 383649 - DNA, 1563 bp, Cannabis indica
taatttttttgaaaaaaaaaattatattttgataataaaaaaatataaaaatccataaaatttgtaatttccacttataaatttatggttgatgaacatttcttattcttttaattcacccctaaaaaagttccctattttgttagaattgctcatgaaattaggacaaggatgctattctagcatataaagcatgtagtactttattcttacttaaaataataaactaatttattcatgtcttaatttttatttctacagagtttcatcgactactgtgaagaccatgtttgtcttgtcgttactgttgatggatttgatctaagccgttggatttatttggtgtagtatatttatattagccagatgaacagttgattcttcctctagagtgaatgtgttaacttagtatcagatattgggtttcttcagtttattttttctttctttatttgctgtaaagtttggttgttggctctaaatggtaatggggtccaatctgtggtcattgtctcaaattaggatttttatttaatattaaaatgtaattgtcatgttatgaagagttatccattttatttaatttgtctttggaggaaataatatcatcttttttcgtaattatacaatgttattaagttgcgtttttgttaagcaaaccaaattattcaactaatgtttctattgatgatacctttattcttaactttattatgaacaatctcatctttcggatatggtatcattataatataatcaaaaagacaaaagggttgttcaataataccttctcttatcttttttctttttaataatcttattttaatagaagcctaaacgtaattttcatccaactaatattcatatactagctagtgtgatacacacatgtaaatgtagtgtgatataaaagggttaatgcttcttctatagtccttatctaatacaaacaaatttgtaccttgagcctttcgattgcgatcaattgattttgactattcatcatgaaaatcgacaatggaaagtgtccacggtccacttcttaaaactttctatatgaattggtttggtgctttagttaattaggaaaaagaagttattaagcacgtaagaaagacaactacataaaacaaacatatagcgttaccatcccgattaccaaaaaatgcagatgcaaaaatttaaaatacacaattatatagattgtatgttgattcagaaataaaagtaactcatccaataaaatacaaatatattttaaaacaacaacaataatattaataaaaaataataatttattttattttgatgtcagttatgtaaaaaaaaaattaataaatattaattaatttaatattaaaaataactaatctaaaataatcaatacaatacgatttgaattgaatttgaaccgtgtagatccaacggattgaattaaaagaacacccacccacatacacttcctcttggttctcaaattatacttgtaaataaacatttgggtgattctacgatgcacccctttaaaatggatgtattgatactctctacttcgttttcagt

SEQ ID NO: 383650 - DNA, 1723 bp, Cannabis indica
aataatcatgttggagtgacagaaaaactgtattatgcaactataaaacaactattatgatcgttttcgaccataaatttacattaggcaaccaatgtagtttttttgctaatctaacattttcatgttttagtttggcaagttgaaagcggctgctccattccccaccctctattttgccacctttgaagtgtgttggaaccggctcctcttgaggagcaggagcacttagctccttgagctcataagacaccaaagtagttagaactactatgaggtggcatcctataattggttagtaattctttataatctttattaaagtaaaataagtaagactcgatattaaaatacaccaatagtgatataacacattacaagggtgctagtcaccgtagttgccctttggtaacttcgacttcctaggagatggactggagcacactctttttcttagcaattttttatttttttacatttttacaaaaatttacatattaactaacaaagtaatctaaatcacaattaaaatctttatatataaaaagtgcttatctaacggcaattgttggtttaacgattttttttaatgattttttttaacgattttttttaacgattcctcttttttatttagccttacaccgaataacttaacagactgttaacgtttttaagttaacaaataaataaatccaaaaaattaaacaatacaatttttgaaatttttttgcacggcttgaatttcaaaaaataaacccaataattaaacaaaaaaaattaaacaatcttttaaaacccaataattaaaccaaaaaaaattaaataatatcttatccacctatctctctaacacaaaccataaataataataaaaaaaaaaagatatatgaagtaattctcaaaaaaaaaaaaaaaattactctaattaaaataataaaattaaatttttcccaatcttatctaatttatttaatcaaattagttacactaatctcaatcaaaacatactaataatactgaccttcatcaagcattatggctacattcatgtccataaaagttttagactgagcaaacttctgggcaccatcataaccaccagtctcttcttctggaacaaaagacaaatagatggaacgcattggctcaaacccagaagccttcaatctccgaatagcctcaaggtactgcatcccaacgcacttggtatcctgagaccctctaccgtatatattaccctcccaatcaatctccgcaccgaatggtgggtagtcccacttgtcgtgctcgacggggaccacgtctgtgtgtgaattgagaagaactgagggaagattggggtcggaaccgggccatttgaggaggatcaggggctttcctttaacgaattccagagtctgagactcgagggagagggatttggcttgggagacgatgaaatcgagctgcttcgtagtagttggggttaggatgggctgtgttgattcgaagatattgttggaacctggctatggctgccgaagatgatgatgggtctacttcgtttggtgttgctgtggagagaaagaggagtgagattagaagggtgcagtaggggagtaggggtaaggtggttgttctgccatggcggaaaccaaaggtgtttgataattttgtaagggaaatttgattttctatgcttagaaaatcaaaaaatttgatttataaaccaataattaaa

SEQ ID NO: 383651 - DNA, 871 bp, Cannabis indica
ttttgtaagtttccctaaataagacaagcctaatacagtggcgaacccataaaattttgtcaacgggggcaaatattttaggaaaatatgtagtacaatctcttaaaattgtattttagtagactgttgatctgtttcaatataataaagtttctcaatttaatatttttttcatgattatataggatgtagttatttgagattacttataattaaaaattatgaatagtttactttacaaaaaataaggtttaacatgttgtttatcatatgtataagaaaaaacagtcgtgctcatgcatgcaacaaaatatttaaacattatttttaacattgtaaactattcataattttctgaaaatttataagtagtcttaagaaactacaacgtactcgatcatgaaaaacataaattaaaaaactatcttgaatgttgaaacagatagatctaccgaaatatctcattaaaaaaatatattatagacttacttaaattttaatatacattcatgtaactaatttttaatgtatgcaatttttagtatagtgaaaaaaatttcaatatcttccctcaaggttcaaacgtcaatgttcgaatctttgacactttaaattactttttaaaaaactccaataaatacatattgaaaactttgatatcttaaaaataaaaaatatatattaaacgtaccactacactaaatttttatatatatattagaaagcgtctatgttaattttatgctctatatctagtacaaatatcttaaatattgatacaatttaaatattttaagcataattttttttcgtaatgatatttattgtagttacataaattttgtgtactttttcaaaaaaaataaaataa

SEQ ID NO: 383652 - DNA, 2174 bp, Cannabis indica
aacatatgtgaaacccgaggagccccatttgctactttgcagccatgtaatctacccataagctcatatttattgattaacgtcgatagtccctcagcacacaagataaagatatacggcgataaagggtccccttgacggatgcctctcctaggtataactggacccatttctctgcctgcatgaacaattgtataccttgctgaagtgacacacttgagaatcaaacgaacccagaaagggtcaaaacccatcttcatgagaatagcttgtaagtagtcccattcaattcgatcatacgctttgctcatatccagtttaagtgccatataaccctcctttccttgccttttccttttaaggtagtggagcacctcaaaggaaatcattacattatcagtgataagtcttccgggtatgaaagcactttgatattccgacaccactttatccatccatggcttcatcctattagaaataaccttcgtgatgaccttgtataacacattacacaacgaaataggccgaaggtcggacatgctttccgggtgcttcttcttcggaattaggactacattagcttcattacaaccttcttcaaactcaccatattgcatgaatttttgaactgccaagacaacatcggaaccagctgtggaccaacttttttgaaaaaaagccggagtcatgccatccgggccaggactcttatccggatgcatttgaaaaacagcacatttaacctcttcttcagtcacgggctgtcgaagactacaattcacttctttcgttacggtacggggaacacaatcaacaatctcttggaaatcactcccagtatccgagaaaagagattcaaaataattaaccaccaagtccggcaaacccgagtcccaatccaaccatcttccatgatcatctttaagtttcaaaatgctgttatttttcctccttgtactagcagctgcatgaaaatatcggctattttgatcccctccttttagccaaaactgtttcgaccgttgcttccagaaaatctccctctgctttagaatttcaaacaatcttttctttgtctccttatacctctgaaccgagctatcatctcttttgtgcttcaagagatttagctcccttttacaacttttaattctccccttgaagtcccctgttattgttcttccccaatcggcaagcttcaatgcacaatttttaattttgcttgatatatttagccccacggacgaatcccaactttcagcaataattgttttacacagaggctctttaaaccaagctttttcaaacttaaacttctgattgtacacataagaaagtttcccaaccagttccagaaaaataggcgtatgatccgaaggagaatgctccaaattaaacaatttagccacagggaatttaaaaaccaggaagaactcaccaaagcgcggtctagacggacctcaatccagtttgcttgtcctctatttcgttcccacgtgaacgggtacccaatcaaatcaacatccctcaaatcgcagtcgggcaaaacctgttgaaatccttctaacaggcgtctcgggtatggacgacctccccgtttatcctcctggttgacgacgttgttgagatcgccgactacacaccacggcaacgacgagctgtggcttaggcttcgcataagggtccaggtagcttcacgttggtctctcctgggttcaccatataacccagtcaaacgccactttctattattatcagattctaccacaaaatcaatatggtttttagaataaccattaatccttcccccctccctatctttccaaaacaaaaccaggcccccacttctcccatgggcctcaacacaatagaccccttcaaagcccaaagagtgacccacccattttgctctattcttcaaacacttagtttcacaaagaaaaacaaagttgggtttcttttgagaaattatctctttaaggaattgaaccgtccccgggttcccaagcccgcggcaattccagcttaagacattcataatccttggcgggcctggacaccagaacccgcctccccaacgttttttgtcaaaatatcagcatttccattcggcccaatactctctatcatttctgtttctacttcattagtggacactgttgggttttatgccc

SEQ ID NO: 383653 - DNA, 1297 bp, Cannabis indica
gtgtaatgagagtttgatccacttgactctcgtttctctaccaaattctcatcaaggtgaaaagcatatgagttaaccgtatagcagcccttagtagtgtgatgccaaatgagacgattattggaaggaaataagctaagaaaaatggtgacgattctgtccacatccataagttggaagtattggatttgtcaaatgggttaagtgttggcgatatggttcgacaagattaacataaaatagaataaaacaagagaaaattgcattgtatacccactttattttacttgtttttttacctctatttttatattctttaagatatactacttttatagatgatgtccttattagatcccttaggttaatgtaagattttaaataatttaatattgaaaagtaactaatctataataactgatccaatccttgtagattggataagattgtatttgagctattatgcgaattgaatttgatccaaaatataaaatccgcacttaatgcggatcaaatgcactataaacaaaatattgcgagttggattagattaacaccttttaatttttttttttttgtcttttttcaaagatttacaacttctttctatgatttatatgttgaaactataagtaattatttgacaaaatcactatttaatcacacttgttatttatcactcaattatttaataagaccattatattatataaaatattataacacaatattggaaaaggtgcatcaacgcgggaaaatcatttcgtatatctttctatgatatattcacattgtatatatttcatatttcagagactttgctgcattgagatcattaataagatcatgcaaattattctacgctaactactcatgacggtgtattttcttttttctatttttccataagaaaaaaaacactactacggtgttttaaacacatcttgtttgttattaataaaaaaatatgtctaacctattaaattatatatttctgacattaaagtatatggacttaatcaagcatattccatttaattacgtacatgcacattgccacttttttcttagtactctgtaatattattgtcttattattatcgtctcatcaagttcaaattaagaggtacaatattcttaatgttaatacaacattaaggtttttttaattgaatatacaacattaagtttaaagtagtacgtacattatattgtgtttgggtaaatagcggtataagtatccaaagttttaagtttgtaagtggcatcaactcaatgtttatttttagctgcataa

SEQ ID NO: 383654 - DNA, 2200 bp, Cannabis indica
gcgccggcaaaaaggtatcaaatctggttcaaagcagattagggtatccgtttaccccggcgttgaagttgtgccggtgctaattctcgtcgacaaaaacaagtttttccagagcataaaactcttttactgaccaagattcgctgacttcttttgttggcgcatttagtctacttttgccagcataaaaagtcaccagcaaaagtccactttcatgtagtggcagggcacacttctcattaagatttttccttaagtctggtgtggtgacttttgtctggtgatcttcaggtgattgggggctctaatctctgatcttttgccaggtttttatgtggtattgactgttttggggacaactaggtggtgtaattagtaagctacatggaaatccccccacttggctgggcgcgactgcgtcccttagcatttttgcctttgcgcatgaaaatgggtgcatgagagtgcccgtgcagtagaaaataaaagacttcttgcatgttggccatcgtctcctccattctatgatttttaatcaagaggtcattcatttgttcttgatggattcgagtgtggaagctcaagctcattgagtagacttgtttttcttctccaggtcaatggtgagggactctcaaatcctgtggaacgagtagtgggggatgctgcttagtggagatactcatgtctgaggtggtgggcctccgttaactgacgaagtgacagacaatgtcccttgtctttttataagggatgtccactcgacacatttgtgtggttccccctacataaatacaaggcgtttggttcactgtggcaaaggtctcctggttttcctcttgggcatctcctgcagcatgtggtggagggtccctccttgccaccactagttggttgttgtccaaacgaatctcaacatactacaaacactgggagcgtctgggcattcttgaagagatgtgattctttgagaagaacttatcttggaacttgttcatcccacagacggtgcaaaaaaatattgactgttggaatttgttaatgatgtttaagttggaaaataaatattataatttatgttaagaaaaataatacaactccaaaagcttttgagaaatgctccgtaagtaaaaatagtgattttattcctttatctcttgttacatattcgaatttttctccttcctccaaatggaggagaatgctatttatattgaggctttattggcctcatgtcacaagttgattctcgtggtccccaaataggaggtacacctgctaacacccaaatgtcagagtagtggttgcaggggtgtggttgtcggagtacttgatggtcctattgaatgatttccttatacaggtctctatagccactacttgtcaggtggtgaggtcaggttgttataaaatacgctccaaacgacattttgtctgtcctttcagtccccctactctagtaccatttggcttctaacttgccttctttatgccacaagacttgtgttttgttttaccactaagtggtaagataaaagaaatggggttttgaacttccttggtcggaggagaaaaggatggtggagaaaagcccttggtgccaagaggtttggtggtgccaaggagacagaaagaggagtaagagaagagaggcccttggcgccaagggtgttggtgatgccaaagagagagaaggagagaaagaggagaaagagaagacaagtccttgatgctaagggtgttggtggcgtccaaaaaagagaaaaagaagacacgaaatcataggtagtggtgtcttgggggcctattttagttgttgtgcaattttacttcacattataataattctcagatgacaatatgtaacttcagggttagcaatatgtgtagtggtgtcttgggagctattttgtgacacaggttttacttttgagttattggcggcaaaactccctcaacttttaattcacttgcaaataaccatccaaccttatatttttgtgggaaaaccctccaaagtgctaaactcttagaaaatttaaggtgccatctatttatctccgttaactgctgacatggactgcctacgtgtacatcatgtacacatagcatatttatattggtccacttaatataattatttaaaaaaattataacaaataatttccaattaatgaataataaaaaataatttattttt

SEQ ID NO: 383655 - DNA, 2188 bp, Cannabis indica
ctggtgtttgtgttcatcagtgaggcaacgtggaatgattgtagtttgatgaaggtagtgttgaagaacttcatccactgaagtgtgaccgaaagcataaggattgtctgttggtgataaaatgacaatggcgatttgagcgccgaacttgacacataattcacttgccttatggaaaagccctgtacgtctctttgagaaactgacaaacacattggagcactgtccttggttttgttgttgttgttctccctcttcttccaaacttctctttctcttacacatagtacctcgtttggagcttaaatgttagtgggagaagaaaacatattaactacaaagctaaagagatacaaatgaataaagcatttgttcacaacttctctaaacagtacattattagagtatgtccaatggagatataaataagtggtatatagcttgtttaacacaaaaaatgtgcttcaatggtgtgtaaaaagtgatgtaaatttggtgtaaaataaatgtattattttttcatttacatttatgttattattttattaatgtatttaactatgacattaaattataaaaaatttatattattttttattttttacatattaaaataataataaaatagatcataaaattattagatttttttttttttaaaaaaatagtaattagatattaaattttatcaaaatcttgtaattatgcattagagcacaaagttaaaaatttagtgaaaatttaccacaaaattacttttttatacttaatataacataactatattttaatttttcaccacttatttatccctccattaaagatggtctaactagaatttttgagctaaatcatattcatgaaaaactaaaggatgaattaatgaaaaagaaaaatacgtttttggccagacttggagagtgggactacagcagaggctgcctcaacctgtacaagtacaaagaaatcaaaacccagttacaaccccaaaaaagaaccccaattgtatgaaaattaattcataaaacataaaatgttgatcattgaaatcaaacatcacattcctataaatatgacactttatcatctacttaatcaaaacgaatgaatgaaaggaattgaagtgtaaacatactatagtgtcggattgattgattgagttgtccattacaagaactggtgtggtgtatagaaaaaaagaagaagaagaagaagaagaagaagaagggaacccagcaaaaactcgagggaaattaaagcagaatagtaatgatcagagtggtggccttcatatatttatgctaaaatatttcaaatttgaactttttcttcatgaccaagttttttgggtttttttttaatagtttccttaattaattaaaattcaatttatgagtctgacatataatatattcttatttcctaatcctaggattctcgtttgggctaaatagtaaaaactagggcttttgcttttaatattttattattggtatacccatatttaatgtgacttactatattactcagtactaattaaatgaagggatcttaatagaagatcgtatacccatgttcaaagcatgtaataattaattattgtacacttggcaactacatattggtttaaaaattctctttttcaaataacaataaaaaccaacggtatgtttatttccaaatgtaataaacttagaattagtaaataaataaattgtgacatttcaaaaaaaaaaaaaaactcaatacttgttagttcttaattaattttataattaaattaaaatacaataaacttaaataacaactaaaatattactaagaacctatttagcacaacagcatagttttgagaaaaaaagttaaaagttgcttttaaaaaaagttggtgataaaaaattgtttgtcaaacaattaaaaaacagcttataaaaaaatttatggagaagttacgtttaaaagttaaagttgatataactcaatttttaaaaaaagctgttataattaaaagactttatactaaattattttgtactaaaaatatatttaattatttacaatatattacaaaaaaataaaatattttttgaaagaaaaaaatatataaaataaataaatttttatatatttgtgattataatgaaatagattataatattataataattataatagaatcttaataact

SEQ ID NO: 383656 - DNA, 3666 bp, Cannabis indica
tactttggatgactggttaaatcctgcaaatgccagctcgattagaccccttagtacaaggaaatgaccatcctagttccaatgcattagcaaagtatgcagcattactcagccaaagaagagaacatcaacttggaaattttccaaatcatcctattattatctttgtttattattctagtacttcttactttgagatatcataaagtgatatgtggacagtgaacttctatttgtcatatattcatatatactcttcttcacatgtatcaattccctcttaaactaacttatatctattacgaaacagtccagcaaatgcaagttgttactacgtcaaatatgtaagtgacagtagagtacaaacctcactggggttaccccacaatctccttggataaaaatctgatgtagcttcaacaattcctggtggtaatctttctgcgcctttaggatttgatgttacccaaatctgcagcagacagtcatagtaagaaattgagccacaaatcaagaaaaataggcagaaatataaaacaaattccaaagataaattgacctaagcctcaacttagcaatagcagatatgtgccaaaattaaatgaattcatatggatatggagatcactttcacacaaactacaatgagaacaaactaaaggtttagcagcttggaaaggagaaggcttagtaattaagtaaagccaatagtccattgaccaagtgcaagacagaatctaaatcttgtaatatgaggtcctaaaactttcaggagaattaaagacaccgtagacttgacaacactcaatacatatggagaaagaaatgacttcaacatttcaagctcgctgtagacttgacaacactcaatacggatggaggagaaggaaaaagacttcaacatttcaagctcatcaaattctattactatttccaagattcaacttctacctctatatattctttcttacagcaaaatcccactggcaaaatactgttaaggagcaattaacagatctcatttcactccataataatttacccactaatgccctgaatcttatatgcatcataactgtgctgagaaaagaaaaaattgtagtttcaagcatattactgtacgtgagttctcaaaatcaatatcaataaacaaagaagcttgaagcatcaattaacgtccttaagttgctttatgccaaaaaaaaaaaatgaaaagggtcaagtaaaacatgtaagcaactttaactttgtattagttctaaaaggatatagaaagaagtgaggtatacctttgttggatcatttatatgctggtcttgctttgagctgctatcattaatctttgcagaagaccactcatttatctgagtagagagacctgaacttgtctcatcgctgtatgagagctgaacaggagcaggaaggaagttggatggaatatttagctggcaaaatatgacaaacaagcatcgcggtgagtaattataagaagttcaacaccaaaaatatgaacataaaaaataatctaatcttatcaataaaagcagaaaaccattacttgtatagtataatataccttagttaatgacaatgctgggaaggatactcctatgaagaaacccaaaactactccaaaaaaagttgttacaataagcctcatagtttcattcggttttctacttgcagaactgcagttaacaagatgatacgattacattagtgctcagtttcatattataagaccttaaaataatttcaagagagacaatttcaaatggaattggaccgttgaagatttaaacctgcgtgaaaggattcccatactatttataaacttctgattgtatgttgaacaaaaaaatcagcctcaagatagtaactatagctcatctgcagtcttgcactatctaacaggttttgagttgcatattcttctaagcagaatacctaatgagattgtgagacatatacaaaaatacaggtaagatttaggtacagcaaaatgaatcaagctggaagtgttgcgagatactaattagaatgaattgcttagcagttttccttcaactgacaatatttgattgtatttggtttttctttaaaaaaaaataaaataaactgaagcttatgaatgtgtgagtgtgtgacaattcacaatcaaaaaagcaccagcttcccttacattatcctttcagaaaatttactgcaacaactctctctctctttctcttagtaacacacaaacattagcagtctatcacgtagctaaacctggctagatataaaagtcacaaagttgacttttaaaccgaaacaattgcagactccacattcagaccaagtatgtagtcatattcctcagacccaagttgatcataatcataaacaagtagtatcttattcgtatgcttcttccacattaccctccacaagttactctacagaaaaagtaatcatgtgctccctttgacaatcaagactcaagagcaataaatgtgaatcttcaataactttttgtttcatcaaattatgaatcaagtacctccctatctaagtaaccacgtgcccaatttgagcaatgaagtaataaaccctccaatttttcattcatgcagaccagtttcctgattatagggttgcttaatgttgaagacacataacagaaaaccaaatataaacttaaaaggcaagaattaagttagctcaacaaattgaaagcttatatttcgataactcctaaaagtcttggtcatcaaaaacatttttcatcaagttcaatcaaacttaaatatatttatttcatacaataccaaagaccaataactggacaaaaagtaagaacggccaatacaaacaacaatctaaaacttaacaaataacggaaagatcccacgttttagaaaggggaaaacaaaaaaaaactgaccaagatcaaaagtacacaaaacctcaatgttaacgttatttaaattcaaaaagccaaaaataagcaaaaagaaggtaaacccatcttcattattctcgttttttttcttctttcagttaaaacccaaatagaaatgaaattagtgtgaaacagatatgaacacaaactaaacggacctgaaaatcaaagccagagcaagatctggaagagcagagaggctttaatgagctgagaatcaaagtaaagatacaggctttacttctctcctcctgtaaaatgtgagaaacggaactcaaaatttagaaacttcgtgatcgccttcgcctttacttagttccgaaaggggaataaggcaaaagcaaaaatgaggaatatgacagagctaaggcgatccacagattggggtatttatatagttgtgggtgtgaatgaggttttgggtgtattattaacaatggagaaaccaattgaagatcgttctctttctgtgagtctgtgattttgagaacgaaaaactatgtggagggaagaaataatataatatataataaataataaataggtctgctcagtttttgcaaaaaaaatacttgaattaataaattaaaattctcaataccaagattgaaaattttgaagctaatgaaattgttaatatataatatattttattctctctattttttttttattattatattattattatataattctttttatttataaaaaataaaaat

SEQ ID NO: 383657 - DNA, 3035 bp, Cannabis indica
ttacaaccaaataataaagttacaagtttccatagaatcataatataatcagtaggattaattagtttaaatcctcaaaccaagtgcccctaaaaaaatttatcattttaaatgatgtattttttaagcttttttctttcgaattttgctctgtatagaagtttagagagatacactatagtttgagcagattgtgaacttactattcgtatcgtatcttttcttttcttaataaaatttaactaatctctgtttgggttgggtgccagaatacttcataattaattactttatttgctagcttgatgttgttattgtcttatcgttatttttttttttcaaggataacatatttgtcaaatcatgctgagcaatacatcatttatcgatttagctatctctgtaatttattaatagttatagaccaatttgctagccagcttttccttaatactatgttaatttgttgtatggattcacattatattatagttgtactatgtttatatcaccacttatgatcgccatattaaaaatattgtcggcatccttcgagcatgaataaattagtaacaatttgaccatatttcaaaatggtccaaaaatttgtttgtggtctttctttgcacagtgttggattgcaatcttatgaatatagtaaatggacttaaatttgtggttcctaactaaagcaacattatccatataattagatcatattcttgggaaatctttgctaactcggaaagatctaattaatggttaatttagtaattaagggggcttacaaaagtgagattattatgttaaagaatacagccattaattgtactttctagctttagattaatcaaagaagaaaattaaatgtagcttgtaaagtgcttggatattatagatttattgaaacggaaaagatggcatgagaaacaagtggggttaagaaaaagaaagatgcattgtttttagtaatgtatatatttattatacatttttaattaaaactattaatttgggttcaatgagagagagatagggtgagagtaaagattaaagaaagagatgcttttagttttgtttgtctatacaagtacccactacttggatcgatatcttggtgggttggatttcactaggtataattgttggtgtttggacccacgaaaagaggaaagagatagagaaaacagcactacctactgaattcatcagttctcataattcaaccccaataggaatagaataggtcatgtaataatataatcattcatgaacgtacatctatccttctactggaacaattttcatactactatttttttttccttttacttttccccagatatatatctattttgagcacaatttgtcattgttattattattaattattatatatagcagtaaaaaaaaaatggcgaatcagtacagtatctatgcttatacatattttaatatgtcttatatatatagatatagtcgaccaaggcatatggtaaatagtgtgttagtgcgcactagtgaaacacaacatgttattctctctggaaagaagataacaacaagtatattttatatttttatatctataaatataaacttggaaaattattgaatacatacagcctaatatcattttacttggaacattctttgaacggcagatcatgtagtgtgcttttcaccaaatgaaatatataaagacgaatagtgtatgaagcaactcttctattaattattaataattcattgtaatatataagaaatcgtctattattttagatttcgtaaagggatgaaatgatatttaattcgacctatttacaagaagacagataaagccaattttttttttttttcatttattcatgattatatatgaacttttcagaagaattagaatataacggtctcaattaataacttttgcaaagaagaaagtatgaaagaaactaggaggagagtgggagtccaaattacatgtacctctctttggaatttcaattagacagaattaaaaataataaatcaacactaattaacaaccacaccacatgtgaatgtacaaaaggtttcaatccatattaatcttttaaggttcttttagaccatattataatttataatattgtattaaattgtattgtatattttttttttttaaaataatattaggttgaggttacgtgtataatatgtacgattttatacatattattttttttttttttttgagagagaaaataataagctatcacaaattaaaaatgtaagtcatttacaatagcagagtaaattagtggagggaaattctctaactaagagcaagctttattcaactttagagcatgtcaagccaaataataggcacatattagttgaacgtgtgacatgagtaacattgaatataaggaaaaaattaaaataaaaaaaatatatctacaattaaatcatttaaagaagaaattacagaaaagtatgcatttaaagcattcaagattaacatcagtgcatctatttcaacatgagtgatcgtttgtcgcaactggagaacccaattcaaactgtgaaaaatagtcttgagctccatctcatgtgaagcaaagttaccaataattggttttgagagtgcagcgacaacttcaccatgagcatctcgaatgatggtaccaacaccaacaatgcctctagttttatctacagtcgcatccacattcagttttaattcacctggagcaggtggatgccaaggaacagaagcttgaaccagcggaggagaccttgaaacagagctaccattcatgatatgatattttgtttgagctttttggtagtttcgtaggtaatattcacagcaaaagagacaagagttgtttctagttttacagtacccccatagacaatcttgtttctctcaaaccaaatcaaccacatggtgcaaattataaattccatatcaaactttgagtggagacttgaaaggtgcatcaagtagtcacctctatgcatagagttggcaaggttcaaatcaaaca

SEQ ID NO: 383658 - DNA, 1565 bp, Cannabis indica
tattagcctctaagggcaatattcatgtgtttacagtatttagcaggaaaccctaactcgttacccttagtttctattctaaagatcaagggtaatcacaacagagttttacatatgcgtttcttttagcttgacctctttgcatgagaataaaggagtatttataggctaagtagcgggtatagatagacccatgacccacctaagatttgttcttaaatccctctgttgggatgaattacatgtaatgttagagttgattggatagtccagtgggtcgcattatgtccgtgcatgtagcagttggataatggggattattttgtaccatttggacacgtgacacgcaaaagtttaacctttaaaagtagggaacacgtgtcactcaaagcttgttcctttgcaagcagaagtttatagtgtctgtctggtaaaaggatggtggtgatgcgcgcactaccatgctcgaatgtgggaagcaggatctgattccgtcaggaaaaacataactgtcacttaagtgacctggcgtgtggagaaagtcgatatccgtaatacccagtgggggtcaatatcctttttagaaccttcgagcgcttatttggaaatgaaccaaatgagcctccctggcagacccttttgggtctgggagagacatttcttcttccgcttttgggaagcaaaggctagcgcgagtaggctttcgtgtgtcctttcattctggatgttttttgggttcgggaagccttttagtgacaaaacaaaattaagaggtcttaatcaaggtaggatcaactcagcttcccttattgaaagccatgtgtcatgcctcacagaaatgcagataacagttacccccaaagctctcgggacgcaacgcgatccggaagcttgcattactctccagcttcttcgtgacaaattcttgacacgtggtgctatctgagattgcttcacattgcacaaggtgtcatcaattaatgggtcactagccgtaggcattattagcatggctcatggggcggcaccttaaatgtgaatgttggcaatacgcgagcgtgggggcgtatttcttgagaggagctacaacgacggtaggttgcttgagatgacccttcttttaataattgcattacctgagacatgcaataatgaatgttaaatgtttgggttgatcattaaatgcaacctttttaactcctcacccatcgattcaaaggatacttcttaatagaaatgatttgggccattcatttcaaatggcaaggacttgaactggtgtataaataagttttaagagattattcatcctcttttcatcatctttaaccttcaaaagtccttctactttcttcaaattgagcccaaaaatcttgatttactttagggtctttttcatttttacacttcaaaatagtttttttttttggcatttttacaaaattctacattgaaactcctattgcaactagcgctgcaacctaaattgcaataaaaaataatatataaaccccaattgcaactagcactgcaaccactttagaaacccaaaccgtaaatttgaa

SEQ ID NO: 383659 - DNA, 1627 bp, Cannabis indica
caatagaattagctatgatttttttctggcttgacccttacatgagaacgaaggggtatttataggctaagtaacgggtatggttaaacctatgacccatctaagatttctgcttaaatcctgctattggagtaaattacatgcaatgtaaagctgattggttgatcccgtgggtagcattatgctcgtgcctgtagcagctggataatggagaccattttgtaccacttggacacatgtcacacaaaggtttaacctttaaaagtgagggacatgtgtcacttaaagcttgctcatttacaaatagaagtctgtagtgtccatctggtaaaaggaaggtgggggtgcgcacactactatgcttggatgtaggagacaagatctgattctgttagaaaaaacataaccattactttggtgacctagcgtatgagaaaagttgacatttgcaatctcccatgaaggtcaacatctgctttagctctttcttctgcctacctggatataaactaagcgagcttccccattaggtctgggagaagcactttgccttccacatatgggaaataaaggcaggcttgagtgaacttctgcatgccttgtcatcgtggatggttcttggttcaggaagaccttccagcagtgttatgattatgggaggattgatgtgattttctccctttcatgtcacgtgtcatgtcttgtaaaaatgcggataacatttaccccaagcttttgagacgctttgaggtccaagagcttgcaatacttcttcgcttcttgtgacaaattttggacatgtggtgttggtcgaacccgcaggatgcatcccataagttgtcatcacacatcgggataataaccaaatgtatcattggtgtggcccgcatgcagtgcttctgatgcatttgctaatgctacgcgcacataagggtgtgttccttgggaggagtttctatgaggataggacaactgaggtgaccccccttttaatgcgtacaatacacggtatttaaacgttcaagttgagcattaaatgtggtcttttcgatttcccatttgttggatcaaaaggtgctttttgggaggaacaatctaggccatttatttcgaactgcaatgtttgcgattggattataaataggttccaagaactcatttttcccttttttatcatctttaatctttataagccttcttgcatttttcttgaactagagcccttattttctaaacacttattattttactgtcgccattaataatgaatgcaagaggtttttgactgtctcctctgatatttctttaatctttgttcatttcattttccaaaggtcgaacccataaattcggacttgcttcacctctagctagacgagaaattcgacgttcaggcatgctacaaccacttgatcgactgggttcaacattttgggcagattttcgcgaaaactttccagtctccatccaaacaccaagtaagttcctcgacgctctgttgactttacactatgcctgggatataagtgttggaacttattttactaggatctagattcactaacatgtatgtttgattataatctataatctaacatcctaaatatgaatttcttaaaacaataaa

SEQ ID NO: 383660 - DNA, 4837 bp, Cannabis indica
ggctgactggggatcgacactgaccctggtgagtgaaagccggggagagaatctgaaaggctagaactgaaccggtagggagaaggttggccaagtgcgcagtgcctttaaaagtctttctaacagctttctgagccggagttttcgtctgtttattattattataggtagggtcgaccctgaggtgaggcgagtcaggcgttcgccttgacccccaaacgctcaggaccccgaaattatgaaaaaaaaaaattatcagtatataaacaaaatattaaataataaggaaatataacaaaatgatgttattttaagctaagaggtcaatagatcaatttctagcatgttttttttttttttttttttttttctattcttttagaatcatttactgtttagctatagatgattgaatcttgaaacttctaagaattttaaattgttctactaaaatttaatttaattttaatctccatataccttaggaccgaccgtgttattctgtgcttctgcttcaatattattacccgtgagaagaggttgttgttgctctataaggtctctaatggcagccctgcattcttcattttctatctttgaaatactttccatctctaaaataatttctttaatttctccttaattaaattatatatatgtatatgtttatgtgtctcttctttctttggaagtgtatataggtttaaattatatatatgctttggatatagaaactgaaataacaaaaagaaaagctcaaagcctcatattaacattatgttatgtaaatttgttcttctgttttgtatagatgtattaattaaccgttaatcagtttttattattattattattattattattataattatacgtgaatgtatacgttatattagactaatatttactcttaattataattaaggttttattaggttggtcattcttgttatagtaaaacataatatatatttataataaattagtggttttcggttagaaaaaattatatttatttagttgttctcatttttttccaaataatatattaattcttttttaatcaatgtttaaaccatcaggttgtaaccgattttttctttattaattatattaattatacaccacaatttttttattcatattagtagttgattagtaatgataccaaatttaaaataatatagatttcagccaaaataataataatattcaatgtaaaaatataagttattaattattaaatattatacattaaaattgtccaatcgttgcacatgtataaaagattaaatataaaagctttggcttttataatattcctaataaaaattatatatatatattgatgaatatataaattatattttatttattgcactttttttttaaaaaaataaaataaaacaaaacacgtgttaagatataaattataatccataatcaaatttaattaattggcaaagtcggcttaattaaataatatataattaagatttaagaacgtgtacggttcaaaatgaaaaacgaaataaattcattattaattttattaattgaaaaaaaaaaatattatattctaagcaccaaatgctttattttttttttaataccacttttgatttacataattttattagtaaacaaatggaatatataacacaatgtagcattaaaagatggaagagaatctaattatcctacttcaaaaataattataataattataaataaaataaataaataaaaagaagaagaaagaaatagatggaagagaatctaatacttctcttcattcccaaaacaggaccactttcttctaagccagttgtcattcttaaaagcttcaaacctttcttggttaatattaaaaataaattacatatacataaaaattaattaattaatgattaagatacaaaggattataaaaaataaaaaaataaaactattttgaatttagtatttttacaaaatttattaattgaattatctgttttgttaaataacaaattggatcttgtattttataaaattgtacaaaatagtaccttgaaatgatttcttatcaaaataaaaaacaacaataacttaatttagaattgttatcataaaacttgatacattttttgtatctgtcagagtactattttgtactattttaaaaaatataaagtcaaatttattattttacaaaacaacaagttgaattgaaacttttacaaataaaaaatctaaaataatattaatcctacaaaataaataagtgatttatagaccttacgattttcatgtcatatacaaatatatattgggtggtggtcaggtttcatcacatgcatttagttcagttctgagcataagcagactagacatgtacctagagctcaactaacttattagttcaaaaaaaattccttataaaaatacatatttttttgactaatttttaaaattactatattttttaaaaataaaagtctaaaaataatattcttcttataattcactaaatttgagagcaaacgttacatgcatctttcaaacataaaaacatgataaaaaaaaaaaacacataataattttgattaggtgggagaattttagtgttatattggaatttataaatatcatatcatatataaatagttaagtacaggagtcataattaattttttttcccaaaaattattattactaatattgtcatttttcatcataaaaaataaaaataattaaataagaaaaagatggattttcaatcattgaaggagaaaccagctatgaatatgaaacataattaagagggtgtttaagaaatggacattttagggtagatgtatagaaagtgacaaaattaaaaagctatatattattattattattagaagtagctttgaaattgaatcaataataattaaaataattaaatgaatagatagctaatctagctttggattctttaaagggtggctggttttgaaggtgtgaagaagtgaggaccaaaaatttgccaggatggatatataaatatattttgaaatgattatttatttatttatttgaaaaagatttgaaatgattatttatgatatatcaaatatatatctcatgtgatgtatgtgtgtataaaataaatatatcttttttaagatttataatttgttgctcaacctataatacatgtccttttatagcctaacaaaattcactttaaatgttattaataaataattaatatcaaaagttaactaaaggaattgggaattgggacaaaatcaaagtttgagctttaaatctcttggtataatgaaattattcttaattaatctcaattaagtaccaagtgtgttaaagattaaaaataaccacttggtgtttaagaatggataattataaattttagtattaatattttagatgactgtgtgttagtttgatatgtcaatgtctaaaattaatttaactgatttttttagaggataataaaaagtattaaaattcaatttttttttttattttacctcacttttaatataaaaaaattatttttaattacaacaaaatttatgactggaagtgaaaattttataactaattataaattatcatttctatgttgtgactaatagacccgtaattaaaggtgttagtcataaaaatcacaatttgttgtgactaaaattaaattagtgacaacttgtatctaaatattatagtttagtcacaagtaactttttgttatgactaaaagtcacatttagttacaaaaaatttatgctgtgactaaaaaattaagaggcccaccctaaagaagaccctactgaactaaaaaatttcgaataatttattgtgtcgaaaatacgtttgaagttttttgaacacacacggtaaagtagaatatcaggaacaatattatgatattataaattatttaaaaaaattcaaaaaattatagagataatattttaactataacgaataatattataaaaaaaattataaaatataattttgagcatgaaaattaactaaaaaaattataataaaagattataatcaacagttatacttatttagagtcattccaatgagacttcaaatttgaggttatagtagaaatatcactctaaggtagtacaatttcatcattatatatgagatttagctacagtacactgcatatatatatatatatatatttttttttgaaaataagtgtattcacagtacactgcatatatacagtaatattgtagcaactacatttttttcttattaatattttatagttgatttgtgtatatatatattatttaatgttaaagtatattttttagtgtaaattttagtgttgtagtttgagccaaaagagtttttgacatcaaatttagtgataatatgacactaaatttattgtataggttagaaatgttgtgatacatggataaagagtagataacataatagtgtgtgaaaatgatcaaatataggtaggtaggtagctaggtgagtgaaagttgtgtcagaaaatccaagtgttgtacttgttttacatgtttctctatctgtttaggttctgaaatagtgtaaagaggaatgctaattacaaactcgtattttaaatttttttgaataatttacagtactgaaaacagagttcctgatatttcagtttaccacgcgcgttcaaaaaacttcaaaacgtatttttgacactgtaagctatttgaaaattttcaaaattttacaaggatgatgttgtaagcataacgaacacccccgtgaaaaaaaaaaaatattctgacatatatttttgagcgtgaagattgattaa

SEQ ID NO: 383661 - DNA, 2952 bp, Cannabis indica
tgtttattcatttagagcattcccaacattcacttttcagtgttcacattaaaatcataaatcatgctcaaggtgatcaagctcaaacatgtattaaccacaaaagatgaataagccccataaacaagaaagaagaaagaacaataaactaatattaactcatgaaataatcacagacaatagccattaaatttctaaattgggagtttagctcatagtcaaatctataatcaaactagacatagataacaacataaaatcaagagaagataaagaaactagatggaggattgtcatgaatcgcccatgttcacttcaagattctttttcttttatgtttaggtttccattctatatattcttttaaacttcatgatccccttttattaaaatagagttttttagcctaaaattgagaaaagacgaagttgtccatgtcctgtacggaggcggtgccatggcggcaaagtgcctcatcgcgatgacagtagaaagataaaaaaattaggtttctgtagtctatcaccgcgaccaccattagcctcgccacgatgagaagatatttttctactttgaatctcgctcaataaaatgtgcataattttcatatacaaattccaaatgagctgattcaggatgcgttataaagctaaaaaagaaatcttaacttctatgctttgactttttcttaaatatgattagaacatagtcaaatttaagcataagttttcagctttattttcttgcacaattttctctattttatagatcaccgtattttcaaaatttgagcaatttatacattccaagtgtgaaatttgaaacaaaaaaaaaaacaaaagtaattctattttaaaaaatgacaataaataaaaaattaactttaaaaatgactcgaacaattgactaaaaatagcctaacagtatattaatagaatatgattatcacctcacactagaaatttgataaggttagttgagattgcaagtacgaatacccatatactataagaaatgtcacttttgttagtacatttttgtgttggcaaacgtttagtattacgctaataaaatagaatttacttctgatgtgttggcaaaaggagttggcaaatcaactttgctattagaaattttgccagcacaaaatgaaaagtgctgactttccccagcgtgtaaatgtactgtgtgcgccggtaaaactttgacctttttatcaacgcaatttgcgaaatatactggtaaaaaatgacatttcttgtatatatatagttttgctagctttttagttcaaataatatgtatagtatatacgtaccattccaaatccaaattgagatatatgttattaatttggacaatcaaataacccactatatatataaggtgtttaacaaccatagaagaagatccacaactcgatgctattagatacgcactcatatgctcataaacatatttaattttacgtgctttaatttgccacaatatatatttatatcatttgctttcactttgtaattgaggagttgaaatatcatcaattaagtaatattgaaaaaaaaaatataagtaatgaatcagtactaaaaaatattaggtactatattataatgtcagtgcccaccacaatataatgttttctttttctttcattatttatttagtgagaaaatttatcacataaaaatcttcgtacttagcaacaatcatgcaaaattaaactatactatatttatattaataatgttctcatcagaatcttataaagtgatcaatcggtcaattatacttatttcaagcttttcatcagttcagaatgtccaaagtagaacttgttaaaaattaaaaagcaaataatgtcaagtaccaagtaccaactagagtataattaaaacaaattaatatatagtttagggatcgatatcaaaataaaaaattagaaccataagccgtacacaacgcatgcttcaagttgcaatttttataattgaacccacgataggctttgtgttgtagtaattaattaattgaaatacaaaaattaacaaacatttcaggaaacctatcaaagtagcttttcaagtggaccaaactctcatgaatatctttgtcgttaatattataattaactaagttaatttcttttttcttaatttagtgtcctaatggaagcatatgatcactagctctcatcattgggtcaaacttattattttttgctgatcttttatactttaatctaataaataaattatgaagaacattagttattacctgcaatcagctgagaaattaacaatatgaataaatgcacgtgcatggggccaaccggcaattacttaaaaaaaaaacagtgaaaaattactttgtgaatacttgccaattatagcaaataccaacccccttaatctctcttcttctctcaatttctcctccttattttgattggattgatggtagcgtaggggttttcctgcaaaaaataaaaactcttcgatgcttaaggacgagctagtttgacataattgtgttgtgaagaaaaacaaatatagttgtgctatgaaacaatgtagcagaactgtaaaaaaaaataagcttagtgtatagtaatttataaattttaaagtgttgtgagttgtcaaaattatattattataataatgataatgatgtaatctaattcattttaattacaagtatatataaaaaattatgttatataaaattttaattttttttatttatttttaattatttttcccaatagtagaaatttatattcatttgacaaaaataatttataatatttttaaattatatttatatctatgtaaaagaaaattgtagtttataagaaactctaggatgtgatttgcagggtcgtattaaatattttagaggtcctgttctaattttaaaaattggactcctacaaaaaaagtacaattt

SEQ ID NO: 383662 - DNA, 1220 bp, Cannabis indica
aaaaaaaaaaaaaaaaactcatataaatagaagtggagcacatatattcaagaaaactcttgattatttataccctagcagaccactagtactaaaagtaatattaaataataaatacatacatatttatttgcttcaacgacatatataaatgttcctttgagaaaatgaacaaaatttataagagaagaaaaaaatcacgtacgataaggtaaaaaatatatatataaataatagcccacgtgaactgaacaatatatatttttgcatatccttgaagcaaaagccaataatttaatttagtagtcatggaaaggaaaacgtacgacaaaaacggcaccgtttagaataaagttgaaatgtcaaaatgagaaaagtcaaggtcaaagctttattggtcaacaaagaagaaaaatgagatggatagaattggatgatatataatatattgattttgaggttcgtaactttatatggatgcatgattggtcaacaaagaagaaaaatgtttaggctttcattgaatttgtaagctctcgcgtcacatttcttaaattccatgtaataaattagctagtcaacttctttggacctcattttcatccacaagtctcttcaaaggaaatctttgatgataaaagttacagaaatcttttattttagtgaatgataaaataaattctatattttttaaaatggtaaaaattgaattttaaactcaattttgataattattatatttttttatataactaatttcaaaacaatttttaatacgaacagatataaaaaaaaaatataatcagttttattataacatatttagatcacattattaagtttttattttgaataaaaaaaaaaatcaattcagaattctatttataccatttttaaaaataaaaaatctattttatcatttaacaaaatagggtctagaatattatttatcctttaattaaaaatattattattaagttattgagaaaaaaaaatgaaaattgttaaactattaaaactgttttctattttttaaagctgaaaacatttttaaaaactaatagaaattgtttggcaaatttttttaaaaacagttttttaaaatttgtgttttaaaaaactagaaaacagaaaacatcaaaattttatttttatttttcaaaaataattttttttgtctaacatattatattttacatttttactcacatactcgaatc

SEQ ID NO: 383663 - DNA, 1199 bp, Cannabis indica
aaattatccccttttaaaaatacgcattatttttttattaattttaaaaaataacatatatttttttttaaataagagtcgaaaaatatatttttattacctgtagttcactaaattttaggatcaattctgaaaagtgttaaataaatactaataatattttctctaattatatatataatcttgaatgaattagaaataactttgacacattataaattttagtacatgcatgtcaccacacccacataatgagcattgattaaaatagaaattaacaaaaagtataatcaaaaaattgagcactaaaagtctaaaatacagtatgcaaacatgcatgagacgacatacgttaaaaataaactcaataatttaataataataaatatttaatattgtcaaatcatataaatttaaaataattataaagctcaaatataaaataaaaaatgtgagtattttaattagtagatatttaaattgatttattacgctccttgattgtaagaaaatattaaaaagtgaaacataaatatttcaaattagtatttaaaaaacaagttgatttatttaagaaaaataaatcaacacaaacatattgagcatatggtgttggcctattttatataattattggtacgatattgttaacgtagattttcgttaaccaaatatgaacttaagagtgataatttcacacagaaaaataaaaacagtataggaaaaggtttgaacacaaagagtttttaatgtggttttgcagttaaaattctgcatagtccacgagtaaatcttattagatttttgatagtttttcagggccttttctcttataattttttcgtcccttttttgatctaacttgcttttatttataatcacatagtaggcagttaattacagagttgactgtaatctttacaacgtttatcccctgaaattgtggagttggattacatatcacatagtataaatgatcgtgttatttaaacacgttttgaatcataatcgttctgggtatgtctcgacatgaactcaataccaatgaccttgatagcgagctagagcttttcccctatgtttctgaggttacgatatatgcctcgttgcttatttgtttgaaggcttagcgctttattttgacaatcgcagttctagtaatagagaatacttcagcagtcatttgaatgtcagctttt

SEQ ID NO: 383664 - DNA, 1319 bp, Cannabis indica
tatctaccatttgcttttaacaggttgatgataaatggtaaatttatgtacaaaagaaaatcgtaaacttatttttataaatatgataaaaaaaatccaccaaaatattttttttgtaataaatgtgtaggtaccaatatagaattagttactactatgaattttttattctattagtgatacgatggtaaccagttattctaaaaaaaatagtaaaaaaaaaaaaaaaaaaaaagtaggaaaatatgagtttctgattaaaagtgtcagtagtttcttggcatccaaacagtccttcccctcaaaattgttaagccattttgaagacgaagagtgtgttctaactcaaagccttgatcagattttttggagatggcagataaagaatgaagcaaactgttctttccacactcctttcgaaattccaatttcaaagagcataacttttgagtctccaatattgactcaggagcactctgatatgatcacacattatatatttaatataattaaccattaatggtaattaattatatttgataaagattataatgatattattaattatgactgtgttaaatacctgaaggatccagttgatatacttgacatggttcacatgttgattaacatccaaatcagtccacttaggctgcaaaaatgaattactgtatttatatatattactgttaattaattaattaataaatttaattaaccaaattatatatgattcataccgataaatctttaataacataatgagcagtgtcaaaatccaagtcccttaactttgtggcatcgttgattattggatcacagtagtccataaataaaggcttggtttcttgtctagtttcctcaatgaacttggataatttccttgtcttcttattcatcatcacatacacacttgttttccattccccaattatacaacaacaaaactatcaatttattttaccataaaaactcaactcatcatcaaaccaataaatattcaatacttcacaattattatttattaagttgtctcccttatagtatatagcctattaataatactcctcgaaaagtataacttttacaataatatcctatatattttcatcatattttatttaattttatcgtgaaatgagtgactcacatagcaaccaatagattaacctatattgcagggccggccctgggcataggcgggctaggcctgtgcctagggcccacctagtccaggggcccaaaaaaatttttttacccttttaaaattacacaattttttgctgattttgaaaataccattttttttctaaataagg

SEQ ID NO: 383665 - DNA, 2342 bp, Cannabis indica
aaaaaaagaaaaggaaaaagaaagttagatgaagatgattttgttgcgcccttacctaaatagaggaaggcttctggtaataagaaatttaaaagcgtttaatttctgatggtaaaaaggagaaaaaacaagctgctcatttgattgaagtttgtttcaagtgttttttttttagtttctattctaattttgtctctatcacttttggatggtgttaatgtattttgatacacgttgtttcttagtctcttttaggtttgatttgttatttcgatcgtttcaggttcatttgtattgctcattagttggttttaggatttcttttggtttctcaacttcggaatcaattttcgcttgttaaccttttctgggtgttgctgttatttgtgattttatgttttaaaataagtttttgcatattttattttctttataagctgggttttgtgtatatatgtatataaaggtataactaccatatgatttagtatttcatatgtaaatttttaatggttatgttaatttatcgttgtttattagttattttgtagttttttattatatctttaatgttgtattttagttgtttataaattttacttgtctgactattttaggtccgagtgttattctacttgcacttatagtgttattgaaaatattatgaaaagtaatggggatgtgatcaaaatattttgtgccactcaattcggtccttttttgaatatttaagtgtacaaattctatcctcaagttgttcatatccttttgttgaataaagcaggacaatcccaaagaagtgattgttgcagttattgttcagcttttgtcatgattttttagttgttatgaaccaagatgttaaaacttgtgttaaatttatagttttattactttttcttgtttaagaacatattgtcaaaaaaaaaatagtgtaacaacaaactatttgaaactttacattaacatgtcaaataaggtgttttaataatacgttatgattttgtttatatttatcatatgtgatacaactttaaatcatctgttgtgcaaccattgaaaaagaaaagaagacaatgtaatataactatttagaactttgcattaacatgtcacatatgatgtctcatatgcattactagtagaggtaaagttttgtctattgcttggttatagtatgtcttccgggtgtgacctttttggccacatttattgcatctattcatgcctttaatcaaagcaagagcatgagcacatgtcattctctctttttaatttatgttgcaattacatgttttatctttcaagttcgtaacacttcaaacaattttttatttataagcttaccaatgtgtttgactataataattaaatattaaatgtaaataaaatcaaaacaacgataacaaacttgtataacaactaaaatgataataagacagaaatttacaatcatattctcgctctctctctctatttcgtcgtcgtttgtgtatatggagccatggctgcctgcggcttcgtcaagctcaacgcctcatctttcaactggatcgatcaacagtcatctgcaccgagttaccatcccgatccgcgccggggcttacactgatgaactcgttaaaatcgctgtgagtttctttgattaattagaaatcattacacctgtcgatatataaatttttattaatttttcgtttgatttgatttcgtggctaatcaaaagctttcttagatcttgatcaattttttcttttatttcgttccgattgtaacaagagataatctttgaatttaatttaatagactggataggaggaggtatgtacccaatccatagtttcgattgtaattttttgaaatctatgcttttcttctatgacttatatacttactgtaatttatttatatgatctctgatcagccagtcagtgttaaagcaattaaattaaattaatctcagtagcactattatcatagttcattcggttctccatgttttttaaagcaacaagcagtcctcctcttggctctccactttagatttgtattctcaatatttagattagattttggaggtatataataaattatttttggtaagggatgatagatacagagattttattttatcattttcaaaactttgtcttgtttcttggcaccatatatttaatttttttttatgttatgactaatcaaagatgtttgtaaagtcttttgcttttcccatcggttaagactttgtagtttgtactaataaaaattatgagaattggtaaccttcctattttttcatcgttgttcgtgatcgcatccccaatacttgtttctccatcgtt

SEQ ID NO: 383666 - DNA, 1738 bp, Cannabis indica
atactctcttcttcagttgaataaagtgaactttctttgcattctctttctctcttttctttcctgctttcactctctacatgaatgtaatgataggacatttttcgtttactttaatattatatatgttcaacattttctgtgttatagtaaaaatgcaatggaaacatctacttaatctgagattctttgtcctagtagttgttgatttcattgtcttcaatttagatctattatataaattaaaaagtctaacttttaatgttttgacttgttaaattgttgaaataattttccttttattaaattgatcatacttcatattaaattataagacaacattaatacattataattaaagagtattatagtattggtagtataattaattaaatatttaatgtcacatattttatttaaataattattaaaaaaaattgcattattattaggtacaagtaatgactagcatcttctaaacgtgtcaccctgtaattggctaacaatactccttacaaattatacttaattcaacctaatttaataacaatgctaaaaaacaaaatttagagaaaaggccattgaatgtgaccaccacagtttcctatcatttactcatcttcttacattaattagcctcattaatacacaccacttccaacacaataaacaaaacataacacaacgtgcatcaaccctaaaacccagcactacttacgttctacatattctactcttccatattattattattcttatttaatataactaaagtttagtcttctttttctgtttttggagctattaactgaaacctctgttttctgatatggagaacaacaacaacacaatgtcggtgctagccaagactgactcggaagtgagcagcctaactcagtcatcaccctcccgatcacccagtcgaggtagcagaccagtctactacgttcaaagcccatctcgtgactcttcccacgatggtgaaaagaccacaaactcgtttaactcgagcccagtactgagtccaggtggatcgcctcctcactctcactccaactcctcactcggtccacactccagggagtcatcttccactcgcttctctggctcaagaaaacaaagcggtggcggcggcggctcgaaccggaaagggtcgagctggaagccgtggaaggaccagtttgattcgatcgaagaagaagggcttcttgatgatgatgctaactctcgtggtctctctcgtcgttcttacttcatggctttcactgttgggtttttagtactcttctctgttttttccttgattctttggggtgctagtcggcctcagagacctaccattattatgaaggtaatatatatacacaacattttatttgaagaaatttttctaagattacttatttatctaaatcttaactaacatttgattctaagaaagtgtaacattcaattgcattgtgtctcattagttaatttatacactaattttacataacttgttcaatttctcaatggtaacctgattttgtgatgtaactcattattcttatcttttttgggttaaagtgagattagctagtgcatctgagatctatgcaagagagttcaattggagtgaattttaaaggaccaatacgaaataagacatttttataataattatatacaaaatggtatttttataaatttttttgattttgattgaggaggcgccatttggagtagaaattaatga

SEQ ID NO: 383667 - DNA, 1240 bp, Cannabis indica
tattgtaaagagataaaagatctcagcctatgaaaatagaacctactactttaagagttataatggtctgttgaggcttgtaaaaggtcttattttatttttccttgtaacttctttatgagacagatagtatgggaatttatccaacagatagttaaatggaccatgtatttgcataaaaattgaagcataatagtactcccatggaaatttgatcacatggtgatcacaagatgtaatttatcgactccttgaattttatggataatctttacgaattattagtttggtcaagtgagagttaattctcatttcttggaataattattggaaacttatttctatttatgtggaacgtgtgtttttaggaaagaatgaggttaattaattgaagaaacaataatgtgtttgccttttagcacaacccttttatgtgaatgtgtgttttcttgtaattatcaaaattttccagtgtttttttttatcaatcatcaaaactttagaaaatgttttactttcaattacataactttattattattatggtttttaatatattttacaaacataatagtaattttaattttaaaattaatatttaattttctatcttatcactctacattaaacatcattttacatttatttttaacttatacataacatctaaaaatctaaaataaaactaaacttacttgccatgcacgtaacaataatctagctttgtaggggttatttcaaatcaaaccttcctattctcacgaaaatgttttagtctattaatcgaaataaaattgacggattctaaaaatgagattctcacaataacgatttggtatttgtaggggttattgcgaataaatctcatttgaaaactcttatagcttttctttcaacaattgtgagcatggcaaattctgtaaatgtgattgataatcccccagttttttcacttcttcacctttcttattttgttttaatatattctcaatcactataatgataatttggagccttcgcaatggttttgttattgcaccaataatgggtaagttgttgtttgtattattatcactattgttattgttgttgttaattggcttcctgcttgtggatttatttttattatccgtttgtatttcattttctaaatagactcctctctatttatatttatacatgaaatgttagagattttattacaatgaaagaaaatcaagatattacaactctattgtaa

SEQ ID NO: 383668 - DNA, 2203 bp, Cannabis indica
cagcctttgacaataggctgtctagaacaccatgatcacattcattcgtttttctgtatctccttggattgagtgctgccttgacctctgtcatggtcaaggtctctttgccatagaggatagtgtccacaaagtgttcatatataggatttaggtagtgagatgagcaacaagataccttgatcctcatcttctattttcacacctatgttgctgagatccaagatgattcggttgaactcatcaagattctttctgagttctcttgaattccatcttgagagagtatagtttcttctgcaaatagagtttgttagcaagggatgtcttcaagtaaatcgaggcaagtttctcccataatcccgaagctatttcctcatttgacacttctctcaacacttcatctcccaagctcagcaggatggcactatgtgcatttgttttgatttctttaatcttcttcttgtcatctcccaactccttcaatttcttccttgtcaatggcttgtatacaccctgaggaaccagaaatgctttcatcttaatcctccacagtccaaagtcattggctccattgaacttgtctacttcaaagcgtgtgcaagccatggatcactttcttgattctgttcttgcttcaagaaacaagagctctgatgccaattgttgtgaaagaacacctcggcaagaacacattaaacagaacaatgatcaatgaaaccaattcaagacaatgcactaatgtgataacaaatataaactagtaacaagaacattaaacaaacacaaaaacacaagaacttaacgaggttcgaacaaagtaatggtgaatcaccttgcctacatccccaatcagaaaacagccacaataagggccttttagagtctttattagctgatctctaatgagaagttacagcagtttcaattacacaacttgagaagctttgcttctgcaatgaaacacacttctggtgatgatgacaaacagtgtatcacaccaattacaatcactcaaggacactcctctctaactctccaaaacagctcacaattgactctctctcaatctgttttcccttgaaaaattcagccatgcacctttgattgaaacaatcgagccttaaatagcaatgctggtgctggtgtgtatgggactcgatctcggttatgttaggtactttggaaggtagtttagggattttgatttggccaacacacaacaaatgagtaccatgataaacaattgatgtaactaatgagtcttttcgtaatacatctgttgaattatcctgtgtaagagggtatggacttgcttacaaaaacctcaacagaaattccaaaaggaattcaaactcttacaaagtgaaagtcaaaatgtctcatttatgtaaaggatgtttatttaccaatgcttcctgctatgaattataatgagctgagaatgaatttgtattccatgatgtttcaatttaagggaattcagggcaattttatgcttgaattctagcaataggatctaatagtgtagtgtctaataatgtagcaattaataggacaagtttgaatttttctctttattttttaacaaaactaaagaaacccatgtcataaaacatcatgatgagatctaatagaattcatttgtttttcaaggattgattaaattttcatggattccaaagacatgaaattgacagtaacacgggacataaatctgtaagtttggtaagcaagttgaagaagctttgtaatgataaaactagctattatatgtgaatttgatttgatttgtttgtttgttgataaaactgtggtggtggctgttttctcaatgttgaaaataaattttaaacgaccaaaaaagttcagagcgcatgatttgatacatgtcaaagttcgggagaaaaaaaatcctaattaacctttcatttttgtttcaattttttttgcaaggccaccaattcatagaggtaaattttaaattatcaacttcaacctttgttaagtaataattttaagagtattataatggagagtaatttctcactgtaatatttgaattttattaaaaatttactccaacgtagatgatttatggatttctggttatatgtaacaatagataagaaggccataactgttgataagtgaaattccgtattttaatattaccagtttgattatttaattaaatgattaa

SEQ ID NO: 383669 - DNA, 1149 bp, Cannabis indica
gagcgagtggatgttgaatctccacgagaagtataaaattcatctaaagtggagatcaattagtacactacaaattcaaaaattatgatgctctctggcaatacgaaacaaaatgtgtccttcaaaatgttccaggtctcttctgcaacaagctctccgtccttagggagtctccctgtaagtgcatagatagttttggcgtctggtgctgggcccatacaaagatgggagcacatcttccacccagggcctattctgcatgttttcgtgcggaagtaggtgttgctcctttccaatttattccccaagtttgtaagctacttgcagaatggttcgtgctttgtagagtaaagaagatggatgtcttgactctggaggaaattctctatttctactaagttaaatccaaccccattgggaagaaaaaaaagcaagattggcttctaccaactcgagaagcagtatagaacattgatctatcccactagcaccatgaagtacacacatgacttctgggattactagttttttaccacgactttcccgttgaagagggttctaactttctctttagatttcagtgttgcaagtaagtaaggctatccttttttattggaatttcagtccatccttcattttactttttgattaggattctcttgtttctttatctttagatgaaattgcacgtctgacagctacttctttcttcctcgctagggaggccttatacaaaggatttcctcctaaggacttgaaagtggagaatttcatcacctcgaccaacctaaggcaagttggtctaattgctcctcaccagagcatagatgcctatcattttaaagatggtcatagtggcaattctccagatcttaaagaaatcattgcagagatagtttctaataaaatgaagagggccatcaagagagatcaaagtgttgggttttgtgccctaaataaaatccatttcaatataatctgatttactaattaataaagatcagaaatccttttatgttgcatggttcacatgatttatttcatgattatgtttaatggataaattctattaagtccagaaaatatataaatatgtatatatttggtcatgattatagtgtcgtcagcacagtggaatataatcatgat

SEQ ID NO: 383670 - DNA, 3395 bp, Cannabis indica
cacctaaatattccaagggtcattgtcccacttcacaaccaataacttaagccatagaatcgacggtctccccatccatgttcaaaccaagcaactgactttgtgcatgttacttttcatccaagacatagcacaaaaaacctttaaaatatctagcagcttatgattgaatcatcatctttcatgaaaaagaccaatcaacaaattgtgagtgactcagtgaaaccttctctttgccaatgaggaaaccatatagaagagaagactcaatggccctatctaccaatctttctaaagcatccacaacaagtgtacacggaaggggataaaggatcaccctgccttagaccctggtaccacaaaacttccctctctgtctctcattaatataaatagaataggacacaaaagataaacaacctctccttcaatccctccactgttgtctgaagttgttccttggtagaaccaaccctagaaagtcccacttgacataatcacatgctttctcaaaatctattttgaagactaatccactccttcccttgcttctttattcctccacagcctcgttagccaccaagacaagagtctaaaatctgtccttccacaaaggcggcttgggtttcagaaatagtattagcaagaacccccgaagttttagaggtaataccttagaaataatcttgtacgaacttataattaaattaatggcttgtaatccttcaccttgcagccatttgacttttttgggtatgagacaattatatgtctcattcatgcttccttgaacgattccatcttctgaaattttttttaacaccctcatcaaatcttccttcaatattttccaattggcttgataaactcccaatgagaaaccgtgcatgtttaatttccttctcttcaaaaggcctctcaaggtgtgttactaggtaatctgggatattcttccattaaataccctcaatatcaaccacttctcttttagtggcctataaagttattgttcagttcatcatgtttatctgtttatcataagcattataatttttttcatgtgtcttaagaggaaacagaacaaccaaaacctttttctacaacatttgcaaacccgaggcacaataaattgctgaccataaaacaccaaagcatatttttcatgctaggctgcattaaaagcactttactattgtattgcaagtattacaccaaattaaataccttaccagtcatttttaatatacatatatataggtatgtatgtatatgaaactctccatgttaggattgactggaacatgtaacatctactaaaggaggtagttattgtatatgtatgcatatgaagaagatcatggctattgtattttataaaactttattgtacttttattttttttcttgacatatcatattactatctagatttgtatacacaactgcacttcatgttcttggaaaggcaaggagacctgtggaggcgctcaatgtgtttaacgcaatgcaggtaatatgttcattgctggctcttggcactaggaatatagaagaaaaagcttgacagaactctaatactctttttcttctttgttttcttacaacagcaacaaatatcctcatatcctgatttagttgcttatcattctattgctgttactcttggacaagcgggacatatgaaagaactttttgatgtcattgataccatgcgttctcctcccagaagaagttcaaaacaggggctcttggtgagtgggatccacgggtggaaccagatattgttgtctacaatgcggtgtgtagaatttagtgttaattcttctaagactcagtacatatcttatattcatttttaatctatttgccttaaagaagtatctaaattagtttagaaaataatcaaaatgtctcctgtttggataatgttagagcctcatgaactattatggaatatataattgaaaatttctaataattcgtatgcagtgtgtttgcagactatatgttaacatgctatttttctaagagcagtttgtctttaagtttcttctctctatttacatctattgatacaatgatttatttttatgaatttcgacatgtacatgaattatgaaccattatccatctagaataaaaaatcatatattttgataaaatgtttaaactctccatttgcttaattaattacataattttacatcttcaccggatttgagtattggtgtgccaaaatataaaagcaacacattatactgatgattcatgtttcttttgatgttcctagagtaatatgttgattgatctagattctctctgtaagagtgaagctttgtcaatttttgacccgtatatatgtttatattcacacgcacctcgtacaacctcacatatacataaataaatatatatttatatataataaattaatatacatgaataaaaaaatatattgccttttcaggttttaaatgcttgtgttaagaggacacaatgggagggagcattttgggttttgcagcaattaaaggaaaaaagtgtacaacctaccgctacaacttatggactcgtaatggaggttatagttacctcgagtttcttctttctgtcttgtctgtttttttttttagttcataaccagttccaataattagtagtaggttccttaagtaacttatatgaacacaatttttattcggtacatggtgcttttgtctactttgttggtgcttatcatacaagtttctgtcttggtttcatcaacatgataagcgtataaccaagctttcattcttttttttcgctgttaactctgacattcattcataatctggtgtaatttccattgaaagggaaaggtttatcttttgaacttcttgatgaatgtaatgaaatatttccttaattagtattgtcgaaagcaaagaaagtagctattatctgtggagagaagtagagctgtagaagtccaaggctgtatgggttctaaataaagtactattgaaaattacgtacatacaaatattatatttatgtatcgataattggcggtggaaaggccttaacttaaactgtggttttgctgcattatgcattgcttttatactaccatgttggtaagctgctgtaggtgttgttatttatctattttcaaattaaactaacatatatgtattatcaagaataaggaaatcaaagagttttttttttctatatgccttcgtgtggctggctgctgtggctgtaatagtaatttgttttctgatgtatatgacagtattgcattatatggttttctactttgctgtaattaatgcctggcattttataatgtaatctagatgatttcctaccatctttaatcaatacatcctagtttcttataaaaaaaa

SEQ ID NO: 383671 - DNA, 3682 bp, Cannabis indica
ttctgtttggttcgccagaaaataatgcgcaacgattcaactgcatttttgaaacatagacacttctgagattgtttgtttggaaatcaatataggatgctgtcggaatcgtggctaagctatctgaatgcatcgcttccagaggtggaaacatacttggagccgatgtttttgtacctgaaaagaagcatgtcttctattctagaaggtatattttgagcttgccacgtttgaacttctacttattgaaattactttatatgtattttgatttttattcggagtggtcatttattgatgacagaaagcttaagagacaaataaataattacagtcctttacatatatagcatattgaattgcagtttgttttgctcagtgtacttagccaactgaaataggacttaatcttttggagtcaggaagttgttatattagctagttcccacttcataggaattgaattgaaccccagataaaggcagaccccaagagcttcttggccactggtctaaccctcctgcccttggtaatagactagttggtgttatttaatgactccatgtatgtactatactatgtatgtcaaaatatggttagttctaaagattgttgatcccaaaaatagtcaagagtaagaaatatgtgaaccccttttactttctttttttgacattatttgggggtggggattcgaacttcagacttactctgtctgtaactaggctatgtctatgactacaaaccccttttccgtagaaaatagatttgtagggtttgggtgagcctattattactttattagaggagatgcgcaacataagggaggcctaactattgtttattgttgacaattttttcggcatcaatattctaactctcaggagccaactagctggaatgacactcatgctgttcttcaaattgatgttgttcatttataaaatatttgtttggcagtgttacttgaatattatagattgccaatttaatgtgaaaccatgccttagttaaaaaatgaaaataagaatgagccttcacttttatttttttggacatatatttgaaaacaaaactaattgaatccctttggctttactgatccaagaatacattaattggagaactaaactggacacacaatcataatatgtgctggcagtgaatttatttttgatcctgctaaatggtcaagattgcaaatggaagaagactttcttaaactgtcaacaacattcaatgctatgaaatctgttgttcgggttcccgatcaggaccctaaatataagattgctgttttggtttcaaagcaggtatagaattttgcttttcttgtatgcatttgcacacatgtacgtatacatttaatatgcattatgccaattgccaaagatttctgtacattcttgaaggaacattgccttgtcgacttgttacatcaatggcaagatggaagacttccagtagatataacctccgtgataaggtaaggtttcaagagtatcagcctctaaacagatttttattatcttcttcttcttatttttaattgttgttcttgatgggttgttttcctctgtaaatcagtaatcacgatagagctccaaacacccatgttttccgctttcttcaaaggcatggtattccttatcactatgtaagttcagatggtgattataaaagtgaagtagagatgttgaacctggttcagggtactgattttttagtacttgccaggtacatgcaggtaataagattattaaactgtaccttctggaatatctctttctaaaccaaatcttcctgttaatatagctttactattgacattcagcgaggtagattaagagaaactgctttttcctactctgtttgcattgcagtgtgaaaaataaaatgaagttgattatctatgtacctgaattacccaggaaagtaattcagaacatcattgtccatctacttttgcaggtattatctggtgattttctgaagaaatatggaaaggatataatcaatatacaccatggccttttgccatcatttaagggtggtagtccatctcgacaggtttgagcttctatctatgagttacaaacgtgtactcgcctttcgaaattaatccattctttcatcctaactgtctatgcatggttaatatgctagattatgttggcaggcttttgatgcgggtgtgaaactaattggtgcaactagtcactttgtgactgaagaacttgatgctgggcctataatagaacagatggtgaatatgaactgattactcctgcttttaagtttatgtttatttctattttctgatgctttttgctctgattctgtcattaactcattatagtataattcttgactcctctatgctgctagttggttttcaatccacgagttctttcattctcatgtccattgaacaaggctctttttggttcaaaatgatcaaaaccctctcaggaaaacatggggttgccttgtccagcatgtatatatatatatttctcaattagaagctaactgctctagaattatcatgcttagaactgccctcaatgtattcattttttgtcgttgcttaaaggattaaatatgtatatacataagcatactatgccatacgagtttcaagcactatcacattttggattggcaacgtcagattccaatttgttagactgaacaaaatttctagctagcttcaaataggaaatccaaatagtggtccttggctatttattataataaaaactcccacttgagcaacgtgttctttgacaatatgcaggttgagagagtttcacacagagataacttgcagagctttgtgcagaaatcagagaacctcgagaaacaatgcctttcaaaggcgataaaatcgtactgtgagctgcgagtgttaccgtaccaggaaaacaaaaccgttgtgttttaaagcaatgaagaagttgataggtgtttagtatctacaaagtcttgtatctcttgccatattttttcctcaacggttcgatttatgtacttttttactcgattcaataatgccaatttctgatttgtttacatgaaatgaaagaaaaaaggagtcactctattttcatttgtttttctttttgtttcttttttgaatttgtaaatttttgatgtgaacgaagaaaatggttcttagcattctatcaactattgtatataacgaaaactaaaagttctgagaatgattttcccaaccatcttgataatatgcttcttggaaactggaagcgcactcattttggaaaattgttcaaaaaataataatttgctttcattgagagttgaactcaagacctcccgcttactaaacgggtgctctaaccaactgagctatgaaagctgttggatgtgtgtttaagttttatatatttatctcaataattaaatatttaggacacggttcttaaaagaaaattataaaataacaaaatttggacttaaaatgaagatgttattatctgtataataatatattaatgaattgatattttctataaattgttatttcctttagtaaattaatcaaatttcggatcattttaaaaagtgctttttatatatttagatgggtaaatattattttggaccctgtattttgcaaaagttatcgattggaccctgtattttattaaatgac

SEQ ID NO: 383672 - DNA, 1127 bp, Cannabis indica
atttgctgaggcaaggaaagacttcacagtactttcctcttctcctattctatccagtggaagttagtacaatcacaagtctcttggttacctataatatggatatggtgggttcattaggaaagctctatgaaagcttacaaaatctaagccacacttatttacaatccaatgttaacaaggattcccttctcaaatccaatgtatcatgttcttccacacttttcaacctaaaacaaactcacaatacttataaaaattgttattcggagagtagagaggtagcgtgtgtgtcacccgaatattatggaccacgttcaccatcatatgtatcatcatcatatggtcatgtggtggtcgtgagaaaaaaagtggaatagtgaaaggagttgttacttatatgataatggatgatcttgaagtgaagcccatgtctgctatctcaagcatatctatacttgatgagttcgttaatgttatgggagttggtgctcttcaggagaagactgtttctgttggtgtcaatgaggtgtgttatatattatatgagtataaatatatattagtcttataataataaagtgttattgttgttattaatgtaattgttttattattatgggcagggtctgagtttgctgaaggcttccatggaaaccaagaatgttcttactcgtgttttcttggggaaccactaaatttctccagctcatcttcaaatgctccacaaattactatcttttgagttttatagagagtgttttttttattggtttttatcattagagaatattttgtgagatatttatatatgttttggagctttagttctctctatcggttaaagtatattttattaattaagactcttgattagagttcttgaagaaataggatccaaattaattaaatttttgtcttttattattatatatccccttattatatataccaattagtgtttgatcagatgaggatattattaattgatagctcgatatggtaaaataagggaaatttacaaaaatactggaatttgagttaacttttacaaaaatactgtcacacggaaatcttttcaaaaatactgtgtttttaaaacagcagtaaaacacaaagcagaacaa

SEQ ID NO: 383673 - DNA, 2819 bp, Cannabis indica
tttttcttaattattattattttgtagtgcactgataaaaatttattattacatatactctttaagttaataaaagaggacttgtgttagaagggcaattatatataaatgtatacattatattaatttagtggaaataatcaacatcaaaaatatgaatatgagaatagacttttcagctttattcattaaataattggattttaggagaaggtggttgcttgtttatgtaatccaaatcacatcacacataatattatatattcaattccatccacatctcttttcttacatatatattgtgaacggttgggatggttgagggttaggatatacatatatatgtagttattatatatatatctttatatattaaaagtgcctatctaacggcaattcttggtttaacgattctttttgggttatctgtttattttaacagaatataccattctttaacagaatatccataattaattttttattccgttaaagttaactcacgttaatgtatagacaaaataacaaattgattctgttaaagttaactcacgttaatctatcaacaaaataaccaattaaataaaaatatttaataaaattaaaataaacgatgaccccttccttcaaaaaataaataaataaataaacgatgacccctaaaatctttcctaaaaaaactctaaccacaatccaccccaaactctctttatcgaaaccaactccaccaatattcatatattcaaattttattccgatgttttcaacatcttaactttattcttccaattttctttcttttgtatacgtttagggttttgaacactatatattttgacacgatcatagaaattcaggtttggattttctccggctaggcttgaagactctatcacaagaaaccgaaaaggttgaaccttgattttctttttcttttctccgatatcgattgaaaatttaggtttttctttttcggataagttttgggtattgatcaaaagtcttgccctagaaaaataaatatatgaatatatgaacatcggaaataggtaggcgaagaaaaagaagatgatttattcgggagaaagaagtggaagacaaaaaggattattaatataatagaagacttacgagtttaggtggagctaggttgagactgaaaaatgggaggagttgataaaatgtgtttctataggttatagcgtgggtgtggcctccatctgcactggatggtacaagagcagaggggttagtggactagcggtaggaagcctcgtaccagtaagtatttattgtttttgatattcttatacctttatttataaaaatatttttagtggacaatatttataatttttatgtaattttaattattaaaataagagctatttatacacatctactcatatataatctttaatacatataaagtagagagataaatacttaaaatatagaataaaatttgttgacggagaaaattatcacccatcacctatcaaattttttcctcataattatagttccaatctgtgaacatcatagttccttacaatttgggagatatgcctgtgcgagattgtgcgttatcgcaatagtgctatgctcaaggcttgttttttttttcaaatgataacagtcaattagatttattattttttaaaaactaatttatattcaaactgtttttttaagttgtttttgttaaaaaaataatttatttattaaataatttcgtatccgttatttaattaatttttcgtttgatatgcaaccatgccaactaaacaacatttttaattactttattgctatttggttatttttttttttttttttatgtaatggatttgtggtctgtattggggtgagctgggattatgtatataggatcggacacttgtttaaaaaaaaaataaccatttaaatagccaagtcgatggaagattggctttgtttaatttttcatacagtattctattttaagactttatttaataatttttttaccctattttaagatgccatttttttttaaaaaaaaaaaaaaaaatttgctacataatgtttcctttaaattttgcaaaacacatatattattcttttaaattataataaatattaaagtcatatattgttatgacttatcataaattatttttttcacattacagataattataatattattatttaaatattacgattaacgtacttttattattaataacaatttacatatcataaatttgcagaaacaactatattttactaatcaaatacactacacaaatttaacttttataaaaacaaatcattcctttaattacagaaatcaaaataaaataaaaaaaaccataaaaaccaacccttaaataaaactaacatttacgtgcctcggcacgtaacttctacctagtatatgtacatgtcttaatattaatttctatttatattatattaatttgtttctagttaattacaattacataattatttataatcatgatcaccaaatttacaactgcttttgtacgttcacttttgagtcacagctaataataacctcctaattaccaagtttctattattattttttccaaaccccctaagcagtttgcttgactttaattttctatgtttggtaacaaacatttagaaaaacacacacatatacacttttgaggatgtactgttacatttacaactttatattttttttttattagtcgtgtacgttataattaattaaaattttatacaaaattttgtataaattcgaaatagtttttaatatagaaagtagtgtttaaacaatc

SEQ ID NO: 383674 - DNA, 1131 bp, Cannabis indica
tttaatatgagagaaatcaataataaccttcattattaacaatcaataatttatgtcatcatgaaatggtgattgatgagattatatatgaaactcaacccttcgtcaaatcgagagttgtgtttgttgatgatgtggttaatttgaggtaaatgtttctggtaaataccatcatttggattcgttaaatcatatgtgggaaaaaggctactggatctgcaaagagttgattgtttagaaactctaaaatggtgttataatcatgccataagagttgattgtttggaaagccacggttaaatttaagagcattgctattagacattcgtggtacttaacactatgataaagtgtggttttataattagttagtgattttttataatatttattaaagttaaacaagcggaatctaaatattaagttgtaccaatagtgatattataccttgcaagggaagggtgttaggcaccgaaagtacctagcttttagcatttctctaaatttaatgtgatccaagcaatcaacaaatgaggaggctttaatggtgtaattgttagtgatatccaacactttctttcgttgtgttatgttgattcttgtcattttacctttcaggaaaaaggcctatacattagctcaattttgttttagagattactttgaaagtctccctgaggtggatattattggttgtggctcatccccgctcccagaagtcacttggtcttgagaagtctccctattggccctagtcttcgcttttcctttccctttgctctcctccgtttggaaaacaatcttaagttgagaattcatttgcactagggatgtacgtacataaatttttgtaaaccgtccaacttaaataatctgcccaaatcaaaccgagataacccgacgaaaaatacaaattgaaaaacctaacgaaaatataacccgcccaatttttatattggactggttaaaaataataccaactctctcaatcaactcgaactatcttgaacaacctgattaagaggatttatatatatgtatatatttatatgtctattatatatatttatatattgtataatttatattactatttaaaaaaatattatgttgaaactaatatgttttttt

SEQ ID NO: 383675 - DNA, 1588 bp, Cannabis indica
tctctctctctctctcttaaccacgtgcaaccaccgccactgccacctccttctctctccatactcgatctttctccaacctcgctctctctgttatggatctccattttttcctagatccgtcaaagaacggcaagacccgtcgtgggtctctcaatctctctctcggcatgcaacccacaaccactgtctccacaatcattcgttagtgagccacccacaaccaccgcctctataggtatatatatatatattaatttattaatttaaaatatttatttatttttattttttaaaatacatatttatttacatatttatatataaataaatatatttaagtatgtattatttttttaatgaaaatatgttatgtaattatttatttagtattgctttttttttttaaaaaaaataaataaattgaattggtattgtttagtttgataatagatatgttaggtatattgttgtgtgcatagctaaaatgtttgtgaaaaaatttcataaattgtctttagtatattttgaattagaaagatttataaattttttcatagcattttagttttaatgttaatgtttaatttgttattaagaaacatatgtggaatgtgtaactagtttagttaaagatttttttagtgaaagtttagtatactttaagtaatgtatatgtgatatgcatgtttaagttaattttaattttgatctaagttaattttaattgtgaaatgttaattgttaattttcttaagtttttatttttggtgataccgtttaaaacatttatggacgctatactagacttggtaatctactaaaattattttccttaatcttttacaaattttagaaacgtttgaagtgtttagctattgttaattttaattttgtttaagtattactttattagttgtgattttgttcgaggatgttgattaagaactttattggagatagtaagttactaaaattttgttcttaatattttataaatattagtagagtttgaatatcctagatattcatttgtagtaaagtaggttatgaaattaattgtattgcggtaggatgggtggaatatgcatgtaagataaatttgaatatcttaaatattcattcgtagtgaagtaagttatacgaatatatgtattgtgatcagatgagtggataatttttgtatttttaatgttattttgtttatgttgtattattttgtgtgctttgtttcttatttgatgcatgtttaaaattttcgggaacatctgattatagttgttatactttcaaaatttcgataaaattaggataaattttactaaaaatacataaatatattaaaaaaaaaaaggaattatattctagtaaaagttcatatatgtgtggtaattaatttaactaattaactactacacatattcaaaataaataattgaatatttttttaaagatttcagaatggatgaaacttggtttaaataattttaatgttactaattaataatttcattcttgttataaaataatataaaataatataaaataatataaagtagatgagaagaaagaagaagaagatgaagag

SEQ ID NO: 383676 - DNA, 881 bp, Cannabis indica
caagattaattacgatcgtgttgctctataggcgagaactttgttgataacccagatgaaaaagtagatggtatgataaacagcaatggtgataagcaatccaatccaagccttaagtgacttgtgatagatataatctacactatcaaatatatggttgggacacactaaggacatcccatcaaggaaagtgagagctgtaaacgttaaagtgacacaaatgaccatggtcaagagccacactccaatcctactcctaagagggagtcctcccactattaaaagcacaacactaagagaagcaagaaaagcaatgctgttgaataatatgaatctgagatagccctcttcccaaacataagccaacactcctgttcccgccatacatgtgtgtttgtcgcagttaaatggatcagtgtcgcctttattgtcttttttgtttgaagtttcttgccaaacaccgcccggtggattgattgcggaattgaatgttgtggatgctattacagtggcgaccaccatgattgaccctctcatttctttcagccaatctctttggtgattcgttaggcgctcaatgatgatcatccatgacttccaacatgatgattttggatggttgatacccaatagttgtttgattttgatggtgttgaagtctgttgggagatgatgatgatctaagagatctgtcggtttgtatcctttcgagtttaaggtgtcttctttcactcccggaatggaaaccaagtattctactgtctgaaatagaattcatagtaaattaaaacctttttatagtaatttcaatatagaacttattgaataacattgtcccacatagattaaatgtaaaaatattgagccatatataagaacat

SEQ ID NO: 383677 - DNA, 1461 bp, Cannabis indica
cataacaaaatacaacctcgaccaaattgcacctatgtccagaataggctggcgagtcttgacaaaaaaagacaacctctgataactataaatttaagaacaatgattaatattattattaattaatttatataactattaaaatattatcatagtcaaaatcaaaatagacactaatagatgggatgacacgattatttattttagtcctatcaaatccaagtacatcttatactcaaatatacaaaggatattaaataataaaaaaacaaattacataaactattgccctttatatttccaattaagccaactcactaaccttagtttttgttttataatgaaagaccatatcatatatttgagatatgcataacattcaacgttatgctcataaattcagaattttgaatacacagaaatataatgtgaacatggacaaaagaaatatatattataattttttataagttgcttagctgcataatattgaccattaattaatttgttaataatttattaattaatgtccataaaaaaaggaaacattaatgtagtttcagctgtaccacagaattaggtaaacttctgccaacaatacaattatactgtcacctaaataaataccaacattttctttttttaaaaaaaaaaaaataaataaataccaagatttgtacatataataaaaaattgatatacaaatatttggaaaattagtaaaaaaatttaatgacattgggaaatgtgataatgcttgacagattcagcagtaaagtatagcaaagtacattactctgacaccttttatttttctatttatttaatatcacattaataaacatgtaaacaacacccaagttggattcatacgaccaaatcatcaaatatgaattattttgacatatattgcaatggtggtaagttgatctttattttatttttagtgaattagtcctaaatttataagtttagtaaattaatccctaattttaaatattttaaaaaaaatccctaattttaagttaatgttgcaagaaaaaaaaaaaaaaaacctaaaaacttcatagaataatttgcttaaaattaaattagaaatcaatttataaaaatttatatatttagaaacaaatttgctaaaaaaaagttgtctaacatttccattaaaaaaagcttagaggctagcgttccaaaatttataagtttagagcatctcaaatgaagtactaaataaatagtgtaatgttatattttaatattttgtaaaattattctctaataatatgttaaaacaataaaacttgtataaaatttaacatatattaaaattaaactaaatttataaacaatattaaataactataacatgttatgaaataatataaaataatataaagtagatgagaagaaagaagaagaagatgaagagagaaagagaaagtgaatgagaatttctcagtt

SEQ ID NO: 383678 - DNA, 2363 bp, Cannabis indica
gtcaccatcaatctttttgaagtttgagtgatcagatccctggcagattttggaaaactttttagccctgtgtcattaactcaatggttcatattttcattatgagaagtgaaaaaacaagagctgaaacaaaggctttttaacaatgccattcatttatacattctaaaattataaccatatgatcgaatcaatatcttaatttaacattctcacataccacgccttgcacatccaatatggttgtgctttgatcaatgtgcttctttgctgcaattgaacaagctgggaacttaacaccaaatgccctctcaaactctcgaacatggtacttcacatagcggtccattgtagttacttgcatcaacttggtagcatctacttttcccagtctctcaatgtacacaggccttccatccttatcaactccatgatatccttggggatagtattccaagacctcacttagttccttgaagtcaaagtccttgtgcaaagaacaaatagagaggtaaattttcaaaagccaatgctatattgaacagtatacatcataagatatacaatcatatagcaatacctccataacagtgtcagcaccaaaatcctttctccactgaagcatgtcagaccacatttgctttgctttctcaacctcaaatttcctggctttcaagaatctgcagattgagagagtaagctaaaatgtaaatccattttcaaaactacaaaagtgatagtgatcaaactgaaatgaaattcaacctaagcaaagtatggtaatcatcatgcttagcaggcaatagctcctccaagataagtgcttgacggaaggcatcaacagcttgtacctcgcctgcatcatgctcatcttctatttcaacagacatgactttgctacttcttcggccctttctagtcaaggaattcctgaacttgcttgaggcattaatagctttttgtttcaaagacccaattctagtcttcctctcatcctcaaagttctcaaaatcaggaactgtcaaattaaaacacaatatcagagatcttaacctaaaccatatcattgtcacccttactaatcttaaaattcaactttcactaacacaaattacagagttttgagataacaacctgacaatatgcatgattatatcataaattagttattattggttattaatgtaaatgatacaaagtgtgagatttttcaaccaaaatatttttattttgtgctgaatcattggaattgtttcatcaaaattaatagattttgcaccaaattggtaaaaaaaaaatgtacaccaaaatgatgcaaccgttggagattgtcttacatatcaaatttcactaacacaaagtacagagttttgagataaaaacctgtttttggagacaaaggcccagacatggttttttcttttactctctgagaattgtttcgttataggtttaaaagagtgagccaaccagggccagaagtatcaaacactcatatcacaagcgccagaaacgaacgcccttaaaaatttgcctgcacataacattataaacacaatgacatttaatcaaacactacacattcacaaatatcaattggcaataagaagagccaaatgtatgaagagatagttgaagattacagaaaatgggaaaatgggcaatgataattagaaaaacccaaaagatagaagaagaaaaagaaggttttgaaaatctacctagtgtgtatgaaatgggaggagtttggggaaagagagaagaagtaatgtaagaaagtgggttattattgtattgatggaggttagaaaatggcggagagacagtaatgattgatgatgaggaggagaagaagaagactatttttgggggttgacaagttaggcatatccccatttttttttttttgacaaggcatatccccatttttgaagttcgttaatttctgtaattgtaatcattctaaagaattgaaaggccactccgctgaaatcgttataaacacttttgtcagttaatttctttcgcgccaaaacttctcttccttttgtctttttgtctttatattcatccaaatataaatgtaggaaagcttttttgggagggagcacttacgtaggagcgttttctatttttatattttacaaaattatatcccaatttttttttttggtaaataccattttggaccctctgttttacaaaagttaccaattggaccctgtgttttgttaaatgacaaaatggaccctgtatttttaaaatagtacaaataggaccctgaattgatttttgttcaaataaagtttaattataatttgatctaaaagtgatatgataaaactgtttacattttttgtatc

SEQ ID NO: 383679 - DNA, 3907 bp, Cannabis indica
ttttttggttcctctaaagaaaaaaaaaatatcaaatattcggccagttcatttaatttttatttttatttttttgaagaagaatgtcagctcagttttgtttaaatattaattttttttctcgattttctagggacatgatataagcaagagtacatttatatatatataaaaaaaaaatattcatgcatgaaagcgagttcatctaatttgttctctggaaaaaataagactcacttaatatatggacatatgcatgtatgtgaagacctttctagtgcatatagtcttaaaattatattttctaattagactaatatagaacacacctataaaagaatgaaaaatactttcccctcaaataaataaattatagaattataactatacatatatattatttatattctttgcatccatcgaattaatgtaagcgcagagtttcaaaaaaactagctacagtttttaattacgtcactaactaaacaaaagtaaatgtccacagccggcaaagaagaaattagacacaaaattttgacatagaattaagtgtgaatatataccatacaaggcaaagcaccttttcttttctttttcttttctttttttcttaagccaaatatatatgaacttttattttacagttaataaaagagattagacaaaactataaatattgaagtaagagccgttggttaacctacgttgactcgtaacaaccctcaaatatatttcaattgaagttttctctttttattttggtatatataagattttaatttgtgattaattggttcgcaagtaaaacttcctctagagataactcatttaagaaaaaaaaaaatcatctagacaacacgaaatgtcaaaaggtttaactagaagtgctcatcaaaacatatattgtttgtcccaacaatttttacgtacgtaattagcttgacttttattattaagtttcatatttatttatatcatatgatatgagtcgtagatttaatagatcatcatagacgtaacgtaccacttttcattttattattacaaacaacctccaaataataatattatcacttcaccaaattaaacaaaatgatggaaacagacaagttccccttagctccgccacacaacttcatccgaagcgatcaagaagtgtcacacgcagccgcggcggaagaagggctccgccgtaagaaacggcggagacggatacagtccgccgcagcctttgtcgttttactaatagttgtcgttttgatctatgctcttgtcgttattcgattcaaaacacccaaattcagaatcagagaagccatgatcacaagctcacaaatcagcaatttcactaataataataactcttcatcaaatctttcgatgaacttgatattggaagctgaattcaccatcaagaacagaaactttggtcgttttaaatacgagtcaggctctgttctgtatgcctacaaaggatttgtgcttggccaggcttttatcgatgatggtcgagtcaggccaaggtcaaccaagaaagtaagagccattgcggtgcttaactcggctggcttgggtagccaagccgagtcggagctcggaagggatattggagccggagtattgtcgttgaccagttactctgagttagaaggcaagattcgagttgtaagggttattaaaaggaagaagtggcctaagctgaattgtaccatggattttgttatcgctactcgaatgatccagaatttgaactgtttgtgatgaaatactttgagattttcatcaacttacagtatttaatttaattatgttattgtgttgttttgttcattatgttaatatttcaatcaataagagtaaaggtatgtgcatacatatattgtttgtaatgaattttctaccatattttattaattcgatctggatatatgtacagaggaaatttctatagtaggatttcgttgatgctggaagtggctaacacgaactccttagattgacgagatgaataataaatgtaagtaaaaaaatttagagagatagacaatttatggtagtttatttgctctactttgagtttttattactcacgagatggtattacaaaaaaagcctaagtgtttaacctctaatttctagcaagagaaactagagagatgctttgagcttgtaagtagttttcttaatgcccaaaatgaactaaggtaactctcattttatgggtgaaataggtccacaaaaaaagaaaaaattagctaattttgaccatagatggtgatctaatggtcatcattaacttatcaggttgatagtcaattcttttagcctgagtcgtgttgtcaagacccgcttcgggtaagcaagagcttatttttataattcacctagtgtgaaatttgaggtcaataacttcagaattgcgattaaagtgtgaaacatgacttgataaagagcattaaattagctttgaaacgcaagttaaatcgcgtcaatcagatcaatattgaatgagttatggctattttactgaagtcagttcataaccaagtgtccaggttgacatccagcaaccaagttgacatatgatgccaacctagacactagtaagtgagaaaacgtcatgtgaatgtactttttgatgcctaactgatattttgacatcacttagtatgtttctattgtttggcgaagcttgtcaccaattctcaaagatgttgctgttttacgaaaataagagactcgaaactctttatttctgagtgaatttttcatgttggaaatgagaaatgcgaagttgtgaatttgacttctttaatatcatagatcttagttattgagaaaaactagatggacggtcgaattagaattagaatcgaataagcagaacctagcgcaccaggccatttgtcaaccttggcagtcggtacttcatttctgggttctcgagttattattctgatacttccaaggttcttgaacttaaggacgaagtttcctaccccatttttttaccattttggatttaatggtccaattagatttgacacttgaatgatcgaaacaaccgcactaggttgattgtcaacatgggcgctaggcccagcaccgagtaaacctgggcattgggttctgcttccagggccttggggttgtggttttctttccgagtttacttgaatcttcattatctttgataacgtaaacaatgctctgaacacttttttgagaacttgattgcaaacaacccaggttgataatatgcaacttgggtgttgggtcccctttatggccatttaaaagttctgtttggtccttggaaatagataaatcttaatctttgctgaaagcagagaagaagctggagagacttcttggaaaacatcctaccccatgccttgttgggaattaatttaggcaaaggtggtagatggatgtcacagcctttaggtcgtacagggttggtcgacatatcatggcgttgaaggccaagagaacgttgatcacaaagaattgcaccatcagagttctggttgttggatttgttgggttttatgccctaaataaaactccatttcaatgtaatctctattattcaatatcaataaagaaacagaagtatttttcattcatttgtgtgttatttggttcatgttatcaattacttgtatatttgatttataaattcatccaaacccttttcacatttatattcttgtttattgtgtcgtcagcacagtggaaactaatcaagattatgtgattaaaacattgggttttactgatatgacaatctacaacatagtttacttgcatcttggataaatgctatgttctttccagagcattggtcaaagtaaagcttgagttggatgcatggagtattgtaacaccctaactaccttaggcg

SEQ ID NO: 383680 - DNA, 2722 bp, Cannabis indica
gtgtatttgttttattattatattatcttaaaaattaaaggctatcacttccgtatatttctaactttgtattgttttttcttatctcagttgtaataaataatttttaaattttattttagtacgataaattatttataatattctaaaatttataaataattttaaataattataacttattaattataccaaaatatatagaccaatcaattaggcctaaagtattttaataaatatatatataaataaatactttatacaaggtagtttctgtatgtttgagaggtatagtctccccacgttgaacaattttttcgaactgcctttggttttttcttcactagagaccaataatgtgtttttgtttttgttttgtttttttttaaaaggaagtaaattaaaaaacatgcattaatatggtcccatgcatgaacctatatctctctactgcaaatgcaattatctaaaatgagtacgacactctaagattcgcaaaaggtttccaaattcattatttccaaatcataaccacctaaaggaaatctttatcaacaaattaaataaattaataacaaaatattttaaatatcaactaataattattatctttaaaattaattgctttttaaaaaacatatataatttatatttgagagtataaaattattaaatatataccaacctagctctcactttttgatgtattattcaccaaattttgataacccttctgatgtaaccaaactctttttagcaaaaacaaaatttgaaattaattttttttatcaataaaagtatataattatgaataatttgcagcaaaaatattaaatttaacattcaattacaaataaatattttagattaaatttttacgataataatagctaaactatgtttttagaacttccacaagtacatcaccattaaatttcaagttaatatccacatggtaattcctgattggtctaagttattaaatttttatttttaaaatttttttttaaatataccaataaaaaaataatatgtacttaacagttggatacctaagaaagttttataattaaaataggtattattaccgttaaaaattaaatgtaggtgccatttggttggaggtaatgaaatggaatgaaatagaaggaaacaatctcaattccattcttttgtatggttgcatattaaagtattgaaatgtcattctaatagaatggttctcatcattttggtgtaatgactattccattttgaaacattttggtgtaatgactattcaattttaaaatagaaagaaagaatattctaatgcatgatgagaaaaaatttaataatttatttatcaatttcttttatgcattttaaattttattttatttcattcttattcctatttttatatttttattcctctcaactaaacgccaccttaagtatttctctgtaaccaggagttaaactttaaatatttacgttacaaattactctataattattatttgtatttttcaacgccctactagattagtagggattgatattctcctggtgcaagatgcaagtactggggcgaatccacatagaagggagggaggcgattgatccctggaataaaattggaaaaaaaatgtgtatatattttagttagttacgacatatatttattattaaagataatatttgtaaacataatattaattttgatgtaatggttaagctaaatagcatatataatagatgtaagtgttcaaatcccataagagcacttttgttttttttttaagtttacttttacttcagtctacaaaaaaaaaaattacactcttcactttaaatactaggtctgccgtgttggttgtctcctattggtttatgggtgtttgtagggcctccctaaactttagacagcttgggccattgcacaaggctccccatttttaaaggccaatttttttataggaaaagtttttttttattattattattataaatacactaaaagatttatatttaaaagtttaggtacatatctttgaaaaaaagaaaagaagtaaaaaactagcaatggaggtcttaatgtacacaattttttttttttataaaaggcccaattttaatcttttgcacaaggcctccaaaatgttaaggccgaccctggatgtctcatcaatagttccaaatcgttttggggaggatatcttggtttttgtccttggtcgtcaaatttggaggatctttagatctttattagccatttgttatgtgatctaatctattataattaagcattagaatatggttggtcatgttattttttttatctatgcttatgccttaatttttagtagaagaacactggctgatagtttttaataagtgaattctgtcatatgtttatttatttatagtaagtctaatatatttcacacttctttaatgcttgactcctagcagtttattggttgcttgatgttggtgttagaattttgttccaagttagtgtaaagggcttggtatgcctaattttcataagtttgctatttgaactacattaaatttcgtcagatttacacacatatatatatactagcaaaaagctacgtgcaagacacgtatactaaattttatgctaatttttttctatgttagttgaaagtgatacaattaaaaattaaagaaaaaatattattagttattaggtgagattattattatgtgt

SEQ ID NO: 383681 - DNA, 1259 bp, Cannabis indica
atatttgtacacatataaatctagaatcatttactggccaatcttccaaaagctgctaaaaagtctcaaaaggttacacaattcttccttctattgtaagaaaagtcactgaaaaagtagtaggaaaacgagcatgggatggtctagttttgtaattattatagtagtgtactaagaaccaagaggaagtcaaaaaaattattttagatgagacaaatgtgtacataaattaaaaaataattaaaattatatttaaacacattcacgtttttttttatcctctatgattttaattttaaaacataattaataatttttcaataaaaataatcttttttattattattattttcttttaaaaaagattattaaaatacttttactaacatatttataattgattacaattaaagtaaattataatttatttaggactttagacactctctatctccttattggtatgatattatttattttgggctaaattcctcatagcttaatttttagacaccttctcgaaatgcctcatagtaatggagtaagtaaaacacttatatttaaggcaactcttgtttattcttctgatgtgggacttagattgatactccaacaatccttctctcaaaccaaagaaccatcttgcctcctctcaccaaagaaccatcttgcctcctctcaaacgatcatctccaatgcgttggagcacacgtcttacatggagtactactactaccttgaaagttcttgctctttctctttctcaggcaaactcctctatccatagcacaccgcctatctaactggccacatctacaaatctcatcatgagaccaaggctcatctcctttgcttggcattcaaaagattcattcacatgactaattttgggatctaactctaataccaattgttaaaaatcatcggacaccatgtatctctatattggtatgatattgtccgctttgggcctaagccctcacaaatttgtttttgggcaccttcccaaaaggcctcataccaatagagatattgtccatccttatatacccatgatctttttgtatttctagtcaatgttagaatttaattgcacacccaacaatccacccctcaaacaaaataccacattgcctccccttaaacgatcctccttcgtcaacactcactacaagaaatgttacttttaccagcacaattcgctacttttaccagcgcattttgcaaactgtgctggtaaagaggtcaaagttttacca

SEQ ID NO: 383682 - DNA, 4035 bp, Cannabis indica
aactataaattcaaaaaattccttcacttactctgtctctctaagctatatatcactgttcaattctaggatttctacttttgtcaattaacaatatatatacataaataaataattcttttatactcttataatatataataagctttcatgatttttcaccatctgattcgtttttgtgggtttgattaattgtgtttcagaccacggacgattcaatcccgatcatcatgttgtttctgtttgttatataatttttaaatatatatgtatatttatatcagccaaaagaagaaaaaagagaaaagggggcgcagtaggatatatcaaaattggtttgtaccgtacaagtcggttgtgcagagaaagattttccttttttttttttttttaattttaggtgtgtactttggttatttttgattatatatggcgacgtactttaatcatgggagttcagaaatccaaggtcctgatgggttgcataccctttatctcatgaacccaaataacaacaacaacaacaacaactacgtacaaacctattctgacacaacaacaacatcccaaccgccgccgccgccagctcccaacatgttctttctcaacccaaaccaactccaccacagccgacacttggccggtgtaccaatctcagccgccaccgcctcccccggtcccggatccaacaacgaagcagatatttcagcctttcctcatcttcaatacaacatttggggttccaatatggatcatcatcaacggaatacgacacctgactttgcaacccagatgggttttcgaaggcatcaggtggtttcgccgacaacacaacaacaacaagctttgtcactgagtctttcgtcgacgcatcccgcccaggctgcagcttatgttgcctcatcatccttttctggtggagatattaataatgaagttgttattccaactgtattgcccacaagttttgggaattctttgtcgtcgacgatagtatctaataatagtgggattggaacaagtcttggtcaagttcaaagcatgcttttggggtctaagtacttgaaggccgcacaagagcttttagatgaagttgttaatgttggtaataataataataatttcaagtctagagaaaaagaagaaaaggacaacactgcaattgactcatcagttaattgcagtactgttggcggccttggctctaaagacaaggccgccatgaaaagtaacggggagagaacaccgacacccgaattgggaggcagtcgaaatagtggtggggagagtagtagttctaagataagtgctgaactttccacagtgcaaagacaagagctgcaagtaaagaaagctaaactagctagtatgcttgatgaggtaattaattaaacttcctatacttagtttattaattaataatgttcgataaaatttgaatatatatatagcttctactataattatttatttaggagagatgtgtgatgtattgttttgtaagccaaaattaaaattggatagtacaatttgttgataaaggactataggccagtgaatatgaaagtagaaaatataattgcatcacatggttcatttatgctatgaattggtatagttattcttaaatcacttaaaggaaagaaaaaaaaaaaagaatctatagtgttggagaaagcaattgttggtggggtttgggaccattggtgtttgtttgctcctcatgaaattaagtaggagaattttcccaagaggtgtagggtagtactatatatagctagaccccataattattaatgtataacaacataaaaagtttaactgtatacgtaaaaattatgaaactaaagtttttactatatatattttcctattgaattaggtggagcagaggtacaggcagtaccaccaacaaatgaacgttgtgatctcatcgttcgaacaggcagtgggatacgggtcagcaaaatcttacactgcgttggctctcaagacgatttcgaaacaatttcggtgtcttaaagacgcaatctcagctcaaattaaggccacaagcaagactttgggagaagaagaatgcttgggtgtgaagattgagggctcaagattgagatttgtggatcatcatcttcggcagcaacgggcgttgcaacagcttggaatgatgccacaacataataacaatgcttggagacctcagagaggtttgcctgaacgagctgtttcggttcttcgtgcttggctctttgagcactttcttcacccgtacgtaataataatatgcatattaaattattatattgcttttttttttctttcccttaattttcgagtcttctttataatacatgcacctttaatgaatatattgacattaatatatatgatgataagcttatctttatttatatatatacacatgacagtactatatacatactcaataaaatccatgcacatgcataagttatatctattctaaatctatatattatgttatgttgattgaagagacaaacaaaggaaaaataacatgatatattatataacaatgttatatatttgattatatatattctatgataaaacaatttttatcattagatttttagctcaaggctataaacaacaattagttttctctgatcatactaacctagttgtccatgcaaccatatatatatataataggtgacattatcaattatgtagcacatatacatactatgtctgtatatatgtatatatataaatatatgtttggtctcagagcatcagtacaatattactgctttgtaggtatcccaagacagcggacaaagttatgcttgccaaacaaacggggcttactcgaagccaggtatctataaatcatttcatttctttcttttttaattatatatttttcataattaatctattataataaatatatatatcccacaaatatatatgtaaacaaaggtataattatattataaacaggtttccaactggttcataaatgctcgagttcggctatggaagccaatggtagaagaaatgtacattgaagaaaccaaaagtcatgaagatcaactaaaaggtactactaccaacaaaatagatacaatcaaagaatctaccacaagagtccaagaaaattcaacggctgatattgatgatgatgataatattgatcacgatgatcataatcgaagtaatattaaccccttccaatactcatcaaagaatcagtcttcatcatcagctgatcaaatgttgatgagttcatcgttttcgacttctactccaaagaaaccgatgagaagtagtagtattactcatgatgaaatgatcatgaaaggtattattactgatcatgatcatcagtacaacagaacagatcataatattaataatattaatattgatgttggatttggaagatcgagtagtacgtacccaattggatttgggacatacccagttggtgatttagcaagatttcactcaagagatcatcatcatcatcatgaatttatggctccaagtttataccatgggaataataatggatcagtttcactcactctaggtcttcctcactgtgatcaaaaccactctctttcttcagaaaatgcccaacaaagcttcctgtccaatccgcagaacatcgatcctttgtttgattaataacaacaaccccaccatagttgaaattattctcacacagagagttaatgagtgactttgctccttggaactatatatatttttacccaaaaagtttttcaaggacaaattaggataagaagaagaaaaaagagagagttagtgggtcaccttttgaatttcacgtcaactagtcttttcgccatcacttctctttatcttcaacgttggacccccctctttccttcccctcccctcattagatagatggctatatacaaccattattattactcatgtcaatcgacaaacaaactttactataggattacactgcctgctcaaaacaattcactgctttttttttcttactttatatat

SEQ ID NO: 383683 - DNA, 1749 bp, Cannabis indica
atatatatatatgatataacttgggtggaataataagttatcttaaaatactattttgcaattatccccatcaaaatgccctttctatttcaatgaataaaatttagaatataccaaaatacaaatattcggagactagatcattatggtgagttattgctttcataaccaatgagatcatagtgttttagtttttataaattgctattcattaattttatatgttcttttaatgacaatatgaaaaggagatagagaaaaataaataataaaagaagacaaagtaaaacaaatgaaaacaacaatatggggtgcactataaataaaaaacactacattatatgtcaatctacaaatacaaaatttttcaactttttggagcataacaccattatgcgggccaactacaaaaataatcataattattatgtgagttgcacatgcacacacgaccctcttctatctaaccatcttttctttgccagcttttgccagctcctattcattcattctactaataatatatctatatatctatatgtttatatactatatctatataaacaaccaacactttgataaactaaatcaatttgctatttcctaattcctataacagagaataagcaccactgtcaccccctttacgccacgtgtacctgacaattgttttatgacacgtgtcttcatacaaatgcagttttatgtggttttccatacaccttcagggctgagctaggtcacgacaagaaagacaatgagattttattaaagccaataaaattattatcaatacacattttaatcagtccatatgaacatgttagttgtttcccatttacaacggttacattattaatatatttttatttatatgtgtttaataaggctggctaatcacacagctaattaaaatattgtaacaaataaaataaaataatgttaaaaaagactaccaagaagtttctcgtatgacgtcttaatcagagctgtacgaaacgccacgtgtactaaacttgaatttttgacttggcaattttgtaatcagaacaatgtcagccaatgatatcatgccgcgtgtcaaaacggaagtataccacggtcaggttagttcgtacatcatattttttgtgcggagtttagttattttttcaaaaattagcggggtaatttggtaaaatcaagggattcggagttgttgaaaaggttaacgcgcaatacagacttgtgaaagcttcgacgcttctttacagacaatattatataacgccgaaaacctaaacgcccggtggcttcggataaggacgttttactaactaccttcccagtgaccgacacatgtccaactcaaatgtccttatttgtaatttcattctcctcaacccgtatccagatcccaaaatgaccctatttgtacacgtgtagcaatgtcacatcgcaattaggtgcgcctccccttatctgattattagaagaaaattctacgaaattaaagggtatagaaggctgaccaattattcacaccgccattagcacaattatagtttttttttgctaaatattagcacattaatagttgtacatgtatatatataattcatacgtgactacaagtatacgaaaatataataataataataataataataataatatctctatatatttattaaacgattcgaggaatctcaagcattattattgattaagcgctgtctttgttcagctctccactttcttcctcccttt

SEQ ID NO: 383684 - DNA, 1062 bp, Cannabis indica
aataaaataagaaatattgtacttatttagtgcattttagttgaatgtcacaatatatagttctccacaatataaacttggttggattggattaacctataatagattagattcacactagcaaataactatttaattgacttcattagctaagtgaatatacttgaatgaatttgactttttacaataataaattgtttggtcctagctagtttagggtaaactaggtccactcgagttttcacgtgtacatagttatgcataagcatatataatggctccaataaatccaaaatacacagcaaaaaacaatgcctctattatattaactataatataatacaagtactattattggtccccatgcacacaataggttgtttattatttaaccattcttatctttcaaatatctactataattaattttaatttcgatcattattatacctcaaactatagtctataccattacattacacatagaaaacactaataataacaacaacaacaacaataattaagggttttgaaacacttttatttttgaattttttaaattacaaaaacaaattaagtagaattaatatttttataaaacaaaaaatgtatttcatactatttttcttttgaataaaaaatatttttttttccgtaaatttcaattctatatttgttttttgttttatttaagtgaggtttaggaaagtgggttgtgggtcagggtcagggttcgggttgggggccatggtatatgttcaggttagggttggggacaaggtttggggtccatgttaggatttgagttacagctggggtcggggtctgagttagagatgagcttgggggctagggtccaagcctgaggtatggggaccaagtttgagtgccaaggatagagggtcggggttgggggctgagttcaggccaatgttccagttgggttcgaggttgagatgagatttaggctgaggcctagggctgttcgggtttagggttggaatcgagatccaaatattgattgaagagaatacaaatggattattgtgacagtcagtagtc

SEQ ID NO: 383685 - DNA, 1990 bp, Cannabis indica
  modified_base (760)..(760): a, c, t, g, unknown or other
aacaataaaatattattttctgtattgataaaaataattcatttttaatcaacattatttttaaaaaatactgacaaaacgtgacttgtattttgaaaatttcaaaaacttttttggttttatttctaaaatcatgtttttaaaacaaaaaattgaaaataataccaaacatactataatttaagttattgagttccagtaaaatcccaaatttgagttagggagagttaagaggctgacaacgaaaattttctgtattaatgagcgcattcgagattctagaatagaaaacttcctagcttttccttcttttttttttcttttccttttttcttcttttcataaactactaaactatagctttaattttatatcaaatttaattttattaatatatatatattaattttatttttgcttattgtgtacatacaatacataatgaataattaattttccacatggaaaagagtgcatttccggcttagattaagggattggtattgcgaccccaattgcccataattttaaaataaacaataaccaaagcaaagcagcatagaagcctaccccccatcacgttgaaatttcaacaattcctatttcctattattcttggttttgatcatctcctcaaagtgttcaactcattactttaatcaacaacttgaaaaatcaataaccctttttaactattcatttatttaatcattacatgtaatggattatatatatacctcgatatgatctaacttattanaatatatatatatatttgtatttatatgatacatatctttgcttccttgtttggtaacaaaaacctcaaagccgcatttctaaaatttgtcatcatgcatagcataggccatatatatatatatgaatatgaatatattaaagagcaagtccataaaggagagacacagaaatgtataataaatttagaagaggtacgttttaatcggtaaaaaaaaaatatagagggcaataaagacaagagacatattgtataaatttgcaaactttttcaaaacggaaaaagagagtataatttagaattaattctcattaagaacaacacacatttaaaacaaataataataataaaaaaaatctaactagctatagataacaatatactccaacaacgtattaatttatataagagttataaagaggggaaaacgtatttgtttgtgaagacggtgacatatcatatacacaaattcatatacaagaaagaaatgaaagtcagtgccacgtggcaacaccacacacaaaaaaagtatggcaattgagtgccttatttattatttactttccaatattagttttttcttcatttttcttttaagaaaaaaaaatccaatattagttgcctccatatattacattgtttatagtaaaataataataaatttaagtatagatatatagtgtttctgttaaggcaagagaagaagataaaaggaagaagaagaagagaagggtgtgtgtgtggggtttgaaaaggaaaataataaacaaataaataaataaatatttttaattatatgtaggatggttattaattaatgagaaagtagtgtatatggtggcagatatgaacattgaagaggagtgtaataaaagaagggtgtttcagttgggtaggtctgagtagttttttattttatttatttttataataacaataataattataatgcattcaacccttcttttcctgatttatccttcactagtcttcactactctctttcctttattttcctttgccttgtcaaactgtgcaaccccccaaatccaaaaaaaatatatataagagaagagagaagtttaatttgaatattgaatcaaatatgaaaccaaaccaatgcaggcaatgatgatcttgatgctgaaggtctaagagggggggatttaattgctcttcacccaccttttcttcctcaccattaagatagatagatagagagagagagag

SEQ ID NO: 383686 - DNA, 1509 bp, Cannabis indica
ccaaattaagcaagctcaacgattatttgattgcagtcataaacccaatccatcatgcaatttaagcaagctcaacgaacaaggatgttagcaaaccaggaaaaaatgttagtaacatcttcataaagctaataaaaaatataagccttcgacattaaacacttgctctttgccctgattttcagttaaaacaattgaaatggaagtgttaaaactaaaatttcaaaacacttcaaactctcagagattcaaaacgaaaacctagccttattcatttactgtttcgacttgcaagtagaaaaaaataaaaaaaaaaaaaaaatcacgatttgctctgaatacgagtttctaagaatgaaatgtgcgaaaattaatttaaaatctttatagaaactggaagacagaaatcttcaataaaataaatgcaaaagaaatgaaattaagtattaaacaaacttgctataaagatgaaagacagaaaatcatacaaataataatgagagatctgataacagagacgagaggaatatcggtaagagaactcttgaacgcgtatcgattcaaatgctctttaaaaccgtaacaactcacgcacgtaaaactcgagatcagaacgcaaggtaccaagatatctcctatagcaacaagcacaggcaatgatgataccaacagcgaaaccaccatcgcaaacataaaaaacaccgtccgtacacacctccgaagcttctcaaagaataaccctcccttggccatgataacaacgacgatccaacaactctcactctctttctttctctccctatctcgattgatcagacagcgccaaccaaacgcttttatgttggactctgcctaaaacaaactgaaaataaacccgaaaccctaaccgacgccaatgatgcaaaatgtaccggattaggcggcggcctatctgccatttccggcgacttcaacaacgaaatctttcagagagggctttcgtaaagcaacggctattccatacacggccaaggctagggcttcagaagagggtctctcacaggctgtgagagagaaagagatggcagagagagctttctaaccgttttctttgttttttttttttgttgggttttctgatttgaattctctcctttccttcttcttcttcctcctctttcttgtttctctctcttctcttttctaggctttcatatatttattcttagcctttagattggatgagaaagttggtttttggtatcctacggctcaatatatcaacttcaaaaagttaaaccaataaccggctgtattttttattttttattaagggatttttttttctgaattattgaggaataatatagtcagctattaaagagttgtgcaatatctattcttgaaaatagaaatgatgttcaaaaaaaaagaaatgtaaatagaaatagtttatgtatttacgtagtcagctacatacaatcttctctcaatgaaaagttatataatataatctatgctctaataaaa

SEQ ID NO: 383687 - DNA, 1105 bp, Cannabis indica
taggacaacattattcaattaatatgcttgatcaactaattaataatacattattattgctagagattgacaaatgagctccttaataataatttttaaattaaaccaactatgtgtaattgtaattgtcatgcttaaatacttaaaaagcttagatacattttatgttaaataattatgtaggatagattggagcactctctaattctacttgaataattataattccaacaagatacttagctacatcaaatgctgattctctacatttacttattgtataaatgcatagtataaaatttttatacaaataatactccgttttagtatttcttttattaaaaaaattatatgtttatatatatttgtgtgcgggtgaattatacattatattttttaaaaaaaaaattattataatattataatgactccttataatatattttttaaattattttcaaaaaatcttaaattgtaatttagtttatattttattatttaaaataaaaataaaattatattttgatattgtataaatattataaataaatttatatatttatataagaaatataagattgtgacatgactaagatctttttaattagcattatttgttctcatataaaaagaaaatatgaggcactgacatgaaactcgaaaatcattatttgttcttaattttttattggctttataattttgtattagtttcataaataataattactcttcctaattattcacatatgccgtattactataatggttcattaaaaaaatgtataataaccttaaaccgcaccccctctatctatctcatccttaacatcggctaacaacaagcatttctttcaattgattgatcattctttcataaataaaatcaaattgattgatgatgatcacggttcatggttgggtgggtgtactattattgaatgagtcaattaaggtacacatataatcttagttaattaattgagcaacaaaaatattcaatttaaattggtagagttcttactcgattggaactaaatagaattgggtaaataccattttggaccctgtgttttgtaaaagttacagattggaccctgtgttt

SEQ ID NO: 383688 - DNA, 2327 bp, Cannabis indica
gagacagccagttcttcagcaaagtcacgaacgacaacaacaatcaagaaacgacaacaacagtagtaactcctagaaacaacgacaacaaagttgacgatcaccaaccagagccaactttcatcccagaaacacaaaacgacggctacggcctttacggccacgagtccggtcagttcccaccttccgaagaacacttcaccaccacaaagaccaccaccggcggcgccccttacaccaccacctccgccaaccccgtcagcacctacgagacctacgagccatacaccactcccaccactacttacaagccctacaccactcccattggccgcccgtacaggaccgagtccgaagaagggaccaacgacaacgcccagttctacagcaacaacgagaacgagaatgaaaacgagaacgacagctacaagaacaatcactataactacaacagtgagaatagctataacactaattacaacaaggtgaggaacaacaatggaagaggaaacgacaggtcgtacaaccccgagagactagggatgagtgacaccaggttcttggagaacggaaagtacttttacgacctgaacatggagaagaattatgatcccaactcctacagaaactccagggtggtggccgaacccaagaacaacaattggtacaacaacagggaaaacgacaacaacaacaactactatggccacaatagcaatgcgaacgacaggtcgtacgagatcaataacaacaaccgcaactcctttgaagggtatcagaaccagcgtgaggatcagttccaatacaacaatgaggagccttgattattgatcattatcatcatcatttatattatatatgaaggttgcattgcatgtggtaccaaaagaagtgaacagataatgatatatataatgttcgtgtttttttttatttaattattgattatcatatgtcatcattcagaaaggtggacgtttcatatatttaaaagaaaaaagaaattgtcatggtttaattaagttggaaaaaggaatttaaggatatatatataggttaatttgaggagagttcttatattatgtgtttttcatttttgtaatattttgtttttgtgttcttgtcatcctgcatacttctcctaaatcctaataaatgtgaaatatgtgttgctttagtttttgttaatcaattaaagaatgttcaatatagtgccaactgtactacttcaaaaaggaacatggcagttcttaatgtcttgctcctactttcataaatgttccttatacatttataaagtaaagcccttgtggcctatgggggcagaaagagagtctccatattaaatgcagtatgtatatagacagagttgaagttgtttcggcagttaatctatataagttctaagtagttgcaagggtcatcatacaaatatacaatatagacccaagaagaaaaaagacgagtacctacaaaagaaaaggggtaaaaaatatcagcataatcactttgcattaaagcaaaagaaaagaaggcattcatcttgttttttttctccttaccttttttttccctcgggtgatggtttaattgataccatgcataatatttttatccttgattatgatataaagaacattttatataggctagttataaattaatatggtgaaatatattcgaacaacgtctaacttctaattttcaaacttcaaatttgtgaataaaacaaagggtaatgtcatccttatccttccataaagaagaaattggatatgaacttttcacaagatgaactttattttcaaaagtgatagttagagagttagaccaagcaagagctaattagttggtgaactagtgacgccacattcaaacccaagaaaaaaaaattaaggggagtttagcaattatttttttttattttttaatcataaaaattaaagtaaaatttaggttacttttggtaatacttttttaatcaatgttttattttttaattagaaaagtaacaatattttcaaaaaacatgtcgtgtaaaattgtttttactttataattttttaattaagaatcaaaattttattttaaaaattttgaaacaaaaaaatctactttcaaaattattttaaatatttttttcttaattaatattttggactccaaacccaacctgaaccttgggacataaactccggccccgaccccagtcccgaactcaaaccacggccccaatcacaacgcggacctaaactcaacttaaattaaaatcgaaaaaataaaaaagaaaatgaaattttagaacatacttttattttctgttttta

SEQ ID NO: 383689 - DNA, 3004 bp, Cannabis indica
caagaataaaacatataattttgctataataagtgttttggccaaacttcctctcttttctttagtacttatcgtgttaatagagaatagagattgattctgaaaagggtagggaatcacttttacgccaaatctgattttgacgccttaaaaaagaaatgaaatgttatattcactcaattattattataataataataataattataatatattcaattcaacaacgttatttatttattaatttaaaattttctcaattaataatttaaatttttgtagtagtgtagggtagtctagtggtggtggaccacaaattcaagtgactggtgagagatgtggtggtggtggccggtgaagaggtgaagacaaacaactaatcaaacaaaagaatacataaaattaaaaaaaaaataataataaaaaaaaactaaaattgaaaagaaaattgctaaaaaaatatggttaattttaatttttgtgttttatagatattactgattgaatcctctatttcttgataatttttttaatataactaacttaaaaataatttatagcacgattaaatgcataaaatgtattcagttttatcattacaattttttagattgggttattatagttaacttttattttgacaaaaaattaatttaaatatttattttaaaaaatatagggtctaaatttattatttaataaaacagaaggtctaatcagtaacttttataaaatacaaagtccaaaattatatttaactaaatatcaataatgtctagcacttcctgatatgttactattttagtttatttttgtatgtatgttgaagttatttaggatcacttgtaaattttcgattaattgtttttatattttattgcacgtatatgatacagctctttaaattttatatttaacactataaactattttagattttttgaaaaatttacaagtaatcatacaacatacgcaatcgtaagaaaaacttagactgacaaactcttttagatatgaaacaagtaaaaaatataccaaaatacctttataaagaatgagtattgttattaagtatcagtagtatttagaacattctatacatgacttttcacgattagttaacgatattttctaaaaattattttcttcaattatttagaacctaaatacttaattacactaaaatatcaaaatatatatatataataagactaataatatttttttacaattcacataaaaaaaaatacaccaataataacaaccaaaaacaaaagtgcatgagaaatgtgaggagttagagagtctatgaatttggagttatggtcaatgatgaaagttaagccaaaataagtgtggacccaaacacagccaatttttgcataacaaaataacaaataaaaaaaaagaaagaaaagggtattaatttgtgtgtggtggaccctacctacccaactcaactccagaaagccgaaaagccacaacaaagagattgttgtggtaaacaaatgaatgagatgtttccacgtgtcaaaatctgtatggcttaaccgtctgatgaatgatcaccacaaattttatagacatacacttgatcatgccagcacatcaccccaccctacccacctggggctctgtactacacaccaattatgatagcttcactaaattaattaaaatgagaataattcggtgataaaagaatatgaaattataattataatttgcatttcctattgactatatttttcttaataagaaaataatatgtaataatattttatgggataggtttcgaaaagattaaattgtctttctattctttttatatataaaaaattatttatatttcacaaaattataaatacaatttaatattttttgaattttttttcatattatttatactaataataatatgatactaaaaaaaaatactaaaaatcaataatatttttataattctcttttaaaaaaatacaaaatctaatttatcaattatcaaagttgaatgttaatcaataagttttacaagattatctaaacagaaatgctaaagggcaccagtggtgtctaacaccctcctaggtgtgaatatcgctattggtcaaactaagtatcaggtcctatataatctcatataataacttttgcgtttggaaacccacaatgtaattagatttgagtgtaattggaggtaattacacaatttggcatgtttgtctgaccatgtaattacactgtaactgtgtaattggaagtaattgaggggttccaattacactctctaattctcatggcccctatgagaattgaatttaattacactgtgtaattactaaaaacttttcatattaaacattagatattaaaaaatattattttctcatataattactaactattttgccaaagaagatattaggaattcaaatgtaattaccgtttcatatccaaacacaccttgtattttaaaatatagtgttattactaaactgtgtaattaccaacctagtaattacacagttacttccaaacacactaaagagtatcgctaaccaattacaatgacaaattgagaaggtgctaagcaatgctcatatctaaaatactatttacctataaataataattctatatatatacaaatgatctatctaaattgtaagcacagctggtcacaatatatatccttcttgtctagtctacacaccattacccctcttaccacttttgctattcccacccaaaatgactcagctctgaccaacccattccaatcttccctttcatattcccaaaagttctcaaaaactctcttgacgtggacggaatattccatctctaacctccaaccgttatctgccacgtcgtcatctcacatttccaaacttattttatttacgttattaccacttcaatcattatttttttctttatataaacaccaaaacccctcacaagacaaaatctcctcttccttgttctttcttcttcttccttt

SEQ ID NO: 383690 - DNA, 1341 bp, Cannabis indica
aaaaaattacttatattgatacaaccactacattataactctgcaataacatacatacaatgacattatcaagttaaaaaatgctacccgtcattaaaaatcgatgataacaaatgcatcatgttctacatgcagttgaaaataaagatttaatatcacactttgtgatgttttgccttgttgtagagttgtaaacacattgtttgctttacttttttcttaaatatgttgtattcatgttattaatttgatgttaaatttaacaatactttatttgttatcgttaattatttttagtttttatattgttaacatatggttattaacaattatcaattaattattatcaactatttatttttatgaaaaaaatatatctttacaaatgtagattatatgtacatatatacaataaaatcatttgaacaaattacatcagtcaaccaaacaacatcaattgatgaaaataatatttaatgcaaacacaacaaaaaaaaaaaaacagaattgttcccaaaatatatgggtaagtcagtaattatggaaatcttccccttgctgatataatctagtcggcgttcatagaggcccttcatttgtcgacatacatggagtttttccctcttttggtcactaccatgattgattatcaaagtaaagattctcccaaggtatccatggagatcgtctcaccgccgttcatgcagatttgtctcatgttgctctttgcttaaatggtcgagatccatgaaaatctcattgttcttgaagaaggtgatctccttgccaggggtgattgtgaatgcgtccccttgcgatggtcattgttgaaagttaaaaactttaaatctgcgtgagagaaagatggagaagaaatagtataaatgtaaataatattataagttatactatatgcatgtttaaaactaagatgcaccataataatgtaattttgagctcatttatgtgcatttaggaaaaaaaaaccaaaaaaaaggccaatgagtatctttaatggagaagcaaattagtaatgtaaagctaaaatataactcacttatcaaaaaaagtactcaaatggtttgctaaaaagttatataaatttgttatatagcaaatattatgtcaaatttggcacaataattgttataatgtaaaatttgcatcataataaatgcactatttttcatttactttatgtcatttaagcaatctgctaatagagttgcgcattatttggcgcgatcctctcttattgaggctgatcgtatttttagtagtcactatttgcctactgtaattgtatctttagttttggatgatttaatttaaaaaaaaaaa

SEQ ID NO: 383691 - DNA, 1556 bp, Cannabis indica
attgtatttcattaattaattttattccgtaaaaaattgaagtgggtctctctacgtacaatccatctgagcctgtggggtgggtatctattgatctatctatcccaaaggaggaccatttaaattcaggtttgtcttcaattctcaaactttgatatatgaaaagttttattaacaaactggtgaaatgaaggagacaacaaaaagcccacttgatttcccacctaaatttagtgtcgtttggttgttgaaacctttcgttttcttgtcgtttaatgtgaaatcagataatatgaacttgaaagtagaaaccagaaagctgatattggattcatggaatgaaactgaactaccctttaaaaaacagtgctttaaatatgaacacgctagtgaaaaaaacattgtttttggtttaaatattcattatatttcattttgtggcacaaaagaaaaaacagatcaaaacagagaccatggagctgaaacagagtatcccatttcttcttcttgtaataatactattccgaacttcaatggccgatccacgtacgaaaatggtgagcatcatgtgcgggaatcaactagagcataacagcacccaattcgttccaaacttcgtggcagtaatggaaaacatcagtgaacaaatgagaaccaagggctatggtagtgcagtggtcgggtcaggacccgacgccaactacgggttggcccaatgctacggtgacctttcactcctcgactgcgtcttgtgctacgccgaagctcgttcggttcttccacaatgcttccctttcaacggtggtcgaatctacctcgatggttgcttcatgagagctcaaaactacagctttttcgacgagtacaaaggacccgaagacaaaaccgtttgtgggaacaagacccggaaaggatccgggttcggggcttcggttaggcaagcgttgagcttcgtggtttccggggctccgactaataaagggtatgcaaaagcccaaatggggtcgacggcgaatgattcggcttatgttatggccgattgttggaggaatttggatgagaaatcttgcagggcttgtttggaaaatgcttctaagagtataaggagttgcttgccttggtcggagggtcgggctttgaacacgggttgttttttgagatatgatgataaagaatttcttaataaagaaggtggaagtggtgggaattcaagaggtgagaaaaattagttgataatggattttgtttttgttgtgttttcttaatgattgtattaaggttgtttggttttggttttggtttttgcaggaactagagttgtgatcatagtttcggttgtgagttctgttgtggttttggtggttgcagtggctgttggacatcatatatggaggaatagatatatacaaaagaaacgaaaaggttagtagaagagacaatgtatatgggaatttacatagttttgatttttaagtcattaaaatttttttccaaaaaattgttaaatttaaaaactttgttaatatagcgattgtccataaattaaatcatgctcc

SEQ ID NO: 383692 - DNA, 2274 bp, Cannabis indica
taaaattagacaaaagttcttatatctagtaatctacaataaaagttcgggaaaaaaaaatactaattagccaaattaatttgtctttagtggcaggaaaaaaaacagtatattggattcctttagctgattctttcttttttttttatcataaacagaaatcatggagtcttccagatgagtctgtgaaagaggggagtgttatctatgatgaaggagattcagtaactgagattattgatcacatggaagaccatgaaaaagatgaagatgaagatgaggatggatcactaatagtaactagactgacaatagaagaagctcaacaaaaaccagctgaaatgagagatttggactctgccttgcataatgacggaaattctgaaaaccttaatggacatcaagctaaggactcttcacagctagcactagaggaaaatatgaatttgaaagatatggaagatagtggggcacgaactgaacaagagggcattagtgacatgtcaaagtcagtagagactgaagacaaaaacttgaatagaaaggatggagtttcctcatcagatcttaatgaggagatagacatggatgtcccaagatctgatctggaagaattggccaaaactagctcactagatgaacatacaactgatgatacaaatctgattatgactcaaaatggaaactacatggggatttcatcaacaactcacatttcaaatactagcgatgttgaaacgttagaggttagtatacagacagtgatcatggaattagggaaatgaataagttttgtttatgtatatttataataaatttaaataataaagttttatttataattactgcacttgtgtttgcatttaaatttgaataggaaccatcttcctcagaaaagttcacagatgaaagtaatggcaacatcatatccaatactcatgaaccagctctagtcaatgaaaaggcagctaaagaagaaccagacacacttcttagtactgatgttgttacagcatttttcggaacacctgaagtaactggcttggaatcgaatgaaggttgcaaaaatggaactggaaaactagctgaggtaaacaataatttcatgaaatccaactatataaatatatattgcttttacatgaaactaatttcatttcctaatataacatgatgataagataatattttattgttttcataaacatacacatttggctaaaatgaccaaatagggacaaaatactcattgcataacaccagaagatgatcaacttgcgcgtgaaaatgatttagagaatgagaaaatgaagtttgttgaagaaagtagagatggatcgaagcaggacttgtccattgagtcagctgatgttgcaaatgacaatctaaacaccacaaagtgtgttggaattgaatcggataatatgatggagaacaaccttgatattgaccaagaccattcgagcaaaatagtgagtaatataaacatttctatttctttgaatactactgtagaagaataggcgataaagtagtaaagatactcgatcaaattaccattatattccataagtatttgtaatttgttactgtataaattattatatttgtcaaatatctcattagctaacttaattaacatgacacgcttatgataaagcctttttgcttagttttattaaatatttgcaactcatgacacatatatatgttgagtggttatattgttaagtttctttagagaactcccaatatttatatcatcaaaatctttttttttttctaattttattatattttattcattttaaatataaaatattaatatatatacatatttccgtacagaaataattattaaaactcaaaacaaattaaaatgaaaactgaaaacaaattaaaatgaagtaaaaacttaacatgtttttagtacagtttttaaatctttcgaagattctctattttaaaaaagttgttatgagtgtttttaatagttgggattttatttttttcttcctgtaaatcaatatccaaaacgaccagttcaacacaaatacgttggatccttcgataagcaatattcttcttgatgagcatatctaatctcacatcacgaaatgaatttgtaatttttggaactttttaagttctagttttatttacatatacttgtcgatcatttaatatatctttataaaaattaaatctatctatctatttatgggtgactattcaatggttacatttttattgtacccatatggttacattttt

SEQ ID NO: 383693 - DNA, 1966 bp, Cannabis indica
attccgagaaaaaacagagataagatcaaccaaaacaaaagcagagagacgaagccagaaggcagtctaaggcccaaaaaatgctcagtaatacttacaactccaacattgactttatcaggactgggatccgcagaaaagctcggtgacaccgagaatcggatccttgggtgccggatcgacgtgttgccaccacgatgagatggatctcgctccggcgacggaggtacggacgggagagatcacgttgttggagatcgcagtgcgaaacgccatgaaaagattatcgttacaactttgattctgtctaaaaatttaatggagcagtaaaactaaggttggttgaagagagagaaagaggagtgaaagacggaagcgcaaatttatgaatggcaaattttgggtttttatatgtttgagattttgataaaacgcggccttgaactgcgtgagactgttctagagtcttttatgttgttgttgtctaacaagacgtgactatttgttataataggtgttttttttaataataaattaaaaataataataatttacagtttaaatatttaagtttaactttcagtgtaaataaatatttaactttaatttttagcggtaatattactaagttatatttttaaaactcggtaggtacgtgactattaaatgttaagtcattatttacgtgttattttcttatttgtatatttaaattaattttttttaaaaaaataaaaatttaatgacttggaccagtcaagaattgtcacgagacaatttacttaacacttaacagtcaggcacctacaaaagttctagaattataacttgtattattaccgccaaaaattaaacttatgtattgatttgtaattattaaacttagatatttatgccgcaaattactctaaccccattttttggttataagattgaaatagtaattataatagtaatagtaatgtaatgaaataagaattgtaataagaattgattattatgtttagtttgttattggaatgaatattgaaaaataaatagtaaattgacaaaattattcatactttagtaagttaaaagtttttttttttttttgtaataaagtaagaaaaagttaaaataagggtaagatagtaattttaagtgattgtaatgaggattcatgagctatgagctataggagtgtaattattttttatacaagtgatgtaatagtgattacaatagaatgtcattacaagagtttaaaggcaaagcaaatattagaattgtaatcatgatcagtgacggacccatttgtattagtgtggaggctatagcccccaataataaatatattgaccttttaaaaaattaaatgtaatttttttaatttaataattatagactaacatagtaaaaaggccccacaaaattaaataaatctaataagagtgattataatatagatataaatattttttaatgataaataaacccctacaaaataaaaattatgagtccgtcactaatcatgactccattacattgtaattacaaaccaaagtgttacattttggcactttgaaaattagttcacctagtattattagcaaaattttgttatccaataaagcaaaattttgatatgataagtattaaaaattgttcaaaatttgacataaaatagagtattgtgccaaactttttacacaataaacctgcaatgtttttagttataaaagttaatatattttttctaattataatttattaataattattcataatattttacttttttttttgttctaatttgcgtcttaaatactattgtttatattaagttgagaattgagctaagttagttagaattaattaggcaagttattaagtgtagatgttagttactggttaatagttgttaggattttatgccctaaataaaatccatttcaatctaatctgatttgttatcaataaaaga

SEQ ID NO: 383694 - DNA, 806 bp, Cannabis indica
aaaaaaaaataatgatgttatttaaaaaagttgatgatgatgtaataaaaaattaaattaaaattataaaaatataaagagggttattttattttaattgtgtggatattggacttattttcaatttgctcattgcccaattaatatattggacagtttatatttttatttggtttttttgtttgtatttttcatcgaatttttcagtttggtttgggcaagattattcggttgaccagtttacaaaaatttatacattttaataaaaactggtctcatcaatgaaacaattaagtatcgagttttacatattttatattactaattgtttgcaaaatgacactttgttcataatcacaatactcttattaatgttgctaaacttgcagtctaattatttaaaatttcctaataagatagactcaaaaacaaagatgccaataaataaggatgttacccaatttgattacagcccaagttggcgcacttaggttcccgtcgcactcccacattattaattaatacatctcaaaataacaatgcttatacgaaaaataaaaataaaaaaacttgaagcaacagcaatgcttatattttaagcgtgatagggagattattattattatttctcacatgttcttgtgtttttatatttaactaaagaaaattagttacgatataattctctcaacaactaagaggcccactcacactgtatgagtacgtgacacgtggctcgtctaattagaaagaaagaagaaaattagtgcatgcttggcatcataactaaaaattatttttatttt

SEQ ID NO: 383695 - DNA, 2842 bp, Cannabis indica
taacacataatttttattaactttaggggtataatggggacattatcgataaaaatgggtatattccaaaaaaaatatgaaaataaaagtaaaaatcaaaacatgtaaagtaaagtgggtatacaatgtaatttccacttgttggtttgggttgtaggaatagggcacaaaaatccaaccaaaatagttcaaatatgtacaggtttaattatgtgaaggaggaattcacaactttcaaggcccaaatcctggtttttggaatacgttgggccttgcaaaatgctcttcgaagatgccattcttgtacaataaattttgagattcaacttaagttagaaaaaaaaaaagatttttacaaaaatactaaatttggggctagttttacatttatactgctatacgaaattttttataaaaatactgttctcactttttttttcttttatatgtacacaccccaaaacacatacgaagtctccattttcaacacttacagcccgaaccactagaacaacatcagactccagtcagaacgtaagtatttaagattccaatcttgaaacaataatataaaaaatcacctaaaataacggtaaaacagcagtaaaattacaaaataaaattacaaaaaaaatattatacctcgataactcttttgctagttgagacttcccttcaccttaaaatatttcctcttaccctaaatacattaaaaataattcagaataaccaaaaataatcgtttaaaaaatataaaaatcaagtagataatactaaatacaaaataacacatacaaaacaacaaaacatataaaatttaacaaaatcagagagtgataaacaaaattctaaattgatatatgagactgaacatgcacaaacaaaaaaaactgaaaaaagaagctaaagtagctgaagaaaattttgaagatgatggagatgagaatagcaagaagtaatggaaaccataattgaaaaaacgtggatcaatctttcaaacaaataaagaaaaaaattgaagaaaaaaaagcttaagaagaagaagaaaattttaaagatgatggagatgagaagattaataagtaatgagtttggggtaacttgtattcagttttaaaaaaaaaacttactcaaaagaacaagtcatataacaacaatacaaccgttaaaaaacattaaaaatatgcatacaataaaaaacaaaaaatacaaaatacataacaacaataaaaaaatatgagctagaagacatagatcagagaaaaagaaactaaaacttctacagcaaaaaaagaaaaacaaaccctaaaacaactaaaaaacaatataaatacgtaccttcagtactttgggtatttcaaaatctttatcatcaaattcgaaatcaaagtctgaattttcaatgatcggtttcgaacgttttgattttctcttttctagagaatgaacaactaatttccttttaggttcgaagctataaaaaatgtagggctatgagagttttctttgaaatatttcttacccatttctaatttactaacaaaaacaagaaaaaagaagaagaagaagaagaagaagaaactgaaacaaaaatagaagatacggataaaaaaaataaaagaaaataataaagaagggaataacaataaggttaaaaagagagtcttatttattactttttttcttaaatttgattgttattaaaaaagagaaaaaaatactctaagatgtgacaactctttttcaaattagattttatttaattttttttttttaaaacaaaatacattctacaaatggcataaaggggaaaataaacaatttattaatatataaaggttttattaaattatttaacaagaacttttatttccgatcatcgtttcagaggaagtgattttccttatgaggctcaaactacattgtttgatttagtttaattgaagtttctcatttttattcaaagaaaaacattattatttattattttttacaaaagcaatctttatttaaaaatcaaaccatttttgtcactactaaaaaagttattgaaaagttacttagaaaaaaagactttaaatcaatctcaatagttctcttactttgtagcttgtatgaagactacctaaaacattaaaaataaataaacaaacttaacaatgaacgctgtcaaatttatatcaacttttaacaaagtaaaaaacttttttgttgttgttgtgtttctatacttctcaaaatttgaattctacattaatgtgtacatcttaaaaaaaaaattaccaaattaagggggaaaaaatcatttcaaattgttatgtgagcgaaaagttttacattaccaaagttttaatcaaatttctaccaaaactatcacaaatcgttagggaatcgtatcattccatcatttttggccataaatcatgtttttattacattattgtatgtaaatgcatcacaaaaccattgttatgcattattttttttaggccaaaaatcatgttttcatggcaccattgtaaatgtattgtaaaactatcgtaatctatcgtagatattattttacatcatttttttcccaaaattatattttcattgcaccattaccaatcattgcaaaaccataattaaggcaatgttttaccatcacttcttttgccaaacatcataccttcattttaccgtcataaaactatcgcaaactgtcgttaaaccatcaataggcatcattttatcatattttttgtttttgccaaaaatcagattttcatcgcaactacatcattaaagcattgttaggcatcatttttctacaatcgtagttcaagaaaaggaaaaaaaa

SEQ ID NO: 383696 - DNA, 980 bp, Cannabis indica
tttatttttttttgaataatcaacgttacttattctgttaatcaccatataagatacacaaaaatttggataattacgcattctcctaattctattgaatagtttacaaggaggcgtatcgagctgtagagtgttattaatcgcctaactttaatattaaggcaccatagaatggaatggagtttatcctttgtccaacttgaccacttgcagtgtgcttgtacaccaagctgaccatgtacatggtataaccaactaattacatacaactacaaaatagttttttcgcctcagtcaacaactcaaattggcacaattgacttcttttgaaattttgcatcagatttagagatggacatacattgaaccatataggagctgtagctagctcccactaaaaaaaatcacctaaaaatatttttaaaaaatatttaatttgataattatgtaaaataataataaaaaaaaagccctctacaaatatttatatactgtaacaatcaaaccttgttcatgcaatttttcgttaacttaatccaagaaaataattaatatagagaataaatttaagaaatgaaaaaataaaaaataatatataaatattttcttatatgttatttccccaatttttcaagacagtacaagttgtttgttgaacaatataaaaatttaatatgttaactgtgctagctatttgacctttcaccagtattgtttgcttttttaatttattagttattacaagtgaactaatatacttatttaaacttataggcataatgagctcggttgacttagaaatttagactaaacttctaagccacactcactcgctaaattggcgagaattaaaaaagtagttaagtaattataagagagacacaataaattttatagtagttcactccctgtatcgcgacattaatggagctacgtctactttaagttttttatttctcacgagatggtaattatagaaa

SEQ ID NO: 383697 - DNA, 1242 bp, Cannabis indica
aaaaaaatataaaagtgtacaaaaaatatattgtaagatgatgatattaactgagttttctcttctccacaacccacttttgcaatttgctgaaacatttttcatccaagaaggcatatagttgctgcaatcttctgtactccatcatgataaacttgtcaatatgagcttcatatctctcatacagggctggaattgttaatataatgacaagacctgcaaacaaaagaaatcatttcagatgtttttcttttcatactcagaatctgaaattctaaggactcacttagttaatactaaagaccttgcttgttgttaattgttatagtacaagttcatattttggccactgatttacttctaaaaactatatgatagctgtgagtagtaataaccaagaaagaaagagttaacataagacattgaagataatcaaacttttgaataaagttgaaactcactggtgtatgccaaagtaagaaaatcagtcatgccaccaacaaaggagatcagacagaggtatccagctactttgaagaacaattttgagtctttaccaagagcaatatcttgagaaactctgagtaaattattgacgcgaatgcggatgaatgaagccatttcatttaccatttcttctgataaatgcaactctggtagaggtggagaaggtctgttcagagaaagctgccattaagtacaagagttgttttggcataatggaaagaaaagaaatccaatttcataccaagaccaaaaaaaaaaagaatcttgttctaaatttacatcaaagttattatcacattcatacaaaaccaaaagagtgtatgcacaatcaaacccaaaatggagtttgagtcattcatattgagaagggaacacaataagtatggattagattaaaattattaaacataaaaaaccagaagaaaaaaaaaaaagaagatcaaaatcaacatgctcaaaattaaatcctttaaattttaagaaagagcagacctgtaccataacatgacagccacttgctaatgttgaaaatttttaaaaactaagcctttacattttcacaatgaactcaagccattttgatcattatactatgataactataatagcacccctttaactatcatagaacacagagtcccaatttattatcttgattaaaagaatatacacaaccaaggacaatggtacaaacatatgatcatgtactaaaaccgggaaaaaaaaaaacgaaaa

SEQ ID NO: 383698 - DNA, 1694 bp, Cannabis indica
  modified_base (95)..(95): a, c, t, g, unknown or other
ttagctctgaaatctgaaatactagtgaactgaaacttcaaacacgttttacttgtccaaaaagacggtttaatcgtttttgaaaatagtggacngttttcttaaataaaaaaaaacaacacacacacacaaaacttcacccctagcttaattctaccccaaacttcacaaaactctcctaatcacctaataaagacataaaacataatccaaccagaattatcatcataaaatttcagaatccaatttcaccattcttaaactaagtttgagcttgaaaactcaaacctagctcaaactcaaccacatccacaaatatcactcaaccaccacttaaaattaccacagaagacaactcataaacaaaccaaactcggacatatagcaaaacttagaattgcatgctcaaacttaacttttccacttaaaattcgaagagaaaaagaagggaaggagcttaccttgggttatctattcactaaccacttaaaaaccttgctggaatttcttgtttttgttctgaaaatggtagaaaatctttggtttttcttgggttttatggccgaactaaagagagaaaggaggaaagaagttgggtttagtattttggttaagtctatctacaattaaagtttttttattcagcttacataactctagataaactaaggatttactagagaaaatccactaacttaagtaaataaacataaggccgaaagactttttttttcccaaaacttcactaagaagtaataagagtaaaatggtccgaaaccataactatgataatctcaacattctaaatgtctaactatcttgcctcgttaattttaagatactcagccgtaccttagttaatctagcggccaaattgtcgcattctactattaccaggtataaaatataaaaattataaaattctatatataacataaataacacttaatattcaataaaatatttataattgagaaattattttcctaagacctatctctacattaagtcctaattttctactaagaagcatataatgataaatataattgaatctcttaattatatgttaattttcataattaaactatgcggtcatttcaaccaccatcccctacaactatccaccaccattgccgaaataactacacaccatcatcaccgtcgaaaccacagcttcccacaacatcttttttagatccaaaacaaccacaactaccgccacctccaacctgattcaaacacaaccctacaactcatatccaagcacaattaaacaaagataaacacctcgtacgatctcagatttaaatctcataaaaataaacaaactccaatcaaatccacaagaaaaaaaatcagatcgaacaattaaatatatatatataaaaaaaaaagtgaaaatagagagaggtgagacagtggacaagcttgctcactgaagggacaagaatcgagatcctaagtcttcccctcaacatcaacgacactccgaaagtgtaacgtcctcgcttcaagcctccattgggcccttacacccacggactaatggctcttatacacgagtacgccactctggctgcttcatggactgacgactggccctacagaccaacacgagtgttttcagcgtgctttgtcctcactcacacgcatcctgggaaaacttcccaggaggtcacccatccttgaaa

SEQ ID NO: 383699 - DNA, 1392 bp, Cannabis indica
aaaggagctgggagcaagtgtgttcttcggatgttttgctgtttcgtggctcatactgcggcttatatatttccccttttggatcataagatcgtcaaggttggccttgtaatgaaaaaagcgcattagttatgtaaatttcccttggctgatctttctcatgcttgattttgttccagctacgacctctgcaagtacttgagactgtcagaggcgtttcaccgattcatgtactacgttttcaatactatgttacttatgctacttgtcttccacatatactggtgggtcctcatatgtgcgatgatccaaagacagctgaaaaatagaggaaaagttggagaagatattagatctggtaagaaatgtaaatgatggatcatcatgttgttgtttttttttaactcttaacttaagaattttcgcttttgttttatatctacagattcagaagacgatgattaaatgaaagattttgtaccggtggtttgggtttcgggtttcggcccttccttggcaactgttttttgatgaaagatcttgtactaaagaaagtggttgtttcctgtagggaaggaagggctttcattcacttttgttctttttttttccaaatgattcttgagctagttagtgctgagatgaccagagataaaaacttttcagtgtataaataataggcaattcttgtataatttgtttggctagatattatttttgttcaagaattactggtcaaattcaaatataatggaattaattctttatatgaatgtaaacatatttagatttacataatcagattagatgatatttttttgagtttgatggattttcttgtattatttttatttatttatacaatttttttttgaataaaaatcataagatctattaattaataaattcgtttaaaacaataaaatacgtttcggaggaatagttttccaattgaaacacacgacctgtagagaaataagtctcttgctaagcgatgagtcaacttatttgcatatcattttacaaaacacaaattgtgaaggcataaaataccgctctgaatcgcttagacacacaccaagctatctgttttcaacatgactatatcccacgaatgagttgcaattcaactcaatgcttctttaatgcctattatctcagcaatttcgggttgaacacatccaatctttcccttctcgaatgtttctaccatagcaccatgatgattctgagctacataactcatgccaaaagcaagactcgaaccagaaaaaactaaaggaaaagactaaataatcaatgtcaaaagacaagactaaataaccatgtcaaaagacaagactaatagaaaaactaattagcttcaacatataaacacgatcacaacattaa

SEQ ID NO: 383700 - DNA, 3286 bp, Cannabis indica
actaaaaataccattgatgttaattttttattttttaatgggcaaatgcttaatttttcatcatgcatttttatctttttaaggacccttattttttgcttggaaataatttatatttttagtatgatattatttgaataatatcatttcattaccttaaaatataatcatattaatattaatcatgaaattccaaaaatgagatttttagagattatttgatttggtaagatttcactttgtattgtattatatatgtacgaatgaggatatattctcataaaaaataatattctttatttttattattattattattatttggcacactttattattattgggatagtggtttagaagattcccaaacataatatatgtgtgaatttgagggatttgtcttggaaatggaaaacattagtattttttttttttggaagcaaacattagtattgttattgtgtattagtaatttaaattttctaatacaaaattcaattttttaaataataatttttgtaataattattaaattaaagtatataaaaatttattaaaatttatacttaattataataacattggtcataacactttgtaaatatattggtactatattacatttagcatttttttatatattcatcaataattttatttttttaaaatataattttgagggaactataataattctttttctttttcgaaaagctcataaatacatatataatcaatatagcgtagtggctttttcatgaaaagagctggattgcatgtaatatttttaatgaatgattatttatttattttaattaatgagtaaatagcagtataagttattaaagttttgaatttgtaataaatttagtgtttacttttaatgacataagtatttaatatttgtaaaactgtaattttccttcaatttaatatgtacagactccgttttaaatttattaaaagaatatttgaaaataactgatactatatgtttctgtgtgaacatgataatatagaatttgggtcttatatgtactctgtttaagataataacaaaatttgtattgacaaaattagaaaaaaattacagttttagaaacatgagatacttataccgctaaaaataaacattcagtttatattacttacaaacttaaaactttaactatttatgtcgatatttacctttaattaattagtcttatttatatatttataatcattagtagctttggtaaattatagtcatgagttggaatcattgatttgcatttaaaaattgtaaattttaatgtaaatatatatatatataaatatttatattgatgaattaaataaattttgtgaaatggttaaaattaattgagatgcccatcaaatttatttccataaataacgcatgcattcccatccttgctacttttattttaatatagtaagttatgtttacttttttagccacaataaatttgtggtaaaaattaatttgagtattaaatatatgttgttttttatttaaaatttaactttcaatccttatatttttctaaaattttaaaggcaccattaatccaagaaagctcgaaggacatgcatgcagggcgactctaagtataagtgcgttacgtttatgtttaggacccacactttctgggaattcaaagtaaaacataaaatatcttattaagcttttatttaaataaaattaaatgtactgtaaataataaatatttaatttagttggttgaggtgtatgacacgttatattatagtgtagatttaagtctcataatactctttttcaatattttttttatatatttaaccaatcttaacattaaaattacgacgaacataaaaaaataaatatcctaaaaatcaagacaataaaattttaatgtatgaaaaataagtcaaaacttgttttggtacactattattcacaagagagctagctagaaccaaagataataaattagataaaaaaaagtttttaactcatataagattgttcttccaaccactctcatataaattatctttatatatataaagattaattaagctatatattattaattaagagaagtaacccatattatatattataatatttcttattattgttagctagtggaattgagtatacttttttttacatttgttattattccattaattatcaccatcaacattcccattaagctattgggttagtaagaatcacctctttcaccaaaaaagaatgtgaaaacatagaaaaaaaaagggtttggatataataattatgaactccactaattaattaagtttgatgcttatttccaatgatcatactctattgtggttaacactttaaattgttaatggtgtaattaacaatttttctaaaatatataaaacccaatcaataataatatatgacaaaactataataccaccattttatttctatatatcaataataatatatgaaattttaagaaattataataaaatacttttatatgaaaatttacattagttatagtatgcacttattcgttttttgaatttttttattaataatgggagttcaaaattgtttagttatatgcctacttgtttatttatgcaagtatgcaagtgaattttgaattttatttttgatactataaattattttaattattttaaaaatgtgtttatatatactataactacaatgtatacaaataatttctgtaagtgctaaaagtagagacatcagtcgtccatacaataaatataactaataatatatatgttaggatattgatgtttgatattattagaggtgtttattcaattcaattcgtattattttgctcatagtgcatctgattcacactaagtgtagattttaattttattttatattttagatccaatctaattcgcacaatagctcaaattcaatccgcaaaagtgtatattaaatcggttattttagatttattacttttcaatattatattatttaatatttattaaaatatatattatttttcacataattaacaataaaataaaataaattattgtagttttatgtctcaaacaacaaaatagaataaataaataaaataacaaattcaaaagaagaaaataaaagttgtctgtagaaagaatatttaatttgttttgaattgtatgctgaaaaaaaatatatgtaagaatggattatatatttgatctagggccggccctgaaacaaagtgggccacaggaaaaaaaaattaggtccttatgttagaaaaaatgt

SEQ ID NO: 383701 - DNA, 1120 bp, Cannabis indica
caatggttttatatcatgaaaaattcttgctacctcaattttccttacatatggctttacacgatagtcagaactattttccattttttttttacagtagatctcataataacccatgatttcgatctgagtttggatcctttgtacatgagaaaactaccatcaattttaaataggctaactaggaatttttctccatcaaattttaacatatactaaattgtatcttttacaaaatttgagccaggaaaaaatcttaattatccttttaaataaatattaataatagggaaattacagttatttttagtaaaaaattaagagccttctacaaggacaccttaaaaaaagtcacattgatagacaccattacttttagatattaattggctggagcatgtgtagcccatggtatgttgctatgccttagcacacatgattcttatttttattaacacgttgaaaacaaaccaacccaataccagccataccttcctctccggctcccccttctatcttgttgactgaactccccttcctctccacgatacctggtacccgctcagtgtcgtcactttactcgcgaggttgccattttgaactagatttgcagaatggcagtggcataatttccgtcggcgatatcacaccaccatccgaaaatcattttcttttatccttcaattttgggctctattttgtattttttcttttctagtgaatttgttagataatctatttgatcgatttaatgattatttgtgtagagttgaatcataagatttgtaagattgataatttgggggttttttttattatctttttttacgtttatattttctagattttttatcaattaacggaaaattgacatctttatacttttcgataatggtacaaatgtttaattactttgaagacaataattcaatggttacatcaatgtttgatacaagagtttcttccatatcattcagtagtgtgcttaaacacgtgagattttggttaattattacgcccactacagcagctagcattttaaatattagacaactaagtaactaagccgtgcttcgcgcggtattgtttaacttttataatctttatttgtacatatatt

SEQ ID NO: 383702 - DNA, 1900 bp, Cannabis indica
ctcgtccctccctctctctctatatataaatcatatgagattattatatagtatataggtaacatataacaaaaagaaatagctagaagaaactataaatgatatgcttatttattacacagcatggccattgctcaattattataaatgttgccatattttttataaaaaattctatggttggatatagttctcattgggcaattgagagctatatctcctattgtgttaagtcttctccctcttttatttgctgtaattttgtgtatgctcgtaaaacttgtaattttgctgcccataatatagctaattgagcatttgttaacaagttgtatggtattattccgattttttcgattttggagaaccttttatgtaatgaccgtgaggtctaattatgtttaattaatggaataattatgcttattttcaataaaaagaagaaacgttcaatctcattaatcaaaagagcaaatcacttaaaaaagataacatcaagttcagaagatatcttaacatatatagtacctggactgtcaagtgcactgaaagattgaacgattagcaaatcatttaacaaagtgtaaagaaacattatgggtcgacctcaacaaaaccttcttcaatcactagaccaaacccagaatgcgtatctaaagagtttcataatgtacacatcctattagtgttttcatgcgtataaattaaaattaccaagggaaattattgaatttctttaaaagttaaaaaaatacgtacaataattataaaacttatctataaaaattttgcccaggacatatatttataaattgggtgatcttataacgtacacgtatatgcaagttcttaaccactcaatcaaaactatgaccccacccccacttaaaataaataaatacatatatatatataagagtgtatccaacaaattataataattatgtagatcaatgtatttattgggcatgcatgatgcatccacatgataggaactcttatatatggaagtagcacaataccaaaaatgcacttatgcactgttacttgtttcgatatttataaaaaaaatttagtgtatttttattaataattgtctctatattataattatttaattaaaatattttgtaaattttgaaaaattcaaaatagtttataatataaaaaacagtctctaagcaaattatttctcacacctgcaacaaattattttaattttatttttggagtgttaattttttttaaattttttaaaattttacaaattatcttacataattataacatgtacgtccataaaaaaaataaattaaaaaattctcatgaatgctaaagcaaataagagtacgaggtgcaatgcactccttttttaatttgcattataaaattttcctaaaatataaattcagaaaagtactttagtgtttgaagtttgaacttctcttgaaaaactttcttcaaatatcatattatataaatatagaaagactcgacctaattggtaagcaagagataagataagcactacatattttttttttgaataattagcatttttactccctcaaattttaacactacttaattttacccctaaaatttaggacttgttaaaaatcccctctaaaatataacaattataaacgacttaccttgaaaatattgggtatttcgaaaaagtcatcttcaaactcgaaattaaaattagaattttccaaaataggttgaggtcatttagacttcttcttggaagaagattcaacaactgacttccgtttaagagcaactggagacgtatgactagggaattctctttaaaattctttttcccaattgatgatcgaggtaagattgtttggggtttttgttagactatatatatagtgtatgtaatata

SEQ ID NO: 383703 - DNA, 4864 bp, Cannabis indica
taatgtgattgaagatcacactaatttcctatctcccaatacagttccacatatcttttctcttccttttttcaattccacttttccatatataatgttttctttagtgcacgattaaaaattatcataaatataatttggcatgcattatatattttttagattttgtggccattcattttagttggttgattaattcaatcattaatttcattgtcatatccatgtccaagtaattatcttgtaacaattatatcaattaatttcactatacaatgacaaaacacaaaacccaatagctcaacaatatttttatgaagaaaaagacattttgaatagaaaaccaaataaatagtggcaagcatgaataaactagataaaataatatgagtgagtaattttcatccttttatattttaatttttatatatttaattctctcattttatttttttgaaaaactttctaaagtttaattttatttgcaattttgaggtgttacttaaatatcgctattaaatactagctggatgattatgtacatctgtgtatatctgtgtatacgtgaatgacaaattttgaagtcaatacaataataatttagttgatatttaacgatgaaatctagataacacctctattttgcaaaaaaagaaaataaacataagagttttagaaaaaaaaataaaaaaaaaaattaagtgtataaaattaaaatataaaaaaaaaaaattgcagcaaataactcaaatatattaataataatagtaaattcatcaaaatacactattttttattaaaaaatgtcataattaaataatagaatatttgatgattttattttattttatttttcaatatagatttttgagtagatatatcaacttggttggtaggtactacttagttatcattattcaataaaggtcacacttaaaataagtagccatatatggagaagatacacgtggctgaaacccaagtgttggttaggtacttggttttaagacccatcatccatgttgtgccattgtgcaattttggattcacaattcacaaccccactcctagtaggccataatacaattttttcatgagaaatgctaaaggacaccactagtgcttagcaccctcttatgtgtcaatatcgttattagttcaactaagtatcgggtcccatatggtttaatataatggcttttaagaagtatctctagtcaatcacaacgcaacatgtcgagaaagttctatgcaccactgtccactggtgcctaataacaatgctcttttttcattattattattattaagaaaagataagatgtggtggtgtctagcattattatgaggtgttatattattattgatgtaattaagagtattttattttacatgttttaatttaataactagtataaaatattactaaatatttgcaagtcgtcacctcatggtgttgttggacactctcacggacaaccctgagatttatggagtcttaagaaatgaaaatagtattagccctaagctaagacgggttaggcttgcacttagagcccacttaacttggaacgtcccaatcttttttacttttaaaaatatatatatatatatatatatatctattgatttagaatatgagtcttatatgtgtatcctatttaagacaataatagtttagattgtcgaaaattataattttactaacattaagtacttatactgttgaaaaaactatttaatatatattacttaaaatttaaaattttgagtacttatatactatatttaatttaattattaaattaaaatatataaaagttaatacttaaatatattaataacattattaacaccttgtagatgtcttttatcattttttgattgagtattggtatagggtactaaggtgtttagtgctattaccattataatatggcactttataattagttaacgattctttataatttttattaaagtaaaatatgtgagattcgatattaaaaatatgaaacattacaaaatgttaggcatgagccatttagcatttctattcttgatttttatatgttctaacttcaaaagtaaaactaactctccactcaattaatgtataggtcttcattataccacctacacctacccaagatcaattcaaagacattatcaatgagagtgggagaaacataatcccttaaaatcacaagactttaaatttttttcaattatctaacatatatgctccaaatatataataggataaccattgcttatatgcttttcatatgattatatacttttcattagcttcctcaatgtttgagagtctcataataataattattcttattgtgaattagttttaaaataaaactttctacatcttaccatatacttattttattctactttcaacactacacttttacatttctaacatggtataccataatcaaataaaactctaatgagtattcaccatacaaaaataattattaaaattcaaaataattaataaaatatattaaaaataatgagtaatattatataaatgtagaacatgaataatgaattttaagaaaaaaaggtttaaaatgaagaagaaaactagagcaactgttgtattgtattttttagatctttataaattttaaagattttttattttagagaaattgttatgagtgctcttgaggactcacaataacttatgtaaaatagttataaatgtaaaaatattgttaagagctaaaaacaagtgattaaaatacctatgagctattattgctcaaaatattaatttccttagccaaatgtagttacaacattcttaggttttagtgcatagttataattgtttattatttttatagtgtattttgttgattttttgagtgtaaaactatatatataatataatgtataatatttttattattttatatactataaatatattatttaaatgatataaaggaaaatataaagaatcatgtataatgtaatgtaaatgtgtgagataaaataaaatataattttttagtgagatatttaaagatatatagagagatattaaagtgatttttttttttgaattgatattaaaagtgatctatcaataagctttcaccactatactacactcccatatttgattatttatttaatagaaaaacatttatatatgaatttctaaaatttaaatttttaacttagctctcatataatttaggaccgatcttgattatccttaaaacagaactagagtatttaaatgtttacatatagaaaagtgattgataaatttagttactttttacaaataattttttttttgtttttgttttatatatataataaggttataaaataagcacataccctacaagaatccgaccacaaaatttctagccaaaaaataaaatcctactcaattatttttttaaaaatcaggacccatatacatgcacatgtgtgttggaaaattataataccaattaataatgatgaatactaaaagatattagtgctatttattagtataattaaatgtcgaagtacatatcataatttaataattattatagaatgataaaaatgttaaaaggtaataccaatgcttaatatcacctgaagtgtcatatcgttatattggtggagttaagtatcatctcctacaaaatttaatttaataattattattatgaaatgatggttatttataagacaccactccataataatattaggcgctactgttagtgtctaatagattgctctatagagaaatgttaaaagccaaaggtacactagtagattaagcatcgctcacataatttaattttataattattataatataccgtcaacaatttataaagcaccacctatgatgttaggcacatggtacctaatagcaatatatataaagaatgaaaaataatactaaggggcaagaggtgacataccgctattggtgcaaatcaatatcaggtttcacacattttgatttaatagataatataaaaatcgctaaccactttaaacgcattacatcagtgtggtgttaggtaccttaaaattctcaatagtaatactcattaagaaaacataagataagtgtgaatctgatgaagtaaaatgtgtaaaaaatagagtttttttgcagctaaacctcctcaactatcatttcacttgcacttaacttttcaagctcaaattttaatagtaaaaccctctaaactattgaattgttagcaaatttaaaaaatgacatttattttttatagttaactaccaacaatatggttgcttatgtgttcactcttattcacgtgataagtttatattagtacacctactattatatttaaaataaaattatctcaaaatatatcactattttttatttttaaaatattttactttttattttgtataatttaattttattttaaaatgaattcttagataatttttaaataatattaataataggtgtatcaatataaacgtgtcatgtgtacaagagtatacacataatcagctcatagtggtaattaatcgggtgacactttaaatttgctaacaattcagtaatttagaaggttttaccaccaaaatttgagcttaaaacataaatgctagtgaaacgatagttagaaaaatttaacctctaaaaactcataaaaatataaaattgcaccacttgtgtagagtgtcaatttttttttcttctcttacacaccactcctctccctctctcccaacccggcccctactctctctctctctctttcccacttaatatatatatatatttatatatatgtaaatgttggaatttattttaccaggatct

SEQ ID NO: 383704 - DNA, 2437 bp, Cannabis indica
atttttttatgcattttaatttattccattccattcctattcctattcccattcccattcctattccattttcattcctcccaaccaaacgcctccttggccgacccgtacggagaacaatcaatgatcctgagccctatgtcacaacaacaaaagtacggttaaccaccattctaggtcgttaattcattcccaaaagttcccctataggtcactagggtactcacaccctaagcatcaagaaaacatgaaaaatggggcaccaaaaatttcaagctattttttttgtagtttctggcagggaaaacagtagatagtttttccaaaagcagtctgtcattttctacaggatacgtgaaacccgatttttctacttctcaaaactccaacaaaacctaaccaatccattccaaacttcaaagaacaatcatataacacccatacattaatctcaacgtatcagaaataaaaatcaagccataaaaaatgtcattaaatatatttttttactatgtatatatatgtttttttttttttttgagttatgtatatatatgttaattgtgttgagttctatgtatactatttcttagtatttaagtatgttaaggaaaagttgtgattttaatttaatgagtgattaatttgttgagcaactatttatgtgttaataaaaaaaacgagaagaattttcagcttgaccttaataacgaaacaattaggatattctctcttctaattttccttatactttcgtagtattcaccttagtagtgattttatatagtagttagtttaagacaatgaatgttatattatttttgaattatatatttaatctaacattaactaattaattagttaatgattaaattatcatttaattattttaaaaatattttgaaataatttttaaatgtttttaactattagcatcatttattagcagcggatcctactgctaataatatttttatttcgaaactgaaataaatatggcgaataatagtgaccaactattagtagcgggctattagcagtgagatcccactgtctttaactgcgattttttgagttattaacaatgaatttttccgccgctaattatgttaaatgttgtagtgatatatgcgtatccccataaggtaagttaaattagtttattttaatgaatatacatattatcttctcaagaaaattaaactgtgataaaattaaaaaaaaaaaaaggacttgaggttgttggtgtgtgtggtctctctttttgacaagtgagttaaaaagaggtagtttgtttgtttttctcttttcaaagaaaacatagggtgcatcactgggtggtgccgaaattttaatggaaaactggactcactggttagttttggaaaatgacagccacatggcccacattattattaccataagccattatttcagacatctcaatctcacaattatgaatatgatatagtcaaattaatattagggatctaaagagggggggactggggtggttgccttttgctcttccctcacctgaattgaatgagaaatgctaaagggcaccagtggtgcctagtacactcttatgtgtcagtatcgggtcctacatagtttaatataatagcttttaaggagtattgctagccaatcgcaacgtgacatatggagaaggccggtagcaatgctcgaattgaattgaagattgttactgagcaccagtaatatctagcatttctaaatatgtcattttgcgattggctaacaaacctacttaaaaattattacattaaattatatggactcaatacttagttggaccaataacaatattgatacataggaaggtgctagacactactggtgcattttagtatttctctttaaatatagagaaatgctaaagggcattagtggtgtctagcatcctctgacgtgtcaatatcgttattggtctaactaagtatcgggtcttatgtagtttattgtaataacttttaaggagtattggtagccaatcacaagataatacgcctaaaaaatattaaatactactggtacctgctcttaaatataattacaactcggtaattttgttttaagtattaattaaggtgccgtttggtaacacttttattttttaattttttaatcacaaaatgaaagcaaaatttttgtttttaaaaaatttatttttgaaaaacgaaaatgcgttatgtaaccacttttgtttttcaattttaaaaacagaaaacaaaagtgtgtgttctgtaaagttcatttttatttttatttttttgattttatttaagtcggttctaggtccggggtcggattcgggttcaagtcaaaagccgggtttagcgccaggaccgtagggaggggatttgggttcgggtctggtctggtcgtaatctaaaagattgattaagaaaaa

SEQ ID NO: 383705 - DNA, 1689 bp, Cannabis indica
aatatatagcatattccactatttattatacacatagcaaaactaaattaaaaacaaaaattaatgaagattactcatccaccaagtccagcagtttagctagtattattctacaataactggattaaaatatagtaattcttatgagtaaaaccacatacagtctggaacattccaagcattccagggatactagcagcttgtacaggtcttggccgaactatctgcattacaatacaaaccactaaagttaacgcataaattatagcaaaaacagacttttgatactctgaacagttgaagcatcatattataacggaaagccaaattcaatggctgcgagaaagggatctctatcctccattgtagtgggtggttcccaacaagttatggcaaggccccacacattcaagatgattcatgaattaaacaaaagttccaagaagaagaacactactaagacaaagaaaacagaaaaagcgaaagcaatttaagcatacctttccagttttaacaggaacaatatcgtccatagtaagaggttcacctgttattgggcattttccatattcctggtggcatgaaaaagatgtatcaaagtgttttcttatctaccattcatgcgaaattcatactgaaacaatgcaatgacaagtgtaaaagcgcacacagtcaatggcccctgcgatacatacatacatatctatctatctatatatatttatataaacatcttgatacaccaaaaacccccaaacttgctttgcaaatttgatttggggctctcgttgaacccaaagatttatgtcgaaaccaaaactcattggaaataaaacgagaaactcaagccacgtgaagcattagcatacattatagacataaaagacaaggaaatcctagctttaaagttcatattatattttctaactgagaagaaatgaacaagcaaacaaccaagttagggaaaaacataatcaaatcttgctcaattcctataaaccctcaggcattcaaactactacatactcatcattttactagtaatacatttgattccagacaagatctaaacacaatttaaacagaaagaacaatactttacaacattctcatctacccaaagcagaaaaaaaaaataagcaaaaaccctaaaaatgacagcgaaaaacatgatatacaccaagaaacattaaaaaaaaaacctaccgatatgtgtctttcgattaaacgcttctcgaagagcaagccagagttcttcgagacgacgggctcttccggcacctcgccggagactgtagagagcagtgaaaaacagagatcagagaattgtgaaagggagaaatgagggaaaaggaagaagaaggtaacttacttgcgcagttcattgtggcagagatttttggggatttagggttttgggtgagtggagtgaagctggctctggttggtttcagcaagaagcagcagcgagccaagagagggagtttttgtgttttggtgtaacaaaatatacaaaaatgaaaaagaagaaatattcaagtttccttacaacccaattttattgggctggactcatctgggcccaagcttttataggcccatactatttgtttcgttttcgggtccaggttctaaaggccctatttggttataactactttttcttttttgggtttttacaaaaatact

SEQ ID NO: 383706 - DNA, 1417 bp, Cannabis indica
gattaaaaaattgtcactaaagatactttttcttgttttgtttttagtacatttatgagatttgtgggtaattttttatttatttagtgtgcttgtttgtgtttgcatttaagaagttgtttttcattgggaaagagatttgatttttcattttacatcttactctatctattagattatgtctatactataactaggcactataagcattattagttcgtagcacctacaatcttaaatagtataaaacaagaaaagcatgggtaaggcatattttgaatttttttgtaacatgtgtatacctttttctcttgattttattgataccttcaattccttatgtatgtataaattaatgacgattttattttgatcaaggctgataatttatgttatcgtattgtatttgtgttaacacaattaaagtaaatataaatacgacataattattatacatgttgaaaatttaaacgcaaacacaatattattaattagcaagtcacatgatacgatatcttgattatgatacgaagattaagacaaacatgatttttttcttaaagtatgaaatttatatggtagttgatttgtgttatcgttttgacacgattatcaaacatattgacatgattttgacacgatacaattaaggtaaacaagacataataattattaaatgaatcaccaaaatctatttattttgcgtcatttcgagtagtatcatcttattatgacttgcatatatatataattgaagcatgtagctgcagggaaaattttgaatgatcactgttcaaaactttattttcttttgtgaaaatgtatctcttggtttatgctactacttttggacaccatggaatgggtagtgtgactcctcctaaaccatccacaagtacttagagaagaaatagaccacaatatgacatggtcgaatgctttgtcaaggagtcttgtgtcatcattgagactcgtaaatttgttgcctcgtatatgtattgtatatatatccaagaggaactgtggtgaaagattgggcccttgagagagatcctaaggtgtaggatgttcaagccagttgagaggtttgaatttgaaagaatggttaagaagggtgaaagagaaaaggtttgtgggaaaattacaactaacagtgcaaaatcaaatcaatgaaactgtaagcaatcaaacgattagaaatgataagattatcaaaacgagaacaacaatcgtatgaaaaacaaggacaaacagagtattaaaactagagaatagtaaatgcagagaatagagaaatcaataccaagatatatactggttcaagtcctatagatcgatgtgatctatggctctactccaattttggaataccactgtaattcttctttattgattaagcaagaacaggtacaataca

SEQ ID NO: 383707 - DNA, 1229 bp, Cannabis indica
attttagtataggttgaattcgacacattttaaatattgtcctagaacatatggcaatggacaggttttctacaagttatttagataatgtttatcactacatattattttattagatgtgagaggttcaattcaaatttcaaacccctaccaactttgggaataaaaccgaagacctcaataactatctaagatttgttggcattgtattatttttggttaatattattgtgttttagtatagggaatgctgtaagagcatctccaaggttgctattggagttgttttgccactatgtaatgtagttcaatttttaaggttaattttatgtgaagtgttgtttaatataaataatgattatatgatattttttttttatttttttattagaaaaaagttaatttaaaaagtcgttaatttaatgtgatgtgtgaccatggtggataacttttaatgttgtcaactattaaagtattttcttaagaaaatgtgacaaattttatgtgaatgagagaaaaaaaaaatatatattttaagatagtatgtgtattttgataactataaatgttgtcttctatttgagatgctctaaatacgaactgggttattttttatacgacacataacaatgcgaatctaagaggtttgagcacgattaggcaaaaatataagtacaagcacaacaccacatgacacaatattttaaattggcaatacacaacacaacaagtttaaaaagcaagacatatattaaaaaccttaaaatataatgagaatattattctaatgattttttttttttgtaaaatatggctaaaaagctatataaataataattggttataaaaaaaatagctatatgtttagtaattatttcattaattgtaaaaataaaatgtgaaaaatcagagcacaaatttaactctaaataaaaaaataagctgatctgagtaaaacacggtacgaatttaagcacaacacaataacgacccatatttttttatttatggcctaacacgtattcacaacactattataggatggggtgcaccccaaaaagaggtgcttcactgcaccctctcgtattttctacatctcaataattttaattttatttgtattaatgtaaatattatttgtaccctacaaaataatatgtacatcccaatatttaaaaaaaattaagtttaaaataatttttaaatatcactcttaatatttatttttt

SEQ ID NO: 383708 - DNA, 2389 bp, Cannabis indica
ttatgaattttagttttcattatttttgtgacaaaatataaattttttacaaaaatattatttatagaaaaattaaaaagaaaagttaaaaatatggaaaaataatgaataataagataagtaattaattactgtttttccatatatttttttttgatttttttctaaaattttccaaaaaaaaatgacaaaaaacttacaaatatatcaaatatatgtcaacgtaaagtgatggcgtatataaatcccgactccgaaggccccaaaggcgtatctgtaaaattcttttcccgccaaaatgagagaaatgcaaaatgctgtgcgatccaattccaagcctctctccgcttccgccattcccaaattcaagaaggttaccaaaccacgctgatcccaaaaccattactcttatctcattccttcaatcttcaatttcctatctaataattctacttctctttttttgctcagaacactgccaagaatttggatgctgaatttcaggcttttgacctcggttctgaacagagctccatcgaaactttggatttgtctccgatttccgagatcagtctagatggagaggtaatgctgctctgcttcttacatgaatttgattttctgctaacactttgtttatatacattacgagtgtctaagttcggttaccgagaaaatgcgagaaaacagaaatttgattgcggaaaatgaaatgttaagatcactgtgttgatattgatttcacttgaaattgacatgatgaggtaatgctgtttcttacatggatttgattttctaaaacttcgtttattatgagaagatttttcgagtttatgcgctctgattttacagacttaatgattgttaagtaagctcattggaagctgtttggttaccgagaatatgcgagaaaattaagatcattgtgctaacattgatttctctctgcttttaaatttactctggtccgatatttaacttcacgaactgtttgtttcgtgtcccctgagaaaattaagaaagtaaagataatcgaaatgaaagagaatcagtagagtatcgaaaattgaacactaatatattaacttctggtgttctttggttctgatctagattttgaaaccgatgctacctgatccagctttctcagcttcatcagtaacctctcagctaacgactcaaccatcagataatacaatcacatcagagaatctcaaacaagctcagaccccttcctctcatggcggatttcatgaaattctcaattcaaaacccagttcttccttggaggctgagataactatcagttttctcaggaaaactaaaactcagctattgagcttatctgaattcgatcctcattcaaagaagcttctggacacaatggttgaaatggttattgatatgatcctccaaacacaaactgaagagaagaaggacataattggagaactcatttctgcgaaaactactcgaattgtttatgtttgcgttttgctcttggtgctggtaatggtggtgattcaaagcttgcttttcaactcatcaacatcaagaaactcttttggtaagccttctcctccaacttgaacttactctataatttctctttcatgtgagagacagacattgatcaattttccaattaaagacacacataagtatatattctatgatataagtttttgaattagaactctgctttttctaaaacatattgaaaatcatatgaatcaaactgattgtgattaattaagagtgttttatatcattttaatccctattaagtggatatgatatgctgtacatgtacttgcacagattttgtttaattttgagtattgttgggcgttgtttgtttaacattgaattttacatattttattttaaattaaatatgtaaggctcaaattaggaatgtcaaatggagcttaataatacacaaatttgcctagaaaaaacattcaaattcttacgcaaattagttattattcaaagtcacttaataagagccaaataatacacaaatttgccttgaaaaaacattcaaattctttgttatgttaaggcaagtttttggcaacgtacacaaacattctggcttggtaaagttaaaagaatactacatagatgataattataatgtgattatggaagtttcaacgttcacaaatactatgtatacatatctcccatgtattattataacaagccactataatgattgatatgtaagacttaataatcatactattattgtgctccagtcacgtacagagtcttattatgattacaatctgaaattaagaatgcgtttggaaagccacaatataattggatttgtgtgtaattagaggtaattacacaatttgacatgtttgtctgacca

SEQ ID NO: 383709 - DNA, 3807 bp, Cannabis indica
tatgtttcatgtgtaggtaaaaggtcaggactaaacaacagtgaatattggagatcatttaagattgtacatatctgaatggtaagatttggagtgttcggatcttcgggacaatatatgttaaattttgttagtcattgggctacacttttgttatattgcattatgttcacatttgaaaaatagattttgggatcatgggttttgtgaatagtttgcatttaaaatgtaaatttatggaagtattttaattattataaagttttaattaaacatgattttatattaaatcctttgattactaaaagttagtacaataattaagaaaatacaataacatgcctaaactagtagggccctcgttatttcaggaagcagccaaatgacgtacccgtgtataagagttatgagtccgtagagaaaggatctaatgaaggcttaaagtttgtgcgttacaaaatggaccaggaaaaggaataatggtcccaaaatcaactccatggccgaattagaaatataggtccatagactttgatttttgctattttatttcatttaataaaatagttttatcgttttctaaatttatcatttatctaatctatttatatttttatctatttaataattataaaaatttaaatatatttattaatgtcttaatcaataaataaatcattatttctattttcttcttaaatttgtccaaacttagtgaaaaacaaagtattattttagatcagttaacttatttgagaattctaattaacttattaaatcaattaatcgagtctacaaggcagtattatctaagaaaatgtcaggactatggaccaatgaaatcaaactcctaataagtagatctgaagtttaccaattaaatgttctaacttattaatttctgctcaatccactatagattcaaaattacacttttaattacatagaacactctatataccaatacaaatacgttatgaattattcattatttcaatagtcaatgatcatctatagacgtattacatcaagtatggacaaatttattattttatctttcgacgtattttatccttaaaacacttaactccttataaatgatatttcggtaaactaatataattactgaaataagagctcttccatttatctcgtttagccaaactttatggaaactatcattttacttataaatagttatagaagctatagattccatagagtatccaagatgtaagtgtgggctagttctataggtaaacgggtaaaaacaagtcaaagaacctgtatagtataattaagctaaagcttaactatctcaagattgagatcaatcgacctaagatcaactataagtgacgttgacttagaaaagatacaatagtaagtttatgatatcttttctactatcaatatcagttcactacgatgtatagtcaatacattactttgctaataccttagaaaattctacttctccaagtgtaagcagaccacatcgttgattatcacgttagtgtaaatctagtgcactgataaatcgtgagactaaatagtttgaagcatataaataatataattatgattatttttcattgtgtagcaacatcataatcatgagtaaatatatgtttgagattttataaattttttatattaaacatataattatgaaagtaacatgtgaaccagacaatataaaatgaattgtgatatttttattaattagtaataaaattatattaaaataggttttattaagagcatcaaaccccaatactctcccccaactactgttcaggtgtcatggaagccaccaacctttggtgatccttaagttaaatgtggatgcagctgtggatgctaataagaaaataaatggagttggaactgttgttcggactcttacgacaacgttattagttgcttatttctaatctattattggtaattttgcatcacataaaatggaggcaagacattttttcacattttaaattgaatccttcaaatacaattgccaattgctcatgtcgagacaaatgcattgttagtttcaaatgctttgcgagcacttttgtctgcaattttttcttttcaagttttaattgtagatatttttaatatatatcctatcttttttttcctattgtgaatattctatatgacaatcgtacaactaatatgtttgctcgcagattggcaaaatttatgttagagtggataaaacttactcttagttgaagaatatatccctctacttatatatattctattattgtaaatgacttattattttaatttataaaagtatgtatttctctaaaagaaaaaagtgacatttaataaaaaaaatctctaaattgtgaccaaaatattgttaaaaaaaaaaaaaaataagttcatttgctctttacaatatgtatagttcaaaatgttgtatctaattaatttatttttagtggttctatagttatcatttgctctattaagtgtattaaagatccattgtaattttttgaataaaagttatcatttgacattaaaaaaaatcataaaaaagcattcacatgcttttataatcaaataatatattatatatatcatcattaattgctctcaaaatattggcaccatcatttactatttacttaattagctagtcttggctgcctacccacgtaaatttcaatatatacttattacaattacaatagtattgttattgagtattggtacccaacaccttatatatatggtgtttgataattagttaataatatttttttaaaatattttcgtaaattatataatacttgatacttaattacactaataatgataatagtggtgtaacaccaaaaaaaaaatattagatatcaataatatttttttaacaattattatataagcattgttattaagtaccagtggtgtctagcactttctcgacatgttgcgttgcgattagctagcgatactccctaaaagctattatattaaattatgtagaatccgatacttagttcaaccaataacaaactggtgcgctttagcatttttcttatcatatttatgaatgttgttccagtgtggttggaactcttggttgctgataacacacgttctgttattatcttcaacacacaattacatttgtctttattcatttcaccatataataatcacatgtaaacaaactcatcctaacttcagtggacctcataataaaaaataagaaaaaaacagaagagtgtcccatactcatagtaattaacttcgtaattttaatttattttagtttttattgataacgttttatatagttttagtttagttcgatcattcccaatctgaacacgcatcaccattattattttttatttatttattattatctctattattttctgaagaagaagaaaaaatagtcccacttgattggaagatattatccatatgagatctattgcgtggagtactattcattcgcacctctacagcttttatttaaatcaaaacaaaacaaatttcagttgagaataatatatttgaaaggcatacactaataaatataattaatattaagttatttattagtacaaggagttgtttttagttctatatgagtaataataatgtttttttaaattttgctaaatgttttgctgtgtgcatgttattactaaactattaaatttgaattttattaaccacttcaggttagctcaagtggtcataggagggtgcgtgtgtgttggaggtcctgggttcgagttccaatgcattgtgtaatatataaacgct

SEQ ID NO: 383710 - DNA, 1784 bp, Cannabis indica
attgttttgagcaatttattattaatagatttatttttttaaaaaaaattaaaccatatcattaaaaatatatattgttgtagtacactatggatagtactaatataatggcctagcatgtgtttcacaccataatgctaactttttacagacaccacatcttttctcatcttgtattattataaatgtcgtacgtacctacattcaatccattatttgttctccaccatgggagctcttctatctctctcttctatatgccatttaatggttctgatccagcttctagccttacttctatcaggttaccactactccgatgcagcagcagcagctgctaataataataataataataaaggtttctcaatcttagaagccacagtggacgaaatccaactggctttcaagcaaaacaaactcacctcaaggaaactcgtagagttctatataaaccgtatccaacggttgaacccactactacacggtgtcatagaagtgaatcccgatgctggtgaactagccgataaggctgactacgagagaaaggttaaggctccagtatcattctccaagctccatggaatacctattctggttaaggataatattgccaccaaggacaagatgaacaccactgcaggctcactggcgttgcttggctcagtcgtgccacgagacgctggagtggtggcaaagctcaagaaagctggggctatcatactgggaaaagccagcttgaccgagtggtctgcttttagagcctatatacccaatggttggagcgccagaggaggccaaggggtggtaagttcttctcattttttatcaatttgaaattgcataccattcctttcactttggaagatttgctgattaatttttttaagaaaacaagaattacttatatgttttattataattagaagcaaattaacatatactgtgcgcatcatcctagtgtctgatcaatccttttgttgaaccatggcttgagatatatgagcttttgttctgagtacgttttctattttgataatggtatgtaaactgatcaagttcaagacttgccttcttcaactcctgttaagatttgcacagtatttaaattgactttttcacaaacaaaacagttactaagaaaacaaaaaaaaatacacataataaaaatttgagtaagttccataaaataacggcttctaaaacacagaaagaactagagaatatggggatttgattaagttactataatttatatatatatatatatataagcagaatccttatgacaaaacggaaactccatgtggatcgagtagtggatcatcaatatcagcagccgcaaattttgcaacagttacattaggaacagagacagatggctctattttatgcccagccagcataaactcggttgtgggcatcaaaccaactattggtctcactagccgagcaggggttgttcccatcacccatagacaagataccgttgggtaagtaagcattagcttacaatttttttattctatgtataaatatattttgtattgaactaaatcatcacttgtggttgaaatagaccaatttgtaggacagtctcggatgccacttatgttcttgatgtcattgctggtgttgataagaatgacaaagcaacatttgagaaatccaagtacattcccaaaggtggctatgcacaatttcttagttcaaatggactcaaaggaaagagactagggattgtaagacatccttactttgaattcaacatttctaaagagatc

SEQ ID NO: 383711 - DNA, 1449 bp, Cannabis indica
tatggggttgccaaaatgaagtgctcctccttttctctatgcttagtctcaatttttccaaggtaactatagtaagcccctaaagcatttaagattgcaattctctcgtatctaacatcagcatagtactcatcaatttctggaagaaagattagacgggcataagcattacaacaaccaaaaattaaaagtaaaagacaacaatgaaaattaagtgcacccgagttatactggagaaatgggaacagaattaacgaacagtaatgagattataagaaaaatagaaagaattctagagccatgtggaataccaggactggacccttcctccaaaatttggcggaactgttcaagttttccttgcttaaagtactccctctgaacaattgaaacgtttagcccataaattgaatattaagtttaatcaacaggtaagcgtcagaatttgaaaatacagaaaattatcaggaaaataataataataataattaaacgaagaagcaagaagtaaccgcgatgatgagccatagatcaagaggggcttgctcggccttgaggatgtcaagaatatcagaagcgtccctcgggagctgatcgagaaccactctcacttcctcctccgagttctgaactggtatgtacactgaagccattatttcccaaattgccaaaccctaatggagtgagtgagcaggagtgagttgaatccgaatcggagtttggatcttcttccttactcccttcctcctattatttttccacaataataatcttcttttctaaacattctaaatggtcaagacttttaggattcttggcgggttttagttaggtttccattctcaatattcaatttcactattttttataaaattaaaatattataaaaaataaaaaaaaaatgtggtatagttcctctaaataaaaaaaaattcttatcattcctaaaaagttgtggactcacaaaagctggtcgtggaaggttttattgtccttctaagaaggatttttaggaaagttagccctccttagatggctagttgttccttctgaaagttagtcccggatagttctaactgactttttcctattcaggaaggtctttcagcgagtgccttgaaccgtgactccagaagttgtcatacttgttcccggatgcacttttacttagcctgacgtggagacctcgctcaaaagagagttagttaacctcgattcttgcagccaccgattttaggatcttgatcctaagcctatatatgacaccctcacttatcacttcaatacgacgatcaaattgagactgaaaaatgaaaagagaaaagattgagaggtagagagagatacagagaagagagagagagagagagagagagagagagagagagagaagaataatatatatatatagagagagagagagagagagtagttggttaggttagttag

SEQ ID NO: 383712 - DNA, 1123 bp, Cannabis indica
tttgtgcaatgaacaattcctggttcatcaaaaaaaaataacgagtacaactgctatatgagaaataagtaaattagagtattatatgctcaaaagaaacatagaaatgtaccctctacttcattaatctcttcatcatcaccaaaggcatctaaaacagaagctgattcatttttcgaatcactaccactaacatcatcatcatcatttaaatcctacaatgacacaattaaagagaaccttagtataaaatgaaagaacatttctcttatttaaatgacataaccatttatatttcatatcaatcaatatatcaatcaaatcaacataataacatcattaatcacatcaaaacatacataaccatgaaattgtttatgctacattcttaattcaagacctcaatcccatcagttggaatcaattcaaagggaaaatcccttatgctccaccagatttggctctttaatgagtacttgtattattgaatatgacatttttcaattcatattttaaaataacaaagctttaaaaaaaaattcaccaaattcaccttcccattatcattagcaatgtcttctccaaaaaaagcttttctccttagccttcctccatgaaattcaacatgttccttcactttctctttttgctcagtttgttgctctgaaacatcatcatcgttatcttcatctgaaacctcagcctcactatccatgactacatgtccttcagtagcttcagctcgatataacttttcattatcttcttttggttctgattcagacttccgaccaaaagtgaaatgaagatcttttctaacttttcatcaactgaatattctgccttctaaagagattttaccagagccacacccaactcaccttccttttctgttaataagtcaagtcaagtgcacagtaatacaaacataggttaaatcacaggacaataaagagagcttcatacctcccatgactatttaataaggttgttacctataaataggtagtgatggcttcagaaaaagaagatgcatttcattccttcagagaaaatcttctagctgccaccttcttctcttcttttcttcttcaatttctaaatccatgagtgatagagtagt

SEQ ID NO: 383713 - DNA, 2309 bp, Cannabis indica
aaataaaataatatgaaaggagaaagtaaaacaaataaaagagaaatatgatttatttttatttttcttttttataatatttaaataattatttttgtgtggaccactaaaaattttccgtgtgtatgcttatgtccatgtcaagagtccaattggcttttaacagaattttttggatgaaagtgtaaaaaccaaaatggaatggaggtttgaagggttttaccactaaaaaatcaaattgtgtggttaatttcacaaatcgcataatttagataattttgccacaaatattcttaatatttaagactttgtattcataattttagaatcaatatttgaatttttaagaccattttaactggttctaagtagagtaaattaattaaataagcaattatactttgggtcgatcctaaatatttgtgagttttaagataaaataatattatttggtcatcatgagagaaatatgtagtgtttttgaaaaacaaaataaagtgtttatattttttataaggaaaaaataattttggagcccctatgttgagtccttaagtagagacttattctgcttttgttcaaaattggactttgcttacacacaataattatatcgtgatattaataaattatcttcaacgaaaataaaatgaaatgcaactaaagataaaaaatttgtatttatttttattgttcaaagatttttttttttaaaaaaaaaaagttaatttcaaaagtggaaaattcatatttattcttaaaataaataaatagtatcactatatatatgacgttgtcaccatagataaagataaggagatatatatataaatatgaggtacataacattatttttcaaggacataataatatgaggttcataataataataataaaaaaatcaataaaagtttgcagacattttagaatatgagtttccacaacaccggaccccacataatgaaatatcagtatcagtgattttcaatagtccaataataccttgaattttcaaaagttttgtcatttccttgatcttggtttcctgtaagtaacctcctgattaattaatcaatatacataagcctaatcaataaaaatattcacaatcacacaattaattattaataaaaagatctcatcgtaatatactatcatgaaaatgatggaggcattatatatatatgtgtgactagctaaactacatacatagtaaagcataatatcaatatataaaaaaatggaaaactcatcatcagtgcttctagtaaagaggcagagatgtagtagtagtaatagtattattagttccaacaacaagaaaatagctaagaaaaatcccataaaaataaagtatatttcgagtcctttgatggttgaagctaaaaacgcttcagagttcagaacaattgttcaagaactcactggtcaatattccaatattgatcaagaagatcatcatcatcatcaatatcatgatgagtatgatcatgataaacttggtggtgaagaagaatttgatgctctttccgctggtaaagacggtggtcataattggtttcatcaaggggatcattatccagtacttctgcaacaaaatgatgaagattacaataatgatccaacggtcatagatgttaatcatgtggctgagaatatttcaagcaatactacaagtactagtactaattcttcttcttcttctcatcatcatcgtgatgatcatgatcatcatcagctgcttttactggaaccatttcaagatgagcaagcttataacattgatcatcactacttgtggagaccagaattacaactttctgataatgaatttcaatctccttgtgtatttgtaggatgagtaatgctatttgtcctcatagaattggcaagtttaccaattctgtagaaactcaaggcatttttggggatagaaaagatgtaagaataatcatgaagagaactagtacttcttaattgttctatcttttctcacttttatttgttttaattattttttgttgccattatgaattaataatatatctattttcagtcaaagctagctagcagtagtgtttgatataattaaagcttatatatcaaattagtcataatatgatgatgatgacttagtgataatataattactaattaaagatcatatggaaaaaattatacatttagaaacctagtatgtgcatgtgtgattgtatgaagagtttcattttggatcccacctcaaactatttaattaattttcatttttcaatgttagttctattcatacaaaataataataataataa

SEQ ID NO: 383714 - DNA, 2613 bp, Cannabis indica
cttactgctgagtttgcttttgcagcttgttaagaatacagttacttaaaaatgaaaagaacactttcaaagaaaatggttgaggtggtgttgtcattggcattggagaggacaatatcgaaacagagaatattgagctgctatgtgtgtaaggtcaagttatttcgctattcactgagcattgttttgtccactattttcttattgttgttctttttagttagtatttgacagtttactcataaattctgtctttgaagtgtttataggcacaatatttagagttagttgtaagctcccgttcctcatgctttgtgtaaaattaccatatttcattcaccattgtcatatgactcatcattgcagtagctagcaatgtatgctctctcgaacccttacgtattgattcgttatccaaaatgaaagctagtattagtgtaaacacatttattagaaaacagagaatgatttgacctttgatatcattaaatgaattgcttgaattcagccaaaaattggagatctctgttgctgtttactcactgtctaaaattagagatctcttagggttatcaatactgaactcatgtttcggtgaaacaatctgaaaaggaaaaaccaattttatacgaggaaaaaactgcaatcgtgtaacagaggtcaggatgttatacagatatactggggacacggtattcatggcattgaatcagcatcgcgtttctatttcggaaagcatccgtctctactgactttgggggaatctgcactgcttgcagggatgattcctgctccagaacttcgttcgccattcagagatcgaagcaggtattttcttgctaattttgttcataattaatgattgtcattgtacttttgctctttgcattagttgtatccttgtgtagtttctgggtggtttcggctgaataaccaaatctggctgtatcacaggggaaaaatcttccaagctagagttttgaaaagaatggtgaatgttgcctttcttgatgttatgacagcacttacagttttgaaacaacctctttcttatgccaatgaacttttcatattaccgtccccttctggagaggtatattctctattttatgtacataaatgttttcagtgtcttgttattacataaaatatgcactgaacacccgtaccaataaatttgcatctgaagtttttaaaacttgaaacaatataaaaaatttcctttatcaatagtcgatagatttctaaattgcgttagagaaaatcttcctatatgatattctagggaacatccatacttacaaagtaggcgaatccagaattatacttcaaaaagtttcaatagacagctttgaaatgaaataatgctaggtataatgttgtttgttctttctataggaaatgagaggatccagatccttatatcaagaaaatacagactcaacattaaagagtgtatgggattgggaaactgagagcagaatatgggaaatatgtgaagagatggaaagatggaccatgaagtttcggtgttcggatcttggattttatccatgaaaaatggtcttaaatttaagggatttttacattaccacctagtgcgtttggaagtaactgtgtaattactaggtagtgtaattactagggtggtaattacactacctagtaattacactacattttaaaatgcaatgtgtatttggatatgaggtggtaattacgtatgaattcctaatatcttgtttggcaaaataattagtaattacatgagaaaataatattttttggtagctaatttttaatatgaaaagtttttagtaattacactagtaattacacagtgtaattacattcaattctcatgagtgtaattacattcaattctcatggggtcatgagaattggagagtgtaattggaacccctcaatttcttccaattacacaattacagtgtaattacatagtcagacaaacatgtcaaattgtgtaattaccttcaattacacacaaatccaattacattgtgcctttccaaacgctaagtttaaaaaataacgttgcccatctaataacatttatctaatttatcttctagtgcttttgagttctatttgcacccaataaaataataaatacaccctattattaaaaagagtaatttgcggcataaatacctaagtctaacttccagttgtaaataaagatcttaacttagctgcatatcactctaaataatttaaagtaaataattatttatgagtaattaaatgtttaaataattaagattatttggaccaataaacacatgtcacatgtacacaagtgtacacagtgacagtgccatgtggtatttaacaattaaaattaaaagattcaaatgtgcaaacagaagtaaacgtatgtaagatagcattgccaccaaaaaaatagataaagggatgaaaatataagagagtttgacaacaaatttctctattttaaattatcagctactataatataatttaaaaaatacttaattaattactaagatgttacaaataagttagaagtaaaaatatatctcgaattatatgatgaaaataattttttttatgtaaaggtaactaatt

SEQ ID NO: 383715 - DNA, 2851 bp, Cannabis indica
tatatgattgtctgtaaaatattgtacaaaagttaaatacaattaaagctttaaaatataaatataatttagtaattataaaaaaatatgaaaaagtaaaacacgaatttaagtccggatatgaaaatggactgacctatttatggtggttctttgcatggcctatttaaggtgtttttccatgccgctcttaaggtgtgtcacccaaggctgaagccgagcagctaatgatagaagtgtatgaaggcttctacggcaaccatgccaagggcaaagcctatctaaaaagatactccgataggggtacttctggccaatagtgatcgaagactcaatggaccacgtaaaaagatgtgacaagtgccaaagattctcaaaaattccaaaagctccacccaatgagctcatgatgatgcagtctccttggcccttcgcagtatcggggatggagctaattggccaacttccaaagggaaaaggaggggtacaatttgctgtagtcgcagtagactacttcactaagtgggcagaagtcttcatgcactcagtatcgtgacttttaaaccctttgtcgacctcaggcacctccgcatggtcaacctctggatcaacatcaaaatgaggctgagtagcctcctctaactcgactccttgtagccaccctgtctacatgggggtcacattgaggcgctctacgataaatttgtttcgttttagctagccatcataggataaccaaaggacatacacgactgtcacatctcctatctgacactcaaaaccatctacatagaagaaataagagaaggtgagcaacttgacaaaactacgtacaaacacattcaggagcaaagcttctgtcacaattaagaaaaattgtgagagtagtatatattttcaaaaataaaataaaataaaaaaatcatacccaatatgagagacttttttagtgttgatccgaaagctcaaattttctttcaacattgacagttttgtcttagtaggacaaatatttatttgaaattatatatttgattagtacaatatttattactataattaactatccttattttatatcttcttttgtttcccttctatgggatccttcaacctccaatacatacaaaccagtagcaaaaccaattcgaatacacaaaccagaaaatagaacacaatataaacgcttggtgatcaaaataaataaatgcaagaaaagtaaaaccaaataagaatacaatcacatctactagtcctactaatgcagatggaacatgagtccgagaagatgagttcaacaaaagttcagagaaagaaaagtactattctccacacctttattaaattatagagtgcttctattgtgcatccaattaaaacaaagtgatgccctctattcatatatttgacatcgagataattttaatttttcttatataacatacgtttaacgaagtaatttaagatattctataaatttttgagaaatattcttaataatttaaagtacagaaaggacagtttaaattatctatttcacaaacgcataaaataaaagaaatacgcgttaatggactatttaaatattgttttcagcgtattaattttttaaaaaattctcaaaaatatacaaaatattttaaataagtgcatcgtacaccattatatataaataatgaaaaaagaataaaattatatcgatttgaatgtacgaaggttgaagagtccatcgaggtgcaggggcaccttaaaataaaataaaagatacgtgttaatgaactatttgaatattattttcaacgtactattttttttaaaattcttataaatatacagaatattttgaataattgcattgtatattattatatataaataaaaaataaataaaactatattgatttgaatgtcgaagcacgaaggtggaagagagtccatgcaggagcaagggggcaccttaaaatttttctaaatcatattgggaaatttgacattatatacttaagaaaagcataaggtgtttgtttcttaaaaaaaatgtaaaaataataccctccaaatatcttaaatcccaacaataccttccccatttcaaacccccactctccctctaactctctcgtttctctctctttcgatctctaactctacaaacccactcccaacaaaaccccaccggaccaccaacgaaaccccaccggaccacgagaagcactcaagccccgactgttcacgagctccgaccgaccaagacaaccgacgaccaagacgatcaatgaccgagaagactcatgatgactcgcgacgacccacgacgacccacgagaagcacccaagacaacccacgaccattgcaccacttccagcgaaacccactcgcttgtttttagttttttctggtttttaacgatgtcgcgaaacattgcgaaatcatgaaacatcactaaatgtctccaattcacaacttttctgtatttttttttctgaattgacgatgtcacgaaacatcgctagatgtcgcgaattattgcgaaatcgtaaaaatatctctgaatgtctccaattcacaatatcgcaaaacacatcgcgaatatcatcgttaaacatcgagaaacatcgctaaatatcgcaaatcattactaaacttcatccctgacattagatttgttctatcattacaaatacatcgctaaatatcgtaaaatctcgcaaaaaacgagagagaccgtgagagaagataacggcgaggtcttgcgaccgaggttctgggtctgtgtgtaggggttctaggtcagggttaacgccagagagagagcagagaaagagagagagagagatggatgtttggttt

SEQ ID NO: 383716 - DNA, 1249 bp, Cannabis indica
taatttttatatttatataagaaaggggtatgttaaaagtctttttagttttagtatatttaactatttataatgtaattctcgtaaaacaatttttttggtatataatgaggattcataaaaatagtttttgaatttgaaataaacactatacatctattatattttataaattgtaatagataaataataaagtagaaacatatccaattatattgatgctataaataattaagtttgtaagtaataacaaattaaagaagatattgaaaatcaaagttgatatgtagaacactatattaaaaatcatttatttttatattaataagaaagactaataattaattttatagccaataacgttaatacgattatacgaataaatatttaaaaagttatatgataactatatattggagtcaaatataggatgggtagtatcaatctcaattccgccctgaatctgtttcgggtatataaaattgttcccctcccctgtcccataacccaccaaagcgagcattcactgccccatttggggtgggtacccacgggtaccaattctcgtgggtcaaatttccatctttatcacgaatactaataggagagattgcctatcagtggggcatacatgtttagccaatccacgaatcgtaatgttaaagttacgactaacatgcatgagagaagagagatgtcttaagaaagctggacaagactttaatgtctggaaaaaagaacacttagagttcgtttagtataccgtattgtattatattgaattgtattttatgtaatatttttatataaaattatatgtaataattacttttatggacgtctaaatattcattattttactataaattaaaatttaataatataatatataatctaatttaatataatacaatacaataaaagctaatacgacgtactaagcatgttcctaattcattatagtaacattatttttcagagctaacacaaaaaataaagaaaatagggatgtttattgaaataccataactagcataagcgtgttaacgtgattttaaacataatgtgcagctcgttgctaatcaacgaggttaatgaaaatcgtaattaattaaaattttgctatttaattaataacttatagtattacatacaaaatacttcgggatcccatttacaaaatactttacaaaagtttgctactcatttacaaaatatttgtcgcctaggaactaacaacaaaaaccct

SEQ ID NO: 383717 - DNA, 1821 bp, Cannabis indica
caacaagtcatatgatatcctgaaaaagatcctagacatctcataagttgtttaaccataagatggacacaaaatgaacctttaaaacagtttctaaagttgatttggaacctaatattgtccatgtttacatccactctcgtctgttcctaatttagaaacaaagataataattctaagccacaaatgtaggttcaaaatagcaaaccttacttggttttagcaaccctctaaagcccagaatgtatatacaaactcatgatttacaaaatcatagctttcaaagtcttcttcaataagtactcgcattgattcatagtataacaaattacaaacttccaaacaacaatcacaccattacccaaaatttcaaacagataaaacatttaatcctacaacataattcaaagtgaagtgttaattatataaccatataagtaatatcccaaaatcacatccttaatatctcttgtttagtacaaaaaaaaaaaaaaaactttccaattgctaaactttctatttagataacaagaagtttaatcattaaaaaccaacaaaaaaactaacctaaagccccagccttgccgctggaacctccagcaccaccatagccataaccatcatacccctctcttctcgatttcttaccactactcccaccaccaccaccgccaccacctaattcatcatcatcgtcatactcctcttcataatactcccttcctctccccttcttcccaaccgatccagccccagcaggaccagacccaacgtgataattataatgagcaggaacaattgctccgcctgcaaccgccgccgcggcaacggaagaaccgtgaccgacgtaatgtcttggcccaaccggcccacccaaaatactcctaacgggaagcaagaagtaaaactccttatccccaatctgaagcagatcctgagaatcgagcttgacgggagggtttccaggtaggtgaagaacaccctcaacgagacagccattctttccgatgacttcgagggcaaaacgacggcgggagaagtcgtagaagatgcgtgcgtgatgacgggatatattcatgccgccaccgagacttgagaggtcgacatcgacgttggatttcttggaattgcggcctaagattatagagtaagtctgcatgtagtactcgaaatcctcgccttgaagcttggcgaaacctgcttcgacgtcgctactggtagcccccattgaattggatcaacaattctattctgagagagaagagaagagagagagagtagtttagagagagaaagtgtaatagtggtaactggtaattggtaaattgggctccattggacctgtttggataccagtaatttcatattctcggacgggatttcgtatgcttctcttcttagtaataacaaatttataaaatgccatgtagggcataaataataaagtataatttttagttactactaaatacatgaatttaatttttgacgataataatacacttgggaccaaataaattatattctaattgagaggttatatctcaatagagttaaagtagaaaaagaaaattaaaaaattaaaaaaatatcaatgtaataataacaataaataatcattaatactatattatattaaaattattttagagtaaatataatgttcatacatgtattataatttgaaataaaataataaattttacataaataaatctacaaaatataaatttactatatgtatatattttattaaaatgtaattattcttatatagagatatactttgttaatacgggacttagaaaatgtataactaat

SEQ ID NO: 383718 - DNA, 3718 bp, Cannabis indica
tttatctcatctcatggcatgccctacaaatggaacatgcacttgcatgtcatacatatacattgtaggagagatttgtttggttttctaacatatattcatgtatcaattatcatgatatatatcgtatatatatatatatatttatacataaatatataaatattgtggcccatgtcatgtgtctttacaatgacctacattttgtggacacatgatcgtatatatactatatatatactatatactattgttagattttaacttttggagaccaaaataaaaaaataaaattatttaataagggctaaactataaattttgagaaaaaaaggaaaaaaaaaagagtagtattttggttttttaggatttagggtaccatggccaccctttactcgtgtgatttttaatatacgtgtaatatattataatgtatattgaaatctctcaaaaattattacattattatttatatatataatattgtaatttttatttgaagtacatagtgaattgtataaatttgattattattattattattattaatttaatgtactctacacttaataatttaatatacttttattttaaaaaattacaaattattcgagcaaactcaactattagatgggaacaaaatatatataaattgtataaaattaaaaattgtgaatccttcaattgaaaaagaagcaatatatagcaaaataaaactattgttaaaaaaagatagtaataaaataacattgagcaaatggcattggcaaatgacaatggtatttatcttactataatttgttaattaagatatataaattatgaaatgaatggaaggtagctttaagtgaaagcatgcgtgcgttataaagctagctaattagaaatgtactatatatattgcatgcggatataattagagatgccatcctttataatatatatcttatatattctattctattctattttattatgaatataatatatttatatatatcactgttagaatttgaggtagttaagataggaggagtagtctattcatcttatatatagtattttatttccacatattacagcatctccaatgaaaaataacatttataattattaaaatacacacatcatcctaaaatattattttttattctctctcatgtacatatataaaatttgtcatattttcttagaaaaaaaaaaagagaatttctaaaaggcactagtgatgcctagcaccccctttagtgtcatattgttattagtgtaattaagtatcagatcttatataacttaaggaaatagtttttaaggaatatcactaattaatcgtaagacatcacttatagaaggtgctaggcaatattggtgcccaatatcaacactctaaaaaaaattacttcaatggttgacaactctaaaagttgtgcaccatggtcccacatcaaattaaattaacgactttttagataaaaaatgacttttttctaataaaaaaattaaaaaaaaataaatcatgtgaccattgtctatattgaacaatacttcacataaaattagtcttaaaaattagaccacctacatatatgtgggaagaccactctaatgggaacgtgggactatttctaataattaccaaactatttctttcattttctttttcttttgttcttttttcatttttagggtttggaaagaaaagaagcatatttggtgtattagcacgcggctagctatatagctttggaaatgtgaatcttttatctctttgcttttgctttattgggttgttttgttctttgtaataaaatgatgctttaaccctactacgtacctcctcatgatcttcttctttttccaaccacaaatattatgcaaaatatatgatgcatgccaatattgtattgttttgttatgatttccatgttttgtcactttttaggctaaaaggcttcttcttcttcttcttattcttatgtattattattaggaggagtgataattaaaatctgttattataatctcttagtcaactttcacgttcgaaattatatgttagaatattttttatagcgatattcgttatacctataatgtcatccctctaaatttttaaaaaatttcgaataatttaaagtactgaaaacacagttcttgatattccaatttaccacacgtgttcaaaaaattttaaacttatttttcggcactgtaaactgttcgaaatttttaaaaattttacaaagatgatgttgcaactaagacgagagattcgatatttaattatagagaaatgctaaagggggcaccataaggtgccaagcaccacatatttaatattgttagtgtaaattaatattgagtcccacacgatttaatttaataaataatataagaaaccgctaactaatcgtaacgcaccacatcagtatggtgcgcttttaattaatccaataataatataatacgttgtggtggtgtttaatagtaccactaatgctttttttttttttggataattacataaaatattaatttttgtaaaaaatttacatttttacatttcaagtttttttttttattttttttttacatttttacggtattctataaaaacataaaaaaacttcatgaaaataacaacaagacaaaataaacataatatactaataacaaaaaattaacaataaaataacaagaatacaacataaaaatacacaaaaagaccgtattttatgtaaataaaatcttaaaaaaccgtaaaaatattaaaagctctatacaaaccgtacttttgtaattctttttttgttgttttgtattttttttttaaataatctctttttttagcaattataattagagaaagactaaagggcagtaccatctaacactgtcatttattacaataatatttagtgtcttataatttaatttaataattatatattatacaaaattactaatcaaccattactaaacatcactgaaacctaataatatattttctttttgtcatcatagcttaattattagaatcttgattaagtgtacatataccatttcctttcttccattaacggttattgacttgacagttatgacagttaattatgttcgtttctttacccaaaagttactaaagaacacttttattattaattagttaaattatatttatcttaatgcatcatggagtgtactaatggaaatagaatcatattattgcttcaattatatttaattcacatataaaattacttcttaacttttagtgtttgacattaattattattactagataaaaatgaattaaggtgcttgttcataataaattgtcgttttgtttctttgttattttctctcaaatttcgagtaagagagctgataattcagtccaataaatattcattattcagtaagacaaagggaaaaaatacaaataaaaaagtgaaataggtgagaagttagggcacaagatttaaaactctttctaatcaaattaagtactagtgaaatgtattgtatatatatttatctccacatatacttatactgtcttatactacaaatttttttaattttaatcacaacaaaatttattatttaaagtaaaaaaattgtgactaattgtaaattattatttctatatcataactaaaaaatttgtaattaaaagtatgagttacaaaaattacaatttgttgtgactaaatgt

SEQ ID NO: 383719 - DNA, 3726 bp, Cannabis indica
gagagagagagagagagagtacttacatagcttaaaagatcttcagaatactcttcttggctgaaataattatttttcttcccggtaattatttctaaaagtaacacaccaaaactaaatacatcagatttgattgaaaaccgtccatgcatagcgtattctggagccatgtatccactacataatatacagcatataaataaataattagtataaatatatattacttgttactttaattaggtgagaatattgatatttagaaattggatatacagtacacaaaatgataataagctaaaactagaaggaaactaattttagagaagataggatggttggtcaggataacataagcattttaaaggtcttgaacaaaaaaaataactttgaaagagtttttttgtttttgatttttaaaaatacacatacaaatatcaaaaagattgaaactaggctttctttgaagaaagaaaacaaagagagaaacagagtatgtttcacaaaacagagacttaaaaaaatgcagagaaaagtcttacagctttattgatgagaagatgtatttatacacatcaattacaatcagtttagtcaaataaatgacaacaagaaagctaacataaataactaccctaactaactctatccaactgacatttcagttagttggttatcatcccccctcaaacggaaaggggaagataccactttgagtttggctttaaggtagtgaaaacgatccttgggcagagatttcgtaagaatatcagctacttgatcaaccgaaggcacatatctaactgaaagttcattgttgataatctgatcacgaacaaagtgttgatcgatttcaatgtgcttacacctagcatgaaacacagggttggcggcaagggcaacagccccttgattatcaacccaaattatgcgagtggcagcagaatgaatttgtagctcagtaaagagagagtgcaaccattttgattcagccgctgtattagcaagagcacgaaactcagactcggttgaagaacgtgtaacaacatgttgcttctttgctgaccaaaagagcaaattaggtccaaggaagacagcataactacctgtagatctacggtcatcaaggcaacttgcccaatcagcatttgagtaagcttcaatggataagtaagtagctggtgaaaggaatagaccatgagaaattgttccctttaggtaccgaaggaaccttttacaagcctctgcacagttgtaggagcatgaatgaactatgataatttgttgataataaaggctacatcaggtcttataagtgtcaaatactgggcacccaaagtacttctatagaaagttttatcctcaaaaggaagaccctctgttagagacaatttatgtgtactgcttgttggactggtgcacgattttatcccatccaaatgaacttttaccaacaaaactgagatgtacttgctttgagacaagtacatacctgttgtgtttctatgaatttctaccccaagaaagtagtgaacctcacccatgtcttttagagagaaccgattattgagcttgtcaataaattgctgaataagaatagcaatatgatttgagtgtctcctgtcccatagataaacaaagatgtatccgatttagattctttgaaaccctaactaaacaaggtcattttcaatttgtcattccaagcccttggtgcttgttttaacccatatatagctttgttcagtttacacacatgagtagaaaattgagggtcttcaaaacctttaggctgagtcatatacacggtttcactcagtttaccatgaagaaaagcattagaccaaccaacatcatctccaaagtaggcacagtttgagcaataaaaacctgaggatcatagtcgagagactattctataagataaacttgtggatgagcagtagaagacttaggagtgacccaattacgattgaacctatagtgacaagtcacagaagtatgcccaaactgcatgcaaacttggcacaatggtctgttattgttgacaggcctaggaccatttgttcgattgggaaatcttggcatattgtcagatccttaccctctgccagcaccattataaggtatatatgtgccatttcttgtgcccattgcaagattggcagccatttttgatgaaagatccagaatagttgagtgcctctccaatcttgattcatgagacattaatagagcttggacttcttcgagagagagagattctcactttgagaagtgatgttggacacaaccgaatcaaactcggcaccaagcccattaagcagatgcagaataagatcaaagtcattaacagggtgcccagctatgccagagaatcacaaatagctttgattttatcaacataatcggagatggtaagattacctttctgcagatttgtgagttggcctttgagttgaagaagtcttgccttcgactaacttgaaaatttctgttctaaggcattccaggcagaatttgaggtttgataacaagcaaccgttgccaaaattccctctgtcatcgacgaacggagccatgacaacaagagttgatctttacgccgccattgcaagaactgaggattggtgctgccattgacaagttgctcaggaagagccttgttgctgagaagaagttcatcaagatcatggccaataactgtgggaatgacttgcgatttccaagatagaaaatttgtacgatcaagtttcaaggtgagtgaagctgtgagagagtttgaaaacgggttccatggttgtgccgtcgaggaggactgagctggcacaatagtaggatcggagcctctagcctgagacgagtggtcaccggaggaagccattgacgctagtcaagggctctgataccatgaagaaataaaataaagagagaaacagagtatgtttcataaaatagagacttagaaaaatgcagaaaagtcttacagctttattgatgagaagatgtatttatacacatcaattacaatcagtttagtcaactaaaattacaacaagaaagctaacggaaataactaccctaactaactctatccaactgacatttcagttagttggttatcattcttatttaagaatatcttttgaactttacttaaaacaaaaatttagcaacatttggggctttgggccccacgcaccagctgcctcacccttaagtcgagcatgtcattgtgtttgctttcaggatgtcttggtcttgatatactcaacattaactttatcaagtgtagtgacgcatttgtgattctagcattaagtgtgacgtgacatcaaatccttgatgatgcggttgttctcatgtggcaacgtcattgggagaatgattggatagttgtgattttctgttcctaacttttaggagatatgacaaattctgtcaagcagtatatttccttgtattccgtgtgtgtaataaaaggcatagtgagcccgaagagagagagagagagagagagagaaatgcaatttcctttaattttgactttttccttcaaatgaaaagaattaacctaatctaatagcttgctgaataaaatggacaggtgtccccaccctaggcagccaccaaatcacttagcaacaaattaccaatttgccctttaagttaacaacttaggtgtttcaaaagctaggggtaaaatggtcaaattccataaccccg

SEQ ID NO: 383720 - DNA, 828 bp, Cannabis indica
aaaatatataaaaatgacaacagcttctttgagctttatctgatgtggataataagctggcagtgactcttccctccattgaagctgacagatatattatcttattattatattttaataatatcccaaagacgttacgtcgtgactgaccttatcaaaattataataatttaatttgataagactttatgaggcgcacgtgttacgtgcgtgactgccatgccagccccccaccatatgtataaatctgcgattccgcatctcacgtgggcttttgcacgactccccatttatttaaatcatgtatttatttaattaaatcaattaaatcaggaaaaggtatttgttaaagtactatagtcggtccgactgaatagctcagttgaccgttgactgagaagtagcaacttgtagcgatgtatcgtgtgataggagtgagtgagtagaaggaggaagagcctagctagctagcccacaaatagacttactaaaccaaactattgttaattagctttaattaaatataattaagttgaggcagttggaagggaagttggtagttaatgcttaattaatggaatcatcatggattcttgcacgggggttaactgttcacttgtattctaattagtttttcctttttggcttaacttattttagttagttagtggaacaattatggtatttatttttatgttattattattattattatttttttgtatgtatgttctacctcgtaattttaagaaatttttacatcaaaaatctaatttactcaatttattacaaaaaaaaaactcctacacgcttacatcatcattttta

SEQ ID NO: 383721 - DNA, 4514 bp, Cannabis indica
aaaaaaaaataaaagtccgaatcattgaaagcgaaagcgcgtcacttcaatccacttcttcttctcaattgaaatttattatataatagtagtagtggcattttctgtaaatccttcataaaacatctccaatttggtaaaaacacaaattcaacacaatttttattagtgatatatattagacgacaatcccaatctcaatctgattgctgctgtcatatgctgtaactgttccacccacataacaatataaacataatatctctctgactctctctcataatctaatttgttcttcacaaatttattctcttgatttgcaattttttttttcttgaaagatcaaagctctattcactcaactctaatggaggatcgtaaggaggttcgtctttctttctcttttttcatcgaactttatggataaatgagtagcgattctttgactatctttttaggttttcgaagtaattgtagtggatagtagagatttgaaatggtttaatggtgaagtagtggagactgcgattgagtattggttgagctagttaatattctcttgcattactcagatactgtataaagtttcaattttcacttcttttctttgtcaaccattacaaattttttttagagattttagtgcatggcttttcaatttttttttcttcaaatgtgtctttgatcaatgggttggccaaaatggaaaattttcaaagatctgtttaccacttcatacatgttattaatcacttttgttttttatttcgttatcactggtctgggcaaaattggattcctcggcttttcttttacctttagtcagaaaacaagtacttgttcaactgtttctgtcatgggaaacagactgttttttttttctttctctgtttctctttttttcatctttattcaaggagggtaataattcatttgtggaccattcaatatataatgaggacacttttcatttttcaaagttataaaacggaattgtgaagagcagtctttgatgaaagttggaaagataattatattttataaaaaaggtgataatttagacccaactgttccatttgctacatgaactggaccgttgctactttttcttattaagtttgccaagaagggtcatttcaatttacggtggtatgttaagggatgttatttattgggggagttttttgctgccttgctagcttaataggagtaaggagtttgtgctaagttactccttattttttatttagtggttaataggtagaagcccatattaaattatgccaataacaattctcattcttttatacctcttgtatgtttgagtagattgaacttttagaactataataattttagagaaatgcttaaaagcactagtaatatttagtactggacatcgatttaataattattatagaatatcactatatctatttacaatgccactcatggtgccctttatcatttcataatttataatacgaagaaaaatgagcggtttgaattttttttaataaaataaatgatattgtctacttgtcaactatttgaatttagaatttaatagcacttgttaaaaaagtcaacacaggggtgcataatgcattctattcagataatcaaagacttttatcttgaaaacctcatcatcctatttttgtggttggtttctcgatatgatatttttattttggaccaatgcgttcactcttttaatgcttcattaaaagatgaagcaataattttgtacttttaattatatttgtttatgatttccccaagaacttcttttgtagaggaatgttgattgcttgttattcactgaatgttgttaccttaaaagatttcaatgtccaatacagaagaacgcaccatggctatcagtgccccagtttggggactgggaccagaagggtggtcaaatgcctgattactctctggatttctcgaaaatcagggaaatgaggaagcaaaacaagagggatgtgtcccgagcaagtattggaaatgaggaagagctcattgccccaactaccaccaccagtacaaacacttctcacagtgatcaccaccaccctcattaccacgagaaccctcactctccatctgtaagattccttgtctttgcatgctttgtttcttgttttgctttcggtatttctttatatatatataataatatatatactgtggtagttgctttttgttattaattaaaggaagttgtattatgaacccgtattaatgatggtggcatgcatgtggttgtagggtggtgatgactaaactatatctttaaaaaaaagacaatcttaaagtgggtgggtcatattcttactgattattattacttacctttttagtacaactctaatcaacttggctggttgcattagtactataatataccctggtcaaataatattataccttcccaggaaaattctatggcaaatatgtaatacaagattttagggtgctgactgctgagcacgtacctcttcagttatttaccatgtcaaagtttgaaattaacaattttcttttattaatagtaagatgtcttgtggaaagtcttttgagaaaaggtcaggtcaagccatgcattttttaggataatactgtaatggggttggggtttgccgattctgttattatagataatagtcttaaggaaagtatcaacatccttctagttttaggacatgtgtttcagatccaagtgcgttaattatgtggttagaaacaagaaaagatgttggatggttggtagttgtagatgtttattacctgagccacacgttagttcaagtggtaatttagtgtagatgttttgggccacatgatcatatgtgtctcaataatgctatgaagccaaatcaagaaaacagagaaaggatattctgtatgtgcaacagaaatgcaataaaatattttgaaaacaaaaatgtcctaattaaataatagttaggaataatatttagatacacctataggttgcgcccaattctatgtggtgcacatgcaccagctgttttagacctttataatttggtccctagctggttaaatataattatatgagccaacttattctctaaatataataaagataagtacaactgaaaaggatacaggaagtagagttctaacaatcttttagctcacaaaaattagtcttgtaattaattttaaatattaatgctttgaagaggtactttattattttcagttgtgtataccttataggacataactattaatgaatattgaccggaaatatgcaaaataataataaatgttttattgcttttatttataatgggtgagataatatttgtattctgataaaatatttggtgttgctatcaaatcgcagttggtactctttgaatttattacgtatcaaaagtttgaattgatgtggtcctcataataaatggtcttatttcatttttccttaaacagccaagacgcagttttttcagctacttcaattgttgtgtgaaagcttaaaaccaaccacatgaaaatgtgaagctgtgaaagattactttttcatttcctgttgtatgtttttctccttttcattttaatttattttggaaaaaagaaaaaaaaaagaacaaaatcgataaaattccaaaaaacaaaccttgttttacctatcagtaatattttcccacaatatttatgtcctttaatcagttgaagatagatttggtaatgtattgatgtgtttgctggcgctatatagcgttatagcatatatataatattaggcatgtaaattattcagacttttgagcagaaaataagatgttttccgaatatttggtgctaatgctaagcaagaaatcagaaatgtaatgtcaaacccagctgaaggaatattgtgggtggtgtaattgtattatactagtactaatactattaggactaaatacaaaatgaagtgtaacaaagatatctacctgattcgggaaaaaaagaaactgcagtccaaaatttactgtcaaattatgtaacagagattatctttctccattaatattaatactgtttctcctcaattaataataacacttttaagtaattgataatattagaaattagttgaaaaattgtatttaaggatccgattggtttaccgtttcacattgtattgtattagaaagtattatatttaattgtattatacgtgatatttttatatagtatattatgaatgttattaatttgtatatgtatataaatatttaatattttaatataaatcaatttaatttaatattaaataaaaatataatatatattacacaatttaatattatactatacaatataatctaatactaagggttattttggcatagctgtgctgaaaagtaggactaaatatcgggcgggtttaccgggtttcaggttggcggatttcgggttcatgggtttcgggttcaaaaaattgaaaccgaacccggacccgattagggcacgggttggcgggttgg

SEQ ID NO: 383722 - DNA, 809 bp, Cannabis indica
ataaaatagaattttctggctttggttcccctcatacctgacccctctctctctcttaaactttcttgcttttcaattttgattgttgggtgaaattgcttggatttggccaaaattgaagcttgttgtgggtggatctttgagcttgcttttggtgtaattttgaggtagttttacagctttgattttaagttattgttgctgaattttattgattaaaagcgtgaaataaatggagttgattttaggatgcatgttagagatcatttgttgatttgagcatgatattacttgagtctttggaatttatgtatgattgagccttggatgaattctagggtattcttctagtgaaattcttggctgtaaatatagtttgtttgttaaaaattgatgatttgagctagcttgtaagttctagctcaagagcttgaaattggggtttaagtaattaatatgcaatctgaaattgaggtttgatattgaaatttaatgcatgaaatgttgctcttagctacctgtatggttattataaagtctatggggtgatttgatggtttggttgtgaaatgggatgttttaattgagctttgggggctgaaattcgtgttcttgttgctggttttctcggtttgaaacccaggttccgcagcatggttttatcatgtcgcggcccacccctttttgtggaacctgggaattggttccaggtgtcgcaacatggattttgcatgtcgcggcccgccctctattggaaatattttaccaagatctatatttactaccatgtatgtttcattaacatccta

SEQ ID NO: 383723 - DNA, 1473 bp, Cannabis indica
ttttatcgttttactgttttaatcattttttaagtgttttcatactctattcatccctgtttttcctcgattattgtttgtgattttttattcttgtcattgctaattatttaattatttaaaatttagttaatttgattacatttagttataattttctcataaaatgttcgtactaaaatctgacatgaaatttgttatattaaaaaatgacggaaattaagcttaatttattattttatatcttttttaaaagaaatatcaagtttaaattttcatttaatggtctgatctataacttttacaacacaaaaatttaatatatagtatttatcttctaaaaagtagaattctctctaatttttcattaaattgaaattgacacctaatttaataaaactttatataggagaaatgttaaaaagtattattggtgcattgctattagtctaaatttcgaattgcatacataatttaatttaatataattattataaaatatcggtagatatttataaggcattatctctaagtaatgctagtctaaataccattgatacttaataataataatattcctttaaatataactttacttggatttttcttttattattttttgaaaaacatatagttgttggatgtctataaacataattgatcatgatgattacagaattctcaactattttctataaattctcttttatcttgtgctgacttaataaaatggtcccaaatttaactctatttaatctgaccataatgaaatcaaaactaacaggctgttataatcaaaaccaattttttgttcaagagcctagaacatccatacatgtatattatttggcattgggtactaagtaaaagcactcacaacatataaattatgatagctaataatgtaaaatttagctcaaaaattttaaaatacctttccatcaactactttataataaataaataaataacaaatagatttacctaattaattgtattcattccctaatttcattttagcttttattattattttttcgttagatataaataaaatatttaaattatgtaagggaaaaaaatgtaaaaaagttgattaaattaagtggagaaatttttgtttagttcttttcaaattcaacattcttggactaatgaagaatatttttcacctatttttcataaattatttttctaattttataaatttctacaaatatcccctactaaaggaaagtaattttctttttttttttttggtacggaattgtcaatatataaagggaaatttgattttctatacttatatatacctaatattttatttctaaactaatacatatcatcattgaaaatatatgactactttatctaaaacccaaaaatacccctctcaaattttccatattttttttagtgcaaaaacataaaaaaaaaaaaaaaaattggtagtccgatggtagtccgatggtg

SEQ ID NO: 383724 - DNA, 2132 bp, Cannabis indica
atatatatcattaaaaattacaataatacccaatttaataaattgacatatatcatcatcatcatcatcatcctcatcacacaataagaggtccttatatataagacccaaacagggatggagcgcctaataataataataatatcacataccccaataagtgatctcttcaaccgatctctctatacaaatacaagtaattataccacacacacatatttatatatattgtaagtttgtaaacccccctaaataaataaatatagtttaatatatataatgaatgaattaattattgcaagtatatttatggggttcagctagagtttgagcctccccatcttgcaaacaattaattggaggaatagtaagagtctgttgagtaccataagcattccaacaaaaggggtcttcaagcaactgtccctcgtgtggcaacaactcaacatcggacatagtgatgttagtgcaagccacagcatcactacaagcaaagtgaattggggttgtccgtacgtcgtatgtacctttaatggttcgatattggatgtcgtttacgtacacagctgaggtttgattaaaacaatcagcctttgataaacagtagtattggtcaacattgatgcagtttctcacattctccatttcaatattctcgaatagtatgttactcactgaacccgtaccaccttgccatgtcttgattcttaggccattgtctgattctcttatcattacgtttcgaactgatatgtttgatacacatgcttgtgagttatgcactcctaagctcccaatgctataaatttataacaacaacaacaacaaaataaataaatatttgtatgtatgtaatgctatttaaggaaatttacataaaacatctaaactcacactttttttttaaagaaaaaacaaagttatttttatgttacagaaacaacggttcttatttttgtaaaaaaaaaatagaaaacagtagatctttaaaaatatacatttttgaggatttatgaaataatccctattatttattgaaaaaaataactaataattagttgattattttttaaaaattttaatatattattatttttttttatattggtgttataaatagctgtcatggattgagaattttgttggttaattagaaaaaatctcatgtatatgataatatgatattatggtttttttaagagtatactacacttaaattgatgtagacattcttcccacttaaaaataatataattagtttgtatgataagtgtgtgcaattatttgagtgtatatatgcttataatattattctttttttttctttttaaattaagttatatatattatttttaaataataaaatattgttttcgaaatttaatttgatttctggaaagaaaaaaagttaaaagaaaattatttttttcaaaaaaaaaatgtataattattcttttatatgttttaataccaaaaaattattatatgtactgtattaattaataaaacaaaaatctaatttttatcatttgatgaaaacaactaagtgtttggttttagttgttttcatcaacttataaaatagatgaaaataataaaatatagttttgatttttcttttgtgaatgtttttataaaattatattcaaactgtataaaaaatataacttaataaatatcatagaatagatatttcaatatacatgaaagtataaattgattttcaacaaaatgagtacgcacctaatccccgtgacttgggccacaggtcacaccttcaatgtccacgtcacgagcatccagtaccaatagaaatgcagtcatcacctttggtaattaattaataaataaaaatgtaattaattaatgaatgaattgaaaaagacaagactaaataaatggtagtgttgtaatagtataggggaggtaactataccattggctatcattgagttgtatatcccccaccgatttagtattctctatgtggatcccatcagtgtttgggcttagctttggtgatgaaatggatatcccatcaattagcacaccttcacaccccatcgaatttcatgtgaaacattggactgttttttatgctagcccttttacaccaagttgtgctcatgaag

SEQ ID NO: 383725 - DNA, 1527 bp, Cannabis indica
  modified_base (37)..(37): a, c, t, g, unknown or other
caaaaacatgacatttatgaatgatttcatgtagagngttttgctagcttttaccagtgttgtgtccaccaaggtggctgctacttccaccgattttcgcggtggcataagtaacaggattattcaacataggctgagattgagactgagactgagatatcgcggggtggtcatgatgaaattcatcaggccactcatcaaacatcaaaaactcggaaaattgatcgaaattggagtcatcaacattgtcatcattctcaggagagtgatccatatgtgatttaataaacttagtgttggtactagcactactagtacaagtgaacttggttagctcttgtcttgtatagatatataatgttactaatgtttgttccatgaaggtgggttcatagagagcttcctatgtaagaataaggaaacttcaaatataatttcttagtaagtatatgaagtgccacttacccccaaaaaataaagatcgacaaagatgggagtggccgagtggggtcatgtgagaaagactttgttttaaaacaaaagacctaatgatgttatgtgatatgtgactcaatttatacactaatcatctcttttgggtccgtgcttagaccaaccccttcataacggagaagaatacaagtcaaaagtgatgctgactattttcttttttctttgttggctaacatttgtacacatatttataggtctaaatcctcttacatgacccaattcgtaattaagtattaggcgtatattttaattaaaggggttttttatttttatactttaaaataatatttttttgtatttttatgaaattttacacagaaatttctatagcaattaacggattaatttaaattgtaactaaaatccgcataacaatccacgtagaaattacatgcgaaaaaaaccaataaaacaacccaacacctaaattttaaaaaaatatatatatactatataaaataatttcccttaattatattataattcggcctatccgatcaatttaggtggtcatagataatctagtctagtaatattatactttgtctcacaaagagaagtcctactttcgaatctctactcaactggtttcaaatttcaattaattcaataattagatttttgtataaaaaagtctaataattaaacaaatagttctcagccaatctttttttctttcatattatatataaaatgaaaccacttatgctaaacttttataccacttatgtttctagagattcaactttagtttctgatgtcctttttttttttctcatttacattttttagataattaataaccttaattatctataaaatgattatggaccgaacaaaattcatatccttgcaaatttttctatgatttttgttttaaaccaccaatatgtatccatgtttagttggaaaattttggtacaacaatcttatttggtgttttaattaatgaataagatgtagggctgagcatcggtcggtttggtcggttttttttagttataaaaattacca

SEQ ID NO: 383726 - DNA, 3324 bp, Cannabis indica
ccaaggaaagtgtgtgggctcagggtgtttgtgtgggttccttgacttacaaaggtctttgtgtggtttgtctatcatctgctcataagtaggcccaacatgggccataaatgtagttatcactcccccatctctttgtgaaggagggggtctggaagagtatttttttaatatatcttcgtcagtgtcttgtgcatttttctttcctttgttgtgtctccacaaggctcgaggggataccgaccttgttcttctttccctatgagtcacctcggtgttgcggattacctctgtaacgtcgtttatcttgatacccgttggcctcttttgtccattgtctacaactttcaaattttttccataaacagtacctgaggtattttcatgtgttctgattaccttccttttgagtttgccattctcattggcctttcaagttgtgttgggatgtcccccaggtcctgtccctttcctttgttctgtccttgtttgccgttgctctggatcggagatctgcccgtcgacggtcgtcggacacttctgtcttctctaaagaaattgagctgattccttgtgttgaaacagctgataacggcagattctgcccttatccacgggccgtaagctgggactgcagccccttccggagggtacgcgaaagaggtttctctaacacaagtgttcttatcatgtcctatgaagccacagttgtagcaaaatttaggaagacggaagtattggaattgaatccattcttttcttcctcttagaatatccaggaagaatccaggcgataactggtgttgagtagaaagttctacttgaaacttcaaaaatcctcttctcgctagagttctttgatccattataacaagcccttgtattcccctgcctttgctgctattctgggggtattcatcgcgttgagatagggagttggaagccccgtcgctctaacccagaaaattgccttactcatgtcagcattgctccaatctccctgttctggccattcttgtattatcagtaacttcccattgatcagccatggtctattttccaatatggagacataatcctcctctttgtcgaaaaagataccccataaaccaggttttaaagttttaaaacgctagcgtccctgtaatttccatttctgttccaggatgtccttcagacgtgttcttgagacccctttcccttcaaaaaagcttgccagaacccctgttcgtgtgatctctgcgtttatctcaaaatctggttccaaatccagggacattaattgaagaaagttttgtcccagctcttctattccttcattcttttctccttctcctaccgcattagtgacttcagtagcttctgttgcctcagaaccctatttttcttttaaggctggcccctcctcaaccacctgtggtgtttgttgaatgtcttctactgaatcttcaatcattgtgtcattaatgatttcatcttgtcccgcacgatttactgtattctccatcctcaagcgaagttggtgaagaatatcgaatgaaataaatgctataatgaatagcccactttcactcagaactctcaaaactaaagtaaaaataactgagcagtaaatattgtaaacagtagtgaacagtagatgttatgaaaggagaatcacttttcacacctaaaactgaacgaagcaaaaggaacaaggaaaagttcaagaaattcccttggattcactgaaaagtcttgcactttaaacaaccatcgtgtcaattggaaactccaattctctcaacagagagtctttggaattaaataacaaatcccacttgaaggaaaagcttagagagagaattttattttctgttgttcctttccccttaaaaatacatatatataatttatataacataaaaatgtacctagtgctagctggctaatgatcagtcagtattgtttactttggttgtggtgattgggtgtgctggtttacagtcaatttcaattatgtagcgttttcttctaattttaagttaagtgaagataccaaagtttcgtaatttattgttaaaatatataatttattttataaattttttactttaatagtttataaaaaattgatgtaaatttaatctggtagaaaatttttattacaataaatacactatttttaaaagtatttttgagtggttttaataatttattattaaattataaatttttgacatttattttttattattttgtatattaaattataataaaataatgataaagtaattattttttttttaataaaatattaattatatttaaattttacaataaattttgtaattgtacattaaattatcatactaaagtttgatgtaaatatatcacaaaatcaattataataaaataaatttttcccattaaagatgatttattttttttttttttgactaagctaattagtttgacaatccatatcacatgaaaatcttatactcttcataagaatatatacctttttctacttattttaagtatcaaacttttctgttaatcatgatcatgttggagatggtggctattgagaaagttttgggaatgatgaaaaaaaaaactaatattttgtaatatatataactgcgaagtttattttgatattttaaaaatctcactaacttctttaataaattcattatttttttcatataaaataatataaataattgatagtatgtccttacggtttttcggtcacttgtaactcaccatgtttcttagatcttgcctgtgaattttcttagagggcatctacgcatgtggaactgaaaataaataataactttaagaagttatcttgttagtaatttgtttagacacaacatttttgaactaaaaaactatttttattcatcaattttgtctttaatatgtgtttttgctacgcaacatacatctttggagtagtaaaagcttacaaatcaaagtgtacttttgaaatcacattttggctacttctgtgtggcataccgcgcaagggccatcaatgaagagtgattatcatatagctcttcaatgtttggctacctctacagggcatatagtgcaaaggctatcactgaagagtgatggagacttagctcttttctaaattcctctacggtgaagcattataggaaccactactgaagagtagtgttttgtaaaagatggtcagtgagagtacatacttaccgagatgttctccattccattgtcctagtaggagagctaactctatgttctcattgtacttgcccggcttgaatgcacctttacttgttatcttgtaacttggtg

SEQ ID NO: 383727 - DNA, 3003 bp, Cannabis indica
gaatgagatactctctttcattctcctttagaaaccagcataaactagtataggtattgagtcccttatttatgtgtgtataaatatttgtatgtaataaaaaatatgggcttttgtatctttgtgtgttggcatatttttctgtcattttgtttaattgggtgattaaatttcagttttgattattatattggattctgcctataaactgtttgatataaagcttgttaaaacaaatttaaacctaccatgtctcttaacttgtgaatatagattatgttttggccattttggggtagttaaggatacatttttccttcagtttgtaacacagagagctgtagagagagccattgagagagcttttctgtagaaaaccttgtgaaaaagagagaacacattgttctgtcatttcctcagtgtgtatttagaggctcatatttcatactcatgttagacatttcattcaaatacaatcttggtggagtcaagaatcgcgctagccaacaaacagataggtttagaatgaattgggtaaacaggttcttccacaggtgcaatggtgctctctttagttgattgcatttagttcataggttatcttataatttttttgatttgaaatatatgtagctgcatttgtttactttttttctacgcataattaagaatttgaacgttcttagttttatatgatacctttagtgtacatgctcaagtttaacttaactcagttttatatgaggcttgaaattctcaaattatttctatatatggactccactatgattttgcttgtattctcttgtatatttgtatttcatatttggcacctcttaggattgagaataagataaaaatactgctagtattagatattttatttacttttatcatttctttttggaacttggaattggagaattcaattttttttccccaagtgaaacaagatatcaatattctggacctaaaacatatatgtgtgtagtgtagaacaataaaaataggttagattttctttgtttcatacatttaaccatttgtactgcgaccgcgttatttataattgaaacattacaatatgaatatgtgttaacaatgaatcatcgagattttgttctaatcttgatagaaatatttgaaatgcaagggccagggccaaagaaactttcataagttattttatgtgaatcccatttgtatggttttgagtttgggataattctacatcttagtgttgataaagtgttggtgacaaagaaaatctaagttatgttttagagaattcttaaagattttattatttgaaatatagtgattgattttctattgagaattgtaataatataatgatgttttagagaattcctaaagattttatttttggtatgtagaaaatgtctatgtgttttccatctaccccgaagaagatggcatcgacagtgggatgctttctcaccggtgctgcactttttgcttatggtcttcatctgtcttacgtaaatgttgctcctcaacaagcccgaacaaaagctcgaagtgattttgtaagagaacggcttaaaaagaaatatggcgaacattaaactcgttctcttttttgtttgttcagaataaatcatttgacatttgaatgctgttacttacaccctcaaaattcacccaaatgagcaggatgaaatgttgtagtatttatttattttttttgtttttgaggggaaaatgagatcaggaaagggtcatagtgctattgtctacttaatgagaattttgccaagttatgaacaactgtgtgaacttgggaaacattagggaaagaagataacacagtttggatacaatcaattagaccaccatagtcagaaatattgtcatttatggtgttactatgctgaaccagtttgagacaatcgatttcgatttggttgatgttaagttgctgcgcactgcatcattttagtgcttccaacaaggtccatgcttctgcaatctttggtttcacattcacagtgccttgatgaatatttgcaagccctgcaactacttccccattgttattcctcaccactgctccaagcctactaattttccttctcgctgatatggcaccatctacattaagctttaactgactcgagtttgatctgtgtgagtctgtgttgttggtacgtttgccatttgtcttctgagcttgctactagtggttgagatgtgttctttcttgaatggttaattaagatttttgcctttcgaactttaacatggattaaatcatgccttttaaacttgtaatactgttaaaaattttcactgaactattaagattgttggatttatgttcaattttagtgagaaaagtttaacatggatgaaagttcaggaagtatgatttggtatatgttaaaattcgagtggcatgatttagtagatattaaagtctggaagatgatttagtacatgggtcatcattgaattagtaaaattgaataaagttggataaaagtccttaaatctaaaaatatcactagtttaagaaaaaaatttaacgatcataattgttataatttaatacaagtcattatttaagaaataaaaatcttaattaacctccttaaaaaatgtcatttagtttctctcaaatactccttaagggaaaggaattcttgttgttatagatttttcatattccaacaaatgtttcaaattctaaaattgaacaatgaaaatttgatttaatttttacatatttatactctttatgatattaaatctgaaaaaactatcttactaatttctcttcttatttatgatctcatatatctttgataactatttattacaaattatgcaagaaaaaaaaaactggccattttgtttaaatatatttactttcataaatgaattgtggattatattcttactatttacttaagtctaacatttatttttttatatcgaatatgaataaagtaaaaactaaaataaagtaggaaaacttac

SEQ ID NO: 383728 - DNA, 846 bp, Cannabis indica
ttttttactaaaattaacttttttataaaatatactactatattttatttttactcaatttattatttcaaaaattaataatttatttatagtactattttttactctaaaaataatttatatcaaatgatactttattattttattgtgccaaataaattaatattttattaatttattttttataaattaattaaccatttattattttctattttacaaaacactatgtctatgttatcaagctagtttgaggacagataaagctatataagctccaataaattaattatcttgctaactcttagctcaactaattaatttatcaactatgatattatcccactaataaattatagttgtactctcaaaacatacaatctatattatttagaagcgattaatcacattaattcatgtccattgattcagtcattacatgagttatgagtttctactaaatattcataattagagctaggtatcttcgtcaattaacctttctaattatatgtttatcaatcagtacccttgatactctaataaaaatttatgtaagtcatatacagatgaaatttctactctctaatactatcaatacaaaaaggaatatttaatctacaaccattcaaggagtggattctatatctgtgcaaatgttcccgactacctatattcttataactctaagatatcagaaattgggtctatattcactttcataaactttactcgatatgtcatgtaaaaccgcttaatttaattttgaaattagcagttaattatgtttaattatggaaaattatttatagatatttaaataattttatgctgttattattgaat

SEQ ID NO: 383729 - DNA, 1428 bp, Cannabis indica
caccgaaacactataaaaacttacccaaatcacgagatccaacagcaagagtgttcaatataaactgggaaggcctgtatatcattaaagtagtggtaggaaccagggtccataaattagcttggcttaatggttcgctaataaagaatcaatggagcagcgagcatttacggcattactaccagtaattttattatataaatgatgtattaatctttgtaatgattgatcattgttatgaataaaaattaaattttttcaagtaattataaagttttattttctttaaaattacttggaggcatatatgtatatagtaactagattcctcctagaaatatatactagaatgctgaaaacctaaaaattaaaatttttttacaaaggaaaggataattgattaaaactgtttttggacaatatgaagtcaagaattgaaaaaccttttctttgagagaaaattaaattagcaattgtaagtgagattctttctcataaagaaacaaaaagctatatgtgatctgagtaaataacgactcgcatgattatagcatgtattataaacgagatgcaggcgtgtcttgagaaataatacataagctaaaaaatgaataaaggattaattattcatataagcaataaaaaaatattcaaagtagttcttaaaagaactattcaaaatatttgatgtttgctaaaagaactattcaaaatatttgaagtttgctctgaacatagcagattacaaactgctcacgaataacatagcatattacacactgtttgcgaaaatatggtagattactgttcgctgactacagatataacaatggattacatgaaatatcttgagttaaatttgagaaaatatttaattgtgaatttaaacgcaataaacaaacataaataactcaaaagaagcaggataagaagcattaaaataaatacataagttagcaatgttggctatccaacaaaacaaaagttttacaaaaaataccacaagggtcaaactattgtctcgatcgaagggtcattgttcagaaataaaaataataaaaactaaatttacatagttagagatttagtgggatatcttcttcttcaacttcctcttttgcagcatcttcatttgtcttggtctgctcgctaaaagccagcatctcctcagtgccatcctttaagaaacttaaatctatatttggatttgccaacaaagccctataaatggaatgcttggcaaccgaattacatctttccttggcattggcctcgactcctttaagtttctctttggcttcagtaagctcttcttggactttttgatgggtaccaaagaacaattctacgaagtcagaatctccataactattctaattcacaaaaccctatataaaaccaatcgtttttagcttaaaacgtaattaa

SEQ ID NO: 383730 - DNA, 1910 bp, Cannabis indica
aacgttccggaccccattcgctttttctatgttttcgttttttttttttttttcttctttataatccttccaaaaagagaaagataaaaataaatcaaaggattatgagagagagagggcttgatgatgatatgtgatcaagttagtacaagtagctagcgtagggcaaatggaaatgtgtgacacataattacttgtccatttggtgataataataataataattaaaacatttttttttatttatattccatatttttcagttgaggtggggttgtgagcctaagtaatggacagtacaaaaaagcatagaatatggatccaattaaagagggcatggatgggccatgatgatgggaaccctagctaactttcttcccttgtgaaagggggcactaactcatgttctatgctatatactatatactatattaccatcatcttagagttgatttttttctcacctctatcatgataaagttcttttattttaattttacacatattgataatgaaactttaaataaaattgatgaggaccctactactatacacacccaaatcacaagtcacttgagagagaaatgattagaccttactagctaagctagctatatatatataaatatatctagctagctttccatgtcaatttagaatttaagatatatggtcccatatacatatgtaccgtttctaagttaagaatatataaatgaatcacaacaatttttttgacaaagtaaaaaaaaaaaaatactactaaataatctaaagggaattcattatattgtccatttatgttggcaacgtatacaaaattaactaggtgtgatttttattgtagtcttctcatttatctctcttagcttttgatcttttttgtctttttgtataaatatattattaataagataattaatattttagactttgtattttacaaaatttactaattcaatttttttattttattaaataataaaatagaacttatatttttcaaaatagtaaaaataagactctgaactcaatttttaatactttcatttcttaatataatcaactttaagacaatttttaacacgaatagatatagaaaatataactaattttatcataaaatttctagatcaaattattattaagttttattttgacaaaagatcagttcaagatcttatttgtacaattttagaaaatataaaatttattttatcatttaataaaataaaaatttaattgataatttttgtaaaataaaaaaattcaaattagtattaactcttatcgtatcttatgatactattattaattatatatgtatcaaagatgaggcactactttatatgttcatgaagaaacctatcaatttgaggcaagagttttcatctatatgggttatatacaaacatacatttatatatatatatatatatatatttcttttgaaaaagggcaggtgggtcaatcaagataaagaacccataacctctcaaaaagaaagaagagcatataaaactaaaaccattcattctcactcacctagatatatcatatctattatatacactcaacatataataaaagaaaaaaaaaatcttttctttacattcttttttgtttttgtgggaatttcaatgacttgccatgagtcctactttacaaaggttgaatttaattttggtgtgtgcttgtatcatagctagaaaaatggatggagtaggactaaagatatatagattatagagtactctattatcaatgtaatccccactataatggattatgaaaacattgaagaaaataataaaagatagaataaaaagaaacacaaaaagagtaaagggtatcaactgttacaactatatattctctttctctctctccctttatttattatatatata

SEQ ID NO: 383731 - DNA, 2724 bp, Cannabis indica
ttgaattacatgttgcttgctaatcacatttgaaaggatcatcaaatgctggtgaatttggtcttccttaggttttaactatcatttttcaatgtcaaatggctcaaaactgtaatgtgtaaattttaggagtaaattgagtatacttgcagcaatgtcttgaagtgtttcttaatggctttgctttgctcgttctttgcaagtttgctgctgtgttcttgatgaatagtttcaccattgtgcaggcaatgtatattcgtgttaagcgaaataaaacaacttacttcatccaatgcgagccgactgagactgttttagatattaagcagaaattacatgttcttattgatcaaccagttgatgatcagcgtttgattctattcagtagtgggcatgtactggaggatgtgaagacattggcagatcagaaggtaccactcagctttttttcttttattctctgagttgattgttttttctattgctgtacttattcctataggtgtacttatctgttaatgtgctaattataaatttctttgcttttataaggtggaaaatgattctgtcgtggcacttactttgaagaaaggtggttttatcttcttcttacctttttttctatttcgtttgaaatggcttacatctgagtttggtgtaaatttgctttatctttggtagttttcattttgggacattatagttagctagtttatttctaccaaagagcataaaaggttagattatataggcatggattgaataattttttcatgtgatttggttttgaaattgaagagaatatttaaaagaattaaattaatccaacaatcttataatccccgagcatgtatagcataatttcattcaaaaacttagtataatttaccctattcggtcctccattttcatgtatttcaatggtaagaagaagaagaaaaaaaaaggctacaactttgcatgcaacttgtttgtttgtttgtttttctaattctgctgttgcaaatgatcaactcatccattcttctatgttttttcttttatattttttctttaatctaatcctacattaacctgaccatggtactctagaaaatgttgtggaatcaatttgatatattcttactctcattctttgtatgtgaattgtatcttcttttatactagaaacatagattaatacattgctgcctttttgtggtatacaaatcctgtcatatcaattattactgttctaaagaactaagtgaccgtatgcaaaccaaaaatacagaatgtcccaattacaataaatttaatattctcaatacccagtttagtcctttcttcaacggcaggtaagaacttctttagcaacatagaacagggcatgtagtaagttagtctttcatatgctctccggttgataaagattattgttggagagcttctttttgttgaaagattttagagtatggtgcaactttccttacaatttagcttgtagatgataatactttgcatatttctgcttcaccaaacacaataacatgagagacattcttcgagtgcatatttttaggttaagttggatacaattgttaggttgtgctatttttcattgctttttggcagaactttgagagaaaatccgagattgtctttgaataattgaataaagaagtagaaggtaaaagcaattaaagactgttgcttctggtttggtactagatgaatgctttcttctatgacaagtatgcttgggaactgggattaggtgtttgtaaactcttccagactgcctcaatgtcaaactcttcatgacagttatacttgggaacagaacagttatattacaatggaatatggctcatgttcagttcaagatttcattactcaaagtgcatggcactgtagctagatttctgttggtcctgaataggttgtttatttcaagtcaattcaattgaatttttttcttttctttcagatgataatgagtttgaagatgtgaacattgcgcggccaactgatttctaccaatcacgtgatccagagggaggcagttggtgagagaccattgcctcagcttgtaaagccaaccagctgcaattggaagtgttgattagttgtcaaggccatggactataatacatatatataatatgattaaataatagaacaattcaatggagggtttgtggatgagttattcaacttgggtttccattattttacttaaatcaatgaaatagctgaaatatcttggatttggattttgagctacatttgtgctgtgtgctgtatgtactgactaacaccccatctaaaggcataccttccctattcttacattgaaccttccttttcatatgtatacatgctttttctccactttggttcgattgtgtttcttgttttacaatatgaggagtgttaaagaaaactctatattttacctcacaatatttagctaattaggacttttatccgaactgtgatatgattgtctcttcattttgtcaggccattaaaataaagcattgttataggatattattttaagttgcctaatactactatgaggagaggaggttcataattagttaacgattttttataatatttattagtaaaataattgaaattcgatattaaatcacagtaataataatataatgttatagtgtgtaagtttttaccacacttgaatcaatccattatataatattatatattatatat

SEQ ID NO: 383732 - DNA, 921 bp, Cannabis indica
taataataataataattatctatcttttattagtacgtgagtatatatagtgcttcaccatacaacattaaagtaattttattcaggggttaaaggagaagaaatttttggttaggatgtattatatttatatatgatgtactacttggaagtaggttaaacgaatttgctttcattaatatgagggtgtggaccattttctgttcaaataatacttgagcatatgtagaagcataatgtatacgtagtgatttctaaccaccaatatatgagcatttagtcacattataagacccacttatataaatatatatttatacatttttgttgtttataattcaatgtatttctaaagattcagttcccttttccattcaaaatcaaactaacttaacttacataatatactcttaaaatatttctccattattccatttctctatttaactataattagcgtttaggtgcattagttctttttatgaaaaaatgaagttatttttcaatatatagaatgcatttttaaaatcagtataaaagttggtgaaagggctttgcattatcattacactgtttaaatttcctaataactaatgacacttcaaaacagaaggctctaatgatttttttagtcgttggatctttagtttttttgtaactagagcatctagccacgaccaagagtctatgtacatgtttgacacaatttttgaaaaaattaaaaatttattttattatgatttgagcataaatatataatatttataacttggatagttaaaggtcacactttgattgatctttgtagaaagataatacttataaatgattttttaatttatattataaaatacttatttaaaaataataacattactactgaaaaaccgtgtttttgcaaatgtcagttgtatataagaa

SEQ ID NO: 383733 - DNA, 3055 bp, Cannabis indica
aaacagtccgattcaatgctaaatcgttgtatatgcctctgtaacccagcctgcagccccctcaaaatagccaataactccaactgtaatggagtgtattccctgggcaaaacagtcgaggaagcatatattacttcaccatgttctccacggatgacacagcccagaccagagtaccccttaccttccttaacacctgcatcgacattgattttttcttccccatgcttcggcacattccacacccccaggtccctgcgtctagctgctgtcttgctgcatttttcaccttgaaaatcagcaagaaaccgatgactccactccaccacttcagctggttgcgacacaaaaccgccatggttggaagcatttcggttgttccacaaattccaagtaagaaaaagaaacagttcaaatttttccttactcattgcagcggacagccgcatcaaaaaggcaagctcatcttcattcccatggcgtttcacttcatgttgcaaatcacaaattttccaacaaaccttgctcttcttacattcccaaagtgcatgaaagattgtttcaggagtatgcatagaacacctcgggcacccatcatgagtggatacatggcgcttagccaaaacagaagaagtgggaagccaagaatgagccaatttccagacaaacaccttaatctttggcagaatttttaatcgccataatttccgccaccaatggacagcaagatgatcatccgactgttgccgttctgctctcaagtcacttgccatacgatagccgctcttgaccgaatactctccgtttttgctataatgccataagattttatcttcaatatcccacccagtgctaggaagtgagagaatcagtttagcatcatcttggttaaacacattctgaatgaattctgcatcccaagtgccatcacccaatttcaaatctgctacccgaagttgctccggtaatggtggcttgtcatatatcttgaacgtaactggtctaggaagccaagggtcctctaaaattctaatagaattcccatccccaacccgccatctgtagccctttaaaattagtttcttacctcacatcaaactccgccaaacaaacgatgcgtgtgtaccacacttcgcttccaaaaccgatgtattagggaaataggaagccttgagaacacggctgcatagagcattcgggaaccttatacatcgccatatttgctttgctaacaaagcctgattaaacattcccaaatcgcgaaaacccatgcctcctttatctttaggcttacataagtgatcccatttgcaccaatgaattttcttatctttttcagaagacccccaccaaaaccttgctgccagtcgatgcaaattagaaattgtccccttcgttagccgaaagcagctcatagtatatgtcgggatcgattgaacaattgccttgataaggacctcctttccagccatagagaacattgatgctttccatcccttcattttcgcccacaccctagttttaatcatgtcactgagttcctttttattacgccccacaaaagaaggaagacccaagtatttaccatgggaagcaacctgcctaacccccataaattcagcaagttggttgcacgttgtctcatcgatatgcttcccaaaacaaacctcagacttaccataattaaccacctggcccgaggcattcatataattgtccaacagctcccggaaccgttgacaaccttccatagtagcatcaaagaaaaccaaactatcatccgcaaaaaacagatgcgatacacacaaatcagtccttctaaacttgataccttgcaaactaccccgttgttcctcagcttgaatcaaacaagagaatgcctcggcacaataaagaaataagaatggggatagcggatctccttgtcttaatccacgttccgacctcacacttccccgcacttccccattaatgaggaatgcaaaactactgacgtaacacatctcattattttttccacccatgcattatgataccccagccgaatcatcatcatctctaaaaatttccactccacccgatcatacgcctttgccatatccagcttgagagccatcttatgcccattttgaaaccggtttttcctcatacaatgtaacgcttcatatccaataatagcattatcatgtatcaacctccctttcacaaaagcactttgtgtgtcggagaccaccccatccaaagtcagccgcaaccgattagctaagcatttagaaataatcttatagataacattgcatagactaattggcctgaattcctctactctctcaggtttatcaactttgggaatcagagcaataatagtgtcatttaggcaactaaagtccgctccttcattgagacattgaagacataaagcaataacctcatctttcaaagttgtccagaatttatgataaaaaagagccggtagaccatctgccccaggagcttttgtcggattcatttctttcacggcacgcacaatatcctcttcatcaaattccgctaaaagtaagtcgttcatctccctagtgacctttggttgcacggctgccaatacaccaagaataccatcatcactaacagaggttgtttgaaagagagatgaaaaatatccttccaccatctgcacaacaagattcatatcactttgccaaacccccacactatcccgtaagccttttatctcgttttttttcctcctccgagacgccttatggtgaaaatattttgtgtttctatccccccactttaaccacaaagccctactcctttgtcgccaatattgttcatctttttccaattccccattcaattgtttttccactcttctgacatcagcccaagtacccaattcttgtcgcgaagacaattcggccagagttttctttagcttcccaattttgtcattcagcaacttcttctttttcttattccatgctttcaaagttcggcctacctgaagtgttttccgtttaaagccccttagatgaccaccaaaagtaccatc

SEQ ID NO: 383734 - DNA, 1109 bp, Cannabis indica
agagagagagagagttgcttggagatagatggggttggtcgcatggcatctctggtcggggctagtgctgcgtctctagtcggagctgccattagcggagagaggtggagaaatgagagagatatgtggctagccatatggaggagagagatgaatgtgaaaggaaagggatttgattttttttaatggtcatatgtgaccattccaaacctacgaaaaaagagaattttgaatggttataaaacgacgctattagaattaatagcgtcggttagtaatagaagtacagttttaatagtgtcggttaaaaaaaatcgacgggaatataccactttttttagtagtgttaataacataaaattaacatgtagaccaaaataatattggttttcttgaaataaaacctaatatatattgtcattctagttggttttgttttacttttaattatggaaatatgtttggatttgaagttgattgtggttatatatatataataaaaacactacccacttactcaaaaacactacatatgaaaaatgttttctttagttttaggtaagatatgtatctctatataaatattatattagcttgtgtcatccaatgtgttattgtcatgatgtatatatatattccataatccattagagttttgggaacaaatatgtattgtgtttgtgaaaaatttggctttgacttgaaaaagaagcaaattaaaggcctcttcataatttattctttatttatttttttgtaaacaactcttcatatattattctaggtagagaggactatacttactcatcatatcatcattattttgtatataattaagcttttccctttaatacaaaataataatattgaaagaagtaataattcggtgaacatgtccttattcattattagggcaacaatattaatttattatgaaaaccctagctatagcttatatatatctttatatattaaaagtgcttatttaacggcaattcttggtttaacgattcttggtttaacgattcctttttttatttagccttatacgattaacttaacatactgttaacgttaaacgttaacaaataaataaacccaataattaa

SEQ ID NO: 383735 - DNA, 1114 bp, Cannabis indica
ttaattttttttttgaaacaggatctctagtttgaagagtgctaattatatattttttttcttataatttttcagttaattttaactttttaaattatatgttaaaatattttttttattatagtattcgttataattataatattattttaataattttttaaaatattttaaatattttattgtaccaaaatagagttattattatttcagtttattatacatttaaaaatcttcaaatatattttcaagctatttaaaattttttaaaaagataatgttataattataatgaataacacagtaaaaaagaataagacatgtatttttaagtacctaaattaactaaaaaattataatacaccatattaatggtagcactttactttaattatttatattaatatagttttaattaaaacaagcaaaaaaatgcatgtgagacttttttgaattacacatgcatttcttaagcatggaatgaaatttctcattgtgttgtgtaaaatgtgagacattttaaattatagctgatttgaaaataatatactgtatacattaatatttatattagctattatatgatttgaaattttatattttgtgaataacatggagaaagttttaaccaacattttttttaatatgatttggtagtaataataattgagatgtaattatactaaaaatgattatgcttaatgtagacaaagagtgtattgtaataactaatttttcttctaatatcacactttttgtgataatcactgataatgatactcacaaaggcaataatatttttatttggagatgacaagttaagggtatttataaaatacttaaatcaatttaatttatacgatctaattcaattcaattcacaaaatgtgaatatttatatttgtgtaaattagattgaattaagaattttaaaatccgtaattgtgtgtaaattcacttgtaaaaattaaccgatccaatttaatttacatatatatttaaaaatttatatgcataattaatattttaaaataaataaaataataatgtaaaagtctaatatgtacaaatatattttaaaatttaatatatcaaatatatattttatttttat

SEQ ID NO: 383736 - DNA, 2407 bp, Cannabis indica
tttagtctagctgataaaagaaacaataaaaatacagaggtttttcttttgaaaaacttacacaaaataatatttttggtaaaattttaacattttgatggtcaaataattttattttattttttacattttaattataattttgcggcatgtgataaaaataacatgcaaaaaaaaaagtaatataaaaataagagaaaagcaacatacaaatagcaagaaaataacgtgaaaaaacttaatagtgtatattgttataggatagatttttcacctaaaatagcaagtatagtctcatatttaattgacatgtagacctagttccaatagaaaaaggattacgaatcaagggtgtaaaccctgatagaatttttcttgcataataaaaatatacaagaaggtgtgatcgagataggggtcaagtcatacactatgtgtcgtatagtaaatagaataaaagagaaattagcacgactgcgacatatatcgaatatatgcgatgacctagtgttgttagtaaaaacctatgtaaaaattgcatatttatggcaattggtccaaatgactactgtacgcaataactcatcatggaccccacgaattttgtgctgtcagtatgtgaatgcccaatacgtgattagtataatcacatgcattctataatatgaaacatcaatagcttctcgcatcaaccccaaagggtttatgtgtctagcgcagatggtccaaatatccaatacatgcggtaactcgagtgaacccacaagtttgcatattaccaagaatacgaactgtcaatgtgtgattaaagtagccgcacctgtttgagtattaaataagaacaattgaaattattcttacatttatttcataaatatttttcatttcaattaagtgtaactaatgttgtaacgatcataactggtaggttatgtaactaaatgatcactttacttctatataaaaaagtgatctgatacgaataaacgatcataatttatctttttaaagtggactaagcagaccaagttctagctaaacaactataatttttttgtgtcttttatatacttgtttacattctattactaactattttactttgagtgttagccaatctatgtgaatactcgcagttcagcttgtgaatgttctggtatagcttaaattctcatagttttaggtgttgtttattttcttctgacaacatttggcactagaagaagagtgcttcagtaatattctatgactttagaggaagatcacaatggctacgaaccaaaattagaatgttaacagtaacatcaacattaatgaaatcactgtcaatggaggggctactaatatttgtccaccaatggcagagcttcaggtttgaactcaacttttgatatcacttttggtggagttggccgaactaacattgtaataacttaaaaatgagatatgaatatgaattagcaatcttaattaacacaattaaatattaatgtgagattatattattatataattaattatgtatcattgtatgtgaatattgagtttaagtctccatttatttgtataggggattttttgtaattttgacctaatgagggtaaaagtgtaattttattatactatgtgctaatagactacattattatagtgtatttgttttgaggtattacatgtaatttttgacaagttagtgcggtgtagtcacaatctagtattttggtttagacagagttcggggtccaaatatgtgaaattatgtagtatggataattataaatatatgtgattatatattctccataaaataataattacaccctattattaaataaatacttaaataatttttaaaagttactcataatttttttaaaaaaaaaattccttacattattttatattaattttaatacttattttaattttatttttatattttttttctaaatcatgtatatatatatatattttattttttcttaagaaatttttttataattttataatttaatttttggtcataatatttaaaatatgatttattttaatttgataggtatattttttaagaatatgaattggaagaagaaagttaaaaaagacttagtactattaaaaatataaactttatataaaataaaaattattaaattaaggtatctttatagatttttgggtgtaaataaaattttccttatatttatgtggttgtgttataatgtgaatgacttttatgcctttagtctctattgatgctgatttgtggtcatttgaccacattttataaagtgataaagatgagctttagtggataagtagcattcataaccatcatgactccttccgttcagacctctaatccgtgatcttttttgttgcagagtataatctgttggaaattatt

SEQ ID NO: 383737 - DNA, 994 bp, Cannabis indica
acaataaaaaattctcaaaataatgttaagttaatatcaatattttatctaaagttgttttccaatattaatgaccaaactatatatattaagtatgtataaaagaaatatacggattgatttagtttgaactttcaccgagaattttaaaacaatgaccgaactacagaattataaacggtctagattgactaaaccattcacaccaaattcatttagttttgtctcaaatagtttggtccaaattaattagagtttggaaccataaattacgaattataggaacaatcctaatgcgtattggagttataaaagccactccatctgttttcgaaaaatatagaaaaaattattgtaccaaaacacaatttaaacattcatttgtaactgtaagtgtgtcttcttctcaacttaactattttgaattctctttttttaaattacattttagattcttttttaaaaaagaattataatgtaaaccaatataaaaattagatataatatcttcaaatgttagaaacataaatagccttaccacattgataaatgtgacaccctataataattttgttttgaacaattataatttattatatgtaaatatataaaaggaaaggtgtatttcagacaagaacagaaaactatagtaccataatgcataataattataattatgtcttgttgttattataaaaaacgctaaacacaattgttattgtacaataaaatgatattcatgataaggtgacagacagatatgtaaatgcatttttttttaggttaaaaaaaaataaaaataattgaattatgtatatatgtactaattctacggtttaataatagagaaatagtaaaaaaattatttcacaaatacatataaataacaaaaaaattattaaaatactgttgtatgaaattttaaatatttttatgatttttatgattttatttataaaaatatagtctttctatgttgtaatcttgttaatta

SEQ ID NO: 383738 - DNA, 3233 bp, Cannabis indica
gttttggaaaagataatataaagctagcaaaatcttaaagaacatttcaacaaaattgtttacttatttttttttttttttttttaattttaaaaaaaaaactatgtatctctctcacgtgtgaaaggggttatagatttagaagaaagttaagatcatctttctagaccactcaaccttactggttaccacttaccagtcttaaatgcaactccgtactgattcagcgctttagtttgaatgtatacattttttattttctatttccaactcataaatggaggcagttgagcgttaaatataagtaactataactcactgctatctttttatttacatctcattggtttttgctggctctgatcacttcacaccaatctttctcttattcttttactctcttcctttattggccgtatgggtttgccgcaacaactcttctttgtatcttttcttatttttgctgcagccattgatggaattcagggagatgccatggttactggcacagtcttctgtgatcaatgcaaagatggtcaaagatcctggtttgattatcccatttctggttagagtttaactatgttatttatccattaaatgtgcaatttttgctttgtgctgtacaacttgtatcatgtaccatttgagctttgagtttcttagttagcaatgaagagtttattttgaccatttatataaataaccaacgcaaccaagatgttcattcattgtcctaatactatgtcttttgatcttatagctaatttgaatgagattggagtggactaaattaatctacaaaagtacataacttacttctaattgcaggagttaaagtcaaagtaacctgtacagacagcaatggccaaatcacaatgtcaagggaagagactacaaattggtttgggaactatgcggtgaaatttgatggtgcgccagatctcagtggctgtttttcacaggtgtccgacagtggacaaggctctgaatcaggctgctcggctcctgctggaccagcccagaaactcaggctaatgtttaggttcttcgacatggagatgtatgcaaccgattcattgctctcacagcctgcccagccaatgccaaactgcccaaagtccactaatcctgttcccgcaccagtaacaccagcacagccacctcctgtggcagtaccagtgccaccagcgcagccaccgcctgtggccacaccagctccacctgctcagccacaacctgtggtatcgcctgttacaccagcaattcctcctccatcaccagcttttaggcttccgccaatgcctcctctgcctccattgccaccagctccctttttggaagcctcagcatgcccatctaagtaagctacttattactcacacaattctattgtacatcaatacactatcacctaactaactataaggtcccaactggaatagaggtacaacattcacatggtatgagaatccaataactcaaataagcatacaaacaatagtaagcataaaaataaaaaagttaaaacccactagagattcggtgatttggggctcaaaaagaggtagcactaccattttaagagagcatatgtcacttttgagttgaaacttgatggatcataacaaaaactgctggaaactcatgatttcgtcttaaattataaattggcaggagttggacaatgcctgaatacaggtgctactggaggatggtgaatcctgagactaaggtggctgttgtgtttggatcacttgcagctagtcggtatggtacagatttgacaatgatgcaagccttacaagggagaggagacccttacagaactcttctaagagaaggggttacctcatttctcaactcctacaacactcttcgatttccttacaacacaattggtgttgttcaacatttggattgggcattaatgggatctacacgcagtgtacttcttacaggcttgcggtttatgagggccaactcgggttatggcactgtcaactgcagtttcacaccatgcaagtgattattttgcctaatctgagcccacatcatccgatatatatgtaccaatctttatatagttgataattgttgtcccaacagtgattataatgtactagtttatcttcttgaataagagttctagagggaggttaaaattttggtatcgattgatgaaatttaatcctcatctgtgttgatacaaccaaatagatacatattttaatctgtacaagtattctattttaattctataatatttattatttatttatctctgtaaactccatcattagcagccttcttaaacaggtaataattttaactatctatgagaaaaagtgaagatctaaaagaaatataaaacctactttacttgtggacacacaatacacatacatatttctttcttaccaccttttgtagcttttgattcaattcaaggaaacaaaatctgagtaattaacagtggcagcacctactatatttatatggacttcaaattgtcatacaaaagagtgaaaacaaatacctctatttttttggtgagctcatacttgcaggattattgtactgctcaaaacagatccatctttggatggaatggcaatcagatgactgctgcaagctcttcttctaatcatccaatgcctgcaactattcaagacactctattgccttcacctgggagattcaagctaagtgtggatgcttcagttagggaacaaagctcaagaattggttttggagcagtggttcagaactgtcgcgaggaagttgtagcaggatgctattcttcaatccctagtggtcttcctctgatttcgctgaaggagaagctcttttcagggcaattacttggtgttttgttgtgcaattccctattgattgtattgtttctgattgccaagttgtaattaataaagttaaacataaatggcgggacagatctcccctttttaatttaaaagattgtctcctctttgtcttattttcctattatttcccttcatcatgtctctagcaaactataagaccatctcttatgggagattaaaaatatagctatatttgacacaaaaagtagttttgtgatatttttacatcaacttttactattgtgctcaaatgcataattgtaaatcttgatgtaaaatttaatatatcatttaatgtccacttaataatttattagaaaaaatataaaataatactaataatacaaa

SEQ ID NO: 383739 - DNA, 1014 bp, Cannabis indica
ccttgtaacgtatgaaatttgtgttcttttgttttattctttctaaatttaagaatattaagtctcaagaagagataacgtgagagcaaacatagttacaataacaaagaataactatcaaatatttgatttatatatattatataataattcatggtggttgtgacaacatgcaaataacttttaaagtataaataaagtagctttgatgtaattttttttttttgttgttgttcaaatggtaactcaaattcatgtctatcaaattgactgtgtattttaatgcatccatacattttgctattattgtaacaaaatgttaacacagtcttcttgtaggactcgtcacactgcagaataatacgatcatgaatatagttattttgtgggaccaatctccaacattactgcaaataatatgcaacattatctgtgcaatttaattctgaattattcagttatgacgatattattaagaggaaagataatattaaacaaatgttaagtacggtaattattaaagatgaatgtccattagtgacttatggcatgataattttttttagataattgggtttataaggaaatatgtcttaaagggtaaggcaatgacaatgtaggcggtgttgtaaggcaatggcaacgtaggcacgcggtgcggtggggtaaggcaatgacaaccaagtagcagcaactgatgatggccatggtcaccttggcttcttctttaaagggttggttatgagcttttataacttggacagttcttaatgtagcaacaaaatcaagtacctaagttatgcaatttttttcggttgcttaaacagagaccaatcctcatccccatgtgtcatcaaagagaaaatagccttttctcttgagttaagacaggcctctatagattgtcaggttatttttagtattacttttagattatatttagtatatttttaattgagttttactcgtgtttggaacattttcacgcttgttatcttttatttttgcagattt

SEQ ID NO: 383740 - DNA, 1263 bp, Cannabis indica
acaatttctttttcaaatttttactgttaactgttatattggattgtctacatggatatagtattcacgtgacaaatttattagtccacataaattttattatttaattatttaaatattataaattatttcaaaatcatataattaaaaaattaagattttaataaatagaaaaaattaaaataaaaactaaacaatacctatattttctttaaaaaaaaaaaaaaaaaaagaacaactgacaaaatattctaaggagtttacatctcttccacctccttctttctgcctaagtcatggcaatcatttttgtgcaaagctttgacttccacgatcagctaccaccgcaccaagccatcttcgactacgtccaactccaaccagtccccagcttcgttccagtcactagccactaacgacgtgtccccatggtggcatttggatctccaatcatgattgtaggtgaatgagcttttttgaatccaagttggagacctttcttaaataaccttgcatgagaagaattattaggatccttactggttacttgattattaaaagtgacctcagtagcttgtacgtctgctgaagtactagcagtgatctcagatgccacttgcacgtctctagatgaggggagtctttgtgttttatttatgtcttgaacatttgatactagaggcattattgatatatgaggatcaagtggttcttcatcctcagggactgagtctgaaactttcgaatcatcaaatttcacattcattaattccatcactataaaaattattttattatacacacggtatgcacggctgttgactgaatatttgagaaaaattctttcgtcacttcgaacatcgaattttcctagatgatctcgatctttcaaaatgtagcaaacacaaccaaagatgtgcaaatgcctcaagttatgagtcttccctttccacagctcataagtaatttgagtagttcctgttctcaaatggacacggaaggagcataaaattttgattaagaaatcaagagaatttcaaaaaatataatgtgaataagaaagcctttcttttgattcaatttgtcagacaagagaaaatctaaagtgttggtatcttgaatcaaaagctataacattatatttatagagagacactaggtttatggttagaattaaatgggctgaattaaagaataaaattttgggaaatttacacccattactgatttttcccattttctttcttttatactgttacacgc

SEQ ID NO: 383741 - DNA, 1412 bp, Cannabis indica
ttaaaatacttaataaaaaaaaataataatgtgtaatattttagttgtgtaacttattactaatttttttaaaaaaaatatactaataaccttaaatacctaaatattctttttgagagatgtaatataaatttatccatataaatcaaaatggataatttacatagtttgggtagaaaaaaagtatcaaacgaaaaagtaaataaattagaaatgattatccagtgatctttcttatagggaataatacttttttaggagatgagacatggattagtatatgatatgacataacatgtaaaatcaatgagaaatatttgactgaaactctattccaaattgtaattagtatgtttaaacaacggaattaaattgtgtaattattgattgtgatattggattaattaaaaaataatttatggtataaatacatttaattcttcaattcttgttacaaataaatatatattttatatttttgaaactttcgaagatatttaattattaagtgtcaaatcattatttatgttattttcttatttgtatatttaaattaatttttaaataaaaaataaaaatttaatgacctatactaatcaagaactgtcatgtgactattgacttgacacttaacaatcatgtacttacggaagtttcttagatataccgtcgaaaattaatcttaaatttttatctccaactaaaagttaaacttaagtatttataccacaaattaaattgagaaaaagtgtgtgaatatggccaacaaaaaaattgactccacttgttttgagtttacattcttgagctataattggtaaaatttacactttcggtatattacttttcgattgaaataattaacatatctattaatgaaaaagacttttaataagataactaagtttattactctaaaaatagcagacaccttttcatatcaaccaatattaagttagtatatatatatatataattaattaaataaatttatattcttcttcccaatgaaagatagtaatgaaaaagtattaaaaaatgtaactggaaagctaagattatttctaaaaatagtaatttgtttttcaaacacgtaacaaaataatcagcatgcacgaaaatgagttaactaaaatttaagggcgttgctattttataccaatgctcaaatgtacataataaactaaagaaatcttaaaatatatgcatctacatacagatttgaatccattttttctaaaaattaaattatttcataaatagctaaagaggataaaaaaatttacatttttacaaatttatattatatatttttatagattttacaaattatatatataaatttattttattgttttttacaaaaatacgaattgttatttttctgtctatttttttatttttttttcttt

SEQ ID NO: 383742 - DNA, 731 bp, Cannabis indica
tcctcgttgaccacacttctggcctggtcaatgctttgttaccattaataatgtctgtgcttcacatgtgtaactccatttctgcatagtatatatgggtacattactttagctacttcttggaatgacgagtggccctaaaattcaatacgagtctttctagtatttttgtccgcacttgcatgctttgtgggaaaacttctaagaaaatcacccatcctaagattattccaggtcaaacacatttaactttagagttcaataatggactactaaaaaagatatacatcttgttcatataggtaatatacatcaattgttttaagctctcttcaattttgtagtcctataactatacaatcttagaatcatatacttgatctttctaggaaatattggattgcaatattgatatgttttgatttattaagatctgattattatgatctttttattagtaagtattcaatttcattttaataaatattatttaatttcaatctaacaaaattaattaattattcgaatatatataactagcttccatgaaactcacaagaagttgtggacacgtatgtcacatcttttcgggtagagggaatatgattgaagtcattgaactattttttttctccaataggaggaatgaaaatataggaatatgaataggattaggattaagaattgaatggaataaaatttaaaatgtatataaaaaatgataaaaaaaa

SEQ ID NO: 383743 - DNA, 1774 bp, Cannabis indica
taaaattgcaatagctttattgcaacacgatttctcacatgtacttatagagctgtctatatgataataaataagttgtttatttgaatcaaaattttgatatgtttctaattcatatctaatggcgtaaaagatctcaaccagtttagaagcattactagaattaagaggctagttttatctcagtgatagtgccaacagttggggattgtgagatttgctccatctacaaaaacagaacttaaccaaattttatcaaaatttttggcagctaaattttttgaactatcattttatttgtatttaactttttaaatttaaattttgatggtaaaatattttgaactattgaactattagaaaatttaaggcgtgacatccatttattacagttaagtgttaatatagactatttatgtttacatttttatacaggtgattcaattgtattggaacatctacgaaaattatttcaaaattgaaaaaataataatcaatcaaaaaagagattagactccaaaaaatacaattaacatacaaacgagatgctctagctataaaataacaacccgattagcagattgtttgacagaatgtaaagaaacatcactaaaaaaaagttatagatgtttacaatcctcaacgataccattacaaatggatgacaaaacattcaaatttctaactgcttgtaccaatactagataatcagatttgataacattgacaaccgagaacccatgcttcaaccacgaaagcacttccttaaaagccacaattttcgcaatctctagaagaacttgcccaacccacactctcgaaatcccaaccatgaccggattatggtgatctcgaagaaccccaccaaaaccatgccttccctcattgtcaaacaacacaacatcaatattcaccttgattttttcatagaccatagctgagccccatccgaaagataccaagtatcaagctaaggaaacacacttctttcttgagcttttctctattgatcaagaatgatatcagccaaattgacaacaaactctacacaattggtccacaaagagtcaattccgtgcaaatcaaattgcccaaaccaacattaccgcctgaacactttgttcctcaccctaccctgagaacaagtacaaaatagtccccaaacgactctacaacaactggaaccatagtcaaatccgcaactcgccaacaattatgcaaaaaaacacaggaaattaaacaatgcaaaataaatttacctgctccatgacaaaccgaacacaatcaagaaacatccacatgtttaatctttaattgaattctcgtcggaaaacacccactaaccgccctccatgcacaattttaattgccaaaatgtcttttaaaacgccacaaccttcccgtccacactaccatttcggtttacttaacactcttaactgtatacaattaattttcattttaatttggttgcagtaaaagcattaatggaataacttttcagcgaaaagataactattccatttcacaacaagaggaaaaaaacattctaataacagatgaaaataaaataaaattatcaattgttttatgcatattttcaattcttttatacatatttaattttattctattgtcatctttatttctcatttcttcgagctaaatgtactcttagagtcaagggcatactcacgtagaagtaagacggaacaatcgtctctctaaaaaaaataataattgggaaaaaaatgtatatacattttagttagtt

SEQ ID NO: 383744 - DNA, 4186 bp, Cannabis indica
atcttgcaaggggaagctcccacgattgagtttatggtaaatgatatagaatacaacaagagttaataatgcatccctcccagcctttgcgacctccttctgggttcattcccgaaactcagcaacttcttaagctcaaccgacatatttgatgcagtttccatgtcagtcttatgtagctcttcaagagccttgagtttcgtagtgagtccttgaatctcctcttaggcatttagaaggtccatctggccagaggcgatggtctcgtccttggcctttgagcctcctaatcctactccctaagagccttctctgccaaagtgtcattgcaaagagtctccatctagctctctgtctccctgagcttcctcaaaactctatccatgccatccagctatgaaacgacaaacccttggtcgatcaatgtcttagaaagacgatcagcctccacaacaatctagaggtaatcaataataatgggttagatcttcaagagaaacaaaaagaaaaaagaaacttaataagtgtatacttacggagggaagggctacgctcatgtcctagatctggtagacgggattggaggaggtgcaggctgcgtacctttttgtcagaagttgagtcaggtcagcagcgaaatgacttaccatctcagaagaaaaaggtgccagggatgagcccaggtagcgtttgaaccaatcgctaatggaataaagatttaggtcccaaacctccccagtatactcacctcaaaagggcccatcatggacctcccttagccacttattttgagcctcagcctcaacatttcctttttacagctgatccactgtgtagttatgtttggcaatgaagagttggattcgttcttcatcaggatgggtgggggtcaagagaatggttagtggagcaggaaagttttcaacttcgactgggatcccagagtcagtgctaggactgggggtggcagagcgtttaggctttttggaaggctccggaaggaaaaccacacctttctgtttccagtcaagcggggatacttcttcctcctattcctcaattagcaccacctcctcattcccgagcatctcctcagtcagacctctaggagtcaccatcatttggggaggattaggcaccttcggctcaagactatgagtagtggttagcatgaccaacaggttgtccatgggtttcgccattcaaaataaacaaaaatttaaaaagaaagcacataaagatcacagatgcaagtacaatacaacaaggaaggctagtcctaccctaacgctctaatttttccctagcaaattcataaatgaaagagttggtgttgtcatcccctagaaaactatctgaatgaaggaaccaactcgaggtcatgtaggaggtatgatttaaaaggatgggaatgggaggaccggagcccatttgacaccgacccaaaaaccttttgcatgattgccccaccaagtatggggcttccaaaacttatactgcttcatgtcgaaatccattggccttaagtaagagtaatcttgggcggaaggaacgaaatgaaggtttagaggggacttacgagctccaaaggtactggcaccaggggtcccagagttaggaaccagaaaggggaacttaggcctagctggcatcttttcctttcttgccttctcctggctggacctctcaaatgcattttggaggcgagtgtattgagctcctgtttttcttgtatctatacctattgtatttgtctgtagcagtcgcaataatgtcagccttgagccccctttcattccccgaattgtgagcgttggggcaaatcaccttggacatgttaagtcctcgactgattggctctccaaaattagtttggccctctggtaattgggagtcatcaccaaatctcccacattcaaattttccttcttatagctagcaaacacctgggcgtggtcatgaagagttaagtgggagctgcgcgatgcattggagggacccagaccgagtccgtcaacaagtctggatgctcaagggccttaaacccagaagaaaagaaaaacctatgatggtattccttaacattttttaaaaaattaaaaggtaccagggttttgttggctggatgtgcttgtaagtgataaaaaaactgtctttaaatttgtcacccttcttgaggacagaaagaagttcgtaaaaatataaaatttcaatggggctgggagcggcccaacccctagcagcatacaaaataaaaagggctgaaattaggcgaaaggcttgggatcaatttgtatggtgcgagtccaacaagcactaaaaagttaatgaagtagtcatgtaggggtagttggctctaaacatgagatgggtctggctcaaggcgccaaaaccattataattatggttcggtatctcttcatccctagggagacggtggtaaactctagaactggatggtttaatcacacttacaaccactatcttctcttgttgatggacacaagtcaaggtctaatagagttcatcagcctcacaaccactagagcgacaagagtatttcttgtaggcaataaggccttacataagctcttctagtgtggcaagttccttggtcgcctttgtggaggatctggtgttggacacattagagtttgacatggagttgggctaatggtgctcaagaatttttttgtcgaatccaaagaaaccatgtttgtgaaggtcctagagaacttcactctgaaagaaaagaaatccagcagtaagcccccaaatcaaaccctaggtcaaaaaggggaatgagggtcctctaaccattgggaagaggccccctctggatgaatgacaaaaggaatctaatgattcttagtggtaaacatcgggtgcaaaaacgtccaagcaatatagagaaatcaagagaaaagagtgggaatgtgtgaagatagttcaatttgctaaaaaccctaaatatatgaaatattcacatgaagaaaatgtgggatgaagggtttcttgccctttgctcccctcaaaaaaagagagagaagaaaaagacaaaaatatcattagacattctgagaaaagatattctagggataatcgccatggcttacccaggaaaaacatgcatacgatttcctttaaaagaatgaatcaatatctgtcacactttgctctactatacaaaaaagtaaaaagaaagaagaacttacacgatagaggcaatgtagaggtagaagtcaccgtacgatagtagtagtttgcctggcaagggcggaggaagagtagaaggaagtcgagaattctagaattttgtcgagagggttgtaaagcctataaattgaaatgcagtgtgtaagcagaccaaccacaagaggtacatgtttttataggcccttcagggtaagagccagcattgatcgagtgccatcatatggtgagggttcaaaccgatttaaattctatggatccaacgaccagggtaaaatcacgagatgaagagaaaaaggcgattaaagcgtttgagtacctctctcacatctgcattaatgaaggggtctatcaaacaggtgagaatcgaaacattgcctgccaaaaatgaggcaaaatcattatgaatattaaatggcccacgcacacgtaaggtgtttgccacatcactccctgagaacagaagcaatatacaaagtctcatttataaaatattgaataagacatggggggtaattgtagctccagatttctcctaatataagtggcaatcccacgacacgacatttggagattaggcttaaggacccagagataaacaaaggaaaatgttacatgggcaggatcccctaagataacccaacagttcctcctagagtcgtgattaaatctagaggaatccatcttttgttcacctccgggagctgggtagcctccagctcctctggacttagggtacaggagatgtactatcaattagcatttaatgcagtatggaggaaatgtctaaggacgaacgcaaaaagtcatgtcaaacgcattaaactcattcttcagcaattgtacgctaatcaaggatgtaattgatgacttcataatgtactatcacatcaatcaaggaaggataagggcttatctcacctaaaccctacgcctcctattaggtagggagcgctgttggaaattattttac

SEQ ID NO: 383745 - DNA, 2015 bp, Cannabis indica
gtccccatcaaattaaattcttgcataatatataaactatcataaaacgataatgcaactataaggcaaccaaaacaaaaaataaatcaaaatgtaactgtatataacgtagatgtattattcatgaggttttttttaaaattttcacatcatacattgttttgaatttggtgggaggtccagatctgtttgttacagatctacatttcatgaatctggatttcgatattagggggagttgttttgatcgaataaaacagaaaacaaatgtgtaatttcagtttcttcacagtttttctgatttttttttcgtcattttcagtttagatcattgcaggtatttttttccagttgattttgccagaattaatagttgtatttttctcgttttggtttcattttggttgttttgcggttttgaaacgagcgcgtattttcatcttcatggttcgctctgtacagctgaaggcttagtgcatgtggtatttttgtaaatatttgtatgtggactgtataaatgtttaatgggccggcccaaagtatttttgtaattttttttcctttttgtttttttttttttttttcccttcctttaattagttaaatcaaaaattaatttttgaaataaataattcaaaaattattttctaaaataactaaattaaaaattaattgagaaacaacacaaataaaatacgacatagtcttttcaacttactagaaacccatgatttaggtcaatcttcaaatgtgctcattaaaaaaaaaataagaaccagttaaaattaataaaacaaacacaatatataaacaaaacgaaatcaattccaaatatattgagacgtatcatattaaatagaagcggtttcacaataaaataagtaaaaataaataacacaaaataacgtaaaaatctattataattaagagaaatatatagtataaatcatatcacatcataaaaactagtgctttttcttaggagattcctttgaaacaatttctatcatttaactaaatcaaaaccaactgaaaaacaacacaaataaaatacagcacgaactttgcaaacagtttggattaatcttcaaatatattggctaaaaaaaataaaataatataaaaaatattagggaccgattaagattaataaaaaatgttatatacaaacttgaaggaattagttctaaaaatattgagacataaattaaactagaattagttctacaacaaaataagtaaaaataaataatacacaataattctaaaactggttctaattaaaaaacaaatcagctcaaaaacactgaaatataaattaaacagtatcggttccacaataaaattaataaagacatacaacaaataataactcaaaaattgattataattaatgatggacatatcataaggtttacacttactatgcaaatttaacttttctgataaatttaatggattaataacgtgatgagatgaaagagaacaagaatcccataacacatcttttgtactgaaatttgaataacttacactcatatttatacaaatgttgattattcctaatatcaaaattaaaaggaaaaaataaatctatatggaaaagttaccatcttgatttaatattagtattttgaattgttcaaaaaaaaaatattagtattctgaatgatgaaaccaactgtctagcttgaattgacgtgaattaccttaatttgaacttagtcaatgggcacttcaaccttcacttttaggccaataccgccaagaacctacatcaaggattagagtgtgataattttgaaaactatgtcatcttttgcttgatgttaggacaagattataccttaataaaattattcagcatcagataagattcccttgtgttaccagtttcttgcaaaacttggatcaaaactctctacaagtttgaacaaaacataatttattaaggccccgtttcggtaaccattttaaaaatggttttttgtttttttaattaaaaaatttaaaaa

SEQ ID NO: 383746 - DNA, 1589 bp, Cannabis indica
aatatacataaataaaatatataatttcattgacttgtaatctcttattaaataataattaaaaaattacagtactgctcatctccaataatgcatgtttttagacacaagcacacattttatattggctttaattttcacatgattaattaattaattaactaaaaggagggaacatgcatatttataaattctataattaaatatatattatatatttatgtataatttattttggaacaaaagaggagaattcatgcaagcaaagcacgtcaccacatccacattgtctctctttttattttattttttgactattaagaagataagataataataacaataatattaattacgagtgtaatttgactttactaagaaaaatactaccaaattataagaacatgccgaataataatgaagaatttatattatttttctacaatgtatatatttgtaaagggagaattttttaccataggagagcagatatatatcaatatattatacaataaatttaaattttgatgattaaaatatctcttttaaaggtgtgtgtcaattgtaaaaaaaatattattattttttaaattttataaatattttacaatattttaaaaaataataaatcaagtaattaaattaaaaataaaacgcgagtacactttaaaatttgacagagttcaatttaatattaccgaaattgttattgatatgtagctgaaaaacaaaataaaactcaaattgatttaaaaaatagtataattggttaattttactactattaattaaccaatattttactaaatatatttttaaattaaaacaagtcaaattaattataataaaatgataatacaattattactttattatatagttgttgaacctacattgatatatataataaagactatatatttgcaaaataataaaaattatattcgagtaaggtaaatactaacattttagttttttcaattataaaaaatcgtgtatcaatatttttttatatgttattatagatgactatatatatttatgcttagtacattaatttttaaaaatttagggtggccacagtccctgttggagtgtatgtggctccgcttatgacggtacacttctttttttgttgcggtatgccatgtttgctaaaaacacaaaaataatttgggtttccaaccactagatggagatttctaaattaaattatttattcttaaaaatacgattgaattaaaatcgtaacgtgaatatatcagttgggtcaaaatatatcagacgggttaaaattaatcctaacttaacttttctatgactgatgacatggtaaaattttaaatataacagtttgacaatctaaaggctgaaggcagtaaagttagttagcctcttaattatgttagttaatctaattactatatatatatatagttgtttaagcattgtaatattaaccaattaaaaaaggtaatacttgaaatcaaaggtgtaagagagagtctaagataacatacaactggtacttttagtgacaactttttagtcacaacataaattttttatgactaaatgtgacttttagt

SEQ ID NO: 383747 - DNA, 880 bp, Cannabis indica
ggttgtcttctcttgatcttctggagcaatagcaatatgattataacctaaatagccatcaagaaagcaataataaggatgacctgatagcctttcaagcatttgattaatgaatggaaatagaaagtgatcttttcttgtctcaccatttagcttgcagttatttatgcagacttgccacccggtttgcattcttgctggcactagctcactgtcttcatttttcactaccgtgatccctgatttctttggaccacctgaaaaggggtcacacatttgatgtctgagattgggtaaataatgcccacattaagaagctttaaaatttcttcactacctccatcataggggggtttatccttcgctgtgcatcacgtgttgggttacctccttcttctaggaaaattttgtgcatacatgtagtaggactaattcccatgatgtcagcaatggaccatgcaatagcagctctatgagctcgaagcacccttatcaacttttctttatgctcttggttgagttctttagcaattgtgactagtaatgcttcattcttgcccaagtaagcatatttaagatgattgggcagtgtcttcaattcatgtttaggagcttgtataacggattcttgtaatttgtcagttaagattggcaataccagatacgccaccttcttataaatcttgttgaagtcgttattatatgttgttatgacatccatcatctcttcagaaaagtcttcaccagaatttaacaccaagtactcttgtatagcaaccttaagacaatcttcattatgtagatctaataccctttgggagaggtcatccaacacatcaagagaataaataacatggacatcacttggatacctcatggc

SEQ ID NO: 383748 - DNA, 3112 bp, Cannabis indica
tatgcttcgaaatcgttttatgaccccgataagaagaggagagtagtatggggttggatcatggagactgagagtagagctgatgatatcaaaaaaggctggtctggactcatggtaattaataattatgcaactaattctgtattagtctctttaatttgtttttttcaaccattcttgtaagagtattgctataaggtagcgcttaagatgctcaacatcatacaacgtaatgttttatgagttagttgaatttcgttatagattttacagctaacattgatcatatataaatatgtttcagtcatttcctagaactattgttcttagtgaatctgggaagcaattaatacaatggccaattgaagagatagaaaaattaagaggtgagaagattagtgtcgaaaacaaggatcttcattgtggctcgctctttgagatttctggtgtcacaacttcacaggtaaactatttcagtttgattgttactgtatgacaccttacaccagttaatacaataaacattgattgatgtaatttaatatcgagatctacgtattcaaaataaaatacaagtgatttgatattaaaatacacaaattattgcatgtcacatcatatatagtgttggatgtcttgtagtaatatttttggagttttaactctcttaattatttcaatattttttttaaaattgtaggcagatttggaagtttcgtttgaaattgaaataggtgaattaaaaaatgcggagttattagagtcgagtaaggttgatcctcaagagctttgtaaagagaaaaatataagtgttggaggccaatttggaccctttggtttattagttttggcttctgataacatgttagaacaaactgcaatctactttcgaatattcaaaatcaaaactgatgacgattgtgagaagtatgttgttctaatgtgtagtgaccaaagcaggtatactatttattcttgttttatcatgatttatttttactttattatttttgagaattttaatgagtgttaaacttgtaaaataactttgattaggtcttcattgagagatgagcctgtaaaaaccacatatggtactttcttagacttggatccactccaagagaaaataacattaagaaccttggtatgtttcattaattaaatttatattatatatatgtgataatataattttaaaaagaaaaaaaaatacataaaattaatcatagactattttttattattattttgccaaaaaaaaaaaccaaaatttccaagaatttccaatggagtattgagtaaatttaaaataattttatataatttattaaaagaatgaagatttgaattttatactttctctttgtgagatgaagtaaaagtgctattgccaaataccaaattatataattttatatattgaattagatattctaaaatgtttgttataattgcttaaaatctatgaaactgtttttgtatatatacatacaaaaatataattatgtaaaatatgggcttttattttgcattggtgtagattgatcattcaatagttgagagttttggtggagaagggagaagtgttatcactgcaagagtttatccaaagttggcaattacaaaggatctcatttatatgcattcaactatggaacaaagagtgttaaaatcttaaacttaatgcttggagtatgaaaaatgctcaatttgaatcaaagagagaagaagaagaagaagaagcaaactagtaataattttgtttatcaagtcaaatcatttgaagattgaaacattaattattgatcatgcaaaatttcccaaatggatatctaaaagggattatttagttagttttcccttgactccttgtatgatcattatttattttgtgataaaaataaattgttatttgtaccttcacttttatttttggtcatatatgtgtgtcttgcaacaaacaaaaataaataaataaataaaatgctaattataatttttttctcccaaattttaacatctacgtataccaaattatattttttgaattttttagaccgttgaatttttttcccaaattattgatattgttggatttgagaactttggtccaattttattaaaggaagtctgacgtggatgaaagttcaagtgacatgatctggtaaatacttaagttcggggacacgaattggtaaacatcaaagttcgagaggcatgctttgatatataagtaatcgtcgcgttagtaaaattgaatgaaattttacaaaaatctttaaattcaataatctcaatagttcgagaaaaaattttaacaacttaaaaagtttaagaagtataatttgataaatgttttaatgatttttcagaaaaaaacctttttttttctttaaatatatggattcaattgttagccaaattacattaacccttaacaaagtaaataaaaatctagtagtaaataataaaaaaaaaacaacaacaataataataataaaacaaaaactattttgcccgaggtagggttgcactttattatttatttatttttcgagattttcaaatgggaaacgagacgtgacgggaatatgttttatattttttatctccgaatgtaaaatttggtgaggacgacacaaatataacactccctgcccacttaattacttcaaagtgaatatctaaactataataagacaattaattttaaagagcagaagatctaatgatcgaatggctaaggaacaatattgagattaagtaataagacaattatttctcattattgctcacactcatttgtttacttaagagcttttattctataattttttcccaaacataagaaactcacttgaattttgttctagtgattgaaataaaactcaagaggattaggtcattaattatttgttattaggattgaatctctataaaatggcatttattcttttctactattttgtaatacaactatcgttttctcaaacacattgttattggctattttcataatcaatactatatatttaaatacatttacactaaattgtatttgtaaatatttaattaaattacaaagtttagtatttaatgcaaaagtttt

SEQ ID NO: 383749 - DNA, 1366 bp, Cannabis indica
tttaaaaggttaattaggattttacccccgaacttttacatatacaaaattatgcccatgaaatttgaagactgttaaaaattttccataaactattgagattgatggatttaaggacttttgtctaattttaataagaaaagtctaacatggatgaaagttcaggaggcatgattttgcacatattaaaatttgagggacataatttggtagatatcaaagttcacggagcatgatttagttcatggacaatcaccgaattagtaaaattaaatgaaattagacaaaagttcttaaatccaacaatctcaataaattagggagaatttttaactgctagaaaagtttaaagggcataatttagtacatgtcaaagtttaggggcaaaaatcttaattaaccttttttgttaaaaaaaaaactttctaaaaattgtagttatggtattggtacttacaacagagaagcatttaaatttttttagcaccaaaactatatattcagaattctataaaaatttacagaaatattgctgtgactataacaaacatcattgtgaaaaagaaaaattagaaaagaaaacttcagcatatgtttttaaaatggaggttgacaaaaagtttgagatataattgttcttataataaataactgtattattctttcttcttctgtatagctctatgcagactctctagcacgatttcaaggagggtcaccctatatatatccagtgtatggattgggagagttgcctcaggttaatttgtttctaccatttcatatttttgtatatatatattaatatattttgtagatgagaaaaagataaattagttgataacttgtgattttcatcggcaggcatttgctcgattaagtgcagtttatggtggaacttacatgctcaacaagccagaatgcaaggtaataaactcatcatttattaagatatttattagaagagtgttgctataaaataccttaacttgcccaaacacaataacatgttagagctacattggcattggcaagaagtagttggaaatgtggggtgggaagcaataaaatgggcattgttgtccaatttgggcaacattgcctaactattttttctttttcctaattggttgaaatttattagtggggtcactcgaactgcccactaaatttgttggtggtgtggttgatgaatcaagattctctgtccaaatactatatcccatattatgtctaaccaatatgatgatgacacatcatttaatttatttttgtaaagttaactcactaaaactaacggagcaattctattaactacaagttttaaaattaaatattatcaatataattgctacatatttttttt

SEQ ID NO: 383750 - DNA, 3092 bp, Cannabis indica
ttttatttttaaaatttttaattcacaagaatgaaagtaaaatttttagttttaaaaattttatttttaagaaaattaaaatgtattctataacaacttttgttttttaaattttaaaaacaattaaaaacaaaaaacaaaagtgttctataaatttcattttcatttattgattttatttaagtcgggagtgggtccaagtctgggatcgggtctaggttcgatttctaagatctaagttgagtcggagtctaaaaaatttattaaaaaaactatttaaaaaaattttgaaagtatttttttttttctgtttttaaaatttagatttttaattaaaaaattaaaaagtaaaatcagttttataaaacataatttgaaaaaatatttttatttttctaattttaaaaataaaatattaattaaaaaagtgttactaaattaaccagtcagtttcaaagactagtgcatgtactactgacacaaaatgcgataaaatagacattccaatattctattttttcttttcagtaattttcatatattttttaaataaccactaatcaacacattgtctttataaaacttaaaaccaaacaataaagaataaatgcaaggacacatgttttcgaaaatatattttaacaaatgttaaatattataaggacaatccaattcatttgactctgatttaatgtccgtctccttgtttaagccatactaagtttgattatctgcaaaattggcttcatttgattcaataaatctcgatatgattgagatttaaaatgtgattattgtgacaatctttagctgttttttttttttctctgttctttaaatagggttctccttgtttcttgcattgatgatagacagactacattactacatccgagagctgagtctactcagaagagctttggaagcatttaaatgaaggatgagcgagattgataatataataatgtgtcaaaagaccttaaaaagggtcataactgtccttcaatggtttctctatgtagatatacagctcacaatgattaatggcttttccaactcaagcatactggtttttatgtatagcagaccacataatacataattaagtgggtataacttctcacagtatggatagaaagcaaaataatcaagacccaactcagcctatcactgtaaaacatgtgacaatgagtgttttggtaaggataaggttattacaaaatgttagcacaacctatccacttgggaaagtatacttaccaatttaaacaatttaatatgctcaaagagattttgaacccttatcttcataacatgcaattacagtcaaataaaagcacctctctgtttgtttaaaaggccaataccctgtctttattgattgaccttccaacagcacttagggaatgaatgaaagaaaaaaagaaggctatcccagttgagattagttgactttttaaaaattttaagttttggttttagactttttatgcataatttattccattttcctttagagccgcctatggtcaagtgagaaaagacaagaacaaaggttatggtacaagtggataatggttgctacactaattgaaattatcaaaacaagtataaatatatccaactgtaacccttcaactgccaattatgggtctacaagcaaatacacgaaccattatttaaattatcttaaaaaagaaatgatattttgaacattaacaagctgccaaaaagggtcttcaatatttaataaaaaaataaacacaaacctctttaaaataatcacataaaggttaatagtgagatgaaaaggaaagcgtgcttaatacttttctaagtcggttgtccgtagctgagtggtggaaacaaattgaattccccactaattgtgttatgtagattggaaccatagatagtgatattcaatttctctatttctctctctttactgttccattccaaaccaaatgccggttttagatactaagaccaacttgggttagtgtgacaggaaccacttctttgagatcttataggccatttcaattggagtgcgggcaagttgcacaattggattagtaaaaatacaagatatttaaagaagaaagactacaaagacttattaaaaaaaattgccttattgacatggtagaagaagctgacccacaagagaaaagtctactgagattgatggttctaacttataatttgtaccaaccttaatagggtagactgatctagaaattgactttctagaattcatgttattctaataataaagaagaaaaactaatgataataaatagtaacaacaacaacaataataatattctagacagctcaagccagcacatgaaaatcattagtccctcgacactttcattttttgtccaagaaaatatttatagcagggaaatatgtagactgagaaacagttaaattgtacaagttttaccgatgattgatgaatatttcttattattctaagttcgatcattaataataaccaaactcgaattcatttttctcattcaataattttgaagatgtgttaccctgttttatgttctgttattctttagtattattgaactatttttcagtgatctagactttgaaaataatctatacctaaataacaattatcgttaaaaataaatgtgttagaaatagggagatttatcaagtaattgagcagtgtgttatgaaaagaatcttagagcttctttggctgtgtttttagtttttagaaagtgagaatagaaaataagtttttgtcattttaaaaatttaatagtgtttggcacaagttttttaaaattatttttagattttttttcttactaaaaaaaattaatattttaacacaatacaatgacatgaacccatttgggtccgcgttcaggtttggttccgggactaggatcaaagtatgtgagcaaaaatataaaatttaatatgttagacaaaaaaattgtttttgaaaattaaaaataacattttgatattttctgttttctaattttttaaaactcagtttttaaaaaactgtttttaaaaaattttgccaaacgacccctattagtttttaa

SEQ ID NO: 383751 - DNA, 1282 bp, Cannabis indica
aagaaaagagagctaagttgaaccctaaaaatgaataaataagcaatccacctccttatttgaaaaataataagagtccttcctactcatcccttgattcagtcttccttagtctttttctttttgcatagaagtgtagtctatttgctttcaactatgaaatttcatggttattgtttacattgtacaactctattcacttttaattccttacctaaaacaaatggcattatcctttagataaaacaataaaataaaccaataaatgttattgtattttttttttaatttggaaaagactagaaaatgttgattaactggagtgaggtaatctttgcaaaggatgatataaatatatttacgcatatgtagatactgagtgggagtggaccaatgtccacactagtatttgtattagtttgggcaagttataatgtataatgtataatatgttaaaattaaaaagaatactggtaactgaaagttattaacatcccaacaattattatgtggaaaacataggtctttactctttacttactacaagaaattttactggtgattataaataaataaattctgactaaatataaattattatttttattttattattaaaaagttttgactaaaagtattaatcacaataaattatgtttttagccacaatgtttcttatgattaaaactaaatttgtaataactttcgtgtaaatactaatttttagtgacaaataatttttgtgatagctaaaagtaatatttaattaatcatacaaaaattatgttataattaaaaaattattactaaaaatattgtaacatttttggtagcgtactcaagtactaaatgcattggcacaacacaaaccaaccatattgagttctaagaaggtgttttgttctcaaatcctatatattttataattccttactaatatttatatgtattaatcagtcaagaaaggcccaataattcattactacagcctcataccgcatggccattaggcctataaatggtccaatttgaatagcacctcaaccatatattccaaaacacattgcaaaaattgttgattaaaaaatgaattgatgcaaaatatcattattccttttgcctaatgtttaaaagtagaagattttgctgagttatgcatgttgctatatttttaaacactacgcaagtatacgcaatcaagtagtaaatctcacacaggtgaggtcgatcccacagggaattggattaagtaccactaaattatacttatgattctattcgg

SEQ ID NO: 383752 - DNA, 1228 bp, Cannabis indica
aaaaataccaagttacttttggtattatatttcctatgcccacaatggttctatgttacttttatggtgtccgaaaagtatcaggttactcaggctacgttttgttactgtcttagttactttgtggtgcccaaaaagtacctgggttacactatggttactaggtaaactttttgttaccgtcttagttactttatggtgcccaaaagtaccggggttattatggttaccaggtcactacgttactttttgttgttgtcttagttactttttgttgctgtccaaaaaataccatgttactctggttacattttgtcgttgtctttgttgctcttattggatggtaagtatatatgttacttattttttttagggtaacctaatatattaagtcatatgtttttagtacaaagttactttaaatagtcaaattattaaataaatatagaaccttaagtaacctgataccttgaaattcatatcaaaactgataacaaaaacaaaatagctaaaagtattgatatcttgaaacaaatcaaacaaccaacaaagaacactaaaagtaacctggtgccttgaaactcgtatgaaactaacaataaagacataagtaaagtaatcaagtgttttgaaactcttatcaaagctaacaataattacagagaatcataagtaacttggtaactgggtacgttgaaccaatatcgaaaccaacactaaataaagcgccccataaccttcaaacccaacaacaaattcagagatattaataatttgttgcaattggaaatccatatacacccaacaattaataaagtaggatagtacattcagaccatatcaatatcaaatacaaaatagagttatgcggtaccttgaaacccttatcaacactaaaatattgttgatatacagctaatcatatgcaattattgaaaaggaatagttaatactcgaatccaatatagttatattgagaagatgataacctgatgaataatgaatgactactactgcttgtacagacatactaaatttgatctctaattaatgctatgttgtgaatgagtttacattacgattaaaaataataatgaatgtgtcaaagataatagacaaagaatttagtgaaattgtacaagtaattagcacctaaagattactcgatccaacaagtgaggaagcgagaatttgactgagtgagggcttgaataaatattaaatcaaa

SEQ ID NO: 383753 - DNA, 1824 bp, Cannabis indica
tccttctccttcaacatccactcaagaggccacatcctcatccgaacaccttggggctttatgttggcttgaagtacgcgaagcattccttgttaagaccatcctcgtacaatattggttacaattttccttttagaaagcttcctacaactctcaataaaagtaccaaaatattgaccgagattttcggcaataattaattcaggatattttgagtaattaatgcaaatttaaaaagagtatttttacgtggttggggcattaaacaaccttagtccataagtcattttatttcagtattgtctttcagagaacaatttaattgatccccttttcttcacattcttgggggtatttataggttcataatggtgataaaaatgccacctttgtcttgcttgtttgattatactttgtacaatttcctaaacccggccttaggtcacgatttcctattctataggtatgtgctttggctcaatataggtgattggtgagacaatatttttctcttactaatgacttgacagttcgcaatgtagccgtcaaacgaggcatgggatgtcgcaaagtcaaagaattataggtttaaaccctgaaacagactttccatggtagaaagtaggttgaccttccccatgtcgcattaaatttgcgcatagtgacagccttgggccacacaccgaatcccatacaatccagctttagcctctttgagatgagtcttctcccagaggggaaaaggcaactaactaccgtcctagaaggtcctctcggagatgactaaaattctgaagcgattcttgactcacgcgcttcgcatgtatgttttgttgtagcacgtcccgcaacggggcctcattaccacatggcttcctcttagagtaccacatattttgagaaaaaatctaagcaaaaattaattataacatataattagcaatattcattaataatatatttgtatttcctatattcataaatatattaccctttactcaatttcttttagaacataaagcctaacacttgataagatttgtgtacaaattgacacactttatttacactaaatcctatgtttggtctcgtgtttatggcatactggagtgcaccttcaatggacctataaagagcataattaggaataagttccctaccaaaattggaaagtcttaacccactatccataggagtgctctgcgttttcaccccttgcagttgaggtttgcaaattagatcttaaagatatttttgttggaacagcaaaatcccatttagtgtgtaaagaacttgatagccaagaaagtagtgaagtttgccagatcttttaaagcaaaagtgttacttaggtatgttataagagaaaatgaagttgttcatcgttgtttgttatcacgatatcatcaacattaatgacgacataagtgtgacttgttaatgaaatcttgacaaacaatgagtgatttgttttagcaaacacaaaaccaaaacctataagagcacttaaaagtttttcgaacaagccctaggagcctctttaaggtcatataatgctttatgtagcttgcaaatttttttaaaacatgtggtatcaataaactcgaatggttgcctaggggtgtacgtcagtcagtttggtcgggttatagtatatttttaccaacccaatacaattttcgagttgcaaatatttaattgtaacttgcccaattaaaattagaaaaagttcaacccgcctaatgatttcgtcggtttggttggattaactcgtccaaaccgttcttcacttttttttttatatataattattatttttagttt

SEQ ID NO: 383754 - DNA, 3252 bp, Cannabis indica
gaaagcattgttcacatctacttgttgaatgtcccacccataagtagcagcaagagagaagataattctgatggtgcatggctttattacggggctgaaagtctcaagaaaatcaagaccagctgtttgttgaaatccacgagcaactagacgagctttaagcttgttaaccgacccatctgtattatatttgattctaaaaagccatttgttagtaataatcttcatatcaggagtggggggaaccaagatccatgtctttttctttttgagagcatgaaattcttgattcatggcttggttccattttctaccagcaagcgcctgttttacatttgttggttctaaaggattttggatgtgagtgagataggacttgggtttgaatataccggccttagaccgagtgaccatggagtgagtatttatggttggaacattatggggaggtgagagagattgtaatgaagatgttggttcttggggaagaggatatagaggagcagtaccaatactggaatggtgagaagaactcgattgggtagcaggactgttgtgaaggaagtgttgtggagggaatgagagtattggccgaggcagtggattcatgcaaagttgcagaaccagtgttggtactggtttgggtgggatgcatattatcaatgtgagttggtggcaggggtgcactatgaggataaatgattggtgagtgagatgagggtggagttgatgtggtgaagagtttgttgtaaggaaattcagattcattgaagttgacacttcgtgcaacataaactctcccactcgggtgaaggcatctataccctttttgagtgttattgtacccaagaaacaaacatttgctggaacaaaaagcaaccttgtgattattataaggagtaagaacgggaaatcatgaacatccaaaaaccttaagaaggttataatctggtttgtgatgaaaaagtttctcataaggggaaatgttgtgcaagattggggtgggaagacgattaataagatatgcagcagtagcatacgcttcccaccaaaaacttaggggcatttgagcttgggcaaggagagtcaagcccatgtcgacaacatggcgatgttttctttcgacacgcccttgttgttggtgtgtgtgagcacaggattgcctaagggaaataccaagatttctaaagtgttggtaaagaggtaaatattcttttccaatatcagtttgaacactctttatcttggtatcaaatcgtctctcaaccagattttgaaagtgtgtaaacagagtagttacttcggatttggattgcatgggatagatccaaacaaacctagtaaagtcatcaacacaacttaggtaatatttgtatccatcccttgaagcatagaatgagggaccccaaacatcagtatccacaatttcaaaaggagcaacagttttatttatggtagatttgaaattgaattaatgcattttgcctaattggcaggcatcacagaaagcaaaatctttacatttcatttgaggactaacaatattcaacactttggacataacagaagtggcagggtgtccaagacgacaatgccaaacaaaagtaaagttgcttttatttctaacaggattgcttgaggtattacaattgaaagttgacactttacacgtggaattgaaagatgaaaactgtgttgcagcagcagcaacccgatctggtttgggagggactgtgagagtgtataggccattattgagggaaccccttagaagtgcttgcttcgttgtcttgtccttaataaggcaacacaagtcgtcaaattcaagcacatcattattatcatgagtaaattgggatatgcttagtaaatttttggttatgctaggaacatggagaatgtcttttagcattaaagacttggtaggaatatgggtgggtatactattagaaccaacatgtaaaatagggatagaatcaccattacctacaacaactttggctttgcccttgtattcagttgtgttgtttaattgttgactgtctgctgtgagatgatttgtggcccctgtgtcgagataccaggtgccaggagactcttcgagtattgaggattcagagatgtgagcttggggattctctgttggtgtattcgaattaggagcaccttgactttgagggccagtaaatgtgatgtcgaatcgatgatagcacttttgtgcggtatgaccaacacggccacacagttggcaaatcggcctattacctctgcctccacgattttgaggagtgccacgaccgcctctataagcccccctgtatccccggcctcgattgttcccattcatagaaagattcgcaagattcgcttgcacattattgagagcagctgctgagaattgttgcagacgaacctcatgactgtgaagcataaactgaatttcttgaagagtcaagggttcggatctggaggtgaggttgaccacaatcgattcatattcggatccgagtccaccaagaacatagagagccaaatcttcatcagaaatagcttgtccagcagctgcaacagagtcggcatagcctttcattttgagaatgtattcatcgatggtggaggagcctttctttgttgactgaagaaggcctcgaacctgaagaagtctagctcgcgatgttgttgcgaacagctgggaaaacacagtccagatctcggaggatgtgcgacaattgatcacataaccaagcatttgttcagtgatggagttcatgagccaatgcatcaagaactgatcaaatcgaagccattgaagatgtgttgggttagggatgttacttgcaagatttggctctggctgaggatgtgtgccaaggatatagccgtcaagattgtacgcccgagttgcagcaagaactaaggaacgccaaaaagtgtaattcgatcgatccaggcgaagattaaggggaaggagtttgttattaggtaggcttgggggaggttcagccattgttggtggagcttcaggggtggtgcttgtggtggatggaacggtatctttggacgccatttagacctaagtctctgataccatgtttgaatgtaaaggtggagaaaattgaaggtgtggaaaatgtgaattgatctgtattgagatagagagccaaatacaatatatataggctctgaagaggttacaacagaatgaacaaatacaaaaaaagacagttggcattccaactgaaataacagaaa

SEQ ID NO: 383755 - DNA, 2098 bp, Cannabis indica
ttttttaaaaaataaattaaatgtatgtttactattttcatcagccctcaattcttttctaaatattaaagaatagttgttgacaattttatcgtagtatttaccttaattaccttatatcaacgaattgtatttcaatatttttacaacaggtgataattgcggagtaaatatgaagtccactgtacataacggcgaaaatacttttataaattgtacatctaaaactgtgataagaaaaaaaatatgataaagaagcgtatcaaagacgaagacaaaaaatgactgaagaccaaaaagatgaaacgtgagcaaaacagagggaatactatgcaaagaaaaaacaacttctcatgctacagagccatcttgatgaaggtgttgataaacaaattggattgacatcaaatacaaggaaagctaccaaagaagttgacactgaaattacaattaaaaaaccgaggcaatatggtagatgtagcaaagatgtttccagagttggcaacaataatgaaagtaatccagctgatattactgatgcaactaattgtatagaaggtacatctttagcaatttcaatttttgtacgtgaatgaagcgtaaaccattcttacatttttaaaattcttttgcagaggttacaaccaatgttcttgaaataggtaacaaaattttcattcatttttttttagttaaagtaactatatatttgattaactgtatttaatttttttttgactttctattatttcaatcaattcagaagaaacaaattcacaatgagacaaagaaatgggtcattgatgatataccccatgcttcaactaaattaaaacctccacttgtgaatattgtcacgctaaaatatttatgcatgaaacaaaaagattttgttgctgtaatggagaaatatgtatagttagtaacaatattcttgaagatctatataatttgtatacatcattagcagataatgcattagagtttcgaaaatttgttagaagtcacaataatacattggcttttacttcacttggagttaaatatgatgtgactttatgtcaaagtaataaatgtatctatacatttcgagttcaaggacaaatttatcattacattaatgaatttatatcaatagatgaacgaccatctaatttatatatgtatttttatgacagtgaacatgaaattgaaaatcgcttgcattattgtacaaaactaaatgaaaatattttaggtatcctaattaaaatattagaaattaatacttattgttgttttttacgatcattgaaagatgtacaaaacttggaaattatcaaatttgcatcaaatctgatccacttttagatcaaagagtttataattctccttctatttctcaagttgccgcaatatggctagatgatgattcctcaatagaatataaagaccgtgacatcattatatactcacattcttgatatagtcatagaatacaatattattatggttgttatgatccattacaatatcctctattatttccatatggagatgttggttggcatgaaggaattcttaaaaaaaaagaagaacgcagaatcaactcttcttacaaatgaatcatcaaattatttacaaaatattgaatctattgatgttttgctcaaaacggaaactaaaggtacgtttacatttatattcatttataaattctatccattacttaattttattttgtactttccatctttacaatttacttttattcatgcagtttcaaaaattagggataaagatgttgtaacttgtcgtgaatattattgctataaaatacaaataagatctactgataaatctttgttattacaatttggtcgaatttttcaacagtatgttgtcgacatgtatattaaacttgaaactaaaagattagattttattaaaaataaacaagattatattcgagctgatttatatcaaggaattattgatagcattgaccttggggcaaaaaaagcttctcaagttggtaaaagaattgtattaccaacttcttttattggtggtcatcgagatatgagaaaaagatatatggatgcaatgacattagtac

SEQ ID NO: 383756 - DNA, 2126 bp, Cannabis indica
aattcaaatttctcttttattaatctccgttggatcaaaatctaataatttaatatttttaaaattaatatagttaaattatttaataatcatacccattaaaaaatattctatatataaatatagtatgatgcctagctaaaatccaattaatatcatattatcaacatatatagcaaatcatctatgcagtttgttacgtaagctacaatctatattcctttgtccaataacaaacaatttatattttaataaggataacgcataaagtataaacatactcaaaattttatagttaactttctaaaaggaatgttgtgatacaattatacttgtatggttttttcattctatattttaaagttagtttttttttttttttgtaattttacgaaaatttacataatatataactaacgaagcaacttaaattgtaactaaaatccatataataatccacatagaaattagtagagcaagctaaattgtaaatttgaaaaaaaaaattaaaaaataatatataaagtaatcctccatatttttatttggagttttttcatatatctttttttattatcatatatgttgtaattatacagaagcacgtgtaaattctcagaaaattataaatagtctacaatgctaaaattaaagttcagatattttattacatgtatgatttttttctccacaaaaatacaaattatgtcgtgtcaagacaaaaaaaaatacagatcatgtcatgtgccaataattttatagagtaggcctgcgacacgacccttaaacctgatctttttcttgacgtgctttttgtcgtcctttgctcgaaccaattagctttttctaaatagattaactcgttttcttttacggactccgattcgtgctctagatgtatattacaattagtaaactactaaactacaatgtatatatatatttatagtaacaagtatttttatataattttctaataataattacatagaattgaaaaattataattgttaaaatttaatatttactattgttttaacttatatataattcataaataatcactacaaaaaattgggtctctaacgagaacacctataccaaggatatgtcatcgttattgctactttcacaccagcaggaaaaattcacagttttttttatgttaagtttctgtaccgtggacatgtcctcggtagtagttctaccgaggacatttttattttcttttgtttttcagctgctttgacttcttcaaactctcataacctgaaaatccccatttcagaccagaaaaccctcgccagaaaatcaaaaattggagatcatccacctccctccccgacgttccatcacttccaaaattatcagtttttcagtctcaaggtcatctaattggtaataaacaattgagacccctggatgaagaagagaaaaaaacagctgagtggtatgttttaaataaccgtgctgagattgtaccatatattcagtaagtatattaaatattaatatccaattcaattcaaaccattcaaatagttaattttttttatatataattaattatttattatctttgatgtagagaacatacgaatattcttctttctagaaatgttgaacacttagaacaagtacaacgaaatgaattttcttcttggttttataataagctctatgatcttcgaagattgggatctccagaggcatcagaagagttattctctttagcatcggggtcctctatgttaaagaatattgtaaatctgaatttagccctaattaattcatgagaatcaaacaataaattagagagtagcggaagcgtaccggagtccatagaatcaatctttaaatggtattatttaatttttgcatcaaagtttttctatggaacctgagtttcttgatgatggggattcaagaatacgatatgtgaagcgatgcaaaaatggggaccaatacctgtttatattaccgacagacaaaattattgataatatttattgactatttctatttggcccctcatcaaaatagaaattgtctaattggtatttacatattaaaatcatcacaattatgcccttaagtcataaactttattccaaaatagaccacat

SEQ ID NO: 383757 - DNA, 938 bp, Cannabis indica
caaaggtcatagaataggaggttgcctcttaccttttactacactagtcgcctggggggaatcacctagttagcgataccagaggtttcactttgatgggacattcgacgattgatgcctagttcattctgcaagcttcctccatttgcatggcttaggtttttcaactggggtctttcttgtgcacttgaggcagagtctcctgggtgatagacttagttccacttagttgaccctttaactactctggggggctacccttgtctctgattccatggggtgagtgtttttttagttttactttggacgtagcatgatctttggtcccgatacactttcccaacatgagtcttcaaatgtctcctgtgggacatgtggtcacttacttgttcaatcagaaagtaactttgttactttttgacaccatattttggttccccgtcaccaggtgttgtgctaatttggccacagttgcatttcataaccccctattggtctttcaccgtcgactaaacgagaacataatgccttttttcatcatcatacgagattggtctagcggtcaggtttttagtatttagacaagctttctctcgcatggtccaaggttctcttttgtaggacgatttatgatgatgactatggggatcttccttgttgctaaagccctggcattcctctccacatatttcaccgtagtagttatttagacatagtctttatctctttagcttgttttggcatgtttaggctactagttgagttagagaagagcgtagttgtaagcttattcttttcacaaacgacgtcaaactgttaacaacctattctcgccaatgaaatcatgtttatatgttcgaaagtttaattccgtgatttgtcagttcactggatttagactggcatgataatcagtgataggtatgcttacaccttgg

SEQ ID NO: 383758 - DNA, 3069 bp, Cannabis indica
tgtattagcttgatcaatcttgtgtaactcttgtgtaactcttgccctcttatcctacttgtggagatatttcgaaatgagaaatgtgtttaacttgatgcctttcatatttaattatttgtatatttttcttcttcatcagattaggcatgtaagttaattagtgttaggactaagaacgaaattaagaggcaggatttgagtgaaaattgtatttggtgttcttgtaatttataatccagaacttcgacagtttttcatttttcttttctgaatatatattaaggtttactaagaaccattgaatttcatttcttcaggtgcaccatgtgatgaaagaacttgttcggatgtccatagctgaaactgaggtactgaacttttacttgatcaagatttctgggtataaaaaaacttattatagaattgcaattttagtgtcagcttatgatttgtaaaacaagattggatttcagcatttacagttttgtatccttccaagttaagtgtcaaaatatgcaagcttgtatattatgtgaaagaattggagtatatgtgttcaaagtgctacttgattattgttcctttggattttttagatgtatgaataaatatatttatcggtgcatatacgtcatgacgatttcaggaacttagacggtttcctacccttcaagctgacatagcagctgccgccaatgaagcattagaaagatttcgcgacgacagcaggaaaacagtcacaagactagtggatatggaatctagctacctaactgtggattttttccgaaagcttcatctcgaacctgagaaaactccaaacccaacaggaccacatgcagaccgttactcagataatcatttcagaaaaatcggtattccattttcttcttgctctgccactacataactcataaacagaagttgttttatcacatgatagaatatatcaagatatttggatttcactgagacagactcaattgttatgtatcaggatcaaatgtcagtgcttacattaatatggtttgtgaaacactgaaacattcgattccaaaggctgtggtttactgtcaagtccgagaagcgaaaagatcacttcttacccacttctatgctcaagttgggaggagagaggtagagtatccatatcttactttattaattttatcatgttgataaagttgttgtattataatccaagtataccattgtaatctgagtttagaagatggataatttaagaagacaattcaaatcaattaggaaaagataccttacttttcatgatagaatagaaactatttgaagtactctgccttttatgataagggcctaatgagttttgttggccttggccctaaagatgttgtttgctatcgagaacccgaggcttacgagtaatatttggcattttattcctactgtgattcttgagtaagttctttactctgtttatgcagaaggagaggctcggtgcaatgttggacgaggacccggcactcatggaaaggagatcaaccatagcgaaacggcttgaactttacaagtcagctagagacgagatcgatgcagttgcatggaaatgatgaggccagcttaacacgacatcgataaccatgccaaaatttgtatgcaccccatgacgaaaatagatttttttttccttttattagtatccatattctttttcacacttgaaaatgaggaaagacttcaatataagaactgccattatttcagccaatttatatgattcttttttcttttggtgagaatttcgattattgtgaaaagatgagtggttttattgtatttctttcttctttttaggttattatgccttcaatatcactgtaatatattcattcacaactcactccaagctttctttttattattattattattatttgtttaaatttacatatatttacatatgaacaagtaaatcctttaccaatttcttcattttttaaccgtctttaaaaattaacagttcatggctttgatggaataaccaaaatcagtacaaatagtataagaaactaactagaagatgccaaagggcactcattaacataccaaataagtttttatcctatgctcaaaatgtacaaaaaggtcaaaatgaaataggcacaaagatctttacatatatatatgatatgatacagagctaataataaacaaatccacaacacatcagaagaacctcaccagaatttgatctaagcaaattacaaatgctacaaaatgcagtataggaactatcgaagaacccgaaatggcatgagccatgaaacaaaattttttgtcccagaatgatgttggtgtgggatcagtttttagtcctgtcggcttgctaagcacagctcatgcaattcgttgagtatccactcctcacccgtgtggccgcccaatactaggacccttgtccctccaaccacacaagtgctatgaccccaagcaaatttcggcggttgttgtcctggaacattaagaatcctccatgatggtttttcctcggaaggatccaaaaggaagagttgcgaaggtgagtgaagcccggcaatggatccaccgaagatgatgatccttccacaaggcatgctcacagcaacatgatctagtctaggaggaggaacaacagcactctggctgccaacaccggtaaatgcactacattccagtaatctccaccggggctcgtcatcttctaaatcaatggtgtatgcctctccagatcgcaatcttaggttcccactcttggctagaccaccgaacataagaattttcgttcgcccataaactgaaagtgagtgccctaaccgagatggaggtgcccatgaagttggaatttctctccatgtaggcttgtccgtaagtgagatccaacaagtatgtatcgcttagaagtactccagcatctgtgcatccacctgaaacaaccaattttgaaccttcaatcgtgcaagaactatgccaggatctcggaagagggggagttccaccaaaaacttctgtccatgttggctgtttggcatccaagtcgagaacaaatac

SEQ ID NO: 383759 - DNA, 847 bp, Cannabis indica
tcagagatgagacactcggagacaacttgaccaaagtttcaagacaggagtaacatttgccttttagaggagatttagtgacattcattgcctccataacaccgacagaaaccgacaaagagagcaaaggagccttcaatgaatctcaccaacccacaccacactcagtaaagcaaaggccgaaaaaaaggtcaaccaagcaacacaacacaaacctctacccacacactttcctacacagacaaaaagtgagaacaggaaaaactataagtcaacacttaaccaacagctgataaggccatgagaaaacactcacaaactcactcactcactcactctctctctctcactctccctctcattggtggtacctagtcgagtatatatatttatttatttattattacgtggcacgcttctattttattgtactaataattatgttgtattaaaataaaagattctaattttaatttctttgcagatgtgagttgtgaacttgtgaataattatttttttttaaaaaataatatttaaatttattagtattttaattggtctcatagaagttgtattcttataaaattgtacttaaaatgtgatatgagaaatatattaaaatattgtgtaatacaagtaacatgttaattatggttttaattttctttgttaataaattgagccgttgagattccattttcagattttgtttttcttcagcatcttaatgaattatttggcctattttgtctttctttgccggaataaaacaatagtaaaaatttaacacaatataaaatttacacaatttttttgaaaaaaattttaccccacagtataaaagtaa

SEQ ID NO: 383760 - DNA, 2004 bp, Cannabis indica
acctaggatgggttaattttggaggcctttgagcaaggttgtctttagttattatgggacctagaacaaaattttaaaaataggtattttatttgagaaataaaataaaattcaaacaagttattaaatcatttttctaggaaaaaaaataattatgagggacttatggaatatgggaggcctcttggattgagagactttgggcaacagtctcgatcgccctaccctaaagacagtcatgccttcagtaaaaaaattgttatatatatatatatagttgtaagagtctaaaatataaaacaagtattatttttttaaataaaatatcaaatgtacataacattttaagataaatatcaaatgtacacattaattaaacataattctaaattaattttaattgataaacatcattttttataatcaaagtaccaaatataaccttacataatttattaaaattagagttatataatggggatatgacctaaaagactgaatataaattaaagagtaataatataaaggtaaaaattataatagaaaatgaaaaatagatatacaatgtaatttcttcaaaaaaaaaatttgactaaagtgagggggccttgggggactactcatctcatcttcggccttggaccaaatctaattatttgtggtgaatattgtttttattttatttatttatttatctattgagaaaaatgaataattccattaaaaaaagcaaaaagtgaaagagatccaatgatcaatacaagcatgataaactaaagtaaatttagtagaagactcagctacaagactcgagaagcatctaaagagagagctaatttagcaaaagaatgagctagaacattattaactcgcttacaatgagaaataaaaatactagagaaagactttcaaacatgaaaatatcattaataacaatatcatactcattgtcaacttgcatcttactagaaactaaattcaccatacacaaaactaaattataattttaattttaaaataaatttgaaatgatttttataatttttaatgatatttaaatatgtataattatatggattaatatgatcgcaacacctgtatttttgtttacatgtaggataatccatacttgcacataaccactctttaatttgctaacaaaagtagaggttggcggattttctcactaaaatttgaggttggaaggttaattgcaagtgaattgagagtttagaaggcttagtcgcaaataactcttagtaaaattaagacttttgttagggaataaacaattattttgcctcttgaactttgtcacttataagattgtatcctcttgcaatattagtattgttaaaaatactctctttaactttatcatttattaaaaattaaaacttctgttaagtttttcataggttgatttgtgcaaatatcagtttatgtggttgaataataaaaaaaataattaaagtttaagaggacttaatgaaaaatataataaaactaatttataatgaaaatcccattttaacttaaattatattcataaactaaactttcttaagaaaataaaaagaaaaattgaaacttgaaagtaatttcattaccacataaaaaaagttaatattatattaaagattaaattaaaataaaatgtcataaagtttatttttattttagtttatttaggtggtaactaaatttgacaatattatattacatcaacaagaaaacatagaaattgatacaatgtagcattatactaatttttcataattgtctaaagtttaaagggtacatttaacactccaacaagtataaggagatttattttttagtgacaaagttgttttttattataaaaaaaattttctcctaattttttttagggacttttgctatttttttactaatatttttttactttttacttgtattttttttataaaatttatactgcagtatactgtgttaagttttcactggtgttctactagtgtt

SEQ ID NO: 383761 - DNA, 2002 bp, Cannabis indica
attgtatattattatataaaatatattgaacatcgtcgtttcgggtaactcttacgtagacatatatcaatatagaaagtgttgttagttaaacctatttgttttgtatgtattcttttggtcttttacttaccctatgaattcttttacctttttctcgaagaagaaagcctaagctaaatttgctgttgttcaaattggaaaattggtatatataatttgtcgaagtggaaaagagatacaactatacctaaactttaatttttttctaagttttacaaaacattaatatatatatatatatatacatacatacatacatatttatattgatatttatattcctttctcatttttgtagtttggaagtccaaagagtataatgacaagcacacaaaaagaaacccttttataatagttgatttttctttctcatttttctctttatgatcctaacatacattctcttagatctcctttttgttattttgtgagttgtagagatttatgggacgaggggaccatatatggtcggctgacatggcgcatgagactgtgacacttcccccaccacggcccacaccacctccacaccacaacaatgggtggacggcaccgccgagtagaaattcatccttactcaacagtttttattgacttgcttgatatatgcactgaccccccccccccccataggaaaataatatattatatacatcatatgtcatatatatgactgacacttgctgcaaactcacatatgccacttgtcacgtgtataacctatatgagaattactaaagacactcttgttgcctaccatcttcagcgtcatactattattagtgtaattaagtatcgagtcttatataacttaagaaaatagtttttaaaaaatatcgctaatcaatcataaggcgccacttataaaaatactaattaaacactactagtacctaataaaagtgctataaactacaaaatagggcatgcattacctacataataggcatcttagatgttaggtgggattagccttcatccttcctttattgatgtgattcttcataatggagctgtcactagcccctttgattatcgtgcaatcgccctaaatcaggcttacgatgtttgacacgtcctcttatgggcgttcccagacgcttttcccatgttgcattaaatgtgaagtgactgttcaagtagatccctctcgtcccgaagtgccttcctatatcttgactcatggaggagaaggcaagccttttgcacttgttcgggagctaacgtcgtgaaccacacttgttgcttcttccatacaacttttaacttatctttgggtgacttgtctatattttatccacatgtcatacatagcagcggtcacgtatattgggaataaattggggcaacagtaggtgcattcgagttagttgttagggtttaagccttaaaaagtttgtaaagacatttcttattatttataagagttgaatattttgttatatgcatgaatgttaaattattaatattgaatattgaataatttatatataaatatcaaaaaatctattattcatacatgaggttgtgacttgtagttatacagagaattacgtgttagggtctatgccctgaaaaacctgaaaagacatttacgattataaataagagttgaatattttgatatatgcatgaatgttaaattattaatatttaattttgaataatttatatgtatcagaaaattcctaattcaaacatgatgatgtgacttgtagttgcacagagaactaagatcacttaaccggccatcaataaaataatcatcaacatattaaagtttaggaatctttaatcaatggttgctagtgtggttcattgatgtccgttatttggtacaagtaatctcgattcgaattactgatgtagtgtgacatctaagtgaatgtgttgtatataataaagattatatatgacaatgatcgatatgaataaagct

SEQ ID NO: 383762 - DNA, 1234 bp, Cannabis indica
tacataaaagaaaaaaaaaaaaaaaaagttatatatgcataataaataattaacattaataatattatatatttatgatatgtatatatacctgttgtggatcaaaagttagagtgtactcatgcatgaaccaatgagttctagctccatgaggaggctttccattatagaaaacaagagtttttctagtcccaacaatatttttcatagtatatttttcatagttgaagatacaatctttttatctgagcctgtacttttccaataaccacaacttgttctcctattacttctcttaccattcttgtactttccttctttgttgctaaaaaagtacctatcttgttctaaatcacctaaaaaaatgttacatatacataaataaaacgacatgaagatatggcataaaacgacaatcaattaattaatatattttttataatacctgaggctgagggcaaatcccaaggatcataggtggaaaggttaatgatctcaggaacaatgtcagaagaataaggtggaagtgggaaagagaagactttgcatctaaggtattgaaacacaagttcttcatctgttggctgaaatcgaaacccaggtgggagtttgattactccattgttgtttcttacaaagttgtacttgttgttgttgttgttcatcataatattgttatggtttatattaagattgattactacagttacatataattaaggaaagtaatactataagagcaaatgttgataagtatttatactcatgtaaaggaaatatattaataataatagtgacttggaaagagagatcgactttgtctttgtttggtttacttttaatatatataatatccaatatcaaataatatataataacatataatattgtttggtctacgaggagcgggaataatgttaattgaaaagaaataatgttacacattgtgttgggaagttgggtccttttttttttacttgggtctaagttctggttattttatttttaacaaaaaaacctcatttatattcaaaataactcctatttattcttctaacacaggacttgaattgaaatcctaaatcatatatagatagagttttatgttagacttcttatttaagcttatattaacttttattaattttaataaaatatgagttgatttgatagttttttattgtgttaacccatattgttagtgattaattgttaatgagtttagcatttatgt

SEQ ID NO: 383763 - DNA, 2036 bp, Cannabis indica
ataagtcaaaatattcatgagacaacttcaatataaataggtttgttttgtaaactttattgtgttctattgtattatattatattatattatattgtatagtattgtattgtattgtataacagattgtgtaaatttattatatattaaccataaacccaactctgaccccaaccttacctggagaaggacccggatgcaaaccctgatctcgaacctgaccctagaccttgaacaccgatcctaaccccgaccatggctttgaacccgaccctggacctggccaagccctgaccttagcctcagacctaaacctggacacgaatcccaaacctggagctagaccgcagatcgaccccaaccttagattaggccctaaccttggctgcggacgcgtatccctaccttgaacacgaaccccagccttggatcctggcctcgaaccctaaacccaaacctggcctcgaccctggacccataccccagacccaaaccttggccccgaccacgaatttcttatgtattaataatatgattgatattgtattaaaatttatgatgcaatgcaaagtttgattcaaacataatggtattcttatttaatataataagacttgtcgaaggacccaaaatgtactaattttaaagggtttttacaaaaaatactaagttttgggcaaaagtttataattttactgtggggcggaattttttacaaaaatactacctttttataaaagaaccgtaaaataacaaaacagaacaactaaaaaataactagcgaaaactttacacagtacactatttttgataaaaattccgtcttatagtaaaaattaaaaaaattaaaaatttcagtatgtagtataaaaactcataattttaatgtgagaattatagtactgtaccacgttattaattattgagtttataaaaaataaataaataagaaagaacattatgtaaaatactaaaattcattgcatcagccaaagtacataggattagctaggtcggacgataaaataataataataataataataactatgttatgacaatttacactacaattttcattgcgtataatctttagcatatatattgattcatgtccttgttagatccatgatctatcattttcagtcttggccggacatgatatagcttaatctgagtatatccaatttataaccaaattgattgtgtcattgatgattacttaaacttctcaaaattgccggccaccaaattcaactgcacttcatgaaattttgaacctatattatatgattataatatattaagtatacttgttagaagccggtaacgattcgtttaatacccttttgagggttctgtacatgaacaaagaaatgcgtacatatattaccatatcacatcacctgacaataatataacaagtgaagtcatattcatatttattaatactattatttgtatcaaaaatatgcagtttgaactatataaaatacctacattagtacagtgacttttagatatgcacctaattggtcaattataactcgtcttattaggttctttaattgtttctataaatatagaacaatgtacttgtgtagtttaagggaacaataggatatggagttaagcagatcatttcactacacaattttctctgctactttgatattttctttggttggtgagtttttttctaagctgatcaagtatgtatcactaagacattaaccattctatgagtgggtgtctaaactgttgtagctttaaattggacattaacaaaatccactatactgtcatcatcatattttacatatttaactagcactaaaatcttctataactcaatttatagtggcttatgatacctttgatccatttgggagcataaatatcaaatgggatgttgtctcttggaccccagatgggtatgtggtaagtgctatatatcaacttaattattcaacttgacctcctttactaccacaacaagaaaaaaaaaaactgtaatttttagtgacaacttttta

SEQ ID NO: 383764 - DNA, 1310 bp, Cannabis indica
ggttgcgtttggttgaaggtaatcaaacagaatggaaaatgaatcaagtttcattccgttcttttgttttgttgcattataaatattggaatgtcattctagtcgaataatttttccaccattttggcagaatgactatttgattttgaagtgtaaggaaagatcattctgattcaatataagaaatcaattttttcaatgtgttttaaatcttattacagtcctattcctatttctatattttcattccttccaaccgaattttaaaatcttctaatataacaaacctgaatgaagagcacattgggagaaggatgagcattgataagataatcagtgatccacttaagagagtcttgagcataacccaattggttgacagagttcatttgatcaccatattcaagaattgcccaagacaaaattgttgctgtaaaagccataggaaatccaaacttaacaagatcaccagcatcatacatccccttagataaatccaaatccatcccatcactcccaatcccatcttgtagccctgaatcacctctccaccaaaccctgtcatccacaagcttaccagctacaaaaagaaacaaaaaaacatttaatcaaatgttaaaaccaaaattaaaggacaatgtcatgtatgaacaggcttcgtaagatcccgttgaaagaataagtaatgtgacatgattttgattaaattctttgtacacaaaaagtctcgcgtttacatttttggatatcgaagaattgcattgccattccaagagcatttgcatactcagcaacgataggacccgggtgatcaggtacaccggggccactcgggttggagtgtttaaaattcttcaaaagagtgagtacagcagcagcaaacaccatagatgctagtacaagcacgattagccaccatagccagcccttggacttggtttggtcttcttctttcttctgattttccacacccattattacttttgctatatctcagtctcatatactaatttcatgtactgaatgaaaagtttccaacgcaattttctcttacacattttcacaaacaccttggcttctttcatggtttaaatacttaattttttttagtaatcataaactcccaactgaaaaagtacactgatttagacatgggaatatttggaggcaaaacttaggaatgtgtgaaatgacgggaatgcccttgtaaaacttggtcgttttgattgggacttattaaacttgaaggggtagtaattggaagttctgtcaaagtcgttagtagttactaatttgacgaaacggcagat

SEQ ID NO: 383765 - DNA, 1718 bp, Cannabis indica
gacctcaatggagcgatgtttggaaggtggcgaatgaagttactttccatgcaggaagactcactctaatcaaatcggtggtggcttcaattcctgtgtacaatatgtcaacaaataagctacctgtgggggtttgtcgagagttggatgctttggttaggagtattggtggatgggaagagttactaaagataggtttatggcgttcaaagcatgggacaaactctgtcaacctaagtcttcgggtgggcttggaattagaaggtttgaagacatgaatcgagctttactctcgaaacttgcgtggtgtgtggcaagtctggaaggaaaaccttgggttagatgtttgactagtaaatattgtgcttgggagtccttttgggctgttaagaagaagagtaatgggtcctatttctggaatagcttgctggaagtcagagatgtcattctcaaaggttctatgtctttggtgggtgatgggagatcgatcgatttttggaatcaaccttggataccatggatggaggaacatgagtttagagttttaatggaggatcttaggaagaagaggtttacggttgcatctgttgcagatgtgtctttaggccatagttggaatgaagagattattcttcagacttttggagaggagctgggcaacaaagttctggacattccgagacttccttatccgtatgaagaccgagtagtctggaaagttaatgctaatgggaagtattcgttgaagagtgcctgctgtttagatcaaaagaaccgtcttgagcctcagaaggaagtgtggaagtggatttggcggagtaatgttcatccaagaatggcgattaatctatggcgctttatgtctgaggctatccctgtgaagtgccgattgcctttcctgtcaaacaaggattgtgagctgtgtggtgaaggtatgagactagtatgcacatttttcaaggattgttgtgtagctaagttgctttgcttcataggggacatccctatccttggagatcgtattcctgcagaaacaactgagatgtttgttgagagagttctagctagttttttgggggaggagagacggagagttgtcacttatttgggagccatgttaactgaaatatggaacttgagaaataaggtagtgctgttgggagagaaattggacttggataatgtaagaaagaatatatcctttaatttcgcagaattttggaaggcttcgtcgattcacgaagaaggaagattggcaagaggggatggatcgagaatggttgcctctgagttttcaaaagtgttgatggtggatgcatcttggtccaatggtagaatgggggctgccgcgattatggttaaaggagctgatcgctcgtggatgtacaaactaagctctgatgttagtgaatccgctttggacgctgaattgaaagctattcatatggccttactttgggcaggttccaacagatggcacgatgtggtgatttgctcttattcacaaatagttgtgccagctttggataagagaagatacatcccggattggcgtctttgtagtcgttccttggctgttttacttttaattaagaactttaatagttgtgcttttatctatattaatcgtagtcttaattctagggcggatggtttagcaaaaatggttagaatttctaatcaccttgctagtttgtatcaagttcccatcgcttttt

SEQ ID NO: 383766 - DNA, 1961 bp, Cannabis indica
aaaaaaaataaattattatatgaaatttgatgaataaaaaacacttgggccaatgttaaagaatatatataatagttatttcatatatatttctgtgatatattttataacctattttatattattttattttttatattttatatgtgagaacatatatgatagttattttatatattatatttttcaaaatataaagctattttattccaaattttagaaggtaaaaaaacagtttgtttatatttatagaagtctctcctttttaaaaaaaaagattttgaaagttgcagattgtcatgtattacacaaaaaaaaaaaaaaagaaatgccaaaacacctcttccagcggcatatagttgtgttccaggattggttatgcctatgaaataaacgagtttgcgtcaactaaatccataaataagcatgttaaaaaacataaaataatataaatgattcaagaatattattctattatccattttgtcaaccaggaaacatcatatcaaatgtgtctcaagctgtcaaaataaattctcccctccctccctccctccactttctcaatttgaataatttacccaagtaaaagattcagctgtataagtcaaatttctaaaatgctaaattcatatctaggtacaattaaacccttaacattttataagtttatgaactaaaataaataaataaaataatccaaagagaagggaggaaagtttctgaatctaaatctctcttctttctaaaggcttttttttttttttaagtctgtttgcgtctaattctaacagcagagcaggaagggcatttgacgagaccgttttcattgcaagccaaacaagtcctaaaaccacattccccagcgtaactgtaaaccttatggcttccatcacattcatcgcacacaacaaatctcagccctccacaagaatcacagccattcgaatcgaccactggcagcccttggatcagcatcttcaactcaccacactcgttgagtttccggatctcgtcgcagccacctacgaatctcccacctatgaaaaccatcggcagattcagtctcttcgttcccacaatcccctgtagctcgtccagagactcagcatccattgacacatctcgttcgtcgattgggacacgtagccctcgaagtatggatcggacggttctgcagtcctcgaaggtcttgcggaccacgcgtaagctggtgtagaagatcaccacccgctggtcactgtctggtaaggacagagttgggtgggaggggttacggtggtgggcccagaagcggaggactgagctggcgatccggacccggtgaaaaatggaggcccgtcttgggctgagtaacccgacctcggtctcaggttcgggtttttcttcttgaagtagggtttgtatgtccttaaaggatgagcaagagaatgtttgtggccgtgattttggtctctgaactctgctgggtgatcttagccatggcggtgaccacatgaccgagagagagaagaaaactaagaagctaggtgagagagagagtagaggtggtgttaatggggaactaggtagcgtaggctaagttaatttaaggggtcattaaataatagagcatataacgggagagtgacctaataaaggaataagtttgaggcattaatacaaagataagaataaaaatattcatgtacgttagggaaagtccagaaatattatatttctgtcttaaaatgattttaaggaaagtgttcaattttctatttgtaaaaagaaaaataaagttctttttgcggaatgcattttgtacgttaaaggggtgaaataatttttaacatactattctaattgctatataatattagtagggaaatttgacaatatatgcttaaatatagcatatattgttttaatatactatgtaaaaaaaaattaaaaaatactctccaattaattataatccc

SEQ ID NO: 383767 - DNA, 1160 bp, Cannabis indica
gagaatgttactctgagagagagagagagccgtatttgtatcaagagaaatagagagagaaacccgaacggaggtggatggaggagggcaccgccgcatgaagaagagaagggggagagagagattgggtgaggcaaaagaaaagagagagatggtttgaaatgtaggatttagaataatatgtatatttagtaggatttttttgtgcttttttctttacttagcttaataatcttgatttataatcgagaccgtgttagttataaatcgagacacgcattctgtatgtatattttttaaaaaaatttgttttggtctcggttatatttttagtatcggtctactaaccgacactaaaagtcattataggtgtcagttataaactaggattaaagagttcgagtggtctttagtgtcagtttaaacaaaaaaaaaaaaaacagtccctcgaaccgaaatcaaaagtctattttgttgtagaggttgtacaaaatatagttgagaaatcatgaagataatttggcgataaaaaatgagatatatatccattgctgaaggtttttttattggttcaatccttaaggattgattaggtgctaataatttgaagaagatgatggccgtaattttttattattattattattattattcttaaagttgttttcatttatttggtctaactattaattagggtcttattctaatattgttaagtttttactgactatgagttatcagtataactaattagaatgaaagatgaattctttgatatatttcaaaaatcttggtgagtttcaaatacagattctcggttaaatgaaattttatttcaataatatatgagaaacattgggctgctatgcttgatattatcgttacaattcaaaactgacatgaagatgccaattttcatttggtgcaacacaaagctaattgtgtactactggtttgagaaaatagtcattggatgaaatggaagtggaacataggatcaagattctttaattgttcaaaggttaattttcattaagagcatctccaaagagataccaaatttggtgttacactatcaccaaatttggtgtcaaaaattatttctactccaaccacaacaccaaaaattacactaaaaaaatatttcttattattatatt

SEQ ID NO: 383768 - DNA, 1248 bp, Cannabis indica
atgaaaatatatataattagcaaattacgtgaataaaaatactaaacatagcttataattaaaattcatcgagtttattttggtaaagaaaatgaatatataaaattcatggagttgatccttctcaaaaaaaaaaaaatacatggagttgatcatcatccaaattacttagtgaaaaattaaatggaagtctttgacatcttaatatagtttgaaaaaaatttttaaaggatctgaaaaattctaagcacgatttagtacatcttggtaaaaaatccattttgtttgcctaggcttaaacttcttaaaagtagtagacttatataaattaataattatatatatatatacatatacaaaagtaatatatgcgagtcatggcatggaataaaaaaagtataaaatacatgtatgtatatatatatactgttagaagctgtgcataagagagacacgtacgtaaataatgcaagaagaatccaagaggataaaaagaatatttcagaaatcatcatctatatatctatatatatatatatatatttatatacaattcaaatattatttgttttttattaattaagatggggtccttgtattgtgtagaaagtagtatagtaggaagaagacatggaaaacacaagtgggagaagacagcaacaaattgtgacttagttagatcgaataccattttaacagctcaaaattaaagatagatgttagtaaccacacgtgatgaaattgtgtttgaacttaattgattgatcgagctaattaaagatgaagggtccagttcatcagaaataaaagactttatttgtgtgttcatattttgttccatagatatatatagctggcatgggctctgcatatatataaatccatttatgtgcggctataaagatcaacaccggttcttctacaatattcataagttgcaatttgtaaacacatgatgaaaccagttattaaaagataagcaaaactacatataaggaaaattaacattgaataaatgtacaataaaagttaattattgcaacaatatgagttttttcttctttctctatttatggccaaccctatcaatgtccatctgctccaccaaaatgttaactgatttttgtaatcattatatatataaatagataaatagataattttatggtgaacccaccaccatcgcttttgtttggaacttagatgtaacatccccgcttcaagcctctattgggcccttacacccac

SEQ ID NO: 383769 - DNA, 1644 bp, Cannabis indica
tttttggttcgtctatattgtcaagttctgtgtagtcttgtttaagttattatggagaaagaggttcaagtttctctagatgtccttgttgatgttgttgataaagctagtgggaaattgcttgaaagagacagtgcaatggagatggaaatgctagagctatttgaagatattacactcgaggatatagtgtcaaacaaggcttgcgtaggaaaaattatgggttgtaaagacatgccgaattctgtcgtaaagaaaagactgatggggatatggcggaatcttggggtttggcgaatgaagaaatgtagagaaggagtcttaggcttcttttttgacacagaggtgggttgctcttttgtcatggacaaatacccatggcttgttaatggggttcttctcaacctcaaaccttggccactggaaggtgaggtgcgaatggcagagtttgaagtggcccgttactgggttcaattccatgatcttcccacgagattcttatcaggtgacaatactaccattattgccaagaaagcaggggagttcgtcaaaacaaatgaaaaatccaagtttgagttagttcgtagggggtatctgagatgttggttggatgtttggataactcaccctcttgtagtggggttttttcttaaacctgatggaaaggaggagacttggatccagtttaaatacgaaaaacttccttatctttgttttaactgcagaaggcttgctcacatagaaaagatgtgacatgcacccacgacaatggtgattcctaaggccagagctgcaattcaaatgtatggtccttggatcaaaaatgacacatgtaggagcaattgcttctctatggcggggaaaggggtgactcgtacctgggttgatcaatcggaatgtgctctgaatagtcataaaatggcgaggagtgggtcttggcatagaagacaacctcgggtcagcatcggcgatgctgtgcagaccagagtcgacaaataagggtttagtgcaggggctgtcagtacgaatacgaggagtgctgctgcctgatcgtctgcgaaggacagggattgtgcctctgtacaaggtacgaatactcagataatgtcgttggacagggtggcaggaaactatggaaattcaagaatccctattcctagtgggcctaactacttggaccttcctagcccagattttgcaaaaggtggtaatggtaaagtgcttgatgttgggccttctactgcccaatctcttgaaatcccttatttctgggtttacagatcacaaagggcacataactaccctgatgaaatccctattacttggcccactaataatcctgaactacaagaattagtcctgaaattgtatgggcatgaggttactaataagttcaaagcctaatagacacttatcttcaactcgcctaagctttcagagcttattacccatatgcttgggacccgaaaaagaaaatcccatacctggtataacccggtaccatctccacccattatttcatctctgatattgacgacgaggatgcctccccaatccctggcctagatgcttttctctctctggatcccgagtccaaattctctcggggtagtgatggacatgggttgttggaaattattttac

SEQ ID NO: 383770 - DNA, 2654 bp, Cannabis indica
tatcacttaggcatcataagtacaggccctagaaatttttttcactttacccaaggtctaggttgatgtcacatgtcaacttgggcggatgagatgtcaacttgggcactgaaatgttatcttgggcgctttatgtcaacttgggcgctttatgtcaacttggcgctcaacccagaacaagcttaagtaaaaaagtcataactcactcaatattgatccaattaacacgattaaacttgagtgtcaaagctatttcaatgccctataatatcatgcctcacactcaatcacaattctaaagttatagacctcaaatttcactcccaagtgagttacaaaaaatagcctccaacttacacgaagcgggtccagccgttgtgatctgagctcagaaaattgactataaaccttagaagttaattttgactgttagatcataatctactgtaaaaattagcccatttagattttttcatattttcaaagacctccttcacaaatagaaggagagcttctctggttcatttttcatatacagaatactacccacaagatcagagcatctctctctagaaattagagttgaaacacttgactatttttcattaataccatctcatgagatataaaaactcgaaattgatgtagcttcattactgtagcgatatagggagtgactactataaatttttgtgtctctctttatttatacttaacaaatatctcattctcgccaaccaggcgagggagtgtggcttggaaatctttgtccaaatttcacagtcaataatgacttacaattacactttctcggatgatgcttcttacattggggacagtattgataagtatagtgatcttcaaggccactctgacttggtttcctacgaaagatcttcttttgacttgagcccgcaaatgtaaatagagcttttctcttctgattatccaaggaaccaacaccacttctggcaagattgaaagtaaggggacgagtgaccccactaacaaccaaagtccctcgggactcttgagtaatctctgtagcactctcaatttgagaagcattcatcacatcttgatcttctaaaataacagatggtctttgcatccaaaatctcccatataatggtcccatttggtaactagcaataaactattttgctgccaactcttgagctatagtaattggtacatgaggtgaaggcacacatccatgtggcctcaactctaaactcctcctctagctattgaattctctcttccatttccatgagcctttgatccaaatctgacaaagcctatggtggattttcataaacacctctataagtactttctcggcctctaaattggccttaggaataaaggggatcacattctctccaaccaccaccaatctcaactacctcatcctaactccttgtatttcgacaagtatccacctataacacaagcttacaaattcatgagtcaactcagttaaacaatgataaaaattgtaatctacttaccacttacaaggaaactcaatatgctccagctatcaatctgctatcgtgcttcctatcatggttttctaatcatgaactacaaattaaagctactaaaacacgtaaaagcttactaaaccatgagtcaagcttatatatgatgatgattgtacatatgtagatgatctttggagaataacttggtagctctgataccaaattgcaatgccctactagtttaggcacgctacaatattttgtcatttactacatactccttttctaatcaaatgtttattgaaaacatgctaaatgaaaattttcttaaataaacttaaactttaataaataaacataaattaaaacattttgggatctcgttaaaactttaaaactatttctaaaatatgttttatacaaaagttaccacccaggtgttaacataatgtgagcctaaactatcctgaagatccgaatactctaggtctaagcatcttgatatgtacaatcttcaacaagctctagactcactctggctcaattttaactcttacctacaaatgaaaataatatctatgagtcagaaaactaagtaggaaaatcataaacataaaactttaattacattgtaactaggcatccatacacctaaccatgatccttcctttgtactctagctgatggtaatttggtcgatatactcggtattatggctgatattcttggtactctggccaatattcttggtactgcaactgatatactcgttactctggacgatattctcgatgccctagccaatattctcagtactgaggcttatattcactgtattgtggctgatatagtcggtactttggccgatattctaacatgcacgctaaacatgtatgcatgcttatcttataataatcttaccttgattttgaatacaagtatgatggtaaccctgagtggaaactactgctcgatgatttgaggccctaagtcacaatttatgtaaaactggtaaatgatccgttaaatcacttttggggacttaaacttgaaactcaaagtttccatatcaataatagtgtggtaatgccctaaatatcaagaaaatgaaaaaatcgatactcctaaaacaactctaatcgatagccgaatccctaaactggt

SEQ ID NO: 383771 - DNA, 847 bp, Cannabis indica
cagcgccgagagaaggatagagagagagaagggtaggaaaagagagagagaggactaacctaataaatgaaaccctgaactaaaacttttctttatatgtgtcttaaaagttaaagatataattgataaataaaaagcccaagcaatacagtgttaaaagacaataaaaaataagtgactttttctcctagttcttacttaaaacttcgataaaagtggagattttatataaaacgctaaggtagtgtttaaaaaatgcataaaatagcccttacaatacctttttttatctgtttgccaaataaaactctttttccaataagaaagtgggatcaaatattacatgatatcttctatctcactttatattttttttcatgtgcaaaaagtgggataaaaaatctcttttgctgtagtgaagctttgattcagatttagtccaagataactcaggcagtaaacagtaaaacaaaaaacccagtgacaaattaaacttaaagagtgtcaagataaaaataaattagctagttagcatagatgaacaaattataaattggatgacaagttttgattagctttagcccgctcaactaaaggtattcctcttgcttgaataaagatcatgtgatcggttcaaacaccaatgttaatgtagcaatcatgtgctcggtaccacctgttgtatgatttagtgttagagatccttttagagtatctccgataaaaattgtcattggagtggtcttggcacatatgcaatatgattcaatttttaagactaattatatgtaaagtgttgttctatatagacaatgatcacataatatttttttttctttttctaatt

SEQ ID NO: 383772 - DNA, 1829 bp, Cannabis indica
ttttttttttttttttttaattttattttctcagtgcctaacgtcgactaaataatgatctggtatatagttcgtgaagtttattgttcagccaatttattaaccactaatcattactaaaattgtcattttcaggcagtggggagccagggcaaacgaggtttctagtatataagtggacactggacgcatgtttgtcaagataaaagaaatacactgggaacgaaaatagaatgagtattgtcatgactagctatatgaacgtactttacttattgccattatcaatttgctttataagtcaatatttctggtttatcatatctctttcctctcctaatttcattttagtacttgtggaggagatattatatatatttatatgtgtataaagtgtgtgtgtgtatgtgtactgataccctatcttttcatggaagaattattctctttagaatgaaaggttggtgcttttgttttatggagtctccaccatgtccaaaagaattattttatctccatgaatcttatttgttactttgaggaccccccaaaccactcaacaaagatgggctacaaagtactcagtacttgatccaatggtgttaggcctatcgaaatgtacagctttccaaatggctgtgatttatatatattcttcccaatagagaacaatgttttttttcccttgaaataccatatacaagaatataaaagtacattattattattagaaatgtaattagttaaaagactatttgcatatttatctttttatcctttcgaaatccaatgttacactcatgtgagatttatcgtcgcgtgtgaactacttttgttttgccgggtagtgtgaactaccctttggtgtttagaagatcactggttttagcttttaaatagtacaatattttcttgaaaaaacagagttaaaatattattagtatccatcgccctcaccaagcctatatgtacatattgcatatatattaatgacgtagttccatctcgtttgtggtgattcttggtctccttctttgcaagggtggttattggtacatgtgcaggtatatttaactctcatgttcttgaatagcttacaaagaaccacaaatccaggagttgtgcataatttaatgtaatataagtttacatttgtgttgaactaaaatgttttagcccatgaaccttaataaaaatagggatttttataaaaatattagattttgggtaaaagtttacaattttattgtcacacggaattttttacaaagatattgtttttttataaaacaatcgtaacacgacaaaacagaactattaaaacaacagtagaacaactaaaaaacaaacgcggaacaacaatgaaaacttaacacagtacacattataaaacttacacagtatttttgataaaatatctaccccacagtaaaaaaaaataaaaaaaattaagaattttcagtatgtggtgtaaaaactccataaaaatattaaaggcaaggcccaagaatgcccaataatgaaattttcctaccagattggatccaaatatatgcgtctaagcgcaccaaatatttccacaatcagacgacaacttgagcttagctatgctaacctcaaagcggaaagtttagggccacaaattcaaataatcgttgagttggttgtgcttaattgactcaagttatttttccaccttcactacctaagttataaataggtgtaattgagtacaaaaagggtcaattccgtctcaaattcaaatatattttccttctctcactaggattcatttggattaaagcatcatagagttttttttttttttt

SEQ ID NO: 383773 - DNA, 1355 bp, Cannabis indica
atatatatatatatatatccaagtgaacctagagtatgcatttatgaaatagatgtagtatttgtctcaattaaaagaaacacctggtgagggtcccaacacagatcagaagcaaccaattgtaatagttcaataaattcaataagagagaattggggaaaataactaggatttttattactctgagtgctataagagttgtaaaaattttaaaaaccctttcagagggatgaccaaacctattatgccaaatggctcagtaaataaactagttgagttataagaagaacaacaagacacacaagatgaagatacaactagaggagataacatttggagatgattggaatctaaagaatacatgccattcacttgcttcccactcaacatgatggaattggtctccttgtccttgacacaacaaacatgagagagaaactcaaagtaaacaaaattgtcattaacaaagttagaagcactcgtgagatttttggtaatagatggaacatgaaataaattgctcaaaagtaagggatgaggacgagagatagaggtaagaaacgagataccaattaattttaaacacaaacttgaataattacccataaaaaaaaaattcacctccctcatagtcagatccaagagtcatgttttgagcatctggtgtgaaatgatttgtggcacccaagtcagggtaccaatttgagtcaaatccaatagtttgagttgtgaaattaacttgagctagtggtggagtagatgtaccttaagggtgttgaaacctggagttcacaagtagtagagggaaactactatcaaagcagtaataatagtcttgaaccacatgaccaacacgcaaacaaagttaacattgagtgcaattattggtagaagagtatctaccactgcctctaccaagagtgaagccaccacgataagtcacaaactgtgcaaaattccctccaaattgagaaaaagatcctcgacaatagttgtcagggtaatcagagcgccctgcattgttattgaaatgagcgaaggaatatggtggatatggtgataaaaaaatatctctatttgttaaatcttctagccatgaacacaggttcataaagaaaacagagtaaccatgaaagtaagaaagaagaaatgagagaaagaaagacagagaaagaatgaatgaaagatctcattaattaaaggagagtagtacactggtttatatacataccagttgcaactaactgaatacaaacaaactaacagatacaactaactaataacagaattaactaactgtctattccaacactcccctcgaactcataatagaaaggtcttcaattttgagtttg

SEQ ID NO: 383774 - DNA, 1378 bp, Cannabis indica
tatttagtatataaagtgttctatttaatcgaatgtgcaatactaaatctgtagtggagtcaacagaaattaataagttagaaaatttattcataaatttcgaaaactgcttattaggagcttggttacataggcccatgatccccacattatctgggataatattttcttgtagactcaattaattggtttgttaaatcaattagaaattctaaagaagaatatgtcttatttataaattttactaagaaataacatatttgagaagaaaataataagaaaggtttatttattaattaagacattttatgggtgtaattaataaatatattcaaattgtagttttttttacaattacttatattatagcattggtattaggatattaaaatggtattttaggaaaaagatgaaaaatttcataaaaaaatagcaaaaaccaaatctattggacccatatggctattgagctaataaggtggttttagggccattatcttttcctaaatagcccattattcacttaccttgaacatagataaggcaccataaaaggaagcataaggctttgattctaaataaataaagaaacacacaagtttcaacaattttagtttccctaaaactgtatcagaaaaagtctttctttctctctaagatttttgagtttctctttctctttctctcaaattttgtggccttagtagtgagatatttcccacacaattcaaaacaatactcagacttatatgtattgatttatcgttttacatttttctgatattactctataacagaaaggaacaatggttagagtgctgaatggaaagactcatattattccataaccattatgtaagtaatctcaaacttatatgtgttaatttatcattttgtaatttttcatatttagggtgttagattatattgcatataatcaacatacatgtagtaaattaatatcttggtaaaacaagttccaaaaatttctagcatctcaggagctgggtgtggggggtcttgggacccaaatgggaaggaccatatgagatgcaacacaaggtgcatgatggaacataccaattgaaaagacttgatggatctgaggttccactagcctggaatgcggaacacttgcgccgataataccaataaactgggggtagccggatccattctcaattaatgcattttgtttttcctttttatgtatgccgcagggcataagtaattaaataaaaatagaagaattttgaagagaaaaatccgaagtctttttgaatttttagttgtgttgtaacaagtgaccaagagcttaggctctcagctcacttgggggtaatatatgcagcaatgtgttgaaattattttaccagga

SEQ ID NO: 383775 - DNA, 1505 bp, Cannabis indica
tttttcttgatatactcgatttgggcctccagtgcccattgaatggccaaggaaagatcaagctgaactgtcatatagctcacttctttacatgtatgctctgcaagaaccgccatctgaaataagaagagaagagtcagaaaaggagtgataacttatggcaagtgacaaagagaagttaagtgagagatcaaaataccctagctttttgttgcctcgcggagttagccaataatatgggatcagtgttgctgcctattgctcacgttttagtggttaattcaatcatactgactgccatgtcctccagcaagttagcactaaatggtgccaattccttgcctaggcacgacataagttgttggataaggataggaagatccatgatgggcgcattgttccctgggttacaaatgccttcaattattttggcccttttaactatggacaatcggtcagtcctagattggacgatgttatgctcctcagcaagttgacgtttcaaatagctgtcagctttgcgtacttattctaagacattagcccttatattggtaagtttcaagggaaacttaaatggaaatgatggaatcttgggcaaccaagtttagagctcttgggtttatttttcgttagtagtgttggccgaagaagatgaagctagaattgactgattactcaagaattgttttggtggttttttggggtaaggtgctttcttggttggatttgtgttaaaggattggtggatgcgagaaaggtatgcttttcggtagcatttttatcttgtgggttgtgaattgtattgatgacttaagtcatggaagggcaattggaagactgcgactgttggttttgagctggaaggctttctaccctaacagacacagatgctcgaaggtctctaatgcctctaggagataagtgtctatcccttttgtctttccttccaagatgtgggtcggtgctggagagttttaatgatgctactgcctttggaaataccaagccttccctagaaccctcatcgtttgaaagaatcatgggttccatctcctagttcataatatctatcgtaacgagaaatttaattatcatgttgcttccacctctagtaaccagtctgatctttgaattgttcctaactttgggttgaacggctgaagggtcaagcgtgtggctaattccttcagcgtcagaggttttggaggagccacatgctttggccttcttggccctagatttcttctgcctccctttaccatcatccatgtcattgaccttttcaatagcactcatcaagtttctcagcatcttggactcaagtgtatttgagagatcaaagtacaacaataatcaaatcaattgaaaaatagaaaacaataacataagcaaacaataagtaacacagactaaaacaacagagatgcaatgtggatgcaaccgtgaaacaagtaactatatggttctcctctcataaataaagttactgttgggttttatgc

SEQ ID NO: 383776 - DNA, 2260 bp, Cannabis indica
aggtgtgcaaaaaatgaacttacttagattttgattctgatgcctcaaatttgtctgtggtacgtctagttgttgtctcaatacaagttttgaccattttgcactaagacaatcctgaaaactgaaactctagttggatacgtcaacctgggcgtcgggtgaaatcctaaatgtccaggttagctttcggattgcaggtttgtgtaatttcagctctcagggcttagattaggttgctcaatgtcttcatggtacataatatcaaaagttagtaagttggattcaagttattgaagtccaaacttccatcccaaagatcctgaagtcaacctaagcacaaggcctagggtcccctcccaagtcgactgctataactcaagtctactcaactctgtggcgtcattctttacatgtcaaacattgatgtccacatcaccagaaaaaaaaaaattgggttaacaatatgttaataatgaggcttgtttgtatgtcgaatatgctcttatatacaatgcattcatatataagtgaattagtatggtaatattgttggagaacacttgcgctcagagacggacctatttggcaggctataggggtgaggttgacaaaacaggtcagacacaataacatgactttaaatctgcacgaagattatagcaggtgcgggtttgctttaaatgagttcgagtcgtgttcgggtttacacgattaacatgaaactaacccattaataatttatttaaagttatttttaatactttaacatatcataaataggttataacgtgctaaacatgttattaatatattaatgagttaatatgtttaaacaaaaattatttataaatgggttacacgatgtcgtgtcaacctatttatcgtgtttagattttattttttttatatgattattaaatagattgtatttgggttgagcatatatacctataatatatatgaatttatcgacacaacgcaaaagcaaatacaaattgtcactctatatagggttgtagtcccaacggaagaaaaaaaaaaatcacataaaaaagaattttgactgttttattgacacctaaatattaaaaaaaaataacttgatttttatttaacatggttaaatttataacaaaatttaccccttaaattatttatcacatatgtaattaatatattcaaacatttaattaatttgactcttacatatataatcatgttgtaatttaacatatagttagcaacataaatacataaattaaattaattatgagaacatgccaacatgatatccattccaaatattcatatggctataaaaacaattaattaaaattaaaaaaaaatacttgttaatataataattgtttttcattagtattatttacacagcatttatctcttttcccaaaaaaaaaattctgtcagaattaagaagatgagcttattaaagaatatcatatgatcacttatataaaaaaaaagatattgttgtcagttgttattttactttttttacttttaaatattattaaatatataggattttctcacatgtaacaacgtgtaaaattcctattattgctattattttaaatcaaaacattatataaagacaaattttacagccattcttgaaaagaaaaaattaacaactatggctgaactttataaacaattaattatatattaacattcgtgctaattaattaaccaaaaaatatacaataatagttattaaataatagaagaaaatgaagtaggttaaagattgtacattgtatcaaataattaaagtcattagtaaaatgtcatgtaattaattaaaaatagagacgtgcatgtatatttgtataaattaatataatatattgtcggtacatataaatataattatatacaattattttagttgttcaaaaatctaaatttcggttgattattgaagtgataaaaaaaaatctaaatttctaaattaattaattataaaatggataatatttccacaagttaatataatatagagaaatgtgggggctaacatgtttgatggttgtgatcttcgtatataagtcgtattaattaattattagctatatatgcggattccatatatatatatactaggtgaatatacgtgccgagcgacgtattgctagtttcatttaagattttggtctttttaagattttgaatgtatttaatttttaaagattacaaactttttgtttgaaaaaattaatatttatatttgaaatat

SEQ ID NO: 383777 - DNA, 1445 bp, Cannabis indica
aagagagagagagagagtggtgggcaaagagagggcaatttcttttgattcccttttaagatttgcttcccatgacatgccatatgatatagccccaatccccatatcatcaataataatatgcatactaattctgtctatttattcaataaaaaaacaaaactatatctatttatatgatatgatgtgcccattatcatcgccaatggccatccatttcatgtgtatccatattttttttcctttcttattctcttagtttatacttaaaaatggtagagggactagtggtgtttagcactttttacgtgttaatattgtcattggtccgactaagtataagttcctatataattttatataatagtttttaaagagtatcgctagccaatcacagcgcgacatgcctagattgtgttaggcaccattggtgcctaatagtaatgctatttctactttatataaaaacattgttgtcctattaatctatttgagctggcaatggcacattggccagacattgtttagaggagaaaaagcaagaaaaaaaaaacaacagtacaaatatttcaatcttgtgatgataccgatcaaagagccactatccctaatttggatttaagctcgaacccccattttgggttcactattctaatattctttctcttgtttttttaaacaacttttatagaagtgagcataacaacttttcaaagctaacttatgacacattcaaaagaagaagaagaaaaatatgatggaaattggaaagcagtttcttaaatacttgatcattattatgtttatggtgttgttttgacaatattttatattgtaagtagttgatttaaatatatattgtaaagtattgctacaaaaaaaattataaagtattaaaataaaatataaaccacacattttacaaagttgaaaatctgaaatggaaaaataattaggaaaattgaggttaaaacaaaaaacctatgtcaacaatataaatactgcaatggtaaaactcaattatatgtttatatttatacacacatttataacaaagtaaaactcaaataaataagtctttcaacttaatttcctttagttttttttttctttctttaacatataaaagtatatttattttaatttatgttacattcatgtggtagtgcatggacagataatatgcattgtgatagggtataataagattatttaaaacataatgagagctttatgaaatgaaatgaaacttatttatatacattatatatacacgatattggacatataattttaaaaatatttatatagatggatgaaagtttaataggtgcatcaaatatgtaactatgattattatatttatttttagttattagattattattagacggttgtaattaatttaaaaatttaattaaaaataattaataaattacttgtaa

SEQ ID NO: 383778 - DNA, 1441 bp, Cannabis indica
ttttttgaaaaattgtgtcaatagataagggaacttaggcctcatggtcattacaaataatatctaccggtatagtagatatctctactatactagttaagttatgagcaaacacccaattagccacattatggatcacaaaattacacagtctcaaaacaaaagaaaaattacaacccacaaacaaagcagagagcatattacaatggtgaacgtaattatcaattctccagttagaagacttccccttcaggaaattaatcacaatctcaaaatcgctttcgatcatcacaaaatgatacttcaaaaggtctgccatcttcagggcaagtaagcaagctataacttcaccaataaggggatcagcgaagtccagaatatcagtagcaatccacaaaacttttcccagaaaatctctagccaaagccaccacacacattgcctcactccctactttaacattacagttaatctttatctagtcttcagggggtggagaccaagcgaccgtaaccgtagcaggcagggaagggaataagcaagagccataatctacgtagcagtgagtaatagaggcaatataatgtgtgatgctattcagattgttgttgtgtaccttatcattaagggcccaccagatcgtgtccaccactagcgaggcatagaggaaaacctcatccatattgtccaccactcgatcccagacacgaccaccagatccaggtatcggccaaatcccccacggggaagatctccacaaatgaaaaggctaagttacaattgagaaaaaggtgttctatggattcttccccatcccacaaatcggtcaggaggagtcatcgatgtgcaacctctttgctaaaagagcatgaataggtagtgcatcagagaggatactccaccacaaaaaacttatggtgctccagcaccttactattccacaatatattccaaacggaaggtgccacaaccgaaagagaagcatgatctagggcttggaccaagtacgcatacttacttgagaaactaccggattgctctttggtccatatccactgatctttcccctgcccacatggtttaccccctttaagatattacaaatcgtttcagagtgaaaaagggaataaagtttattaatgtcccaatcaccatcacctaacaacagatcagaaacctttcgcacatcattagggtgattggcagttggtcttggaacgaaatctttaccatgggttacccacgggtcttcccatatctttgtatctttcccatcgtttattagcttgtaggcccccttctttaaaacatcttgagttttgacaacattcttcaagaagcaagagtctgaattcttataggagcaattcaaaaagtgattacctctcatatatttggctctaagaaccctgcaacaaagcaattgattctcattgatcag

SEQ ID NO: 383779 - DNA, 1852 bp, Cannabis indica
aaaaaatattaccaattataatacatatggataaaattgactaagcgttattattattattattattattattattattattattatgtatttaaatgtatatattgcaacataaggaaacttcctaagtcgtcccacgtgcttggtttgttgttatataaaaagatcaaattgcatactcgtcattgctcttattaaagtattaattcatgaatatttaatgcaaggaaagtacaagtcaatttcctcttggataaataatatattttatgtcgactgaaattaaacaatattatcatatcatattagtgctaatcctatacaaatcattttaaagccgcaaaattctttccctttgtagtcaactacactttttaaaccgtttctctttaaatatttacagattcgcaaagtgacacttattttagatgactaattatagacttaactattatttatacatttaacttcacattataatgtgatatttatatataaaattaaaattgatgtggcctttatttgaaaatattcatgattggtaggcatgatgtagtttgaatcacctcaataaaaaattcataattaaatttaattacacatcatgatatatactttaggtatgtaaattaagaatttatatatcattacttattttatatgcatagaagtatgtgaagtctacccaaatttatactcttttcatctacttgatatttctttttttcttatctgaaaatgaaattaaaaacaaaattcttctcccctggttctgtgctgagataggagtgagaaaattctataaatgagttaggtttagaattaaataaaaggtccttatttgcgtgcaaaagttgatttctataattctattgtaaaatatcaattccaaaaaagtggggtccccatgtttttgagcagagataaggaagacattgattctttcctggtctatataagagagaaacaacccctacaaccaaaactagctctgtttattcacagttcacattctccaactccataatcccatacctacccaatattctctaccttacaaatatgacatcttcctactacttgagctcagcctcatcgggaactcgccggaaaagtagccggaaaactggtctgagaaagcggtgtttgttaatggtgaagcaacagaagacccgattttacatccttggacgctgcgtttcgatgctactttgctggcacgatcactccatatcagattagcttaaatccttaattctaagcctatagctaaagctgactatattgtctcattggggattccatgggaggtaataggagtaggagatgagctttcttttgggatcaaagattagatttcttccggcatagaaaacagagaagcatataacgtttgtatgtatatatatattggatctttgttactctgtaatatagatgagtttctttttggtggttgagaaactattactagctagtattatgtaattcagttcctttacaataggatcaatccatgtacatacaaaatttctagttattcaatttaaagaacgagaaattgaaattcagacattcttggttattgctatactttctctttgactatttttacttaatataatttgtttgtttattaatgtgatgcccgatttcatttaggataaaacaaagcaaggaagacaaaatttcttattatataatagggtctatccaatatccatattacccaagaatacccatgataaatatttgatctataatttttttcttttttctttttactaaaatatgaagtgttaaaaaaaacatacaaatgtaaatttctcaaattataatgtatgattgatca

SEQ ID NO: 383780 - DNA, 1054 bp, Cannabis indica
tgtgggtatatgtttgaatttttgtttttgtaagaacaaaacattagactaacaatggtgataataaatgatgattgaacacagttgagtttaagggtgagaggatctctttgtagctcagatgatggggaaggaaaattcatcagcaaagaaaaagatgaatggaaaatcaagtattccagtgaaaaaccaatcactccattgcttgatacagtcaattacccagttcacatgaagaatttatccacacaggttcatcatcatcatcatcaaaaaaggattacatatgtttctgttgatcatttctttttgtgaaaaatgataattaagcttccgtgggaatgatttttcaggatcttgaacagctagcagcagagcttagagcagatgtagtccatacagtatcaaaaacaggtggtcatctgagtgcaagcttgggagttgtggagctcactgtagcactgcatcatgttttcaatacccctgatgataaaatcatatgggatgttggacatcaggtcaccacaacattaatgtctttatattaaaataattacaacccaattgagttattctgaaaaagaaatgaatttttgcagacatacccgcataagattcttacaggaaggaggtctcaaatgcataccattagaaagacttctggtctagcagggtttcccaaaagagatgagagtgtttacgatgctttcggtgcaggtcacagttctacaagcatatcagcaggccttggtatcttcatatttaactctaattattattattattattattagattaatttgtcgcataaatatttaagtttaaatgccagttgcaaataaatacttaaagttcaatttttgactaataatacttaaattattatttgagaacttttgtaggtatctatttgttaagtattaagtaaattttcacatgtcaatttttaattggtgcaagtcatcaaatttttacctttttttaaaaaaataatttaaatatactaataataaaatgacacgtggattaagtaatattaccgctaaaaattaaa

SEQ ID NO: 383781 - DNA, 1834 bp, Cannabis indica
ttcttgggacttagctcgagatggtgccgactcttcttctagaagttctattgatgttgtttgcaactaaatgtactccatattataagaaaatgataggtatttctattaaattatttcatatataatgtttaaattcaattagcctaagaaaaaattacttttcctaaaaacatgggaaaaatgtcgttcgtcattattacaaatagggctgtcaatatgattaaaacacatatgttttcacatacacaaactttaaagaaattgtattagaactcacaatgaatagcttctttaaaacccgtggactagactttgttaatagattaaccatgttataaatatcttatgttcacattttttcttaattgcttaacaattcactaaattttcgttgatgaaacactgagtaaatacacataataatagccaacaaagttaaataaggacaagagatgatacctgaagatgatactgagctagaaatgtcatgaacgtcttacattcataaagcacttttatagtatatggcttcaaggtaatgaacgttttgcaaaagagattttgctaccatggcagcatgatacaagtagactctatagattctctacttcctagaacaatcaaaagcaatgacacatgagaaaaagtaccaatcagctaatactaggtttaaataagtgaatcagcttacccaagtgtgaaaataaagatcttttagagccttgatggcacatggtgcaatataattctttgctacatggtacacatctacaaatttttccatcagtagttgaacacgtggcatgacaaaggttacaaatgccaaccattgttccttcagaattggggcccaatcctgcaaagtaatttcaattacaaaagtacgaaaatttctagaacaatgacgaattagtcataatttaaaaagcgagggaaagatagaatatacaaacaaaagatcctataaatattatgtcatgtagactctcaacaataaacaagaagatgtttacttaagtctacaaagaaggtttctatcagaaatattaatctgtcatttcacctacagtgacattttcctttgatgtatttcccctatttttattcaataccgtttccttttgttttgttagttaaaagaaagaaactgacagaaaataacaacacctagggagatatagcagcagtctaatccatttgcatgtgtaatcaatgtcaaatccaacttggaaaccaaatttcttttttatgaattgttggaaaacattcatttggcagactcaaacatacctttttaatcatttcaatctgcaggttaatccattcttctacttgagctttcatttctaaagcctaagaagtacaagaaaaatgaattaagcaaaattagagagagagaagaataacaataaagaagttggatcattttgtcagaatatagccaatcctgtgttaataaaatcatatctaataagtgattcttcctgtagctgtaggtgaaagtttaatatatttcaataaattaaattaattaaaagataagaaaaatataccttctgaaacaatgtatcaatgacctgtttcccacctttgatccaataagcttctgtatacaactaaaagtaaacatataattgtcatcaaagattattcttcattctcccaatgaattatatgtatggaacacttcttaatgggtattacccatgaatggttactaaacaaatttaactataaatattaattttaaaaatatcaaaccttcgaattttgatttaataacgaataattaaatcacaaattttaatttctatgcttaatttaactactt

SEQ ID NO: 383782 - DNA, 759 bp, Cannabis indica
taattaataaaaaataactaaaaattagatgctagaaaagaattgcattataaaagcacatttatacaaaaagatattatgtataaagaatgtcagtttccgaagtggggtgtaactatttaaccaaaaaaaaaaaatggggtgtaacttgtaagggatataaagttttcaaataaacgtgttgtttatcatgaaagttgtcaaatttgtaatattattgtcgtttatgtagaaattgtcgttttacaggaaagtggtccacactgaaaaggttctcttcaatgcattgttttcatcacgaaatcattaacagtttcaaagaggtttacataaaattagtttgtagagcttcttcaatcagatgcaaaaataataatcggccaaggaccaatctcattttacttcccaattaaggggcatcttaaagtgcctagatattgttacaagtacaatttaatattagattgcacatattttttttaataaataatataaaaaatcactaatcaacacaaaaacacttaaggtactaatgacatattttcccaccccaagtaacttgcatattaatgccccatttagaaatcgataagagatcttggtatgtagtataattttatccaccacatttgtttattagtaataaaaaataatattttacatgggagttcagagttatatgaatatcctttcaatttcaaagggcttatatataataattgagcattgctattaagtatcagtggtgcctagtacctt

SEQ ID NO: 383783 - DNA, 1526 bp, Cannabis indica
tttattttggcgagtaggtcgtgccatgcctccttgatatatatggttacattggagatgtcatcacctatcccccatgtgactaaatagtgtagaccttgagtcacttgttgtattttctcaagttaaattaacaccttatatacgagtaatattatcaactcattactttgtcaaaaaatattatcttggtcaaatgatctacaagtctttgacaaaatactaaagataaaattaaatattgaactcctaactgttgatagtatttttgaaggtgatctacactccaagctcttgggatctgagatccatccatctgcttgaggcgataagttccaacacatatttcatcttcgatttcatatggtccttctcatttggggcccatcacccccactctaggatcttgtgatgcgaggaagaatcgtcttagtaccaagtcttcgaccatgaacttttggtcctttacctttgagttgtagtatttggccaccttcctttggtacgatgctaggcacatttaagactcttctctatgttcttcgataaagtcaagagactcttgaagcaaggattggttggtggtcagatcaaaagcggtccttctgtgggattgcacagtgtgttctactgggagcatgacctcacatccataaaccattgataaaggtgaatgtcctgtagacgtttgggtcatggttcgataggaccgcaatactcgtggaaattccctaggccaattattcttgcaagcttgtaatttcttcttgatagtagtctttcgaatttcattcacagcctctgcttgtccgttagcctgaggtcttggcatggcaaaaaaactattaacaatctcgtgatttttgcaaaactctataaagtgatcactatcaaactattttccgttgtccgagactattttgtggggaaatctgtatcagtaaacaatatccttaatcataaagtttaaggcattctttgcagtgattgagttcatgggctccacttccgtccacttagtgacatagtctataactactacggtatacttgacccccagctttcttggttggaagggatccgatagggtcaacccccacacttaaaatggccacagactagtcatcagagtgattttatttggtggagctctggggatattttcatatctctggcaggtatctcacttccagacatattctaggtaatcctttttcatagtgggccaaaaatatccctgcctcagtatcttttagataagttatcaccccagtgtggtctttacaaaacccttcatgaatttcttgcattattgcttgggctttggattcgaccacgcacatgaggtaaggcatggccaatcctctccgatataacctgttgctaatcataacatatcatggggcttgatattgcaactttttggaagcggctctatcctgtggtaattctatagatgtcaaatacttgatcacgtgttgcgaaaattattaaatactacgcaagtgcacgcaatcaagcagtat

SEQ ID NO: 383784 - DNA, 2007 bp, Cannabis indica
ctccaacaatggcgacaaattagtgtttttgctgtactgatcatcttatttattgatttagcaaaggttcgattgaaaagtcaaaataaaagggaaacaagtagttaaatttgatctacactgaaggagaaacaaaagagatcctcagtcaccaaaaagcagccaaaaaatagagataaaaggcttgatggcaagaatgatgaataatcaaaatgtaaacccttagtaaggacagctcacacctgaggagactaactactataccaccatagaaagaagtctaagaaaccaccaccctgtaaaagtctcacttaagtgctacaattgccacatcctagaaaaactctcttaataacttgcacttatccacctaaaaataagatgagcagcctgcagaggaggctagacaatgaactcaatcttagctcttggtatccttgatacctctctttaacctttcatctttatagtagttatgactttaagataactggaaatcctagaaattctaccttgccttcgtgcgcggatacaacttcaggaagcgccttcatatgcttccttaccagcttctccacaaatataggttcagtcattctgagataatagataatgttgacatctttcttcagaaaacctgatgatattaaaagttgcagaactgaactcctaggaatgagtctcttctccaagctaagcattaaaagatttggatttttgcaaatcatagaagcttccatattcaacttgtcaatgaggaaatgcatcactttcttgatcttcttctctgaggtaagcatacacattggctgcaatttgaatgctaaatccacctgatcttttgtcaagccaaaacttttgtaagtttccacctttttctcccacagtgccttactcatcacagccatggaacgaatcgctagaacaaagagcaaagtatttggtttgaaacccaattccacaactttagcaagaatctcattaaacttctgagacctcaaaagcagtgttcttgggtgggttgtgaacaatttcacaatcaaatcctcaggaacaccatggctcttcaacaaggatatgtttggcacaagcatcttttccaaattgtactcaagtatccagtagcaagcttttataacctttctcacattatcatcagtgccaagaacccgtttaagcacttcaatacaaggaatgatttgattctccaggctcctttctagaatgtaaggctcagatgaaacaattctggcaatatcctcatctgaaaaccccataaatttaaaatactcaagtttcttaacagtattatttacattgtagaaatgcaatgaagcacgcttaatggtcaatgccttgatttgctcattactaaaaccatgagctctaaacaattgaactgagtcaactaaatcacaatcaagtacacgaggctccttagtcaacaaatttaccatgctagcaccagaaaaccccaaagactcaagaaactccattttaggcctaagtgtattttccaaatcagcctcaagcaattgaggacgagtaactataatcttctcaatttgggactttgttaacccttgacctctcaatagctccaatactaaatcgggttgttcagagttttcaaataagagcttcttagaagctacaatggcagaattgtgtgacaacccacatgagttttggaggtaagaaaccgtaaaagtctgtctgtcattggaactagacaattctgacatgggtctaataaaagaactggataaaaagaagccatgggaaatgggtgaagcagtgggctttacaagcgagagtcttttgaaaattaaacgaagcattgcaaattgtaggagaaaagcttcaaccaaagactaacctttttgtggttgatccgcctggctcctcactcaccagcttagctctcctgtctctgctctgcacagtagtaatggtgtgtagtgactcgagagaagcggaggaccagtgtagagtgagaactgagaa

SEQ ID NO: 383785 - DNA, 1841 bp, Cannabis indica
cctcgtagataggtgctacgacaccacgtagttgacaaataacaatactactaaaaataaactttaattttaaaagaaagtttgtaaagaaatatacaataaaaaacattaaagtttttattgaatagtatatatataaaattatattaaatatataaataaagtataaaagcatcttcaatggagtactataaagattgagtatatgtatgttttagcccatgctacataaaattaaattctaatggtagtgtataatatggtttaaatttgacataaaatataaaatagaccaaattttattccacactaaatattacttttctatttactattttactactcattaatacctttaataactttttacatcttatttatgagaaatgctaaaaggcccactgctggtgcctaacacttttctggggtttatatcgttattgttgtaattaagtatcaagtctcatataatttaatttaataacttttaaagagcatcactaactaattgtagggtgatacctctagatgatactagacatcactgaagcttaataacaatgctcttcatttatatatttaatagaattttatacacttttaatcaaaattaatgtatttattgacttctttatacatttttatcaaaataaagttgatttattcctaatgcatgatccaaaaagctattagttatattaatgagtcacaaaatagtaaataaaagtgatatatattgtagtgtaaaatttaactcatgctatattttgtgtcaattttgacacaatttttagcgtgttaaatttagattatttttacactactattataattgtatgatcatatactaatgtatatatatatatatatatatatactatattatagcactacattagaaaatacttttatgtgccaaatttaatcacattatacactactattaaaatttaattttcatgggactaaaaaaatgcatgtacgacacatttatatgagtccattagagatgttaactaacaatttttgcttttaaatgactatgaagagcacaagttcaaattttaattaattttgattgatatgttactgaatattataaatatattgctttttttttaaacaatttttttttttctaaactaaatatattgaaacttgaattgcatatgtctcatatgagggccactagtaattaattttgccaataattgggtccacgtagaataaattgaaagcgaaaaacctctacacatatacaactttattttttggtcccaacatcttagttaaacaacattaaatatggaaaatggacccttcctttatttatttaattttttcttttttttttttctaaaagaaggaaaaaaaatagtatggaatcatagagttataaatgtacattaaaaatttactgcatacccatttaagaagacattattgcttaggctgacatgttcacgagtccagcaaatcatagataaataagaagaagagattgaaccattgaaatagtttcgaaaacttatgtctttatccctaaagatgatgagtagtaattaatatgccaagaaataaataataataattgagttgtattatatgtaccctttaaaaaagcatattcaatgtgaaattgtattgtcccagaaaagaaaagaaaagaaaaacataaatttgcataggaatttaaaagttgttcttctttattgattgtttttttttttcacttggtaatttattttcttcactccattggcaatagtatacaactttacatgctttaattttctactaaagttagaaagaaaaacaataaataaataaaaaataatgga

SEQ ID NO: 383786 - DNA, 2364 bp, Cannabis indica
ctaactaacactacaccttactaagtgactttaatactcccctttaaggtggagtgtaaacattacaaattcccattttgtcttttaaagtctgaaattgattaaggaggagagctttagtacaaatgtctgcaatctgatccttgctcgaggtatggactgtctttattattccttactgcactttttctctaactaggtgacagtagatctctatatgcttggttctttcgtgaaaaactggatttgcagcgatttgttgggcagccttattatcacagtgcagaattgcaggtcttctatgttcaatcttcaattctttcaacaaggaaaggagccaaaccaactcacaagttgtatttgagatggctctatattcagcctctgctgaaaaccataaaaccgtgtgttgtttcttactcttccaagatataagtgagcttccaagaaacacacaaaatcctgtagttgatctccttgtatcaatacaagcagcccagtctgcatctgtataagcctcaagttgtatttctgtatcagcagcatagaataatccttgtccaggaaaactcttaaaatactgtaaagttctttgggcagcattcatgtggagactttaggtgtaactaagaactgacttagtttattgacagtataagctaagtcaggcctagttatggttagatattgaagcttcccgattatctttctatacaactttggatcggcaagtttctcctctgcatcttggctgagtttcagattaatttacattggtgtgttagcaggtttacaccccaaatggcccaaatcttctagcaattagagagcataatgcctttgggatataaagatgcctttgctggttctagctatttcaatatcaagaaaatacttcaactcaccaagatctttaatttgaatctgctattcaaaataactttaattcttctagggctgctatattgttacctagccaagatcacatcatccacataaacaagtagtatgatgattgtggatccattttgttgaatgaataatgagtgatctaaagctgagtgttgaaatccttcctcaactaaggctgtagaaaattttgcaaaccattgcctggatgcttgcttgagaccatatagagacttctttaatttgcaaacaacattaggtggtagctcccccttaggactataccctggaggtagagtcataaacacatcttcatgcaatttcccatgtaggaatgcattattaacatctaattgatgtaagaaccagccttgtatagcagccaatgcaagaatgagcttcacagaaacaaactttgcaacaggaacaaatgtttcaatatagtcaatacctttttgttggttgtagcctttagcaacaagccaagccttaaataacaacctgctatagtcaattatttcagataaagggtggaaagtggactgcttagacacctgatattgaacattgttaatggataaaaaacagtgataatcttgaagatatgagggttttcgaacctgcctagtgggtctgctatcagtacattcagtaggcatatttaaaatatcatcattaggtacacaaggtgtagacttatcaagtgaatgaaaaaaatcagtaggcttatgagatgaagaatgagattttgcaaatggtaaagtagcagtattagcagaaaaattatcaaaagctgctgctggaaaaaaatttgcaaactcagaaacattagaaccagccaaaacaaagggaaaaatttgttcatggaaaacaacatctctagaacaaaaaactttgttggtatttaagtcaagcaactgataagccttcatacctataggataccccaagaacacacaagcaatagccctaggtgaaaactttgatctagcagcccccaatgtagatgcataagccaaacacccaaaaggctttaaatgatcataattaagggctttagatttgaggatttcaaagggagatttgtgcttgagattgggtgtgggtgtcctattaataagataggcagttgtgctaatgcattccccccaataaggcaaaggtatgtgagattgaaaaagaatagctctagcaacatttaacaaatgttggtgctttctttccacaacagagttctgttgtggcctttgcacacaagaatggtgatgaacaattcctaaggatgaaaacaactcaggaaattgtaattcttttgcattgtctgacctaatccctttaatctgaatgttgtattgtgttttgattaactgtatgaaggcaggaatagctatttgagcatcagacttgttctttatgagatgaatccaggtatatctagagcaatcatgtaacacc

SEQ ID NO: 383787 - DNA, 3218 bp, Cannabis indica
caaaaaatcacacattccaccttaaaatttacaccaaaatgcacaacacattcccatctatcccatccctacatctttttttgccccctcaaaatcccaaaatgtaaatcctagctcaatatgctaactaataaccaagcatagttagttacattaaccatctcatagttatgtgaatccatatgacaaatgagacatgaataataaattgctttatatgtattttaaattaattaattaatatatatagtgtatatatgattgtaaaagaaatcaaacagtgtgaacatgtcaaagatataatagcttaaacatgtcaaaaaaaaaaaaatcattacataatatgaatcaaaattgaactccctcctctttctaaagtactaaggtttttaaacaaaaagtagagcaacaaatgcagcagggaaaaaagacaatgtctcacaagaaatttacagactcatgaatgtagaacaaaaaagactacctatgtattttcactcacaataaagactatacgggagttaaaattggatatctgttaatttaactaagcttcttagtttgcattttactaggtagactaggcctccatattcggattgtttgatcgtcacttgcagacgccagcatttgaggcctcctaggattccagctaacacagttcacagtcattaagtgacctaccaaaacctcaattgggctggaatttttccggttccagatgtagacctgctaatatagtttatattgatgaagtgttcgaagtttcaatttagttcaatgaactagtaatactaaactcgtgagaaataagaattattacctgtgcatcttcactaccactggcaataaagtagctattcaacccaccgaaacacgatcttatcacatacttgctttgcttgtggcccatatatttttgggtttctcccatttccctgcaatatcccacatatgaatttcttggctattaagatttacgatgaagaattcaccgtctcctgaaagtgaaagtgatgtgattgagtgctcctctgagatgactctctcagcatttgttataacatttactattgtaatttctttatctgagaatatacagatcagattttctccatcagatgtcacgaagatctataactttaggcatcctcgttcccctccatgcctttatttcattcccattacagtcccacatgtagatgcccttttcaggtctgaactaccacatacaagtctttcagagtcgggaaaccaagcacacgagcccacaatgaagttaagatccccgaacgtagtgcattaatgtacctgtttccacatcccaaagtttgaggacttccaaatttccacaagtgagcaacttcttatcatcagggctccatgccacaaaggaaacttgtttttggtgaccacataatgtgtgttttggtgttatcttaccatcatcatcatccggtacctagccaagaaaggagaaggtaaaatagtgagacttcatcacaaaagatttcctcttttctcaatcaaaactaaaacagataatttagttctgaccaagaataaatgccaaaatcaactcagactatgcggtgatgcttttcaatgggatgtaaaaagataagagtgcatagtctcaacctgtttaatccaaagcaacatcattaacttgggactaaaacttctaatgctatttttcttgtccttttatctataaaaggaatcaataagatacctcccatatgatggctgtacaatcacttgatgagaggctaagtacttccgctgttagaaaattgaacaaaccatacttcattcttatgatcagtcaaaatctgcaagagtgagaaacaaacatgaaattaaacgatgaggctaaacatgttgaggctgtgtttaacgtggttgatcaaattttcacaataatgcttagtaacaatatagaggcattatcagcatttaaattttagcttatcctaccaaactagtaaaacttttaacaaatcttaatcaaccaaaaactaacgcacacctgatgggtctctgtcgggatctgatctcttccacataaatgatccacatacagtgacactgcacctggtgaattgtggtacatacatgaattaatctgggctgaaacagtggtttctaccaaactttccaaccttctttcgggcataataattggtggaggaagcaatttttccaactctctcaacaaatttcttcgcgacccacctacaatgttatcatcattctttcccagctcttcgttcaaggaaagaatattatgagcgagattgtgaataagatctctgcccacatctaatgcagaaacatctttccgcaaaacagccaatgccttcaagtaatctccatgactcaaatactcagaaatacactgttcgaaaattaaaaacaatgctgcagctctagtatcctccttcaaatcactaaatgccttaagagtctgaatgcaaccatcccaattcccatttagtacttgagatttgaacaattcaaaatcgtgggacttgtccgaaattccagactctaattccaaacaagaagctgactctccaaagcctaatgagtatagacactgaattattacttttacaaactcatgctttcttattaggcgctttgtaccaagcaccgtcggcgaagcctctgacattgatatacagcaaacctatgttttggtgactttctaatcttatacacactcaaagtcaaaggctaccatttcttctgctggccatgattcctcttaaagtaacctaaacaatagcaagttcttagtacaaagaagtagcaaaaatccaattcaaaggtaaacattctcagaaattccaatttccctaaatattcccaaaagtcctaaatctcagaatgtttacaattacactttacagacactaaaatctaataagcaataagaacagttccccaatttccacaacctcaaaaaacatctaaaacccacagcaaaaacttgcccaaattaacataaaaacctatcaattaactaaattacttcaataacccatcaacagtataaaaacacatataagatatagaataaaacaacaaaaccctgagctaatgtatcaaagaaaataaaatacccaattcaaaaaaccaactaaccctagattactgacagctcaatagaaaactcaaaccaaacttttacagtaaaaaaaaaaaaaaaa

SEQ ID NO: 383788 - DNA, 2875 bp, Cannabis indica
ttttgtattttttttttcttttgggatttttttttcctggacatgtactgtggatttcgtgaaatgggttttcattatttcatcgaaacaagtacacgtccttgtggtcgttctggtataaaactatatatagatatatacaaaatatagtttggattcatgttattatacttgtaatttaagaatgttcgttttgtgttcgatgaaatctcgctatgggttggggatttatgtaacgtggaaactgttacttatacttttatgaacaatagattttgtgtttgattatttgatcctgtttttgcaagttttaacttttatatatatacatgtagttaatcaacaagttgataatgttcttggctaattgactttagaatccaaaacgactgctattcaatccgaagggttacaatcgatactaatggaaaataaagagttaagtatatcacttgtattagtacgactgataattaagctaattttgtattcagaaagatagatttggctaatttatttgtttattcgaaaagtaaatgaaagtacaactaggccaatcaagaatgaaagctcactaattctttatccaacaattttataggcttttctaaaagtaagaaaacaaaaaacaaaaagagaaatattctatttaaatcttcaattttaatggattaattgggtccccacaagactgagatggtaaaattttttatcatttgtatatatacattcatctataatttttttttactcaaactttttattatttgaacatttgttttaaaattaataagtgtggaaatgatatgattttatgatgttatacaaaatgatttcaaataaaatgaaaaacaaatgtcttatttagacaaggggaagtaattattgtgacatactttgtggaagcttgttaagtcaacaaatttttgtactttacaatctaggctgggtaaaatgctttatctaacaaatttttgtactacttttattaaagtagcatagcagttaacttcctaagatgtcatttctagttaattttaattaatcttaagatatatgtttaagacatgattataatatttcggctaatcataattatttctaaatgtgattaagcaggacaatctgattaaattttaaaaattgtattaactctgaactttagtgtgtaatgctgtttgttttttaaaattccaagaaactacaccactttttttttttttttttgtaaacatccaaccaataataaagagattatctcttgcacttgatatccgtagagataatctctttcacttgatatcaaactaggattgaaatatctttcaagttgctttggaaatcttgagtaatgaaaactaaagttcttagtccttttaaggaaccttagaacactctatagccttccaatgttggatagttaaattgcttgtaaaccttctaagcttacgcactgcatatgctatatctctttttgtacaatgagcaagaaatataaggtttccaattgcactagaatactctaattgggccaccattcgagcatcattctttacaagtttacatttgtatcaaatggtgtacacttagaaaaaatcttatttcctgaccgacaggaattcttatttttgtagtagtgtgtgttaaggatggaattggggcggataatatgtggggaacgcattctctgcctacatccccgctatccatttatgcctcccatactcgtttttaggggtttacatccattccaatttgtattattttactcatagtacatttgagccgcactaagtgcggattttatattttgaatccaatctaatccgccaatagctcaaatataaaataatccaatttgaaaaagtgtggattggatcaattattttcgattggttattttttaatattaaatcaaagtttaaagtttttccgccctttttttctagtaatctcggtttaacgggattagtttatattattagttgtcatagcgtgtctaattgttaggacattacaatatagtagagtcacgatgaattaacaagttagaaaatttacgggagtaaatttcagatcaacttattgggagtgtggcttggtcttgtggttttgctaatgcgattaagtttttattgcgattagtcttgtctttgtgacatgattttgagtgtcttttgtttaggttgctgcgattagtcttgtctttgtgacatgactttattttgttttatttcgttgttaattcgtttattttctttgttctttaatggctcgccatcaaatcactgttagtggttcgaaataacaagtactcagttgctgaaggggttgttaatggtgcagttacgtaccttgcacaatagttgagtgctcaagttaatgggttgaatgaacttattgcaacagtttatactattgtatcttctgagcggttgaggaaatttataagtgttcttaaggttaactgtgatgctacaatcattttcatctaatattattttagtttcttttgtcaaatgatctaggaatcaggcagccggttggttgattcgtttttctgattctaatcctggtcgtgttttcaatggggagatgtcccgattgagttgcaaactattattttaacagattgctattaataaaattgcattatttattaaaaaaaaagtattagctcccacacaatctaacttaataactattatagaatataattaaccaactatagcacactacctttggagaatctccaatagagtgctaaaagagtaggtgtattcaggggcggacccacatagaggcgaggtggggcagtcgcccaccctgaaaaaaaaatcgagaaaaaaatatatatacattttagttagttaca

SEQ ID NO: 383789 - DNA, 3724 bp, Cannabis indica
ttattagaatttgaacactgaatctcttatatattactctaatcaaattatcaccgagttgcaacatatatttaatattatgagtataatttttcattttattattaactatattttatttttttcaaaatgggagtttgagcattgtggggcctaaccgcgtccttcatctcacctcagagtcagtcctgaatactatacaattgttagaaaaataaaaaaaataccttttaaaccaatacttttctgttacataactttttttttttttgaaaaaactctttttatgaaaatatcattaatatccattttatatgaaaattgaagaaatagagaaatagcgggtgattctacaatgcatccccttaaaagagatgtacagatgcaccctctacttgtttcggcatacagaaaaaaaatttactctattttttttttcatattcatgtacgttatagctatttaaggtatcttataaaattttgagaaattcgaaataatttacaatatagaaaataatgttcaaacagtctattttatacgcgtataaaataaaagtcaggcgtgcaacacagtgcttgaacgtaattttcagcatgttaaattttttcgaatttttttaaattttgcaggattataatttacatgaccatgggaaaaaatttgactaaaaaattatttctaattataaatcagataaagacgtatcagtgtactcttttgaaagatgtccattcaaatatttaaaaccgacaaaaaatatatataaattgtaaaatcatatcaacaatttaccattgccagaagaaaatcaaatgccagtgttagggtcaccctgaaccagatagtcgtgtccttaatttcggacaaggacagagtattacttatctccaaacagaccgatactttaggtctcagccttgcccctttataagcctttcaaattctcaaactccacatccaataaaccctaaccctaattaccttcttcttcgcaatttctaatattttgtttttcatgattttgtaatttttttgggggattttattttgcatagatggatagagcatcagtgatgagtccataaaaatgttatccttgcactttgattgtcagtgaagaatctaatggggaatttttctctgaggtgctctcgctcactattctctcttttctttttttctttgtatacgcatattggatcaatgatgtttaaattactgcgttatctatctgcaatttcctatcacggaattgaagacgattatagttgactgagatctagttttctttatgattctttttctttttttcgaattgcgtttttttttttttttattttttctttcatttttttgttacattatgttttctagatcatctttcagttatatccaccatatgtgacattcgtttctcacttatctgtggaaatataaggaaagatgaaatcaatctgtgtttatttgaattttgattgtgatggttcaatgttttatactttggtaaattggattttgcaagtcaaagtttgtaaatgctttgaaaaaaatatcaggtttgatcaaatttgaacactttgttctttttacccaaattactttctttttttatgtgcaaattattttccatcgactaaatgatatttgaaatattattgcacaagtgtaattaaggaactaagaccaattttagacttagtgcatatggaaagtcattatgatttcatcagagcattgtgcatcactggtacccagcactaaaagtcataaaatttatactgtgagatctgttttggtgtgtagtgctgaccattggtaatgctctttagtgtttttcttatttcatgggcaacaaagtatcgttaataaattatttcattagagatttaatcagttctagtggtggaatgagtgtacgcaaaatggttgggaactaattttttgttatgataaatggtaattagaagtaagatgtaaatgtcattaagcatgacctagttaattgaaggtcatcaagtttagaaagagtatttatataacaagtgttgcattggggaagttcagaatgttatggattcactttgtattatggagaacaaattacagaaaatgttttgttttttttataatatggtttggtatttttttttcaatatatagaagaatgaataaaaaataaattagtgaatggtgtaaattttatgggctcgagtcttttactctggctaagttgatcaatctggcttcatggggtttgattttattttatgtgtcctaggtaattttttcgtgtaaatttggtgatgtgaaatggcacaagagttaaattttattaatttttcttagataataagagttcaatcatactgggaatttgacaattttgatattaaatttggttagaaatggtggttgtaggttgtagtgccatttgccacgagtttttatttggctgttcatggtgggtggtggctagttaaggcaattcttgtttagaagtttcagtggccatgaaggcgatgacactgcccatattaatagtctctaagttggcgatcctgacattggccgtgattctacgtttcactgttacatttcgacgaggcttttgttattggtcacaattagcctccacattcctcattgttttctgttagtttttgggatagttttgtcagtaaaaactaaaaagaccaaaattgaggcaatactattttttttctttcttttctctttaaaaacttgggattttttttttcgaaattaaactcaacaatcacagggaaaattctcaattcaagccaattcactattcaccctaagtgcatgtacagctaattcatgagtagctttgttggttttatgttgagcatgaattagggatgcctcaggaaaattggaaaacaaactagcaatatcatccaataaggaaccaagttcattacaaagggaaaaatgctttgggagagtcgaaaccaaggctaagcaatctgactccaccacatgaagaggaagaccaagagtgagagaccaatccaacgttactattaatgcaacaacttctgctaatatgactataaaattacctacaaaaaacaacaaacagagaataagttcaaaaaaaaaacattacaaggagagaaaataaatggtcaatcctaataatgaaaacaacaacaaaagaagcaaaattacaaatttggtaaacaaaaaccatacaccggagggaaaagtctccctccggtccaaccataatcccaacacaactactccacaccctcctatcttaggaatatcataatattttaaagtcataaactataccaaataaggatctacatagacatcccagcacattcccagtagtatctcgaactattgccccaatgcctatagtgttagaattaacatccaacgacgcatcaacatttagtttatacgctcccaaaggcggcttaacccatcgttctggagataagcatgtcgatccctttgccataacattatgcctcgaacattgactgtactcattaaataacttaaagatttgtgagaccacaacatcagaagggttggctttgcgaccatggacaatttggttcctttcactccaaatataccaagccgcaactaggaacaattcgtactcagatctagatagtatctccgaagccttcagaactatttgtttgaatgagatatccatagagaggttattcaa

SEQ ID NO: 383790 - DNA, 2014 bp, Cannabis indica
tttttttttttgttctatttttttaagatcctcttgtagctgtctttgttgactgaattgttggaaaagaaagaagaaaactaatgcctaacaatttaagagaaatgttagttttgtggtaagaaattaatctcaaccaattgtattcatttaattaggaatttttcacttgttgaagagcgttaattattagaatataaacactattataaagcctaacacaattactagtgacactttaaaatgattataataattattaaagtgaatatcgatattttattacctttattataatattatatatattacgaaaaatttaaaagtaaaaaaattgtgactaattatatatattaattttctatgttatcactaaaacgttcatggctaaatgtgttagtcaatatattaaaattgaagaggcagccatgccactggagttgagtgcccataatcatgtacgaaatgtagaggaccacaattgaagtgttttctcattctgatatcacatatgtcctattgtccttgaaattttcttttgcacaaaattaagaaattaacacaaagaaatattagctgacatatcacattcattgtactattgccatatacgactataaatttggcatttattattgttatctgtgtttctagacaagggatatgtgtacttctaagccccctttcacaggcccaattaagacaatgggccaacccaccaaaggagctagactatgactccaggtctagtataaaaatatagatccaaatttttacctaaggagtaaggacccatccccctagggtcccggaagggcatctcgcccagaagaaagaagacccatcagggcatatttgtatatgggttattcctgaaaggacgattcaatagacgtccgggagctatggctaacatagctcctctctcacatagaatctcatagtatcaagaccttatccccctgtgtcagaccatgagagtgcatgtacacccaaaggatacatgccctttgtccaacaactactactctgacgctactgtacacaaagggaggtgaacgcgcgccacctatcaccatcaaatggacccccttgtacggataaccgttgcctcataggctgggcctcacctattcagcccaatgtcaatattgtacttgtattaaccccattagtgggccatgtttacatgcaaaccctagcaggtttgggtatatccataacttgactctagtctataaatacgtcattaacctttcatgcaaaaggtttgagatcaattgctaaaatgataaggctaagagctaggattcataaactaaggaaagaacacttgtataagattcaaagacttttctagctaataatattgactcgtggactagagttcattagcaatcgaaccatataaaaatcttatctataattttatattaatttcatctatttcttaagctttctttatattataccaaaatctaaaaagctcggtaaatattttggtgctttcattgaaagctgagaaaagctatgataccaaagttgtaatctacaataattgtaactaccagaactgccgtcgttaagcctgttgctcgtgaaggtgatgacgacatggacgacgttaatctgccccttgtacgtgcccagacgggtattgtggtggacaaagaggcgtggaaagcaggcaacttctctgctcgatagaatcaacaacgtgaaaagtatgtttatagaaatgtaacgtccccacttcaagcctccattgggcccttacacccacgaaatgaatggctcttatacacgagtacgtcgctctagctgcttcctagattgacgactgaccctacagaccaacacgagtgtttccagcgtgctttgtcctcactcgcacacttcctgggacaacttcccagaaggtcacccatcctgaaattaccccaggttaagcacgcttaaccgtggatttctttcgtgatgcgctaccaaaaaacaagatgcaccttgttgatat

SEQ ID NO: 383791 - DNA, 1495 bp, Cannabis indica
aataaatattaataaaaatacgctaacttataataagacgacaacataagtatctcatagcaatactttaatataaaccattagaatgcaactagaataactcatataaaaaaaataagagtaactaaaaaagtacaccaatatgctatatataaatatatatatatatatatatatatctttattcattaaaaagcattattctttatatagaagggtaagcatgcatgcatgcattattacataatgttctcacaattcatataaaatacatatcatgtttatctcttattattaaattcttgatgagattaatttcaatactattttcgtttgagcacaagaatgagttgaaatcctccctctttgtagattggttgaagttgatctgaaagttcttcaactttcttataaaatctatcaaagattccatcaataatctcacttccaaaatgtttggtcaataaaacctccaatattgctcttaggtgcagagtaattgtctctgcagaggtaaattgagtcacttcaccattattgtcactataatcaatcatgcttgtcttcattatctccattctctcaatactaaaacatccatttgcttcaatgaattttgtcatctcatttggtaagactgaatataaaggtatgttgaatgtgtccacttgattttcacttataagcccctgcattaattaattacaatttctcaatatattatgttggaaataaattttaagagaaaaaaaaatatgaaatctaaattcctaacaaagtcttgtaattagtctaaaaaaattaataaagaaataaaaagaatatttacaacataaaaccaatgatattgtttagcgacaaaactacccaaaattactgaaattgtaattcattacatccattagtaactagttaggatgatatgtgtcactacctaagggctaatctcatcaaatttatgatgtgaccaaattaggtagtgacacgtgctattccttccagtcgtcacctaataaatgttaaaacatttttattaactttgagtacttttgtggcgaaaaaaatcattggatccctgctgtttataaacataaaactttcggtaattatgcaacaaatatctttaaatgaaaattaatttgcatctcttatattaagtgtaacttacttcttttgccaaatccatgagagaagagccaagaagctcaagcaacacatacataacagactgagaacaagggaaatcatttggaacagaaagtaaggtcaacaccattaaacctccaaccacaagctccttagctctagcatccaaaaacttagccatgtccttaccaaattgagcttcataagctttgccaacctcatccgaggtatttgagtagtgaattctcccgcggttaaatgctggagaattctcatcgaccaactccttcggaagattggagagccaatggagtgcatacgaagaatggacaaggtggagagacgagct

SEQ ID NO: 383792 - DNA, 1691 bp, Cannabis indica
atgtatattttaattagttatgacatggattttatgataaaaggtgatatctactatggacataaatattaatattggtataatgattaaactaaattatatataagatagaggtcaggttcaaatctcataaagtatttctcatgtacttttttcgaattagaataacttatcgtctaatcaaaaaatatattttgtgagaccataaaatattaaagtaaaacgagcaacacgagaaatgcctccataaatttgatctcatcaatataacatcgtccaaaaataacgaataaagatacaaaaagagatgataatttgtaataattaatttttcttaaataaaaatgaaatttgttatttattatttattttttaaaaaatatgaaattttgtaataattttagttagtcatatattattgaatatctcgtactgatatgtaaccttttctttttttttttattgtaaagagaatattaagccttgattttttggattcagatattttctgggatcttttttctttaatttccatcaaagtcgaacacataatctcttcaaaattatacaagctataccatatattaatttcctcaataataaagtaatgaatttgaacaaaataaaataggactacatttatatatgctttttcgagctttaaaacattcataggtttactttaagatacttaatttggttatatcgaaacatatttgtctagtttttttttaaagttttactaccaaacgtgtaagtggactaaggcttagttaaaaacaaagacaaaaaaaaggtggtacaaaaaacaaaagaccaaaaacaaaacacaaaagtagattttttattttctttatttatggataaaaagggaaatcattatcatcttaaaggctatgatataagaaagatgaaacattaattaagggataaaaaaactaattatatataattgtgagctatcacctttagaaaatttaatatataattattttctttttttttctttttttatggaaattattctattgactattaaaggcaaattaatctcagttactccatgcgcaaaaactttaatctgtacaactcatttgagaaagcctaattaagcaagtaagcatctcaaaacctaactatacatttttaactatatatatttatgaactcgagttagaagtgagactttatatatatatatttatatatttatatatatatgaacgagtcaacatcattcgaacttgatcaccttcactataagcatcgtataacattgatttcttgtcactgaagtaaatattttggtgcatattaattattgtttaattattcttgttggattaaacctccacttacactgatatttactaaatacaaaggacagaacagtaattacaagtaaagccctaagttggccttcggcctctataatccctaacagaaattagttagaatggatttggttaatccacacctaactaatttctgtaactacctaactaacacatgcagaaataaaaatcagaaccctagatctatatatacctgcattcaagcttagatctacacggttgagtgtttttcttcaagatcctgggcatgaacacttgaagaaagagagattgatgctcgtacatgcacaagaacaaaagagaaagttagtacagtttgagagagagggttaaaac

SEQ ID NO: 383793 - DNA, 1340 bp, Cannabis indica
aaaattggttacatatttcttcttcttatttacatgattacatctctgccctttattggcccttattatgcttccccgtctctctctgttcctgtatcaaccatttgctcaataaagttagccaggtttctgattctaagatgtaccacctttttatatgcatcttcagggttaaatggactcaggaaacaccaagcggttcgtaccagtatttcatcaaggttagtggtttattaatttattgtatttcgtttgattgggctgctatattttccagttttgtaattctctgaaaaggagaaaatttccatgcaacagggaactttagtggcaatatataatatagttccccatttgatattgtttttttctatgatatttcttttattgctttcactgtcctaacaattattcgtgaagataatttggtatttactgtgtcataggtggtacctacaaagtacaccaatattagaggccatgatgtccaatcaaatcaggtattgtgtaagaaatttatttgaactaatctgtagttaatcattttttctttagatattatactaaatttgcacactgtagttctctgtgacagagcatttcaaaaatacagaagctggacacttccgatcgcttccaggagtgttcttctattatgatttttctccaattaaggtttgttcattgtacccagttagtgaagctactggttaatcctatttcgaaccttccattacttgggctgtcaatagtgaaaacttacttatctcctctttcttttttgtcttttaattttggaaaacgattgcctaaagttgccttgatgtttagcttacggctatcatggccacagccacgagcacatccgtggatgaaatattaaattaacaagtgataaccagataagatcaaataggaaatcaataagataatggcacaacctgaagtctaaatgtggaagagatgattagaataatttattccttatgataccaattaagtcagaaatatacccacatttagacagggagaaatcacttgttaaatttctctctgtttagagttgtgattaactgtatgctatatgttaactgtctaaatgtggcttccataaagaaaatgtctaaatgtggcattaatttcaatgctatatgttaactgtatttgtatctattttgcaggtaaacttcaaagaggaacgtgttccatttttacacttcattacccacatttgtgccataattggaggtactctctctctatatatctattctatataaagtgtgtttatataactgaattttttagtttatgagaaattcatgggtgacattttattt

SEQ ID NO: 383794 - DNA, 2660 bp, Cannabis indica
ttattcaaatcttgatgattctgctttaacctactctcaaataattagcatcaaatatcaaatgggattttttctcataaaccaagaattcagttatataggcacactttatatagaatagatatgtaaaagcaataaaatcgtataacaatattatttatctaaagatttgatttgagttatcaaatagatagatagtgatgtctttccttttgaacattgtagtcaatttggaataatttaagagaaggtatgattttttttaattttttttaaaaattgaaactctcatactatagaagctttcaatacaggactatcaatgaacacaaagatactttgggtacaaagtcttgcaaagcttgagccatgaaaatggccttaggatctttatttataggcagagagattacagaaaggagagttgttacaacaattgagactgtaactaactctgacagattaaaccagaaaataacagaagaggactttaactaactttgtactgtaatatcccccctcaaacgaaattgtgtaggacacaattgaagtttggttttgagatagagaaatatgtctttgctcaatgccttggtcaagatatcagccacttgatcgatggaagggacatatcgaacctcaattgtcttggccaaaataagatcccgaacaaagtgcaagtcgatttcaatgtgtttcgatcgagcgtgaaacactggattggctgctagacttgcggctccttggttgtcaacccatatgattggggcagatggcagagaaacatgaagttctgaaagaatagaactgatccatttaacttcagcaacacaattcgccaaagcacgaaactcactttccgtgcttgaacgggcaaccacaggttgtttcttagcagaccaggagacaaggttacctccgaagaaaatagcataacccccggttgaacgacgatcatcaggagagctcgcccaatcggcatccaaataagcttgtagacacaatctaagagtaggttttattaagagtccttcattgatggagcctttaagatatcgaaacaatctcttacatgcttcccagtgatgtgtggtgggagcatgtatgaactgactcaacttgttcacgataaaagcaatgtatggccttgttaacgttaagtactgtagagcacccagggtgctgcgatacaagctttgatctgaaaatggttctcaactggttagagaaagttgctgagctgaattggttggtgagggacagggcttgacaccatccatgtgaagctttgttaacaattctgagatgtatttggtctgagaaaggtgcatacccgaggttgtcctgtgaactttaacacctaaaaaatagggcctgttattagtatgtcatagacataaactaataggtaaatgatatcgctgccagagccactaacaaatagagagttgtcagatttggaaggagtgaatcccttgtgacagagtgtttgtttgagcttgtcattccaggcccgtgatgcttgcttcagaccatagagggccttatgtagaaggcagacatgtgttggttgtgtggggtcaataaagccaggaggatgctgcatgtaaacagtctcattaagagtcccattaagaaatgcattggatacatcaagttgttgaaccgaccattgaaaagatacagcaagtgtgagaagaagccgaactgttgtgggctggacaactcgactaaacgtctcagtgtagtctataccaggtgtttgagagtagccctttgcaacaagtctagatttaaatctgtcgagggagccatctgcatttattttgatcttgtgtacccatttgtttccaacaattgtcatgtgtggttgataaggaaccagggtccaagttttatttcttctaagtgcatgcatctcagtgtccatggatttgtgccatttgggatcagcaagggcttgtgtgaaggaagttggtggtgttgggagtaatgattctggtaaagggtaatgagtggataggtaggctttgggtttgtacactccactcttggatcgggtttgcattgggtgaatgctggaaatagtaggttggttggatggaggatctgtttgagtgtttgtgggaggggaaatgttatgcggagactgagagacagacggttgctgagatgcatcagaggcaaaaccagtaggttgctgagaaggagaggctattgcaggtgatggttgcacaacagaaggctcaccagatccatttgcctcagataaaacagaagttgagtgagagactaaagtaagaatggtgaaactgactgtgggaaaaggagaaatgaaggtagattgtacctgatctgttgttgttgtagcagaggcagggtattcatcttcattgaagaggacattacgagcaatgtaaatgcggccctccttgttctcacaaatatagcctttgtgatgtaagctatagccaaggaagatgcacttggtggatctcaaattcaatttgttaggcaagtacggtctgaggtgcagatagcatgcacaaccaaagcatttgaggaagttgtagtctggcagcttgtgaaagcgacactcatagggagatatatttgttgggttttatgccctaaataaaaatctgtttcaatgtaatcca

SEQ ID NO: 383795 - DNA, 3916 bp, Cannabis indica
ctaacacatggattttggttgacttacttaaaaatagagttccaatagggtgaaaatggatgtacaggattaaagaaaattctgatggcagtgttagtcaatacaaagccagattatagttgtaaagggtttcatcaacaacctggctttgacttcactgagacacttagtccagttgtaaagcctatcactatcaagattattcttactttagcagtaacaaaagggtggaccatgagactgtaatatcctagaaaataaaataatatttaattggatatattttattaaatatgtgattgttctggtattgaagtaaggttatgatcttttttaagctaattttgtgaaaattagtgtaaatttaataaatgattaaataaagcgtaatttatcaattacatagattttatcggattatgtgggtattgtagatactatttttaaaataaaatatttttagattcggcgaccttggaacttcgatagagtggtcaggaatgttatggcaaataagttgtgttatattgaaattataacggactaggttaaaagattgagaagtcagtttgatcaagaaagttagaaaatgaccaaatgcccttaagctttatcttatgtaagtgttagttgaaggggtaaattagtcttttactaagattttatttattttttgtcctattgtgaacctagagtctactaggtcgaaaacattttctagttactaagtatttaaaaaaaatagagaaagacttaggaaattaagagaaatcaaataatcaaaaggagaaccaccctttgtctccttcttccttcgacaactctagaattagcagaatagggggaaatttcttcatcaaattgtccatttccagctgattcaacaaggcttagagcttgttcaaactttgaggtaagctttctatcctttccctatcaatttctaagtttaggctaagttttgattaggattatgcttgattttggggattagggttagttagattcagagcatatttctaagttaaattaaatttgtttagagtgtgaattgtgtattttggtggctgctaggtttgaatttggaagaattgagtgtaagaacttaatgttcactctttaatggtgaaattgtaattttagtgcatttctgagttttgaatgtttagatatgttatatttattgtattgagctgttctgggaagtttgagtaggtttggagaagatttagttggtttttggtgtgaaaaactagggttcccgtctgccagagaaatcagttaatcggttttacaagtgctataaaattggtaaaccaattttaccagcaggggaaaccctcgttttggcttcgaaaccggtttggatcggggtatttttcagagcttagattagggtattttagtgatgtttaagttattttgaaccagtgggaagttagaatttttccagttatggaattagggtttgttttagagtttgattaagttatttatcagattttgttatcgtgacataggacccgagatcgtcgagtatcgttccactcaagtcagtccgcacacctgatattggattaaggtaagaaaagctttacgcaccgatgagcatgctggtaagaaatgattattattatttgtgactcgattttgatcgagataacaattgttattattgtgactcgattatgatcgagggaaagatatagtcattactggaatgagtaattactcgcttgaaatcgtacataggtttcttacttatcgtttactttaccaggcaatgatagtgacatatgtagctcgtgtataacgagtggtaagagtgctttataaggcactgagattggcttgtcttatagacgtataattgtttatgcattgtttgattatgcgttgaatgaggaatatgtgtattatgccatgttgtgattacttgtattttacattgtttgtgatttaatagcttttcttgttgagtctctctgactcatgggtgcttcgtggtgtaggtagagggaagggtagagttgatcaaccatgagtcagaggtcttccagagaagtacatatcgaccgtggtgtcccgacttccagtggacatgatctacccttttgactgtattttgaaagtataatttgatgttgtaataccacttttggaataacatgtaaaagtttttatacaggggatctccatacttaacaataattttcttttataaaagttgtgtttttattttaattaaactacacttttcttaaattagatcaaaaataagtttgtaaaaccacacacgtggcgtccttgtgagttagtgtgttacagagacaattggatatcataatgcattcttaaattgagatatataagaggaaatatatatggttcagccactaggttttgtcgatcttcaacaatatcacaaagtttgtaaactcaataaagctttgtatggactcaatcaagctcctagcgcctggattaaaccctcttctgctatattccgtttgggatttcactcagccaagacagaccactctttgttcatccaagtctcctctacaagcttcctacttactctatgtatgtttttgatatcttgatcactggttccaagagtgatcaagtcacctctctcatagcagctctaagctccgcgtttgcactaaaagatcttggcacattatcattcttcttgggcatccaagttattccaactaatgatggccttatcttgtctcaacaaatttttttttacaggatctcatttgcaaagttaagttacaaggagcaaaatcacaaagcactccaatgaacagtggacttctattgtccaattatggaagtgatcatgtcatggacccatctgcttacatgtcttttgataaatattgtataatatctagacgtgatgtagcattcagtgtaaataaggtctgttagtttatacaacaacccctgcaatctcatttagttgtagtcaaaaggagacttaataatctagctggcacacttgattatggcttgcacataaaaaaggctcacaactgaatttagaagcctattgtaatgtcaattgggctactgaccctaatgacagatgctcaaccactgactattatatttttttgggtgaaaatctaattggttagcaatcaaagaagcaaaataccatttctcgttcctcaaaaaagttaagttttgaggtcttgcttttatggtctctgaaataagttagattaagtccttattctctgagttgcatctaccgattgtctcttcacctcttatctggtgtgacaatctaagtattataatgcttcctgctgatcctgtgcttcttgctcacactaagcacatggaaattgatttctattttgttcgtgataaagtgattcagaaggagatttatgtgcaatatgccctgccaaccatcatcaactagctgattctctcacaaagcctatctccaattccatgtttccttgtttgagagacaactatgtgtggtttgttcaaccacactcagtttgagggcacctgttaaggataaagacccagttgagctggcataatttgtagttaggcttctaaatcaattagtgagttgttatctttttctgttaaagtagttaagcaactggttaatcaagttgcttgtcttcttgatatatattgttctatattggttatataagatcctctcgaattttttctactcaattaatatatagaatttttcttttatatcattctcctagttcaaacaggttacataattgatgtaatttttaaaaccttttttatacaatttaccttccaatcctcacttttttttggtcaaataacatccaatctgcactaaggtagtgtttggttgggaggaatgaaaatataggaatagaaatgggaa

SEQ ID NO: 383796 - DNA, 2334 bp, Cannabis indica
aactctgatgagtgattctctttcttgtatatgtgataaaattagttggtagaactgaagaatggtgagacttacaatggacatttagttaattgtgatacatggatgaacattcatcttcgtgaagtcatttgtacttctaaggtattatgccatttaccattacctttatgttgttttgttgtttatcaatatttttaatatttttagctctttcacatggaagggattagcttcttacctgtcttgaatatgaaaacatttaggatggagacaggttttggcgaatgcctgaatgctacatccgggggaatacaattaagtatcttcgagttcctgacgaggtatgcttgtttttatttttatgctatattcccattaatgcaagctttgtctcttattcccatgaaaagtttgttctcatgttatacggatgctgtgttgatatgcttatttacttgggtattttggatattgtggatgataagtacattaatattcgtcaccgcttgtttatttgtctcttttccgactttgaaggaggcatatttttcgcactttatttgttctcggcttgtagcctttatgtttaaaaaggaattcttgttgatttgattgatggaactctagttgtctttgcttttcaggtgattgacaaagttcaagaagaaactaagagtcgatcaggtacatgattatgtgattgtaataagtagttctacaacactttactctatctttgcctaaatatatgcagctttcaagctcttggaccctatagattattttttacttgacacaaagttatcatcttctatgttttcagataggaagccacctggagtaggacgtggtagaggaagaggtagggacgagggtccaggtggacggcaacctaaagggattggccgtggactagacgatggaggtgctaaaggccctggtggaggccgtggcaggggtggatctggtggtagagctggtggaagcagaggtaaatatactaatatatcctgtttttccttttcaagtaggattgaaaagacctttataatttggagtgtgcatgaaacatttttgacctttatgaagtaaatcagtcatgcgtagagacagtcatggaagaattcagtatattaaggttcatttaagtttataactgataataagagaaatctttgcttgcttaatacaacttgaattttgaggcattgagaaattctctagcattccttatatttgagatctacacaaaagttaaaaatcttactaaagaaagatttatcattacttgaacaaaaagtgaatgtgaaatatgttatgtcatttagacatttaagtgggtcagtacttatttttagtgcacactattcgtcccattcccattcatgaagttagaaaggaatctaatttatctcatctgacatatatatctgttgtcttatgctatcaggtgggggacgagggcgtggttgatttggtggttagttggtgaaacaaaatattggaccattggctgcttttataggcatattggttccatgttcaagtcaaatgtctctagtttcccgcctctgatattattttctactgctgtgtaacgcatttggaatgtcgctttataagtagcagcaaatgtagctagtgtttttctttctttttttattgttttacataactagaagctatttattgtgtttcattttgggtgagtttgaggaatatatgcgtgcatttgccaaagtaattcctgcttggccttgttattgtttttcttttataaacgactctgttacatctatatattttgctccagtttcttttcattacaatttacatgttagttttgggttgatagtactagtagactggtttgtaaaattcttgtctataacttgtaatttaaacaagacaattaattatacagtgaactcacgcaaaggtgaagaggatcatgcatggttttaaaacaccatgataataataaatataaaattcaaaaaatacatgaaaagttaaggaaaaccaatgacaagattgcaaaaaggggtagatgctagtaaggttgatgcctagttttcttgcgagtattgggcgatctcataaccaatgcacttgagaaccaggaccgatctgtctgtgatgaatcatctaaaacccagcaacacaagcgaccatcttcaccgcctgtccatccgaacatgcctggactgtgatcccgtccactgcagatgcttgatacaggcaaagcacttctaacaatgccaccatgtccgcccataagaaccgcttcaggggaacctatagctgcttctcctttatagtttacgggaa

SEQ ID NO: 383797 - DNA, 1561 bp, Cannabis indica
tgggcaattgaagagacacttggaggcatccaaaaacaatcctacgtggcatcctctagctagacacagggtcccaccaagttagagatttgtcctctacgtctaacttgagaagtgcgcacaccaccaaatggaacatacatttttctccaacgccatattctctgatatttattgtaaaaacttcggtgcgcatgacacctatcaccatcaaaatggtccccataagtatgaaggactgttatctcataaattgggtcttacctaacaatataaactgtactttaccttatcagtgggcctagttaacacatttcaatcctaacgtgttcgtgtctacccataaactcgactcaagcctataaatagagcattacctcttcatccaaaggattagaaaatcatttcacagtttgaggactaaagattagggctcttgaactttggcaagaacactcttgtgtaaaaatactctaactttttaagttcaataatattaatttgtgaactaaatatcactaatacctcaatcacatattgtctttaatttattcttctttaagtttaattttatttcgtaataagtttctaaaaatttcataacatatataaatgtaatttaaaaaaaaaaaatgggtgttgtattattataataagatgaaaatgattatatagtgtaaattaaatagtatgaaataagaatgtaattaataaattaaattctatatatatatatattatgatcattttttatagtatatttttttatggaagatggtcacgtgtaatgtatccacctataattaattggtcaagtaaggtttggtagtagatgtgatatactctaactattctagctaccctctcttgcgtgcccatgcttctcattaaaattacttatcatatattaattacatgcattcatataactatttacttccctgtattttttcttctcgtgttcaattgtttctgaattattggaaagaattttatgttaattatacgaaaaaaatgagagggagacatcaatttatattattgtgactagcaaagagaaactataaaatctcatgtaaagactatatattttggccttttcagctaaatgccaaaatttgtcagtggttgaaaaaaaaaattataataatattaataatgatactaatattaaagatttagtcttcacgtataccaacttggaccttttagttaagaaataagaacattctctttattattgacatctggttgttacacttcatttattgaattaagtttcaatattcttttctttttccattcccagttggcagcctcttgaaaaggaacatttataattaatttaaaatttaataattatgttcagaatacatttatactaaagtgctaaatatatttatctcaaaataaaaaaaaaacaaaaaaaaatgataaatatatttaaattgattcgtatttctaattttttaaaaatacattaaaatgtataaaaatattttctaattttttttaacaagaaaaattttattcaattagtgttagaaaatgaagttgttac

SEQ ID NO: 383798 - DNA, 1662 bp, Cannabis indica
ttggaggatgtaaaatttgtgcataatttaactaaaaaaaatgagctaatgttatatttcactcaaatttataatttgactccaatatattaggtgtaagattagctttgttatattaatgagtgatagaagaataaattaaaaaaatgatatttattgtagtgtaaaatttaatctatgctatattttaattttgtatcaaatttgacacaatttttagcatgtgctaaatttaaaccacattatctacaattattagagtttagttttataaacataaactaaaaatgtgtatacaatatatttataacacttcattaaagatgctctaataaactttaatatatatttttattaactattatttaaataatttattgataataattaatgatgttttatttttgttataatttgcaattttgcatcttaaaattaatgctgttgtgaattgatatattgcaacaaatatacatttttttttgtcaaatttaatacaatatttagatcttgtattgaatcttctttttgtatcttgctcttgccttatatagatttaatttttttagaagttactttaatttttggcattcttatcatatgtttttactagagctctactctttactaaacagtgtttgccttgtgagttcattcatactcgaagtgaatgatatataaaaggaagaggaattagggaatgaatgaaatgaataatacaagtaagtaaatgtcttgtacaacaagcaaagagaatcttaattaagtctaggcagcagacagtggttaaatgagttaacaatattgaagttaggcataacccaccaatcacgatcacacaattaaactaataaatatagatatgtgaccaacttcccatgtgaactcttcgtgttcttataattttaaatttaaactataattaattttcagcataaattttgaaaataatcattatagatttccacaagtagaagtaaaagactagttgctttgttcaactagtttttattgtactcggctaattagtttgtgttattaggtgatctcaatcgaccacttataaaatacttcatcccaaaaaaaaaatgtctcgtgcccaattttttatctcaatgttgataactataaacaagaaatataacaaattaaatggtaaactatacaatttaaggtatacgtgtgaggagagttgaatctcctagacattgaaacttgagatcgaacaaacaacactaacagtaaagaaaatctaagaactgagaaaagagagaaaagagaaaaatgaagaaaatgaaagatatcatgaaagagctcaattattattgatcacagttgtacaatatttatacaagagttttagtaacaaagcacaaaacagttacaactgaaagctaacaactaactaatagaaagttagttagttgtgtaactaacataacagtaaagtacaactgtcaactcttaacactccccgcaaactcagcattggtggtgtcagcaatggtgagttggctcgaaaatgactgaagttttggctcgatattgcttttgtgaatccatctacaagttgatctgttgctggaacatgtttgacaataatttgtcaattttaaacctttttttgacgaagtacaagtcaagttcgatatgtttggtgcg

SEQ ID NO: 383799 - DNA, 1762 bp, Cannabis indica
attgtgattatatttaataaaaaaacaattaatttttatttagttagaaaaaaaacctatttaatttactaaaattggactcataaattaattaattttttttttttaaataatcaaaatataataaaagtttaagttcaatcaaagtattatactacaaaaaaaaaattaaaatactaataaattaaaaaaaaaaattagctacacaatatgttactcaatttataaatcgtttgacaaaaaaaataaattataattactctaaaatagaagcatattttgaaagtcttgaataattaaactaaaggtagaaaacattgaaaaatgactaggaatagcttaaaaagtaattaaattgtctatttcaaataattatgtttgctctgattaaattttatttaattgagagtttctttaaatccacaaaagttaatttaaattattatgtttataacaatgctatctaaataattagtgaagtaaataagaatagaatatatttcctaacacaacaaaatacgaacccccgaaaaaagtacatttgatttaagtagttcaattcccatacaaaatagtaatagtcaacatttctttctactcaactggctacttaaagttctactaagtgattatctcaaaacttaacgatgataacaaaaacaaaacaaaacaaaaaataactttaaaattaggatttaattagtcatcatattttttgatcgagatgaacagtttgaggaagaagatagtatttgatatggatttcttcgaagatcctcttaagctccatgactagctcggatcggcgtcggtttctctccccatactcttggaaatttatggtgtggtttggatagagagccatcttcaatttgttcacattctcaatctcaagcaccaccacacgatgtattggatgccatgtttgagggttctcctctaagtacctacacacaagtttaattcattacaattattaaataataaaaagagtgttattatttttctatgtagtcactctttcaaaaatattatttcatagaaatacatatgatagaaatacactacaatttgggatgtgtcttactaaaaacaaatattttcttgaattcccaatttattttttagaaatcgtatatttcaatttatttagaaaaaaacttaataactttttcaaaaatatcatattcaaattttttaacactacatcaaaaaaataatatataaattacatatgatattttataattcaaaaatatttcatgagaaaaattgaagaaaaaatttaaaaatatacgcttagagtaactacatgggtaactagttaccttatactattttctcatattttttaacttttttctaaaatatattttttttattgaaataaagtgatattttacaaacttataccttaacaatcataaaaataaaattcctttctccaaaaataatccaattgagatttaaaggcccaattttaaaggcccaattatcttgggccgattatatatataggataagttgataaatatccttttttgtatccattaatcaaaaatactttcatattaaatttcattaaaatatacctacttttaaaagtagttgcctaatataccttcccttccacttaagtctaagacataatttacattaacctaaatagtatattaggaacatcatctataaaagtgaaagtgagtatatctgaaaatataattaaaaaattaaaataagtaaaataaagaaatttttacat

SEQ ID NO: 383800 - DNA, 2279 bp, Cannabis indica
aaaaaaaaagttacatttatgaagcacaaagaattgtacgaaattgggtgtggtaaaaaagtcaaaggagtaatgggtaaaaatatattttttttttcaatgttgttatactcctttggtaaccttttgtagatgaggaataaagtgtgtttagaaaattactttgtaaaaaaatattttagaaaaataccatttttgaataccacttgagagtacaatttgtcatcaagtttttggtgatcaaagtccattaatttatatttcatgtactaatattaggcttaagaaagatattttataaacttatagcaacaatgtaaatatttcattttataaataaagtcatattttactaataataagttttaaatcataaaatgacaattattcttctttcaaaaatttgtaattttacttttcttcatgaatttagtaactagttaccgatttttctaaatataaattagtaaccacttctctaacaatctaacaatctagtagcatttttcatatacacttttttttttttttgctaactactttttcacatactttataattacatatttttcatatttaaataaacattggtaacaatatctcattttaaagaacatggtaatttgtttacgataactttgtagaaatatagtaaccgaatttgtaaaaacatggtaacttataactttgtattttgaattatagcaacctattacactgtattggaaataggaatgcagacgggtgggaaattgacgatgagtgttcccccgttcctatctctgttaaggattttaatttctatcctcgcttatttttcattggaaatccctaacagggataaggacggggtggggaatcccctaataaaaaaaataaagtttataataaaaatttaaatacataaaaattaaaataatatacattaattattattcagtaaactaattatcatccaaaacacaatttacaagtcataaaaaggatactaaaatactttaaaaaaaatacaaacataaataagtccctgtcagggcggggagtgtgatctccgtttccgctttatttaacattcgagaacaaaaataatctctattccaatactattctctatttaaactgagaatttccgcttcattaagaacgggtcactgcgagactcatccctatggaaaaaatacacatttctaattggaaagcaaaacacagaaagtatttgagtattatcattattatttcggttttttttctaacatgatacactactacaaaattgagctttagtgacactatttagtgacccgcacaaaagtgcgtgtcactaaagggttaggggtaagttttagtgacacgcacaaaaagactctgaaaattcaatgttagtgacctacaattcatgtcactaaaaatatgaggtgtcactaaaaagtaaatcttataatttttgttatttttttttgttttgaaaagttactctatagtgacgcgccaaacgcgaataggtaaatatttcccaacatgcctggcgcgtcactatatcataacccaattaaaaaaaaaaaaaaaaaaccaaccataattataaataaaaagtaaaaattaattaaaaataatattaaaaaagctaaaaggttatcacggtttccaagtttcaaacctaaactttattttttaataaaatactgactaaaaatatataagatttatttaataaaaatgaaaagagaaagagaaaaataaaaaaatttgggtctgaaactcctctctctttcatacagaaccctaatcgcctcttcccctctctctctcttcctctcgcgcctctcctttctttctcttggcagttgatgatgcgcagcttcctccagcgacaagcgcctgggactttgcggatttatggcatagaccgtggatgcaacggctggggttctggttaggtggccggcggagatgccttcttctccggcattgaggtcttctcctggaagggaattgaggggtgggaaactaagcacttataaggaactatgcaatttggctaatgaaatggggcaacctgacctaatttatctgtttatggatttggctaatcataaagcatctctaaactcaaataggggtgctgcatttgggttttctaagattgcaaagcaagcaggggatattcttaagccacatttgcattcattaattccaaggcttgttcgttatcagtatgatcccgataaaaatgtgcaggtatagatccttcagtgctttgtatgatgtgagaccatcgg

SEQ ID NO: 383801 - DNA, 2877 bp, Cannabis indica
ttagtaaaagtgtatactgaaatttgtaaattagtttgtacaagtctgtggtataagtcgtatagagggatcactaatataatatactagtaaggatggtaaattatttttccacttcgaagataaatgtatattacattttatttttcatgtatactaggaaattatgacattaatatgtggcatgcaggacgctctgaagcaactatggagattggcatatcctactaaagagcttccacctcttaagtcagaactttggaagcagatgggatggcaaggagtagacccctcaacagattttaggtttgtagattattaacatcttataatataatttcagcgaaatatttgcttctcctatctctattgcatacttgctcagatttctgttatgatttttcctttggacatatgcggtaatatgactatcttttaactttttgcaggggtggtggattcatttcattggaaaacctgatctttttcgctcaaaagtatcctgtatgttattaaattactctgttttagttatttatcatgagcaattgacagattccttatattagtttttcatttgacatacataagtatgggatatttttctgtttcaatttgaggttatctgccagaatctcatgctgaagtttaccatgcagtacccctaattctttgtgacgtaaacatatagagatttcacattctattgttttttaatgaaagaaatgagagtatagaatatgttggcacataattgaatgtgtaaattaaatgttacattgtttggaagttgtaaaatttgataacttattggatgagctgggaatgctggtcaggatttttccagaagttgtgaaaattggtttgattgcataatttattgttgaactgccttaattaagatcgaaaagtaccaacaaaatcattcatgaagctctagttagggttctaggggtaaatgttcactttattatcactgataaaaaatatcatttggaagatttacatgataagttagtttttaaataactcttgtggagcagtgtttctttatatgattatgatagatctcctatgaagtacacttatatgagaagagggataaacaaactaaacaaagttgttttacttattttagttgttttagtggttttgtggttaatagttgttggttaagttctgttaggagttttattagtagtgtagaaaatggtgaatcaattgtattttattcaatagaataacaagtatttatatatctagggagactaaataggaaacttataggaaattcctatcattacagaagcaaaatagaggaagaaagagcttaagatgaacaacaatggaaaatagctagtctattaatatgagtgataaaagagaacaagttggtgggtattcgagagacctagctctctcccaagagctaaagctcactaaaatcattcacacctttttccttcattattgagtcctatgtataataacaatacccttattacaattacacttatgacctttttatttaatatcccaatgcctgtcaataccggccgcctgaaaatcaccttgtcctcaaggtgatggagatcaacttgtaacagcagtaggtgcaactcgtgctcatcccttgtcaaagaaccaagccaacaaatgcaaggtgttcgagtcatgagaaagacgccactgctcacgagtctacctcgatcaaaaaaccagctgagcaaattgatatttgctcttttggtgtacataagaagttgaaagagagccactgattttttcccgaaatgccttgtcttgcccctatcgaacacccagaaacaacccactccagtggataaatgagaaaaacaagagatacacccccaaaatccatatatgtttttcagaagggtcactccaatatctatttctttttgttggtgctcttgccccaaaccagtagaaaagaattagggataagaaaataaatttccaagaatcacaattggctagttgagtaccaattctaggttgacacatccatgttgcttctctttcctatatcaaaactccggtagataatgcccacatagttttatttttgctacccatttcaagtagtttctcttgtcggcgaatccttatgtcaacagatacatttcttttatgaacaaagaaattcctatggggtgtattaatgaatttgtttccagcaatattaatgcagacacttatatcccatgtcaaacttactcttgcaatttctacttgagatgacaaactcacaaaaaaatatttcagattagatttcaaaaccttgagtgaacatggtacaactttgtttgcaccatcaactagcagcttttcctcaagaagagagatgttgttggatgagatacacttcctgaaggtggttcttctctctgctaaagatccaactagtggtgggtgaagttacatcctcgccatacccgagaactgaacccttgacctccgtccacccttacggtgcccactacccattgctctatcgttggtggttcagagttgcagtcggccaatctcagccctaaaggaagctttgtgcgattagaagaagggaacatagaaaccttacctggatcccacgcgacccatgtgttacctaaaataaacattgggcttttccctttgcttaatgggccattaagggttaggtcatttggcccatgtgtgaagaataaaataatccaagattctctctcctctttctaagaagtgtgcccatgcatacgtggggtttccatggtccttatggccatggaaggcattgaaatcccactggtttcgggaagaaaaaaggtcactaccccactggtaatgactggaaaaatatttctaattcatttc

SEQ ID NO: 383802 - DNA, 2608 bp, Cannabis indica
aaaataatttccaacaggtacttgtgtattaacttgtttgagggtcatcactaatggatctcttgcatttctaggagtttgcatgctttgatctatcaccattgggtcgattagatcagtttgaattcccccacaagttacaacaatcctataccctataaaaaatacaaaaaaaaaaacttgtttctttgctctcaatgaaagcaccaaaatgttgatctcgcttctagccaacgatagccagtctaaattaaagcaattagataaaataattaataaaacgcaaggactgtaaataaagaaaaatctagagtttctaaaggtctggccctgtgattatcataatagcctactcctctttaggttgtattgacatatgagacaaagaacaaagtattctctctctaaagctctcacaattgacctctgagtaattcttttttcgattactatttctctctttagtgttctctctgatcattataggggctcagtacatatgaatgggttcccttaatctttaagaaataaagtaggaaattaatatgtttccataattataatagaggaattgggaaagttcaagctgattgcccttattctctaaacatatgagtcaatcccatgaaaataaggattatttcttatcatgtaagcttggagatatcatcgatcactgctgaaatttcccactcacattccctggccgatgcaagcgagatgatcatacaattgggctggtcggatgtccctcaaatactctatttggacatctcgctatgtatgtacaacttcgaccttcatatcaatccttgtgggctactaggggtgaagccatctgcttaggttgtaggacacgcgtcatccaactagatgccccatcatagtgcaaaaaataggataacaatgtgattagtaacacttagtacaattttgtagatatgacattcctgaagagtgccatatatcttaatcttaagtgaaagacaaataaggacctcatgacttcctcttcctcaaaccttcttttgaggagtaagagtaatgatattgagacttcgatcattgacttctcaaagaagcaacaaaaggttgctcatgataaggggaaaaagcctacagtggaggtagctatgaaagctcttgctttgatggctttctaggaacgctatgtaagcaacaaattctttgtcaagcttaagggtactctagttgaggacatttgggatcgtttctctaaccatatgattcaaggaattattatgtactcgtaagctatcattgtgactcaataggcactaaagtactgcgagcttgttaaaaagaaaaatcaccttttgcaagatgggatcaaataagctttgatcttgatgtccagtaaggacaaggccatttaagatgtgggtaaccagattaacttcttgaaggaaaaattcttgcaattacaaatgagttaaaggataagaaggagaaagatgctgggtatgaagtggagaagaaatcatatgaccaggcggtgaatgattatatctaaaccactttaaccaacgtccctaactttgactttgccatttttggtcaagaagtagttgagatggcaaatgctttttgtactatatctccaattaaatcccaaggcttagtaggaactctttttcttgaaaatattgctgcaacagctaaggtcacaaaaaacattgagaaagtcacaataatgctaatgctcttggtacataaatatttttttacactgttggttagctatacatggttctcatgattgtgtatatttatttcaaaaaacaagtggcctcgtgcctttttatttcaccacatatctcgaatcttgaacatcttttctattcgaggacttatttagtaagataattttctacgtattttttatctttttgctcgcgcaattatgaataaaactttgtgcatttctttttcttttgattattttagtacgatttgtaacttggtgtaaactttaaagataactctttaaatagtgtaattctaggaacatcttagtgttcattaagtgaaaaataaccaagtaaataaatgtgcaagaatgttttgaaaatttttgcaaataattagtagtacatattattaatataggggtacatgtatcctccctatacttagggaattgaaactctgaaattgattatgtatatacatttgagttctatgaataataaacctttggatgttcagcattccaagctctgtcaaaaactgaaccattgatatcaaagagtcagtaagtcacagtaattattttcttagcaattaggaatggaccttcccagttatcgtcgaaaatcccgtgtgccaggttgcaagtatttgcaaagtactaattcttctactcgcagactcatttctgtaacttttgagttaaaataacgcattgtgcattgttgataggtcgtgactttgacttgggcttgatctcattttttgtcaatcaagtctaaaatgagacgtttgttgggaatattttacgaggatctagatttactaacaagtatgttgattaaaatcctaaatataaatatctctaaaacaatgaaattaaacacataagggatta

SEQ ID NO: 383803 - DNA, 2543 bp, Cannabis indica
atgtccatgtttctgctaatgttttgtaagttgcaatgttttatgtctctcgtaattgtcaattagctttaagaaattgcttgcctatctaggttactagtttgaaaatatgttgtcaattagctttaagaaaatgctttatatttgtatttgtttcttcataattatcttttaatggagatgtaattgtatttatcatatgcattcgtcttcaatatcattgtcatttgtgagctcgtttccaaaccatcttccgccatttgtaagcttttcatctctatccatttctgtttgtgtctgcacaaaataatattgatcaatatttcttttcaaggttatttccctccagcttcctagaaatgaaagtgattacacttttgaaaccaagccagaaacaaatagcagactactattgtcttgcaaactctccaagtccattgtgagcttgattgtgcccatggttggtttaacttgtcctatcggtgagacacaattgattctgggtgcttgtgccattgtaataaagggccagtggaacaacctctttaatcccaaggtcggttttagtctcaactcaactactatccaccaaatacttctgcaactttcactccatggctatggtccttctcccacatgggctttctacaaatgggtcgaatcaatacccaaatcaaattacaagcattccttgcagtgctcatggactatgattaacattctaacaaggcacagacagttcaaatctgcacaagaactgcttggaaaagttgcccagagagatttcttgtcttcaccttcagttttgaatgccttggtcagcagcacccatggtaactcagatgcaaattctcatgtatttagttggcttgtgatagtttacgcgaatatgaagatgacccaagatgcaattcaggttttcgaccatatgaggttacatgggcttaagccacatttgccagcctgcactgtgcttctgaattctctggtcaaggataaattaactaatttggtttggaaggtttacaagaagatgattcgacttggaattgttccaaatattcacatatacaatgtgctgattcacgcttgttgcaattcaggagatgtagagaaggcagagagtttagtgagtgagatggagtcaaagtgtatttttcctgatcttttcacttataacacgttgatatcattgtattgcaaaaggagcatgcactatgaagctttgtctgttcaagatagaatggagagcgcaggtgttagtcctgatattgtaacttataactcactcatttatggattttgtagagaaagtaggatgagagaagctgtgaggcttttccgagaaatcaaaggtgctgcccctaatcatataacgtacaccactttagtagatggatattgtagagagaatgatgttgaagaaagtttaagattgcttgaggtgatgaaggccaaaggattataccctggagtagttgcttataattcgattcttcgcatgctgtgtaagcaaggcaagatgagggatgcaaataaacttttggttgaaatgaatgaaagaaaagttgaaccagacaattttacatgtaatactttaattaatgcttattgcaagataggagatatgaagtctgcaatgaaggtgaaggagaagatgttggatgctggactaaagctagatcagttcacatacaaagcgctgattcacggattctgcaagatgcaggatatggagaatgctaaagaactcttgttctcaatgctcgatgccggattctcccctagttattgcacctattcatggattgtagatggtttctgtaataaagataatgaagatgccattgcaaaactcccagaggaattagcaagaagaggtctatgtgttgatctttctttatacagagctttaattagaaggttatgtaaaagggaaaggcttaattgtgctgaaaagttatacagttctatgcaagggcaaaaagtttcaggagacagtgtcatatacaccactctagcttatgccaacatgaaagctgagaagtctagtgctgctatggtgttgttagatgaaatgtataagagaaggttgatgataaatcgcaacctttatagaagtatgaacgattcttatgctagtgacaatcaaatcctacatatcttctgggaccatttggttgagagaggccttttctcaaaaactcttttcaaggaaatgcatctcacataggaaattttacctatggatttgttcaattcatgtttcttttagaaatatttacatccaattcgttatttttaattagcggcaaaaccacatgaatttacgatttatcacaccacataaattaattttttgacagtagaaccctccaaactcccattctattttgttacttattgtttcatccaaaaaattttgttaagtaccacagtggattgtctacacatgatcaattttgaatgatcacataatattaattattaaaatatttaaaattataaaaaaaatattttgtttttttttttcgtttcttttt

SEQ ID NO: 383804 - DNA, 2675 bp, Cannabis indica
tctcttgtttattttcatcttgtgcatttgacttacgtcagagattcaatgctaaacctcttagctcttctagttttatattatgatcttttttttttcaatagatttgttcttagccaagtcccctcctatatatagttctgtgtttttgtgcaattttagggctatagaattttaatttaagtatttatctaaccatcttgacatttaattattcatgaaatgatgaacatctttttcaaagtacttattttggtgatagtatgtttcatttccatattctctgttttagttttcatgaaatgataaagatttttttcaaagtagttattttggtgggtgtatgtttttttatgtatatagaaattaccattacacaaacaatctaccacttattctaatttctaattttctatgcaatgcaactatatgtgtttagacaatatttcccctctttgattgttgttggcatatcaaaaatgggctataaaggatgttttaaacatcctaataggactccacttctgactcaaattgaatagaaactccaataaccacttgaggtttaggtgggtgtgtgagtgttagagattctggattcgagtctcaagtaaaacatggttgtaatatataaacgctaaaaaaaaaaataaataaataaaaaaaaaacctaccaacctactaatgaagataaaaagaaacacaaaactaatgacgaagattctgatgaagatgaatagaaacacaagtctactaatgaagatcaaatgtagtagaaaagttttttttttttttgtataagtgtagtagaaaagttagtctatacaaatattacaatttatgtgctcctctcgtaaataggcttacactttgtaaagttctaatacaatatttaaagatgcaatagatttgtaaataggccatacaagtttttttcttggtggaatatttacattaggcttatacttttgagagatatgtaaatagaccacaactttggaacatgtaaacatgtaagctgtactttttaaagttatgtaaaattatggtaaaagggtcgacaaaaaaaaacaaagaagaagaggagggagagattgagtacaatcaacattgatgggcccttttagatttgggatgcaaaatctcgtgagaaagaaataatcggagagagaaagaaagattgagagagagaggagaagcgacttgttcggtagacggcgggcgacagcggccggtggtggctggtcttggttttttttttttttgaatataataactaattttattgctgagagtcaaacaatacattgggtcggtccttattgttttagtttttgttttgttttgttttagtttttattttatttatttatttatttataattttattttataacttgaaattattttcttaattttaaattgtattttgaaattattttttattatttttaaataataatattatgtgtactaatatgaatctgatatgtgttataaatgtacacataaaccgtctttgttggcacttaattgtggtaaatatatggcactttaaatttgttgacggttcattagttggagcgttttaccaccaaaatttgagcttggatggttaagtacaaatgaaataatagtttggaaaaattaaccgcgaaaactctatttttttagtaaaataattaaaaaaattggagtcaaacaatattaaattttttataaaaaaatcttttttcaaaaaaaaaaacctctaattctgaaggtacacattagagcacattatctagtgatgtggcaataacagctaccaaatgattatactttcgtgcataataatttggtacctagaaaaataattaagagagttatttcttgggaattatattatagccaaatgcagaaaattacaaaaaaggggttgataatagtcagcatcagtcattaataagtgaaatttttgagtgtaccacatcaacacacatggtcccgagtttatttatataccttggataatatgcatgcagacttggaatcccaattgttgttgcccaatggtaaattcggcattatcatttatcacactcccatttagtgatgacgttggtcttttagtttccacagctatatacaatttggactattttcaatgtttggaatttcccaatttgggaataataaaactctctcaatataaatatatttatccttatataaaaaaaatggcaaactacccattttttttagttccaatttcaaataaaattgaccacctctaattcaaataagttcagccatttaaattaaaaagcaaaatcagagcaaaaaaaaaaaaattgaaaaacaaaatagttcaaattgcaaatacacaattagtccaagcaaaatagtccaaattgcatatacacattagtcagagcaaaaaaaaaatgactaaaatctaaaataatcttaaattaaaaaactaaattaataaatgtctactttttaaaaaaaaattaaaaaaatagttaaatataataaattagttaatacaaattataaaaatatatttactacatattattttttaaaaaatatatataataattaaattaagttatataatatttttagtattgcaaattattatgttgtaacaaaaacgaataaatatattagatcaatacatatatata

SEQ ID NO: 383805 - DNA, 6197 bp, Cannabis indica
tttttttgaatggacatgatatttgtacatttaattccaaaagcaaaatattactttgctcacactattttcaaaaagccaaaataaattattattattattattattattattattactattattattattttgataaaaagccaatttaatatagcatattaaaaaaaggaatattaaaactaattataagtgtgccaaaattatatgtgatttatagttgtgttcacatattattactcattataaatatatagctccaatagaattgaaaaagtagtgcaaatttaatactaaaatgtatgagcatctcccatactctctaagcatatttttttagctaaaagagagggaacactaaatatgaactacaactatatatacaaaatgtggataaaaaagggatagaattttttaaaaaaaaatacacttttttaatagtattttaattaaaagcacatgaaactacaacttattcattattttatatcaaattaatcaaaatttaataaattcacaaactattataaagatcaatgattgaactaagattaagaaaaatgagtctcttttttaagatttcaggttaaatttacctaaaaaataatgccttggtctactggaaatataaatatatatttttatatttttatttattgtgaattagaccaaatagaaatagggctcattttttaaagctaaatttcgcataaaatttctttagtgtcacaacagtgtgtactgtattggacacctcaactaaataccaatattttctaatacttaaataaggtttattttttagtgttattatttaatatgtaattaaataggaaaattcttgtagttatagctttttataaaaaaaaatatatatataaaatacaaataaaaatagtaggataccgtaaataaattaatgatgcctcgttgtaataaatgcactataaatgtataaatgtaatgtagtaatatataatcattacatgcattcaatgataacggtaatcttgtattcttgtttccttttcttttaacaattattatttccgattgttaatttacaacacgatgctatacacataaatcttgagaaaatccattgctctaattctaaagataatatgtatccattgctctatatgaaaagttcaaataatatagaaaaaatccaaaaatgccaaaaatgaataaaaattcaaatatataaattattttttttactctcaatttatatgtttatttttttttcttacatctctatattcaattcaaataacataaaataatatgtatttatataaattagttttatagctcttatatattattttctccattccaaatagcaaatgttttatcattcaaatcatattttacacaagataattcgtgtaagaaggtccatatatattattactttaaggactaaaattaccaattaatattggtagttaataattttttgagaaaataaaagatattactaattaggtaaaactctgcaaaatcaaataaaagaatcttttctgctgatttatatgtgatatacgtacgcagtcacaattccgttaaatattttgtccataaatatttatatatatatatatatatatgcagctccacaattaatgcatattgtatataactatatatgcacatatataactttttcatgaaattaaaataaataatagtaaaattttgtcgttgtctcaaataatcctagctagctcacaatatttttataaattaaattccaagtcttaaaagtaagaaacctcaagaaaatgtttatcaatcaatagacaatataggcaaattaaactaactaaaatgcacacataaaatatatatttatacacacactaaacacaaaatatataaacatttgctgagaaacaaataggctcatagaagtgagagaatcaacttcttcttttcttctttttagtatggaagtgagaatcaacttctaacctgcatcatatcaaagattcaaaatatgtaattttgataaatttcatctctctcctctttttcagccatttcaattatagcctttaaagtattaattgaacgaaatttttagatataattattctaaaattaatgattataaaattgtttctaataataataagagcatggaattaaatattaatcaatacagcttataaggcctctttaaaataattaaatctgctgctaattattaaaaagacactatatatagtgatgaccttgactgagagaactgtgaatagtattcggttcccgtaaaaatgaatgatcaaccttacgatatattgaccaaacgaatttaattacaattacctaattttgtatatatatttataaaatcaccaaaaacaaataaacccttttcagtttctacacatatacttaaagagaaaactgtgaatatattatgtatatagtattcggttctcctttgtccaatttttattaagtaaaaaaatatctgaaaaacaactagtatatataattgaacaaaatactgaaattaaaatcagaactagtctgaatttggatttctactccttatatattggaattaatgatcagccattacaattgaccaaggaatatgtaattacaatgacctaattatatgtatatgaaaatcaccatagttatataactaattacaaacaaataaacccttcctcaaaaaaagaaactctaatcttgatcatagcaattaacagagaataataataccagaagttgataagaatattaaagttctttctcatcatcggtactagtcagaaagaagatattcggcgactgacaaatccaaggccacggcagtcctctttctcgtttcttctagtttcttcttcagtgcctcaagctctttcaagtcgttgcagttctcaacgtcgaactccagtaaatatctcaacgaatcgttaatgttgaacacatcttcaccttgagtcgaagtccccgtctctgtcgtcgacgaggtcatctcatgagtggcttcggcagtggaagtcgagggagacgatgagacgaagggagctacgagagactcgaaggaagaaggagtggggaaggcttgaacgtagggacgaccggtctcggacaagatgataacggcgatttcagcgccggtgaggtgagaaagctgtttggccttattgaagagaccggattttctcttagaaaaagaaaccaatcttcgttgcttgtcgtcgattttctcaatacgaaattgtcgcttcatttttatttcactcggtgagaatgaggaggaataaattgaaagtgttgacgtaggaagatttggtgagaatgaggtatggcaatagtggagatcgattgggattatatatatttgagtgggtgggtattagggtgactgactcttggaatgtctcacagatttggacacaagatttgggggtccctactttacttgcgtactgctactactgtaacggccagctgagctgtcattgttttatttttttttttaagatttttatttatttgtctgaaaacgaaagtgggatgattatttgtccctgtttttgcaagatacgaccacatttttcaaatatgccataaaagaccccttttatctctttaatttagtgttatacctatatattagaagagcttataaaaaaaaaacaaaacaaaacaaaaacttatatatgaaaaattagaagaattactttcaaataagaattaaattttttttttgaatggacatgatattatttaatcgcaaagtaaggaaaatattacttgctcacacttttaaaaagccaaaataaattattattattattattttgtacaaagccaatttaatatagcattataaaaaaaggaaatgttaaaactaattataagtgtgtcaaaattatatctgatttatagttaagtgttcacgtataattactcatcataaatatatatagcccaaatagtactgtaaaagttgtgcaaaattagtactaaaatgtatgagcatctcccatactcttaagcatattttttagctaaaagagagagtcaacattaaaaatatgaactacaattatacaaaatttagataaaaaatgatagagttctctattttttatttttattttttgctaattttttaatagtattttaaataaaagtacatggaagtacaattaattcattattttattattattttattaagagtgcgtttaacacttttttaatcagttttttgttttaaaattaaaaaaataaaaatatttcctaaaatcatattctatgaaactatttttacttttcaattttttaattaaaaatctaaactttaaaaacaaaaaaaaaatcacttttaatattttttaaacagttttcttttaattaatattttggactccgaccccaacttaaaccttagaaactgaacccaaccccaaccccggacttggacccacccccaatcccgatctcagactcggcttaaataaaatcaacatatagaaataaaatttagagaatatacttttattttttatttgtaaaattaaaaaacaaaaatagttatacaatacatttttttttttaaaatcaaaattttaaaaacaaaaattttacttttatttttgtgattaataaatttaaaaataaaaatattaccaaacaacacctaaattaatcaaaatttaataaattcacaaactattataaagatcaatgattgaactaagactaagaaaaatgagtgtcttttttaagatttcagcttaaatttacctaaaaaataatacctttaaacatggtctactagaactaatatatatttttatttattgcgaattagaccgaccaaatagaaatagggctcatttttcaaagccaaatttggcacaaaatttacatctgtaatggtcttacaaattctcacttccagctaagtttgtacaagaaaaattcagattataacaaactatcattcaaagaccagaataggaaatattttctatgcaacaacattatgtggactgtaaacaattaaactgtgatgaagctgatgctacactcttcaaactcttacaaaccccttaacaattgcaagtgcagcagaaccaaaaaaaaagaaatgctcatcaagacaacccttcttggaccttgcataagcatatattggcatctcccttttgctctatgctcagcaatcaccaaaaatattctcccaccataataatcttgtgcaaaacacaatattgagattgccattttgttttcggacacgtgctcactgattttctcacttctccttctttgccaaggcttctgctttgaactcactgccagcactgaccacaaagcctgcaccgacctggaatgcagtgcaattatgtaagatacctattgcaagtctacataaaatacagagagagagagagagagagaatctaacttggcaatctttgagtatgacacgctcttggagttgtacattgctgcatatcaccgagccttgaattgaacaaccatctccgattgtaacatgattcataactattgagttaacaacctgtacatattcaagaaaatgaaaagtacacagaaattatagtctcgccttttttaggaaattcatgcttataaactaatgaaggaaagaaatatagaaaacaaattaagcttatcccttaaacctctataatcaagaaacccttgtaccttcacattagagcctatccgacagtgacggccaataacagatcttttaacgctgcacttgtcacccatttgtgaaccttcccctaacatacattgtggtcccacctaaaatcattcaaacagatcatgagtacaataataatgaacttaacttgaaattttgttgtaatgacctaaactttccaaacacattatactaacattgacttgtattcattttgaaagcaaatatttgcataggtgttgaactcacagtagttttcgacccaagctctgctgaaggatgtattatgttatgatgggcagataaagaatacccagacaaatgaatcttttctcctatgacctgacatagttagagaaaaacagaaagaaatttgaaactagaaactgcttgaacccaaaatgcagtcaagaaaaatatatgtgtgtgtgtgtgtgtgtgttagagagagagagagagagagagaggaggaacg

SEQ ID NO: 383806 - DNA, 4188 bp, Cannabis indica
tttaaaaaaaacaataataaatacttgaagcttctgctttggttacgaagccagcccctagaatcatccagattgtaggagctcagttttttgaaatttaaaaagaaaaataaaaaaaaaatcctaagactgatatgcacattaagacatatcacatctaaacaacaatgaacccacgaagatagataacaccagagactctatacacccaaaatgctgggaagactaagctataaaagaatcatatgttgattctaacgtgtcgacttttttttttttacatagttcttattcctacttgggtggccggaagccatttccggcacccaccaatccatgacagctctgtctgagcaatggaagtttacaaagggtttagatatgctaaacggaaagatctttagaggaagaacagccctgccatcctccaaaatccttctccacccatctggagcgacgacacagacatctgacttctctggtgagcatgactatgtatgacctgcaaaaatcaggaaaacatgacataataaagaccccggtacagatgtagatgaagagagttctcaggagtattagggtgtattcattcatgtctcataatgctcaccaatagtatatgtcacaatgccaaatcaattatacctctagaatgcaaaacaaacaatttgcaaggctagattcgaagcctgccactcaagtagcagttcccctgctcttagtcctgctgcaatctaaggatacctgaaaagtgagtacaactaacaatcttaaaatagctgaagaagttgcataaaattagagaattctactaactgcaagatatatgaaactaacctcaatcaacccctcacccagatgtttggtcagaactgccaccgtgtacatactgagatggagcaggaactataaactgtggttgggccataacaggtgctgccataccttaaaagtaaaaacacaagaaatctccaatcaggtctatctacatagcaatagtatcaatcttgaagaaacatctacaccaaattcatattttgtttttctgatgcacattagtacagcagaagcccgagaatggtcaatgttccaaatcccataaacgaataacataaactagaaaacctaagcctccttagaaccaaaaggtggcctataatttgccagttttattatgatagtagtttcaaacataagaactagtttaacttatcaccggaattgtacctgtaggatatggtgtttgcatcgtaggcataggtgaagttgttaaagggttcaccccaggtccactaaactgcactagttgatgactttgcattgtatatccatgcatattggtataaccctgaccgctaggaacagattgacctacttgtccatatggataaacagctgaattaactgccgcaggtactccatatatctgaagatattgctgaccagcatacggattgtaaccactctacatgaatatggaaaacaatgaaagaagtcggaatcaaaggatcaaacataataagaatattaataacagaagcaatggttttattttacactattgacctgtggatacacatactctggtccatatgttgcatacctgcaaaagttaaacaggcatcacacttcctgaacagaatagctccagtcgtgatttttagacaaatatatatatatgtatatattgaagttcattaaacaaaaatgaaccttaacttccacaatatgaagttccacataaatgaacattagcacgcatgaatcattatgacaagaaaacttccaaattacagactaaacggctcctattctacaagtaatttatcccaagtacaagatcaatcaggaaaaagtgactaacaacacaattcggggcccttatcaaacaacaccaattacaatcttgcctgctcaataaacattgatctggggcacatatcctccgcaactaaaacttttgaattcctgcaattaccaatcacaccatatcacatcactataatttggatagaaccaaccctgacttgaaagggattgaccaattatgtatttagggcggggcagtgtgttgagattggcatatgccacacaaaagaaagaaagaatgagaaaggagttgcaaaggagtcgaacgaaaatgagttaacagctctccaaccatcagtcaaagacaactacaataacaaaaaaagggtaaacaaataacacccactaactagtgctagtctatcaagtatctgccactccctatacatgttgggctaatacggacacaattgtagatgcacaaagccatactatgtcaaacaacatgccggtagccagaaccaggtaaaactttcagaaaacagtgcaacatctaaccacaaaaatcaaaggcacaagattttctgcagtgaaagggctgcaatcaccataattgtgccacttaactatttgttcattttcaaacaggtatacataactgccaacaacagcgaggtaagagggaaattacattgatattgtttttttttcaaaaaaataaataaataaataacatggagggaagaatttaaggaataatacattttccataaacaatgaaatcgagccaaattaacccaggatagacgtatttagttttctacatactaacaacttgatcatgaatatacatatatagctcacccataaggtggatacattagcccttggtagctgtaagagagaggttgttgttggtacccaaaacttccaacataactcccacgagcagtttgcatgtttcctatgtattgagccgaaggtcttggacgtcctgtaagaaaacaaactaaagaagtgaattgagagcaaaaggtttcaaaacttcagacctaaaacattgctaagaaattgtaatcaataaagtaaaccaacaaaatctaaaacaagagacactaccatagggcataggtggcctaggccggccaagggaagcaagattgcagtttgcgcgcctgccgtcgataattggagctggatcagcacaggctcttctagcagactccgggtcccggaaagtcacctaaaccctccatgtaaagacagaccaaacaccaagtcattttatggaagcatcaatgattactatcacaaaaaaatatcttcccaaaacaagatgaacatgtttaacactctataacgtaaaacctaaaccttccatatgtacaaatagaccattctatggtcaatatataaatgcaattaatccacttaagaggaactacttcaaaaatggtagttaaaaacccagatgaacatgtttacattttatgacatataaaatgaaaacaatagatactcacaaaaccgtagcctttggatcgtccagtgttcttatcagtgatgacaactgcctccagaatatccccaaactgctcgaagtaacgtctcatagtctcgctctgcgtctcccaagcgagaccgcccacgaaaacctttgtgtaagtagtatccccaaaaggggaattaagaaactgatacccagaactggaactcgatcccgagctcggacccggaacatggtgatacgccatgaaagacaatttcttttctcttttttcctttttttttttcgagcaaaaggggaagttggatataagtcggtaaagggtaatcagatcgaaaatactattgacaagggaaagtaaatacgacccaataaagattaagcagcatagtagaaggaaaaccctagaaaaacccaagaactagtagaaatatactgggaatcaattgaattcggatgagtttctatggtattgtggtggtgggtactaggtaaggaaggaaggtctcgaatcgggtagaaagaaaaagagatggcgaaacagagtgatcaatcagtccaataaacctaaataagaatcaaaagagagagaaaaggaagaaccattatgaggtgaggaacagtgggtatgtatgtactaataatagtaatagtaatagtaattgggaagatggagaacaaggatgtaacaatggcgtcgcgggagtaacagtaacttcagtttcataccctttctctctctctcatctctcaatctacatctacatacatattaattatatgatatgaaattcaaaaaccccaatccaaagcagcaaataaaaccatactaaaaccatacttatacaaaaaaaaaaaaagaaaaaaaccaa

SEQ ID NO: 383807 - DNA, 1166 bp, Cannabis indica
gattttgatatgcatttgattttttttttattttttctagaccacctgcccactttcaaaatgggttatcctcaatgatttttttggactacagtacagttctagggtccaaagaggtccaataaagtagctaaagaagggcaagaaaaaaaggcaaaaagggggcaagtctcaggagtggatctcaaaagccagcacctccaaccttgagctaggaggttgctttgaaggctccaactctggaagactaatccacatccgtcattgacctggcggaaatagttctgatgtcgtgtcactacaaagagtgcttgtggggcatgttgagaaggataattttgattgtgatgggaagtcctagttctcaagaagtgatacggaactgcacatggagaggccaataagaatgtgagggtggagaccaaagaaaaagtgcaaccattggccactttgaggaggcaagttgcttctcttaatctcaaaagggatatgatgtctccaattgttgaaggcaagttcggagaagcactcaaacaaccaaggataatcaagatctgtctctaccacccccaacacctaaaaacaatgcagacacctcctctatgacctcctctattttctaatctttcagttaggcctacatcaatgccaaaggaggtaagagaacacatggaagccttcgagtagttttacttggctcaacaaaacaaaaattgggtcgcacttgtaaagactccaataaaatgaccttggagctggagggccaaattcagaaaagagatgaggagaagcaagaccaagaggttaggacatgagaagcattaaagcaatcttttttatattctctatatatcatatagaaactcgacaattctttgaagatagagaacaggtgatccctcaagtccttcaactagcgagagtagaagaagccaagagggtaacaaaggtggtcaatcttggaacatccccctgagggtgagaactgcgaagacccatcccttccagctgttgacgatccttttgtgattaaatctgcgatcccaaaggtctccaatgatgttcagccagataattctcaaccactaaaggatctagccatgcctttcccaagtttatccaactcttacatattttttttttcattaacatctttaatatttgta

SEQ ID NO: 383808 - DNA, 1870 bp, Cannabis indica
ttagattaaatgatcacaatttttcttttgtggaaacaacatgtgcttgctgtaattcgtggaaatagactgatcaagtacattcaagattgagctccaccgcctcaattcttgagtgatgcagatcaagcttccaacacatttaatccagaatttctagattgggaggttcagcatcaattaatggtgtcttggttgctatcatcatgactgaaagtctccttacacgcatggttgggtgtcatacaacacgatagatctggcatgctcttgaaaaacacttcacctagcaagtttcctccaacatcttggagtttcgaacgaagttgcagaagcttcgtaaaggatcaatgtccctaaatgactatcttctaaaagttaaacagtatgtcgatcttcttgtgtctgttggagaagttttgagtgccagagatcacattgctacaatcttcaaaggctcacccagtgagtatgacacttttattatctcctctaacactcgaatagaagaatactctgttgcagaaattgaagctctcttgcttgctttcgagtctcgaatagagaagactgatcctgatcaagactctaatctcaatgtcaatcttgccatgattgactctgatcaagtctctaaagctaacgttgcctaccagaactatcctaatcaaaataacagattccccagctataatcgaactccttcccctttatccacacctcgtggaggtggccgtggattcatgaatcgtggagcttcaacaggctgcaactatggattgtatcctggtactaatggcagtggtggtactggttctaatagaggaggaggcagattccccacatcatccaatcgtgtccagtgtcagctttgccacaagcttggacacactgtgattgactacttttacaggtttgataaaagctttacaggggtttttcaaggctctaatcgcccatcactcaagccaatcttgcacaaacttctagtttaggttctagaaatattgtcataactgacactctcatttccccaactactggtgcatcatctattctgttgctcccattgaaaatcaacatgctgttgctactcaaactcccatgatcaactctcataatatgaaaactcgtgaaaagttaggcattcaaaaaccaaaaggtttacacggccttcaaaattccaaagacagtgaatgatgcattagaaattgagcagtgtaatcaagctacgtctgatgaaatgcttgctttaattcgaaatgctacttacacattggttcctttacctcctggtagagaacctataggttgcaaatgggtgtttcgacacaaagaaaactcagatggcactcacaacaagttcaaagcacgtcttgttgcaaaaggctttcatcaacagccagggcttgactttacaaagacgtttagtcctgttgtcaaaccagtcaccattcgcattgttatcactttagcattgtctcatggctggtgcattaaacaacttgatgtcaacaacgcgtttttaaacggtgatcttaaagaagaagtgtacatggtacaacctcctagctttgaagtaccatcatcacctccttttgtgtgtaaacttcacaaagcattatatgggctcaagcaggctcctagagcctggttcgataacttgcaacactgtctactgcaattggggttctttccttccaagtctaatcattctctattcatccaacatacttctgttgggaatattttaccaggatctagatttgctaacaagtatgttgaattaacatcctaaatatgaattctctaaaacaatgaaataaatacataagggtctaagaaaaccttacattgattgcatcagaat

SEQ ID NO: 383809 - DNA, 4185 bp, Cannabis indica
ctttgcaaatgttgcttgtcatttatctatctgaatctgaaacaaagacttctctgaccaccgatgaaactaaaaattggttccctaataagagcaaaattgcaacatatgctacttcacctccaaaggagaataatcaaataacatctccattgcaatccaagaggttaagtttcaagcatggaagacatttttctggcatgagctaaaagcttcttcttcttcttcttttcacctctgatgaaactgaaaattgcttccccaatagtgagcagaacatgctgcttcacttgcacaggagattaactaaataacatctccattgcaatccaagaggcaagcttttcttttcttatttttccaatatcttcataacatttctttattatcatttttccactttttgagtaaaggcatgagctaaaccttgaacctttctttcatactattttcagttggcttctgccctttttcttttattctctatcttctagtttagctaatgaaacaaaatgcataactgtttacttgagccatgtatctgcatatagagcccttgtctcctcctccgggcatcttttctgtaccacgaataacgttccttatacaatccaagcaaagtaagtttaggcaaagtgtctccacataatcagtgtcatcatcaatgcatcgaccacaatgacagcagcgttctatgcacattatgcaggccctacatagctgagcggcttgatgtttctctcgacaactctctgttggacaatcataaactaccctcggctgtaggcatttggggcaagtctcgacatcaatgacacgatcatcgtcatcatcttcagagaagcagggagatatcccgccactataaaaccttggtttgtggcctttaagtggcattctgttgtctgcatccaacaacaacttcaactcctcaagatacttattagtaacattaaagagcccaccaactctcagatgctttaatccaaggatgcctgctgatttcatggatttcagattacacaagaaatcttccatgcaaatcttgttacaattatacaagcataactgcaaaatgatcaaaagtaaaccttgtaagttttctacaaagtaaagaattcattccacataaaaataccaaactccatataaacaaaagggtatgtaaatgattaaggaaacaaatataaacaatcataaaaactacttctaaggtgcacataataataacaagaaatagaactaaaagttttacctttgtcaatttcgggttgttatcaaacacacgctgcaaaccatctgcagtaattttgttgcaatgaaccagactcaagctttcaagagtaccttcagccttgttggttaacttcacaagagtatcatcggtgatcttctgacaaaatggccaaccaatgttgatattcttccatagaagactatccctaataacatactgtcttaaatttttgcaaacactttcaacagaaagaagatcctgataatccaaataacgcaaagcatatgaaatagcttcatgagcatcttcttggctttgagaatctccagttttcataacttcatcattaaagattcgatcttccacatgatccatataactagcaaagtcctccatagtaccatttaatacaaaaccaccatcaaataagccattaaacttattacatggttttgatatttcatcatatttcacatcattcaattcagattgaaaccacatgaaccctgcaggtactcctcctcctccaccaccaccatcattatcaatcttttcatcagaaaaagagaaaccactgcctgattcaaaatcttcaaactgacctttaatggctgtgaaaacagacctcatgccaaaaggatcaacaggcaagcaagcaagaatatcatcattctccttctgttgttcaccgcaactccaaaataaattcatcggttcccaaacgcttctctgaatacccgaatcgcatttcccatttaaatctcctttcttgggaagattcataaaagacccatcagagcactgaagggtagagctcaaattcttttcaggggaagaaagagaagaaaaatccaaagccattcctgctcttcctcccaagaagactgaacagaaatccaatccaaacacaaaacccagaaaaaaagattgaaacttaagagacaaaaagaataccctttaaaccccaaagcaccagaatgtagttgagaccttaaattcccaatcaattgcaaagaaaatacaatcgaataaaagaaatgtgagtaagagaaaccctagtaagaaaaaagggtacttttttttatccctttcctgaaaatagagtagttttttgttaagggaacagatgaactcaaactgagaaagtggaatgaagcagtaggcgtattaggaaagtaaaaatgaaggtgagcttggattggattggattgaatacaaggaatttgattccaaaacaaaaacagaggaaattgatgaaaccagaaacgaaagcaatcgaaatagtagaagggagagagaatcagatgtaaagggtagagagagaaagagaggtaaaaataggagaaggaagagagagagagaatggcgggtgaagaaggaggggtttgaccaatgaagactcgctcttcgctcgcaggttagttggtgcctttaaccatatcaaatcaaacctcaacaccctccacccttccgtacggaccatacccttttaaaactaatcataaaaataaagataaatatttcataatttgaagaaaaataatagttaaattattatggtgacatttactaattattttgtttttaaattttttaatcacaaatttttgttttaaaattttgttgttgaaaaataaaaatatgttctataaccacttttgtttttcaattttaaaaataaaaaaaatatgttctataaattttatttttatttgttgattttatttaagtcgagtccggggtcgtggtctaacactggggtcggggtctggtctgggggttcaggttcaggtttggagtctgagttcgggtccaggttcgggttcgagttcgagttcgagtccatgtctgggtttgaagttcgagttcgagttcgagttttgttctagggttcaggtttgagatcgggagttcgggtcggggtcagagttagggtttgagtacggggtcaagtccaggtccaggcccaaggtcggggtctaagtccagggctgggggtctgggtttgggtcagggtctaggtttcaagtccagagtccaagtcgagatcagggtccgagtctgggtccaggtcgagatccaggtgcgggtccaagtttaggtatagggtccgggtctaggtttgggtcggggtcgagattggggtttgggttctaagttctaggttggggtcagagtccaaaatattgattaaaaaaatatgtttaaaaaaattttgaaagtaatttttttattttcaaaattctgactcctaattaaaaaattaaaaagtgaaaacaattttatagaacatgattttgaaaaataaattaacttttctaatttaaaaaaataaaaaaatatattactaaaaaatattacctaacacaaattatatcataccaaacaatctctaaatggtatcaataattcttaacagtattatgtattattgttgtaattaagtattaggttttatatattttaacttaataattattataaaaaatttctagttattcgcgatgtcacataatagtattagacaagacaacattcttaataaatgagctaaaattttaaagaatttggtaaaattgcacattcaacaagtaaggtaaatggtgagctaaaatagctctgataccaccttgttaggccttgttctttcatcttgttgggtcatcacctcattttaactcttatattagtatgatattgtccgttttgagcataagccctcacaattttatttttgggcaccttctgaaaagacctcatattactagagtaggaagaacacttatatccaagacaattcttacttattcttacaatgtgggacttagattaatactccagcacatattcttttaactacatgtagctcaatatatagtggtgagctaaaaatattatatattatttctctttctctctcgttcttctaattatttttttattttatt

SEQ ID NO: 383810 - DNA, 1232 bp, Cannabis indica
ttttaatttattatatttattttctaaattaattttctaattattttacctgagaaaaaaaaatatctctctctgtttttatctttctttttgtaataaagtaattatatgtgtacatacaaatcagacacatatgatagatactcatgtaacaagttattttaactaattatttttatttaagataagtcctaataacttagaataattatatccaaaattcaattactttataataatatctcacttgacgaattattatatccaaaattcaattactttcttaaaaatgaccaccatcaaaaaaacaaaacaaaaaacaaaaaagaaaagagaaaaattacatgcacccatattatctgacaatacttagccaactttattatttatttgtttttgtaaagaagaagaaggaagataatagaaaagaatatagacgatatttatatgttagaagagctcgtcggcaagatattttgtctttatattatttcatgtggttcaaactcattggatttctttctttctttctttttttctttagcttttgaggtcaaatgtcatttatttcaaacttaatgcacaaggatatgatgggagatataaagtgacaataattcttggccatacaataatgaaagaagtctaaatttaaataatttctttacacatatttatacactcatacattcatttgagtttaattttgtcaatggaccaccctagctagcctatcataacaactaattgaatttccggtaactttatcaattaataatcagggtcagccctaaaatataattggttataagaaaaaaaaaattaattcttatttagtaaaaatattatacttttcaaaatcaataaaaaattatatataattttaaaaggagaaattaattttagacctttagattatatgagtcctaagcacaaacttaatccacctatattaaggaccagacctgccattaatagttgtcatatcaacttattgtgctttttacatgctacatctccaaaatttccaaagaatggttcattttaattaaactatatttacacacagattattttttaataggtattatgcataaatggttactaaacaaatttaactataaatattaaatcatcaaattttgatctaatgaaacaaatttgaatttttatgcttagtttaactacttaattaaaaaaaatatcaaaaaatatctctttttatactatat

SEQ ID NO: 383811 - DNA, 2115 bp, Cannabis indica
gcaactccgatgactttccggcatcaatgacgaataaaattttctaaacaaataaaaacattaaatatgggatttgaaaacctaattacatatatatgacatatccaataccataaaaagacctaaaaataaaaaaataccatataaattattcaaatttaaatgtgtcgtatttatcataggaacttttaaaatctcatagtaagtgtaattttctcataattaatattatattagcaacgtaaaaagcgattatattatatatatatttttttttttgaaaatgcgattatattgtttaattgcaatataataccaaaaaacaattgatagagttctttaataagaataaataataaaatatagacacaaagaggacagttcgtcgtcgtttagtagtaataaactgttgtcagcagatgtggtggcggaatgtgggacatgcatggtatgactttgacaagtcaaacttacgcaattaataaataataataaaggcctatttatctattattattcaaaaaaaaaagaaaataaaaaataaagaatatttattttatatatagtactagtacattacatggagatttggagatggaagatgggtggcggtgaaggcggtggtgcatggtgacgactggagtgttggtggtccctgtccctacgctaacgcattggtacctgcgttttcggacttattgttaattggtcaatacgctaacaaactaataacatttatttattaatattataatgcatgtgcacaaactccaaagtcttctagctgagtttttagattctttgctttcaaagtcaaatgtgttttgactaaaatatattcctttccttcttcacataaggtcttttgaaccaagggggaagggagggacggaccaaaacacatcgttttataatttcctatatatataatataataaaacaaagctcgaagcagatttggaaaatcccttctattatgcgtggcagccctatgactatgagtgtgaagtgaagccagccatacatattatttttttattaatacatataaataataactctctgaaaccccttgtttttttttttcggtataaaatttttctctgaaacccctgtatgtatataaaataaaaatgatgaacacagaccactgtaaatataccaccaggaaaaggagaagaaaattataaatgtatttatttgaataggtcaacatttgacaattacacgagacattcattgtataaactgctgctgcagcctgctgctatatatttatatatatagatatatatatagccaatatattaattgtgacacgataatccagaagtgatgaacatatgcaagaatattgtatacaacatcatcactatacggccatctattaataatatcattctgttatatgccagagtttctatttataaaattagtgatgatttaaagacaaatgggacgaccaaatattaaaacaatccttccatgtaaatttataccgtcagtctaaaatactatgatcgtaaaaaagaataaaacacaaattatgtatattaaagaaaacactatctaggagactagcactatgattatattttgagatatgtagattaatgtaaactcttcgactagaaaaagaaaaaaaagattagcttaaccaatcaaaccaaagcaaagtttttgttattaattattgactttgattaaaaatatatttatagtaaataattttaattttttttttccagcgaaaccagctgttcaccctaatacgttaaaaaagctagaaaaaattaagacaaatcttaacaaaaagtgatccccataccaagttattgatgaatgacgatacaactcagcttgaaagctaaaatataacataatcctcataacattggtgagttagcctacttagggtgggttcgacagcatatttaaacagcacaaaattcaagaatacctaaccatcgcattattaaatttcttttaagtaattgtttttttatttttacttttcaaaattctcaaaacaaaattaagtcaatcttaggtggcgtttggtaacacttttttaatcagttttctatttttaaaagtagaaaagtgaaaatattt

SEQ ID NO: 383812 - DNA, 1908 bp, Cannabis indica
gttttgatgttatttttcctgttacttttatttatagtttttttgttattttcatagaacattctaaagtgtaaaaaaaaaaatgaacgcaaaaatatataaaaaaaaataaaaattaaacttgaagttataaaaattttataaaaaataatattttatataattattcttttttattttgtgttaagctgagtcgatccgttttcaatccgcgttttttatggtgaaaatcctattcatggttactcctttctcccttctcctttaaaagagtagaatgttaaatttaagatggttgtccaatccatgatattccaatcaaccggagaagggcatttctacattatgaattagtttttttcttttttttcagtgtacattatgaatagtttaataagcctttttattgacaatttttgtagccgggcacccattcaatcttgagattcttcaagaaaattgatcagtcttgccctacagtgaaagaacatgacgatgatttgcaaaatgttgaactagcatcaacaggtaattccagttcccacttatcccatttatcttactgttgatttcataaatctcatatacgacttgtaagctttccaataagataatctgtttcgaattgcattaaggcgttgggctaactgaaagacctttagaagtcagtgacaccaacaatggacagtgtactttgactcaatttgaacacagagaagcatggagttacaagattgatgaaattgacccttctgtggttgatgagttaccaccagaaattcaggatgaagttcgatcgtggctccgtcctctaaagcgatccaacatagcgaaacaaggttctagtattgctcattatttcctgccaacaaggaaaacttgaattcagctacagtgtatcctgtacaggagcgttttcatctcaaaatgagaagcccttttcatacctgggaatattcatatccagggtgaaaaaccagaagtgaaaacataccttctgactttccgatgtctgtacatattcatgtagtttacagtgtttttctgtttttttttagtagtatctgatttatttttatttttgttcataatgctctagttgcatcggaggtaacaaatgaataccaaatgtgtgtaaagttaattagtgaattttactggcctaattagatttaggagcaattttttggttcttttttatgataaaaatttccattcaaacactattacaaaatgggcaggttcagcaaaacaagcttctatgaaaccagttggggaaagagatacattcatttctctaaggtgatgtttggttggaggaaatagggaatgaaattgaaaggaaacaatttatattttattactttgtttagttctgttttaaagtattggaatgtcattcttagtctagttatattttcattccttccaaccaaacactacttaatggggtgtttgttatgtgagtttgagttagagagagtagacttgaagagaatataaaactcatgtgtttgaggagattaatactatactaccattattttaattttaaaagtgaaacttacttgaaaatacaaatctcttcttgaatcgtctctaacctctcatttcccactcactatttttcacataatgtaaaaaaaaaaaatagagtttataaagagaagaaaatcagacaaaaaaaagggggaggggattgacaatttacaaagaaaaatctgagaaagaaaagagaagagggaaaaaagagagaaagaaaagaaaagtcactgttattgttgttcttcaaattgttcaaagtcttcaagagtaagtacctttgctatgaaatacattcattcatctctactcattctcttctatttccctatttatctatggaatgccctcattccataatgaaat

SEQ ID NO: 383813 - DNA, 1033 bp, Cannabis indica
agctcttgtttatgaaattacaatgtatattctggtttttgaacgttaggaatcccaacccttcgcatggatggtttattccatagttataggcatatttcataaatgatgggatggactgattcagagtcattagggttatatttgtgtaaaatcctactggtggggtaaaatacaaaatactttgagctattaggtcgggtaggtgagacgcaagttgaattaagcttcctttcgtacacggtcgtactgttgactgtgacaactgaggcatgagccattattgggaagaaggaatgtcagatgtatctgctccaaaaggaaatttcctttttgctattcgcgtttccaaaacctaacacaggggacaggccacacctgatttcttgaaatcatgttagagaagtgccacatggggcggcttttgggacaccaacttatctcagacctcctttcatattctattcccagatgaccccctggggtatctcctccaagagttcatgctcttttatcttctaagtgtatatcaataatctgaatcttggtattcaaattcgttactgggaagcgatcctgaaaactgaactatctctcccgtttgcccattcatgattgatagattgggtaagttaatcctcatggggccagtgaatgggtttggtatccttgatgggcctttgtaatggtccacgtgctagctatccggagacatggataacccctctcaattacaatgtaatttgcttagggcccgttacgcagaacttttgaaaaggttaaaagctgctttttgaaaaaaaaaattgtgttataaagatatttggtaaaaaattaaaaaacaacttatcgataaatttatggataaactacagctaaaagataaaagtagtacaacctaacttttaaaaaaaaaaattgttgattaaaagagtgcataataaatttatttgtactaaaaatatatctatttatttatagtatattaaaaaatgaaaataaataaattatataaaataattactatttaaat

SEQ ID NO: 383814 - DNA, 3720 bp, Cannabis indica
tccctcaattttctctttctcgtcatttggtttattaattaataataacattataaaaaagagtaataatttttagttacaacataaatttttgtgattaaatatgacttttaatcacaataaaaaattacttgtgataaaacatagtatatagatacaaattgtcactaatttagttttagtcacaattttttatggggataattttaatcacaatttagttacaacaaaatattgtaatttttgttgactaataatgttagcaattatttttagtttacaacatagattttttattagtttaagttaaaacaagagtcattagtagtatatataaataggctcatttttatgtatagtaataatcatgttgttatcaatacaactcagttacatcaatgatacatttatttgttttcttattttgagagcttaattggccgaaggagactaatattctcttcttagagcttagagagtggactttagtcttagactttatatacttaatcaattagtcctttatgaacccttactcttgggagggttgaaagctccacacttcttcctaatctcaccagcttttcccacaagaacttcaattttgcccatcttaatcatagcatttgcgaaactttgagagaattggaaccgattcttagccaaagttgaaaccaaacgcgaagaagtagagtctgaagcaagttcttggtcaatctttagaacccctctcttcaaacgtatttgacggtagaactcgttatcgaaaacgttacttgtgttttgatccaaaaatgtctttgggttattgtttttcgcgcaaacacctctcaacttggacaccaacttaggatccatggtgggatcaggcttaccggtcccttgaaagtttgaaagtcggctagagaagaagttgcaatgagcgaatccaactgtgtgagcaccaagaagaaccaccatttcatttagggttagccctttcgctttgaaagattgaaaagctgatgtaacagactggcttggaccaggcaagttgacattattagggtttgagacaagtccgtctcttcttcctgttggaacagcatagtttggtccaccagcaagaacgactgagtctcgagtggctacggtaataatgtcagcacatgagacttttgaagggcatgcagcttcaagccttctcttggcctcatcgattatctcataccctcgcacagtttggtttggtcctgctgttttttctgagggtcttttcgatgttgagttgataagtatggatgcatcacaaccctgtaaaaaaaatgagtgaaataatttacttaagcataactatatatgtaaatataaatacatgtatgttagataaaatttttatcaaaattatagtttatttttataattcatgtcgtcatgatgtaaaataaaattacaacttgaaaaatataaaaaatgcctacaagtagtgtttaaaaacaatcgagatcgagagctagaaaatgttcttactctaacaaagcaatcgtggaaatgcaaacgaagtaagcctgcagtaatggaacgatcttttgcgaatcgttctctaacaacttgtttaataatctgttcggctttagggcaactatttttgtagaaattttgagttagttgaccaaaaacacaagaactaagaacaagaaagctcaaaagaatcacaagagaatgaatcttcatcatgatattatgaagaaactataaaattgtatgtattaattagggttttaattgtgtttggctaatgaatgctgtgaagattgcttatatataagagctaagagttggggtcacgtaaaaaagtcaaagaattagacaataatatagagacgacgtcgtaagcacattcgaacgtggtatcatataaattcatgcattgcacttattgattaataattaattaggtggatatatatgattaataaattaaattaattaattattgaattaagagagatggctttcaatatataagagagatattccaatattgttttgctaattttgaatacataggtacaagtatgttgtgtagcttataaaagaatatttaccgaaatattcttttataaaaatatatgaggcgaggccggccgcacaatgcgggagaagggtggtactggtgtagctaggtttagctcgtgccatttaaacctcgcatgaggggatggagacgtgtgagcaaatgacttgatagctagcggccatgaggtgatgagagggcgtgacacgggaatttatcgaaaaaaaattagttttagtgatatttttttagttatatcataaattttttgtgatttttacctacaacaaaaacttacttgaaattaaaacatagtattatttagacacaatttgtcattaatttaattttagtcataagttgtgactaaaaatatagttaatcacaacaaattgtgatttttgtgactaatacatctaaccatgaaccttttttgatgatgtaggaatgatggtttataattagtcacaatttttttttaatatttttagttacaagttttgttgtgactaaaagtaaaattttttgtagtgaagattacccgtgccttggaagtttggacgttgattaaagaagaagttgaagtgattgaattcaaccaagctgacattgttaaggtttgagataatcgaagtgggagcgtgtgtggctgtagggttataatgtctacattagggatgcacacgcggggcaagaaattggcggggagtactttacctgtcttcatcccggttaaaaatttaaattctcatccccgtttattcccatcggggatagatcgagaaatcccttaataagggcaggacaaggtggagaatcccctaatataaaaaaaagttaataataaaaatttgaatatataaaaattaaaatattacacattaattattattcaataaactaattattatctaaaacacaacttaaaatccttaaaaaggatactaatatactaaaaattacaaacataaattataaaatataaaatattattagaaatataaaataaaatactaaacgggtccttgtcaggggggagagtgatccatcccttccccgtttaacattcagagataaaaaataatcctctgtcccattctccatttagacggggaatccccgccctattaggggcatttttctacgggacatgttcattgggaaaaatttgcatccctagtctacgtatgagatttttgaaatgtgctactttaagctttttcctagtctttgtcgatgatctcatacacttgtatagttagtgttatacccaaaattcgacgagcacgtcagagaaagacacgtgtcaagctgggaagaataaagaactcaaacacgtaatcacaattacagttgacatggaataactcgttaaaagcacaactttgctgagtatgtttataactcggctggttgaacagtcttatgcgagataaaaatgtactgattgttgacttatgtcttgacaagaaaccatgtaaatgcaagtgtgcatgacgaggcattaacctcgtcacgtggaggagatataatagaaatacttagcgtatatgacacggtatgcaaactaagtataaacagaggggtgaatcaaggtgacctcttgggaagttttcccagaaagcgtgtgagtgaggacaaagcatgctggaaacactcgtgtt

SEQ ID NO: 383815 - DNA, 2112 bp, Cannabis indica
ttgcatttccatttaagcataatcaattatattcaagttcttaacaccctatcatggtttctttctttttttgttttgtctaatgcaacttcttgaaaaatgaataaatttgtttagataaataaacctgcattgctcgaattgaaaccccaagcaaggatagtggatagagcacaactttatatccaatttcctcaagctcaaatggactgagaattggggtcttgccccctccttcaagcatattcgcctaacaagaatcaaggacatcttttaatgatcaaaatctatatccatgttaagaaaacagtgtatttggttgactatttcttacacattccaattggaaaaactgaacattatgaaagttatagagtcgtgtcttttcatttgctgcaattctacaatagaaaaaaaatatatagtatataccaattttggaactgaggaagaggtttcacaaaaactcttcatctcttcttttgaagttaatgcagtaatgagaagaagatctgctccagcatcagcaaaagcctttgttctccagattgcttcttcaaaagacacggcttggcgagaatcagttcgagctacaataacaatgtccgaaccactctccttccgagcatcaaccgctgcttttatccgcatcactgcttcctctcttgatactactctcctcccttgagtatggccacaagcttttggtgataccttttgaacaagaaataataatcataagtaagcagacaaatgagaagacaagcatatcaaatgtaccaacaaatcaaaattcaaaagagtctttctacataatgaggacagaccccaactaaagagcacaaacacaatttttctctctgtcctttcagcataaaattaacaaatttggtggaaactaaacatgtgacatcagataaaaattaagatgctttctctcaagatagtgcaatgtagtaaagtacaaatgaaattataataacctgatcttcaagcataatcccagcaaaaccagctttgatatattccttaacagtccttttaacattcatggcattgccatatccagtatcagcatccccaataacaggaatggacacagcttgagtaatcagtcttccttgttccaacatttccccatatgatataagccctgcatcaggcattcccaatctagcagctgatattgagaaccctacaccaataaaagtagaacaaatgttcaagagcaaagaccacatatatacaaatatatatatatatatatatgtaaacataccaccagaaagagagcattgaaagccagctctgtcgatcaacttggcactgagagcatcgaaacaagcagggcactggtgaatccctggggagtccagaatccggcgaagcagggtggcagaagacatgagttggggtgagtgcggccgaagggtcaatcaacaataagcagttgttgcctgtcttgactcttgataatataatgtgttttgaaatagagataagctattatatatattatatacgtgaaacgtgggccagcttgagtggtggaacttcattatctcacgctagagttaagactggacgacaatgacgggagaatgaagttaaatgagaaatctacctgaccctgacccaacaaaaaaactgtattttattctatttattatgttgctagggataaaattaatcttttttaagctaaatttggctgcaatgttatatttcacctcaattttacaatagtgctgaaatacattaaggataaaattaatctttgaaatgtaaatagtcaacagaaacattcaatttttaatgaataaaatgttgttaaatatgtaaataaaatataaaaagttattaatataattaataaataataaaaagtaaataaaaaagtgatatttattatgatgtaaaattttactcatattatattttgtactaaatttaacatattttttagcccctgttaaatttagactactttatgggaaatagtagtaaatgaccttttattctttaaactgaagcttaatgtccctttttaaaaataatatagcaaatggtttttattattttttagtacctaaaatacccttagttatataa

SEQ ID NO: 383816 - DNA, 1257 bp, Cannabis indica
agttgactaagagattgtaacatttgtattttgctgagaatatatatatatatacatataatatatgtataggccagtagtactgctataccactacactgtaataatcttaataatgttcacatgcatggagttgatgtgatctctgcatttactttcgagcatccatatactcaaaccttttgttctttcaaacaataactatatgttaaaggccgggcatttatattgctatatatatacatgtacgattgatatatataataataatatatataaataaaagacctaagaaaaagtattgaattggctcgtacatttattattgaacactttacattatgtaagactaagagttactacgagtcaaaaagttattttaagtttattgtcttatacatatataaggaaaaaaaaaactaggtaaatgatttgttgtgcatataaattataaagtgaagtgtttatttcagatcatttaaatacaggccaataaaaataactttgacgtttccaaagccctagctataccatttcaaaaaaaaaaagccctgtagctatagcatgatataataactttacgtgcattaattaatttctcgattaataaaagctgtagctatatgattcacaataatgttttcttttttcaacaacatatagtacggttcaagaaaataaaaaaggtaactacaaaaggattaataaaattctgaacactattacactataaaaatttgtggttaattataaataaattattagtcttaaattgtgactaaaaaattcatggttaaaaatagtagttacaaaaattataacttattgtgattaaatatgtttttatttataatacttattgtggctaaaattaaattagtgataatttgtgtttaaatactataattacaagtaacttttttgttgtaactaaaaatcacagttagttactatttttttttgttatggctaaaaaaaatattaataaaagtgatattttttatagtactattattagacactaatatagaactaaatagaagtagttttataaataattaaggatattatatattaattattaaactaaattaaattatgtaaaatttcgtacttaattatattattttgcatattgtctttgaagaaaaaaaaaatgcatcatataaattatatataattaacacacttcattatactataaatgcatatacataatgtatgtattaacttaccaatgaggtaaaaaaaaaaaga

SEQ ID NO: 383817 - DNA, 2127 bp, Cannabis indica
atgtggtatttgccatagctctatattcagcttcagctgatgatctagagattgtatgttactttttgcttttccaagaaatcagagattttccaaggaaaatataaaaacctgtggttgatcttcttgtatctgggcaagtagcccaatccgaatcagtatatgcctccaattcgatcttggattgagttgaaaagaagatcccttgacctggtgtgcctttaacatattggagaactctttgagcagccacaagatgagatgctctaggtgttcccaaatattggctcaatttgttgactgagaaacttagatcaggttaggtaatggtaagatattgtaattttccaatgattttcatgtataaagtggcatcagcaacggcatcatccttggcatcttgacatagctttagcttagcttccataggagtaatcattggtttgcattcgaagtatcctagatcttccaaaatttgtagagcatatggtctttgggatacaaatattccttgctcaaatctggccacttccaaaaaccaaggaaatattttaattttcccatatcctttaacttgaacttgttgtccaatctgatttgagatcttcaagttcattcaaattgttacttgctatgatcacatcatcaacatacacaagcaaagctatgaaacttgttgtgaatgttaatgaagaaggagtgatcagagtagagtgtataaaaccttcttcctcaagagcatttgagaatttttcaaacaattgccttgatgcttgctttaagccatacaaggactttttgagcttgcatatatacaacattgttaggtaactccctttaggactatacccttgagggagagtcatatacacatcttcatgcaaatctccaaggagtaatgcattgttcacatcaagttggtgcatatgccaaccaaaaacagcagttaaggccaaaattagcttgactgttaccaactttgtgacaggcgcaaaagtctctgagtagtcaatactctcttgttggttgtatcccttggcaaccaacgtaccttaaaccattccacagatccatcggcattgtacttaattttatatacccgtttgcacccaatagcatgttgatgtgctggtagactaacaataatccatgtaccattcttttcaagagcttcaatcttaatgtccatagcattgtcccattcagggataccagcagcttgatgataatattgaggctcataatgacttgatatagaacaaatgaaggctttaaaggtgggggaacaatttggagtaatcaagaacctgagattaacaatgaatagtagtgtcagtattatggcatgagctaacataagtagactgattagttaaaaaataatgatactctttaagataagagggtttcttaatctatctaacaggtcgagaattttgtagatcaggtgcagaagtggatgggggagaatcctaagataaaataggctcattgacctatctaaaagattgagtaggatggtaatctggtgtaggaatagcagggatatgttcctgagatgaagcagatccatcaacaaaagtgggaaaagggataggaacagcattgaaaaaagtttcataacaagctttcattcccatgtgatatcctagaaaaatgcatgacacagggaatataatattgaaataagagagctctaaagatatttaagagatgttgatgctttctttccacaatagaattctattatggtctttgcatacaagcatgataatgaataatacccaaggatttaaataattccacaaattgaagttccttagcattgtcaggcctgaagccttttattttggcattgtattgagtttgaacaagattaataaaggctggtatgacagttttggcttcaaatttgtgtttaagcaaatgaatccaagtgtatctaaaacaatcatcaacaatagtgagaaaatacttgaaaccatcatgtgtcatagcatgatatgacccccatatatctatatgaataagctcaaaacatgttttggctatattatggttagaaataaagggaagcttcttttgtttagcataatgcatgttgagcaatgaatattaagagaaaaa

SEQ ID NO: 383818 - DNA, 1128 bp, Cannabis indica
cactaattacatttataattttgtactttgctattttcttttataataacaataagtaatgagattatgttgtttgaataaaaagtcatatttgctcagatataattgggtataggtagaagatcgtaatggtggtaattatttttttctgtaattctttcttttatgcttttaatgaaacatatatattaatttgaatttttataaaacacaaaataccaacttaaaagagtatattccccatattaaattatgatacatatgtaataatgacaaaagaaattaagagatatatctgtggatcgatctatatggacaaaattaacaatctattaattaatacatatatattttataacgtatatctttgatatttttaagctaaaagccataatattagtccgagagatctggtatatatagtagaatatatacaattatataaatataaatacatgtagatatataatataaaagtgaaaagaaaaatgaataaaaaatgaggttacttgcagcacacttatatatttatataaatatataaatatggagaggagacatatacagtttatgatataaattgacaagttttacatgttggattgagacataaattattatcaatcatattatataatttataataatatatatatatatataaataatctcatatatatatatatatatatatcagacattaagactcgtgctcctcttttattggctcccaacaaaaatgttgacaaacaaacacaattcactatacactatattcacttgcctctcaaattaatactgttctaaatatttcgataattctttataaaataactttacacacggtataaaatcttacaattgagttgaatttttagactaactacttgtaaaaaattatcgaaacttgcactataaaaaatttatttttagttacaacaaaatttgtgactaaaagtaaaaaagttgtgactaattataaattattattcctatgttgtgactaaaaagtccgtgactaaaagtattagtcacaaaaattataatttgttgtgactaaatgtatttttaatcacaatacttgttgtgactagctaaaactaaattagtgacaacttgtgtctaaat

SEQ ID NO: 383819 - DNA, 2515 bp, Cannabis indica
cttcccctttgttttttggttgagtgttggtggagaaagataaactaatatccttattccgtgcttttgaaaatatcattaattgataccaaccaatatgattggattttggagctcagtctactaactttagccctttttaataaaaatctacaaaaatactaattgagttaatcacattttgaaagcacttgaccattgttttactttgggacaaggcatgagaggtaagaggtatgtgaatatgcattagtaatagtaagagatctgggatatttgaaagaagttttagctcatgtaatcatgttcactagtttggtcataattatatcattctgttattataggaacattgtattaaagttttgccatcaattaacactaaagttttcattttccaaaaaattacagatgtaggtgtgatgagtggagcaatcttattcatacaggaagatttaaaaattacagaagtacaacaagaagtacttgttggaattttaagcattatatcactttttggtagtttagctggaggtaaaacatctgatgttattggaagaaagtggacaatgggattagctgctgttatctttcaattaggtgcagcagtgatgacatttgctccttcattccaaatactgatgataggtagactcatggctggggttggaattggtttgggagtcatgattgctcctgtctacattgctgagatatcaccaactgtctccagaggctcactcacctcattcccagagatttttataaatctaggaattttacttggctatgtctcaaattatgcattttcaggactcccagcacatataaactggaggataatgcttgctgtgggaattctgccttctgtctttatcggtttcgctctttttgtaatccctgagtctccaaggtggttagtcatgaagaaccgagttgacgaagcaagatccgtgctgttgaaaactaatgagattgaaagtgaggtggaggaaaaacttgctgaaattctattagcagctggaagtggcaatgctgacaagtcgcaagagaaagcagtctggtgcgaacttttaaggccttctcctgcagttcgccgaatgctggtcactggttttggaattcaatgtttccaacagataacaggaatagatgccactgtgtattatagccctgaaattttcaaaggagctggaattgagggtaactcaaagctactggctgcaactgttgctgtgggagtgacaaagactatcttcatattgtttgctatcattttcattgacaaagtaggtagaaaaccattactctatattagcactataggaatgaccacttgtttattcagtttaggcttctcacttacttttcttgggaaaggagagattggtattgcattggctatcttatcagtttgtggaaatgtagctttcttttctgtgggaattggtcctgtctgctgggttttaacatccgaaatctttcctctaaagctacgagctcaagcctccgcccttggagcagttggaaatagagtgagcagtgggattgttgccatgtccttcctttctgtttccagggccatttcaattggagggacattctttatcttctctgctatttccgctctttctgttgtgtttgtccacacccttgtcccagaaaccaaagggaaatcattagagcagattgagctgctttttcaggaaaagtacgagtttcaaggaagtgaagtggaattaggagatgttgagcatcttgttcagaaacaatgactagtttcgaattcgaagaatttcagttgtatgagggaggcccctgtgttttcaatatatctggcttaagagaatgatatgggatattgtccatatatattttctaatttttgagatcgttggtgatattgtcacaagtaaagatacaatttgtgagatattatggtgaatctgtgcaaggactggatagatttccatatatgaaagcctgctataacagaacaaaacctctgctaccatatcaatcagtttacagtaccaactatcaagtgggactccttttgtgatgatgtatgattccagtcttgatgtatttaagagtgtatctgcatagctatttgatattgatatgtcttgagtttaataataaaatattctttagtactacaagactacttctactggaattgggtggaataaagcccaatatcataactctcactgtatcaagaaaaccagtacatatgttaccattttgtaatattttttttactatggttatctatttacagcaaaatcatctatttgctcaaatgtaaggattgggatttttatttaggaaaataatgacttgtgttttgcaaaagttattaattggactttctgttttattaaatgacaaaatagattctatatttttttaaattgtacaaataaaactttgaactgattttttgtcaaaataaaatttaataataatatgatctagaaatattatgacaaaactagttacatttttt

SEQ ID NO: 383820 - DNA, 2197 bp, Cannabis indica
tttttttttttttcttgatagaagggttatcttaatttattagagcaattattcctctattgaaattttcctagcatgtatacagtatatagtagatattattaattaggatgatttttctttaataaatagtggcctcctaaataatagtagagtacagttcaatcaagaaatattggaatcttagaaatatgaagaataattaatatcattagagtacacagtagcttatatatgtagctaaatttggaggcacatttttttattattattaaaagaaaatataatataatatgtactgtacacataaatcataaacaaatgtaattcagacctacgtggcagaatacttttataaagaaccatcttaaatgaagatgtgtggttgagatgttctttggcaatattgttcctttaatatatcaaaatatttattatataagtttccaagagaatgttacgtacatattataattaaataaataaaaaatatattcttgcataatatgtgtttgacacttaatttttaaccaaactggaactttggaaggcagatttaattcctctccaacttttacaacaatttaatgttttatctactatatttattgttgttaagattgtttgatttagattagttgaatagatttgggttataaaagttattctactaaatggatcttggagactttgacaaaaaaaaaaaaaaaacttaaagaataatattatgaaaaaaaatgaaatattactttttcgtaaagtttttacaagatttttttttttagtgatttacttagattgtaatttctctcttgagttttttcttcaaagtaattttgtgtccctaaataatgaaataagaccactatctatcggggctaattacataagaatgaacttccttaatctataagaaataaaataagaaattaatacgttttcataattacaataaaaaaattgggcaaatctaggctaattgcctttattctctgaaagtatgaattaatcccacaaaagtaataattacttcgtgacatgcaagtttggatatagtttttattgccaacttacatctcctggtcggtgcatgcgagttgatcacacgatcaaactggttagatgtccactaatgacttcgctcttacaacttgccatgcacatacaacttgaatcttcatatcaatcttcacagaatgctaggagtaagacacgtgttatccagtcaggtgcgacgtcatagtaagacacgtgtcatccagtcagctgccacgtcatagtgcaaaaattagaataacatttgtccctcaagtctgcgcgggacctttttggtcgcatagggacttcattcggctaggaatctgtctcgatgggtgacacgtgtcctagttgttgaagttgatccgacgtgacttgattgagagtctcttcagtgtttggggcattaaatgcctcttgaaagatgtacctcgagtcacgtactgagtgttgaagggtacagggtgcatgatttctgtccttcataatgagtactttaacatacacttttgggggagaaactcaaattttgaatattgacttaattaatttcctcttttaggcgcctatataagggtttaatccttcgtgggaaactttttagccattttcattctcagagaacaagagcaaaaagtttttgcgtatttttctctcaaatcttcaaagaagttgctggagaatccattgacattaccttccgagcagataaaaaaatctccgaacagtaagttacttttccctttactctatgcaattgccatcgaatgtacgtattatttttctggatttcttgttgcaaatttatctattcttgaaccgttcttgactgatcatagaatagataaaatcaaggcttgtaactttgactagcattcaattataacttctgattctctaattgcatatcaattttgacctgaaatcgttcatatccacccattcatgagattctaaaggtttctaggtacatctcaagattttgaacttctgggtctggaaattctatttttgaatgaaatcctttctttttatctttactttttcataacagtagcagataaaggtgcctcgcctaaggttaatgcaagctcgattatgccaaggctagcgatgctgtctctggtgaatctacaaagattttgttgggttttatgcc

SEQ ID NO: 383821 - DNA, 2696 bp, Cannabis indica
tagaattccccagtttaagcctagtaatctaaatgtctactaagaaattcttaacggtaaaatgaaatgtgatatatatcttaccgcaacaataccttccccagaagttgtgggaagagagacaaaaccatgcttcccttcagcatcaaccatcaaactgtcagctgagtctatctcattcaccctatccaggacctaaaatatatcataaaattaagttttttccaaccagaaacattatatggttcaaacaggcataaatcaactgaaagatgagtgcctcaccacattacttgaatctgattcaacaatcgagtccatgtcattgacttccttctctttaacctgggtttcaaaagtttatgtacagaaggtactgagcaaaaagagaggaaaatttaaaaagaaaagatagtgatagaactcaccattctaagctttaagtcatctatatgtttattgattctcaaaacatggagtttcagcgactgcatgatcaaatcaggtaaaatcaacaaaaggtgaagtagatatcttggaagactactaagagctataggaggcatctacttttcaaataagcatacaaaatgtgatgacttacctcacgacgttgtgcctcaatagagcgtttcattgccgttttcttattcataagtgtcttaggcctcaaagtggcaggccgctcataattttttccccgatacacaattattgcatagcctttactcaccctttccactgctactaatatcccaccgctttcagcctctaaggtccgcgctacttggtgaacagcttccaagcttctctcattacttataaccttcactagttccctatatttccaatgaagatgcatgttttcaattgttccatcaaaaacaccccgcctacctgagtatgtgcgaaaaatgattattggaccctctttgaggaaagctatcattatgataaaggcttgatgttcaatataattaactctaaagcaagcaatatttgaacctcgactagactggagccacttcatcatattgactcacccattagtaggaaggcattcattctcaaaccaatcttcctcagcatatatctttcttcttcagttataccctctttatctgcttcaggagtttggcacaactctgccttctccagctcagctagaagttgctctgctttcgctttcttttccaaggcctgtgtgttcaagagattaatacatatgtagcccaaaagagatatgcattaatcaagtgtaatacccaaaacaccataccacagacaatttaagactagtttttctgacagagtcctcagtaaatgttagctttcgctgttcacgaatcacactatgttcatttggaccacttggtgtggtctcaagttcatcttgtgcagatgtaactgctgtgctgtgctctgccctcagtttctttccctgcattacatatttccttcgttcttctattgcagaagaaactgcaggtggtagaaaatccttccctctatacaagactataaattctctatcccgtgcaattagagttcctccagtcaaactctgcaacaaaaatcagttcacataagaagttagcatatataaatttttataagattactaacattaacaagtgaaaagaagctgatattctatttttagtactactatgtttcttttctttttctccaggatttgctagtttaataagattgaggtgctacaactcaaaacaataaaaaatctaaacattatttttaaccattggtcacctttaactcttctgccatgagttcactgttagtgttctgcacccctcttttaacagcaatcttggcaacttcacatttttcccaaagcttgatgatagaagctgccaatccctgatgtttcctatttctccctgcaaagacatggaagtaactatgtaaatgttgacggtatcaactaaagctatggcattagaatccaactcacccaatgcaaaatggcacggcaatggccgagcaagtctcctcaacgtggtcatttcatcatctgtgagtttaggctgcacaccatatggaagaaggcgaaaaggtctcctgtatccaggaacaacagcaggaagaagatcagcatccacaggctgggggtcatatccccaccaatcggaaaaacggggacccaatccatctaacatgcggtcagcttcttcagccatttgtgcctctccaggcagctgaaatcgcactctattctgtaatccaacaccttgtactaaagcaggtttagccattttatttttatttgtgggaagctgagcatctactccatccacactagaagaagcccaagtctcattttgttcgtcatcgtcacttagtgaatcgcttaatgcaccatgagaggcctcttcaatagaaattactccatccacgctagaactaggctcatttgattcatcatcttcactaagtgaattggttaatgcaccatgagaggcctcctcactcgaaattttattgctaagaaaatagggatacttataatttgtccctctgtataaaactatcttacttccagacctccaaacgaccaaacctccagtttttttctgaaacatcggcatcaaactaaaatgattgatgctacactattgtaaactgacaactgaaatatgattaccgatacgtaaagtttttatgctttaaaa

SEQ ID NO: 383822 - DNA, 2167 bp, Cannabis indica
ttaagacaaacgtacctaaataccaacaatctcaatagttcagagggcatttataacgaccttaaaagttcaagagacataatttgatacatatcaaagttcaaggggccaaaaattataattagatagggaccttccatctatgaatgctgctattgtagagtgtagtttttctaattcttttcctcgtttttgagaattttttttttaaatgtaaaatttaaagttataaatcatcataactttttaattcactttttttccgcctttttgttttttaaggctttcaattaaatattaaagaataatagtggtttgtaatatctcaataagaaaatatttaacaaaaattaaactcaaaatactaatttatattatttttaaaaatataaaatttaaattattatttaataaaataaaaaatccgatcaataactttttggtaaaagataattcaaaataatatttatctttaaaaattattaggatttttacccccgaaactttaatatgtaccaagtcatgcctcctaaacttttaaggttgttaaaaatgccccctgaactattgagattgttgaatttaaagacttttattcaattttagtaaaaaaagtctaacatggatgaaagttcaaaggtacatgtaaaagttcaagggagtatgatttggtagatatcaaagtttgcggtagtacataaacaatcactaaaatagtaaaattgaatgaaattaaataaaaaattcttaaatctaacaatttcaatagttcgggggaaaatttttaacgacttaaaaagttcaaagagtataatttagtacatgtccaagtttaaggaagaaaaattcaaattagcatttaaaaaatccacaaaggagtttaaaaaaaaaaaaggaaatccaaaaagaggtggtaaaataggagagaagtagggtgagatctatggtggggtgggccgtgggcccagtagtagggtagtgggcctgagtgagaaaattgaacggaggtagacatgtgcattcatgtgcgttccgtttccaccactccctccactccacctaataatactactattactactactactactacttcttctttatatatacatcattcattttttaactaattttatcaatttctgtaaacttttatacatcattatagtttgtttgttggtattttctttgttgtcctcaaagaaaataccaacaaactataataatatatgcattaatatatagtatagaattagattccaaaattttcacgtgaagatatataactctctgcttctataaaagtataccagtttctgatcacactgccctggctactacgattttgtacattgcacataataatctcattttactttaattaaatgattaaaaatgtttaattaaaagtctcttccaagtgttaatattgagatattaattgggattccaagtgaaaaaagaaaaaataagtgttatatataccattaaactatatatacactagcaaaataaagtatgtatacactagtaattaatagtgtaattaatttggtggaatagtgtaatcaagctaccttaaattatttataaataatacatgcacttcgatcacattaattatgtagatatataaatagttatattcttatatatccataaattcttatttttttaaaaaaaaaaaattatctctagtattaattaatcttttggtcattactaatgattgattacttgtgtgctgggaatttataagtgtgtaattactaaatagtataatttatactctatttaaaaaataaattatgtttggatatatgaaatgagaattatttataaatttttaatgtattgctttgacaaaataattaataattaaaaaagaaaacaataatttgtaatatttaatattttaaatagaaagattatattaattaaaccccaattctcatatatgagaatttgagagtgaattttaaacatatcaattatatccaattatataattatattataattaggtagtgaataatgaacatataaaaatatacaattactttcaattacactcaattataatttttttttttttcgtcttttctaaatgtcgcaatatatgatgtttttgaccaaaaaaaaaaataaatataatatatatatatat

SEQ ID NO: 383823 - DNA, 1661 bp, Cannabis indica
aaaaaggtattatatttgtttgatttaaaaaaggggaagatgatagagataaagatatgtgtgggttgggtttggtttgtgtgtgtttatatttaattagaattaattatgttagagatgattatctgttcaaataattaaaatatactttattcaaaaaaaaagtggaaaacctgccaagtctcgatctatttattattattattataaaattagtaatttgcggttaaactctttaaatttttaaattttgtaaggtgtaatttttatattgaaaaaattatggttaaagttctcaatttatatttttgtttttattagcactttatctattaatttttggttattaagtgttaaataaatttattactgtacacgtgacgaaattttattagattacttatgtaatttgggcactcatcattaagttttgggtgcctaatcattattatgctaaaacttcacttttttttttttaatattatgatttaatgtattgaaatgaaaatgacattatttatgatatttttaaaatactttatttatttgattgggtgggtgaagaaacaatcttagctaacttaatttgattagtacttaggcactatcaaataaataactaaataaacaaattataaactaatgccaaataaaataaaaaataaattgtatataagtataactatatatacataggagaattctctatatatatttggcaaacagtcaaaaaagctaaattatagctcaattatatcatagtatatttatatagttattataatagattatgtaaaaatcagtaatactaaatttatcttgttgtcttattattattattattattattattattattattattattattattattattataagctgagcaagccaaaaacatgttgcacatgcatgtgtaagaatacaataaatgaacaaaaacaattatatgttgtttctttccaaaaaagagtgcattatttatttatttatgtttttttttctaagaatattcaaaaatatatttaatatcacataaatatttggttgattaagcataaatattcattagattttttattccgttttaaaaaatatgaaacgtaattgtatggatgaaaacaaattaggcctcaaaccaatgttatctgttggtaacaaggaagtctcaattatataccacatattctaatttttaactaaattataagcaacaaaattaaaaaaacaaaaaaattgaaaaccttcgaaaaattacatcttataaaagagttcataaaaattttacaattaactacataattatcaatttctcacttcgggttcaatcccatatataacatctttaaacactatatcagaatcacattgtacgccttaatctacaacaaattctaatgtcaacaaacaagatgcaacttccctactaagagcattagcaaaaaataattgcttagtaccatcccacaacaccttccctacatgatctcgagccaccacctcaagcatcatacctccctcgagttggcctaaattttttagggactttgtgcaaaaatttaaaattaaaccctttataaataaaaaaaaaaataggaaaattactcatacactatttttttaaccttttttttcaaaaaaatttacggtttggattt

SEQ ID NO: 383824 - DNA, 2026 bp, Cannabis indica
aaaaaaaaaaaacataatattaaaacgaatcatgacattataacacctcacgtatcaatatactgctaatattttttggcaattctcgaattctttttatctttgaaaattatgtgatttttctccaaaacaccacaattccaaacttttttttttaagtctttgaggcagttcattgtaatataaattcattacaaacttagccccataaaaatttctaacaatgtaaaaataatgtcattttcaaattagtttattaggatttataacctaattactcaatgagaataggattaggattaagagcaaaactccaacatccaaaacaaaataaacattagactaagagtaactagtgaaaatcaatattaacatttgataattctttataaaataacattcataataggatctcgagtatgtacactaggctcgaccttgatattttgtgggcctaagaaataactttcgataatggggtgtgtttaagtattattgggcctatttaacaatattcacaaaactaccattttttttctcatacatatccttatatgagtataagaaatttgggccatgagtttgggtgagcactaagcataagcctagcctgtcttagcccaaaatcaatcttgatgtacactaaaaatgtgcactaaatttttaaacacaccaaacatgtcatatcatttccacaaaaacttgatgcagagctgaccttgagaatatataaacctaagggctattaaaattttgaagccttcactttcagaaatatatatattgaaaaagagtgtcacgagactcaaacccacaccattgtgtaataaatcatacacctcaatcaactaaattgtgaatatgtgttgtttaaaatacacttaattttgctcaaataaatacctaatgaggctttttattttttattttgggcttccataaaatgtgggttgtgggtcctaggcacaggcctagcccgcatattagagttgaactcttttatcaagtttgacccaaacccgaccaactcacatcgacccgacctgaccaaaccgaaaatttaaagaaactcgttcaattcgggcggtcaagttcaatctggtacacctttttggtggatttccagtttgattttttcaagtgaccaggttcaggtttgatttttcaagtgactgggtttcaagtttgatttttcaaatgatcgagtttcgggttggactcggacctgcctgtaaacctttttttgttactcttatataaactttataataataaaagtttatactttacatacattagacttaaaatataataatatttactattcttaaaaaaaaagttacgatataatatacatatacttattcgatgttaaaagtttatatgtatgttttattaaatttaatggtcttttatatatttatatataactagaaaagtgttaatttttttttttttgaaaatgaaagttcatcatttattaaacgaataacttcgtaccaaattcggtaacagctcaaccggaacagtgtccaaattgaaaatgcgatcagggtgagatatagaggcccttacaatggaatgagccgctacatctgctgatcgttttacaaaatagaaaaaaacattacgcaaaatactaagtaaatccttgcaatcactaacaactttgccaaacaagaaaagcataaccacagagctacggataggtatgtttaagtttatatatttatatataattaggtatgtttatagataattaggtgagtgtaaaaaaaaaattgacaaagttgaccaggtcaattcgcttaacccgaacccaccaatccaccaactcgtgaacctgttgagaatcatggggttccatctcaaaaccaattggcaatgagtggagtagcccatgttcttatatatggctcaattctctaccatttattccatgtgggacattgtccacaatattccccctcaagatgatggccattttttttgctgccaatcaatcttgaaccgtatcagagtggac

SEQ ID NO: 383825 - DNA, 4869 bp, Cannabis indica
actctggtattgattccagtggctgcattactaataggatggttattttgctttggtagtcagatgagaggaccttatgttttttccaatttcacaaccgaacaaatttaagaatatgaaaaatacatattctagtgcctatcttaatagctaatataaaagcaagcctttagaagaccaaagtaaaaaaaaaggaaaattatattaagacttatgtccattaaactgacacttaaatccatctgttcacatattggccatttgaatttcttcttgttttgcagtaattaacattagaaacagaaaacattttgatgtatgctacttgcaaaaaatatttatccttagtattacaaagtagctgtgataattttcctatttcattccttctttcggtttctatgctgcattaatatttttcttggcgacaaataatctttttactatatgagcaactgcttgtccagatattttgatgttaagcttgaatacttttaggtttgttaatggaatagaactaggccatgatttattatctgccttcaacatccatatcattgcaatgtagcttacgaaaaattgacccgtgttgcagatgtggtacagcaaggctggattttggatcctgcttctcaaatgcttacagtgaagaaacaaccacttgtgaaagagcagaaactagaccccagtaaattgcagaacttgacagaatatgtgttctacctagagcattaaaggagattttttttttcaagagttcagctactgccgatgaatttttttgatgcaccgaaaatcattgaattttttgacaattttcttgagtagtttgaggagttctggtaaatatgtagcatttttactttgatcatgttgaaatcattgagagatttactcaattcttatcttaatttatcatttttgttggttattattattatcatcactacatggaaaaagttaaaattttgattaaatggcaaacgtactaagccaaatgtctagtcaggctcatgcaagcgtgcttgaagttggtcacattttcaacttgcacatgccgtgaacacaccctgttttaagccacttttgtcttgcttttgttatacatatacatatacagatatattaatgtgtagtagctatcatgctttgattattagtaccccctataaaaactatcacataaatggctgaaaaattaaagagtgcacatataaattatactcaaattatactagttccatttattaaaagtaacttgtgtgtaaagtttctgcacatatcattactcaaaactagaacaacaaacacaatgtggtagtaggtaagtgtgtagtgcaggtttgagtggcgtacaacttatggcaatggaaggaagacttatttgaagtcagagtacatagcagcagcctatggtctcaccactgcctatttgacacctcttgtgttgaggtcttgaccagttcagattttagtcaattattggataatcccagtcaatggtcaagtcatggatcttaatttttgattaaagaaaagacaagatgaatatgttcattgatgtagagacataagttgagttagctgcatttgagtggggttggagtatagaaacactttgaattggattcatttcattttaaagatggaactgaatgtgtatggtagtaatatatgaaacttttttttttaatggagtcatagaatattgattaactttaaattacacttgccaagtaacgagtaattttcttttcccttacccaataagaattactttcacctgaagaaacttcacaattttccactcaaaatatctctacactactacttccactcctcctatctaagcatcactaatctactttctttcttcttctttttctaagacaattattaagaatttcttcaaaatcatatccacatatatcagataaaaatcctattatataattaataagattcagtatctatctatctatctatctacaatttattgtatatatgtataatagttgttaattaaaatacccctttttaaacccgcgcaataattaattagcttattagaaatcgattacttataaaatttcacgtgttatcgcatgaaatcttaaccatttatacagaacaatactaaaggaaaaatccagcttcaaaaaacaactgagatcagataaaccaattaaaaccaaaactccatcacattggtatttattatataacattattatttaggtcagtatatacacatttcctctactcatacatatatattttatttatttatatatatattcacatacctgaataattatataaataatttacaattcaaattagaggatttgttaagctataaatctcacataaagacctgaaccttttgtgcttcctgtgaggcccaatctcaaatatcgtggttggatcatcattatcatcatcttcatcctcatcatccttggaagcagtactaataagatcaaacgtcgtcgtatcgctcatcgcctgttgatcgtgatcatgatgagctgctccgaattcgagtacttcgaccgatactacggcgtcgtttcggttgctgctttccgagtcgccactgagttggatgagtagctcggccgcgttgatttctgactcggagaaaaccgacgtagaagagagcaacgacgaggaagaagaagaagaagaggaggacgagattttcctcttcttggttttggaattgcatgatgatgatgttgtttccttagccatgtttatttttcgttttggttttagaaagagaaagttagagagagattgagaaaatattagcttatatagaacgaaatagtttaggtcggttgtaaaatcctttgtatttcattttaggataaatattatttttagagcatatattttataaaaattattaattaaattctttgttttgttaaatgataaaatagatcttatattttttaaaattgtacgaataagatactgaactgatttttttttattaaaataaaacttaataataatcttatgtagagatgttatgataaaactagttacatttcttgtatctgtcatattagaaattgtcttaaagttagttatattaaaaattatttttttttttaaaattgagtttaagatcttatttttaccattttggaaattatatggtctattttgtcatttaacaaaacagaaggtgcaattattaacttttgcaaaacataaaatctaaaatggtatttactttttattatatttatttatttatttatacaaatggaatgaaaagatttttctttctgtccacgttagagcatcggccatgcttagtcaatgaaatttattaatatataatttttttatatatataaaatgaaaacacggcttaataattaatatattaataaaattaaaatttattaacgatatctaaaatcaaacaaaaggtgtggatttgccaattattatattaccaaacaaacattagatatcttcacttatttaatatgaattaattaattatcttcttttttcatcgtatttcttttgaaagatcgtattattgttttgattcttttatatgcttctattacatttttcttcacttatttaatatgaatttattaattatcttctttttttatcgtatttcttttgaaagatcgtatttttgttttgattcttttatatgcttctattacattttcctatctactctccccgacatatattttaaaataatttatttgctactattatatattattaagtggaaattaattaattttatgatgtattcttatttaaaacaatatacaactacttttgtttttgaaataaaaaaaataacagagagagaacaaaaactattattacaaaaataatttatcttgaactccaatttcaagtacattattctttaaacaatttgagatgtgtgtactagttttcaaataaaattcagttttataaattcatttacggagcttgcaaacaagttgtgtattggaagaagtggttgagagtacagtgagttatttaggatgactcaggaagagccatgtaaacctccttgttgaggtctccattaaaaaaagtgttgttgacatctagttggagaatgtgccattgtttaatggtggaaatggccagaagaagcttgaaagtaactattttagccactggtgagaaagtgttgtaaaagtcaattcattcttcttgagtgtagccttgtgcaactaagcacaccttgaatctctcgattgaaccatcactgttatatttaattttgtagacccaacaacatccaacgacacgttcggacgcaagggcaccacggcaccactgtccttgttttttagtaagcaaaaagttcatattgcattgcttgatcccacactttgatttgacacatcttgattgtatgtgatgggttcaaagtaaggttgttactgcaaggataaaggttttacgagaaggagaaagtttactataagagagaaatttattaagagaatagggagtaaagtgtaaagactcaatttttcgagtcaaacatatatatataaaataataataatatatatgtatatatataaaaaaaatagcagacccctatcatcactctctctctctatatatatatctctctttttctctctcttcaaaacacaaaaaggaagccacaaagctccatcaccggcggactccggtgacccacctccggccaccaaccagccccacgggccagaccactcgaacccctggtgccgacgacctcaccccccaagcggcgctgcttctttcaccgccgttagctcgggatcgcaagtcaaagtttggaggttcaaactttgaacagat

SEQ ID NO: 383826 - DNA, 2073 bp, Cannabis indica
ttttattttattttttgaatatttatcaatgtgagccaattaaattatgtcacatgtatattgtgtctacgtcgacaataatctatgcacatagacagctaacttggcacttaactgctaaagatggataaaaatggctaaatgctaacagaatatattttaaggagttttgttgctaaaatttgggttttaagaattaattgctaagaaagtaaaaatattgtgagttttgctgcaattaagcttatattttataagcttacttgttcttgggtaaagctcgctaatttggaacattaatcctcctgttttctagttatgtattgcaaaaatatatattgagaacacactttttgtgccagacctcatcattacttcatttatttttacataaaatcagagtttctggtatagacctcttcatagccaatttttttacttccctgatggccatatagaaacaattattttgcacacaccaaacacaaagttcatactataaagatcaagatgttacaaaatttgataaattaggtgtgcctgttgggctaatcaactcaatgagaagctactaaaactagctgtcttattttccaaatagtagttctaattaaatagactatatattaattgagaggaggagggaatgtttaattagttacacatgactaattttatattaagtggtgctttaagtagtagtgtcagtccataaaagaagtagaataaggaagatacgaagagagagcaaaagatggagtgcctctaataatcctgaaaatggcgcagcctatcacttccaacatctcaccggaaaatgtcatcagccacggtcgcaaccacaccgcccaaattccgaccaccgccattgctacttctaatccaaataaccccattatgcatgatctctgtttgtttggattgcaattattaattaataatattaaacatagagatgaagaggtgtcgttatataaggggtgattttaggatgttgtaggggtgtaaaatgtcagcccctacatagttagcggcctctaacgacagctacaaccaccattcaattccaacctaacaatcttcatagagaagtagaggaaaatatgtaaatatccaagtaagcatatttccttatacttacaatattaaacaactttctatttcattattattattatcatatgttttatgaaatgagtaatgctaatgcatgttagatatccatccaagcatattttacatagtagttaatgatatgttacaaacagaagttaatatcattatgtctactttaaatatgtagaataaatgtacgtatcaaattaaggatcttcctttgagaaatttacataaagtactatttaattttgttaaattttttataaatttatgttttctcttagatttttacgcagatttttataaaaataacgaaaaaatcatgtacaaataacatgaaaataacataaaaataatatacaaataacaaaaaattaataaataaataaacaacaataaaatatgcaagagtacaacatataaataacatgaaaatattaaaagactgtaaataaatttttaaaccgtaaaatatttaaaattctgtataattatatttgtgtaatttttttttattttgtgtattgatgtaataaccccatttcctttttaagaaattaagcccatttctcagcacaagaaaaatattttccccataaaggattaactttcttgaaactaagtaaaatcatatcaatgttaccaaacaaaaaggtagactcatgtcaataatagacgtacatgtgtgttcgccaactccaaggagcattattacaataatgtaacacatgaataaaattaacaaatatgtacaattgaaaatgtacttaacaactctaatatggcttataataatctttggtaccacaaggtttactaaaataaatatttgagatcttttgttttcaataatactcatttgatatttagcattttaaaaggaaaatttatatggtatactaacttttactatttttttacaaaaatactaccaagcgatattttttacttttt

SEQ ID NO: 383827 - DNA, 1442 bp, Cannabis indica
caagaatcccaaacccttttcaaactccacatatatatacaaattaaaccctaccccgccactaatattatcattatcttatctaaacataatacatgacatgccatgatgatcatcatgatcatgatataatatgccatgtgccatggccataacatacatacatttataagggcgtgtaaaagtctaaaaaaaatgggccacagagaattgtttttgaagaaaaagagtcatagtcatggctgactcagaaaattgaggcctcatatatatgcacctagcaacatggccttcatattgctctttccattttcaatattttctttcatataatttggtgaagttgtcaatcccattcattccccataatattattaaacttcattatcttaattaatattatatattattgccaataattatatgtaggagatacctataaggaataattaattaattaataatgtttttacttacttaataatgccaccatagagggactttactatacgtacgttaaccaatatatgaatatgattaaatgtttttacaatattggtgcatgtgaatttcactagtcgttattgcttaacataatttaaaaagggtgttaatatagatattataaatgttggaattttaccaattgctacactcacttctacacaaaaagttggcccagttagaaacaaaaataccaataagtacggaataccccaaaccctagctagctcttctaggtttgattagaaccttcgagagtctctctcacacacacactcgcacacatacacacacagagattagggtttttaaattcaataacacacacacacaaacacgtatagttctaagaatcaaactagaaatgaaaaagattgaaagaaaaaaatacaaacagatcaaaagaacataagatttctatcaaggttcaaccaaaagctgggctatgtccttgtcgagcttgcctcaataatactcgagttccactgtcacgactcgagccctaggttgtggcagttatgtaatatccataacttgggtggtcaaaggtcccactttgacccttgtaggaagataaagcttacaaatgatcctttaatttatattacaaaatactaatttaaaattaatggattaactcttatattaataagaaaatattagtaacaaaattaggaccacttatcaatataaaagaacaataatatccccacagttatgtaatcaccgaatagctagatttaataagtcaataaaagaccaaaataatacctagcatccatcattcctcatttctaactagtacacagctaatttaagtcatccagactatccatttcagcttaaatacaaatttagtttcattagaagactaaagagtagaataagactaaactaataacgactttcttcctcaacggtaccatccacatccacta

SEQ ID NO: 383828 - DNA, 1407 bp, Cannabis indica
aaaaaaattagtagtaattgttattatatgttttgctagaatgaaagtgtttcttgattccctggctttcgttgtgtagtagttttttcttagcatttatgtatagttagcgtacagagaattgtgttcatcggaaactatgagccagaggtttttcgtacatcaactaatgagttcaacttgacttaggtgcatgacgatcctttgaatgcgcccgttgatggtccaactcaatgggtaggtttattttgtgtgtatataaaggcatgtttttatgggaatatctgtgtttttttttctaagtaaactgatttctattttctgattttgacaaaaaaaaaaaaaatagccattgcgccatttggaggaacttcttcgagagcttgtggcaattgcagtaagttcattgctttacttaatatttggattggtttgcgtcttggagtgtgtcaaattgttgttagtctataactggaagtggtgcacttttaattcatatggaatcaagtctaactataaacgttgtaaacaccaaaagatttatagtaactttctcgatgaggtatattcttgagattttttaaccataagtgtaacttattaagaaatctttcactcccatatcatgagaaatggtcttctaagttagttcagaaacttgtcagcaggtcttcgtggatgattatgctaatgatctaaataatttttggttagtattgcaatattatttttacataacgaaaacggtaaatggattttgttaagttcaataaaacaacagttgataaaatggagatattgttggtatattagagtataataaaatatatttaatttccttgattaccttcaaacaagaatattgaagaaaccaacaagagaatgaccttgatagttggactttggtatttttacagttgaatcatatttgacttgatattattgtctttgtttacttacagagggtgagcaaggggaagcaaccattcaatattgatcttacaccatatcgtgattgaagattttaacgagtccactttaacttttaagaaaataaacctactgttaaattattgctcatgtcatgttttgcatttacatgcattgaaattgaataatgaatattggaggattttttttatagggcctctgaaaaagaccccatcagtagggtctttaatagcctatgagcagttgacactttatttaatgaaattgtgttttgtttggacaagaaagaccggattattcagcatctttattttaatattatttctgttttttgggtagttttttcaaatgattaggtcagggttttctgtattctaatgaacacttcgtatggtacgctgtataaggatcatattgtattaaataataaataacactatgtttggataaaacaat

SEQ ID NO: 383829 - DNA, 938 bp, Cannabis indica
  modified_base (12)..(12): a, c, t, g, unknown or other
aaaaaaaaaaanaaaaaaaaaaaaacccttaaattttatgatggaacgactcatacttcttagtaaaaaaaccttactatttcctattttttaaaccacgcttctacatcctaacaaagtaaaatattgtggagtacatatataaacggattgggattagtacaaggaagactaatatttttgtacaacatagacaatgccaaaaatggcagttaaaatatcaacctcgctcgacaaacgatcgagtaaatggcaaaggaagacgacgaagcctagggaagaggcattaatcttttttattttatttttatcattgtttaaaatttaaacctcaaaataatacccataaaatacaatgttttggtcagtgggctagggattgaggaatgggttgatttgtttgcattgggttcgtggctgcaccaaagatatattggtggcaagcattgattgaagttttgtatatttagtgtttcgaaattaatttattgtattggaattagttatttgttgttttgttttaatgcgtaattggtacatcagtgtttgattttattctcaattgtggcgccgcaagtaatcgaaaaattcactgttaatgttatttgcaatgatatatttttgcaaatttgtcgccgcaaaaaatcatgggaaatgatattatttgtcgcatttttttgcgatggcaatcttgatccgtccccaggttgagatgactattccaaataatcacggggtgggtggaccatcaataggatctctagcatgcatatcttgcaccattgaatcgattcagccgatgtcatgggttaggcaggggatgcttgtttctagacaagtgctcgatgtatcattttgataacttgccatcacagtagatatcactactacaatatgggtctttagcctttcttttttttaactcattttataaaaag

SEQ ID NO: 383830 - DNA, 1562 bp, Cannabis indica
gaacttgattcgacaaacttattgtagtaaaggtttcgtttacaatcggtggctggtttaaactccaataagaccatgaaacttaacgggcagattagtgaatgcggtgtggtggttctcattgacctcggagcaacacaattctaattcccaattgttggtggacatgctcaagattcctatcaccaagaccagccattgcggagttacaatgggtaatggagactctatgaagaatgaagggatcagtaaagatgtcaatattcattttcaaggagtagaaatttgggatgactttttacccctaaaattgggaagtgcagatgtcattttggggctgcaatggttaactactctagggatgactcacacggattggaagctccaaacaatgcaattccaagttggaacaccgcaagttacaatctgaggagacccttctcttgagaaaagccttgattcgctaaaaaatgtctaagatcatgaatgccgagaaaaatggcctcatggttgagtttcattacgtagaccaagatgggcaatcgctgctagctcaattcctaacttcattcagcctacattatcaaagcatgaggttgtttcttctagcctagttgcttgactccaagtcaatccctaaagtccacacccatcaaagcattatatggtcgagctccaccacctatattgccttactaaaaggggatagtagctgtttcgcctattgaggagttgctacaggctgaacccgaacaagtcctccaataccactttaaagcagttggtgttctagcagcttccgatgttttgattaaatgggacctccctacctgactttgaggctacatgggagacttactcagctattgatgcacgatttccagcctttaaccttgaggacaaggtgaaggttttaggaggcgatgttgataagctccttgtttgatgtgtctaccaaaggaggaaaagccataaagaccttgcataaattttattacagcagtttattaagttttaagtctttgttttaattgtttttggctgagttgttctttttgttttgggttagtagcttttaattaagttggtgatacggtaagctttattctctataaatagaaaattagaactcagtttcagataggtggaaagagtttagaattgagagcaatctcatgagagaaatccagccctcttgaaaagttagaatagaagaaaagcctctcgaatagctattttgtgtaattctattaataaaagcattctggtgggaaatcaatatttgtgtctgaattctttgttagattatttctagtctaagaaaaagtactatcataacagcagaaaagtagtaatataaatatatatatatatattaacgagtttaaaatagcaacagaagttaaaagataatccaaagaagaaagaaataccatcttagatttcctaacttcaaaaaaccctctttgatcatatacataaaacgaccaggtgttgctataaggacatctactccttgttgtaaattttcaagttgagtttttctgccgaaaaccacctgt

SEQ ID NO: 383831 - DNA, 1702 bp, Cannabis indica
tatcatatacattaacactaaaaaaaaaaagtacaatcaaaagtatacttaaaacaataaaataacataatatataacctaaaaatataaagaagaaataaaaaagtttctttaataatagtcaatcctttttttgtaaaaaaagaggcaaaaaaaaatatatgtttctcacatattaaaatggttatttttatatttttatatatgtgtaaaaattctataataaattttttaataaaaaagtaactcattgatatcttatttatatcaaaagtaactaaatagttgcttttttaaaaactttcaaaaagcgaaaatttctagaaacaatatttttttagttttttctatttccggtagttattttgaatttcggtatatatgctgatgtagcataacggtatttctacaaataattttcttaaaggtatttttataaataaaaccaattttaggtataatattgaaaaaacccctttaacctttttatctttcccatttttttgtaggctttacctgtattcatttattgggcctttcttatgtttctaacaccatgggcctcttgttgacacactgaaattttccccaaacataccgccagacagtatttttgtaaaaaaaaaaaaaaaaagtcaatataccatgtaaatttctcttaataagaaaaattacatcactttaaatttctaaatattgccactaataaataaaaaatagattagttatgacttgtgagttttacaaaagataaaatatgtgagaacgataagggagagcatcgttcatgccctttgcacaatatctcactttttttaatattcacttgtcgttttataatttagtgttttattttccagaaaatggaaaagaaagtgataagagctgaagccatcccgaccgacaatagtgtaaggtgagtgggtgatgatcataactagtctctctctcacacacacaagagaaaaagtgatatgcgccaattttaaggaactccgtgaaccaaccacacgcgcacttacatcgtaacaggttggcgttacaataaataaataaaaaagtcattttacttgaattgatattttggtgagagaacaaataataaaaatgttattgaattgatgatgatgactagtgagtgagtaggtcgtactagtagtgatatatatttatatatttttttttggattaaacatgtagtagtgatatagtattaaattgatggtctgcgaatgtatttaaaatactgacattatataatatccactgccactgctagaagctattatagctaccaagctagttattgtacgttgtgtgtgtgtgcccttattgctgctcatcgtcagcgtctttttagggttcaattcttacctctttgacgtgcaattcttgattctactctaataatctactgctcttctcttcccatcaactaaccccatcgccacgtccatttaaaagcccacccaccaacccaaatccaaatccaaacccaagcccaatctagctaatatcaaaatatttggtcttttctacacccatctctcacttcgtaactatctgtctctaatgttcaaattgtggaaagtcagctctctgtctctctcctcataataaactgctatcttttaattatgctcaaagtatttttttttaaatattctataagaataaaataaaaaaaaaaaccaatataaaa

SEQ ID NO: 383832 - DNA, 2862 bp, Cannabis indica
aatcaaatcatatttacagaaatattattattaagcgtactttataatgatttaattaataatttttttccctcataataataaatatgtgtggttataaactataaaaaaaattaattaaagcgacttattatataaagggaagaaaaaaatagttgttaaaaaaataggattttaaatttaaaaagagaaacttttttctttttataaaaagaatcagaaagaatttttttaagcatataattttgttggatcatgaatgaatattttaacattaaaatcaactaagttgtgaatatttttttgtttacaatatatttaaatttagttaaataaaagtctaataacgtctttcattttttttattttggagcccgaaaaatgtggacgctagcctgtctatgctagagctggacccttgatatgatagttaaatcaatttataatataaaatttgtacactgtttttatttttcaggagatcattaatatgtaaatgttaatagctctttctcctttttataacatataattatattttcagttaatgttcagcaccgatggatacgcatttcctgaaacatattacttaggtgtgttaaatttgacagttattttactgctataattatttaattagcttgtatggattatcattttcataatctgacttgtcgttttaggtgctaaaaaatcacgtgaagtcatcttttctgtcctacgtgattcttgtattgatggagatcttgatattcatgaggctattcaagctgctaaagacatatttgctgaaaattctattcggctttacaaacttaagctactgtaaaatcttttgggtcaacaaatactatgtcatctacacctacaaaaactaatattgaactcagtggcatcacattagttcgtgtgatatgggttgatcttgcaggacaacaacgttgccgtgtgagttttccatatttagtatctttttctctgtttttcgaattccatattttctttgtctctactttgttttttctttctagctagtaatgtttctaagctctcaccaacattattgaatgaacaaaaacaataattaatgttgccataatgccattactgtaataggttgtgccttcaccacactttcagaatgtggttcagaggaatggtgtcagtttgcctgttcttttaatgggaaatccttcatttggtgttcctatcttagaaaattcgtggactgactgcagttggtcaggtcagattggtgcctgatttatcaacaagaagaataattccctggtacaaaatatctattttttttacatattactaaatgagtaaggtcttcaaaatagactacatgtttgaaacttgattagaatcagtagaccagatgtacgaaattttaacatcttttcttatagggaaactcgagaagaaatggttttggctgacatgtgtctgaaacctggtgaaccatgggaatattgcccaagagaagccttgcgaagggtttcaaaaattttgaaagaagaatttaactttgtatgtattacaacttgggtaacatacgaaagaaagcactaattagaatatttctattttgtttttgatcttgaatggattttttccaggtaatgaatgcaggatttgagatcgagttttatttgttgaagagtgtactgaggtttgagattaaacttttcttgcttagtcatatatttatttaaaggaatttcttgagattattgttaatatttgtttgttaatgaactttgctagggaagggaaagaagaatgggtgccaattgattcaacttcatacggctcaacatcatcttatgatgctgtttctcctatattccaagagattgtgtctgccctccattctttgaatattgcagtggaacaggtgcatatgttattattctctattcccaatattccttcctttactaagggctataggaaaggctttacaaaaaattctctttttttttatttattctcaattggtacgtacgtatttccctttttgtaggtacatgcagaaactgggaaaggtcaatttgaggttgttttgggctacggaccatgcaccatttctgctgataacatagtttatgcacgtgaaactatcaagtccattgcaagaaaacatgggttattggcaacttttatgcccaagtacgtttcgtcttccaatcttacaaattgtgcatacatgtatagcaacctgtagagcaattatttactcatatgtttcattgatggaagaattagagcgattctttctaatttcttttggtctatggagatttgtttcccattaaataaataagttggagttttagtaacaaattggtggtttttggtcttactctaggtattcaatgaaacagcctggctctgggtcccatgtacatgtgagtttgtttcaggatggaaaaaatgtcttcatgggatcatctgcgtatggaatgtccaaagctggacaggaattcttggccggtgttctatctcatctccctcgacttttggcatttttagcaccaaatccaaataggttccaaaattaattttcataacttagtatgtatgcatgcaaatacaagtatttcattgtacttttaatagttgaacatgtttgttatgtagctatgatcggttacaatgcaatacatggaagggaggataccaatgttggggaagagagaacaaatatgttgcactgagagctgcatctccacctggatttccagatggtatggtgagtaactttgagattaatgcatttgatggatgtgctaatccacacataggcttggctgcaatacttgctgctggcattgatgggcttcggaaacatct

SEQ ID NO: 383833 - DNA, 1942 bp, Cannabis indica
tggtttgtctcaaatgtctttcttagtgatacgggttttatgttttggaaaaatacaggtgagtaacttgataaactgtggtgtctatgtctttactcctgagatctttactgcaattcaagatgtttccactcacagggaagacagaggtgagtcttcttttagttgtttgtattatttactggtacttgatatcagaagagttcacagtgtattggctctcaaaattcaagatccggaaccatctaaattatcgtttgtttattaaaggttacacttcttttagcttaatttggcacagtcatttagttcatgcatcaaaattcgttaggaattaatggaaaagggcatgcataatgtttccttactcggaaggatgcatctcaaaattacaaaagatagtacattgcaataagctacatatgtgctgttttgatttatcattttgctacagtagtcagtatttgatcttttaatgggggaaaatgaattcttgtttgcaagtctttgatttacattttctccaaatgcagctaatttacgacgtgtttcaagccttgaagccctccaatctgcaacaaggttagctcttaacttaaaagaaaaaaatggtatcaacagctgttactgtcaaatgcacttcaatattatacatcaacaaacagttccactactttcatactgatacacatttctttcagccggacctttcccactgattttgtgagattggatcaagatattttgtctcccctcgctgggaagaagcaattatacacatatgagaccatggatttctgggaacagatcaaaactccagggtagagtgattatgcatcaattcttcatttgaatcattttttgttttgtcttgacctaatctgatgttgaaattacaggatgtctttgaagtgttcggctttgtatcttgctcaattccgacttacaactcccattttggccggtggagatggtattaagagtgctatgattatcggtgatgtttatattcatccatcagcaaaagtacatccaactgcaaaggtaatttcatcacatatagtattcaacctctaccttttgacctcaacagattcatagtctgcttgtatagtcacatgttttttcttttaatatatggttctctttctttctacagatcggtcccaacgtctccatttcagcaaatgttcgggttggtgcaggagtaagacttatcagttgcatcatcttagatgatgttgaaattaaggtacgaaagtctatgcacataaagcttttatgacctcaacttgatttatatagttataaaaaaataaattttatgtttcatccaacaggaaaatgctgtagttattcattctattgttggctggaagtcgtctcttggaaaatggtcgcgtgtccaggcaagtacatcgatatcatcttgtagccattacttttctaagacttcaaatattggactctacatagaaaacttagattgaagggaatgtgcgaaatccaatatagacataaacccagtgattttgtgtggctgataaaatttgactttgggtaaatagcggcgtaagtactcaaagttttgagtttgcaagcggcataaatctaatgatttttttagcggcataagtacataatgtttgtaaaattgtaattttcctccagtatcataatacggactctgatattgtcttaagcatgacacatacaaggcccaaattttagatttttgaatttggacggaaacatgtagtattagttactttcaaatcttcttttgattaattcaaaacggagtctgtactggtgaaaattataattttacaaacattgagtacttatgccgcttacaaagtcaaaacttttattccgctatttaccctttgattttggggggttttgaagcatcttgtaccagtttcaaacactttaaaac

SEQ ID NO: 383834 - DNA, 1365 bp, Cannabis indica
gatcagcagatcacgaccccaaatgcttacacaccatgcatgtgaggatggacttatacccaaacgagcttgcatgaagccactatcccatcttacaattcctaagcccaacaaattagtaagggatgattccaatcagaagagacattcaattgcaagtgtttattatcaagtgataaatccagatgatacaaccttgagagctttgagaaaaatactttagaaatcacaccttctagctagtgagttcatagatcaatgtatatgttaagggaagtccaatttttaaagattcttggaatgatatcaccttgtattaatttgattataagaaagatatcaattaatgtatgttaaagtagttgtcaaatttccaaaattatgtagaaaggaatgtaacaagttatcagcaagattaagatggacaaggtttggcatattacaaattaaaaggaaaataaaattctcttttgtttatttttaaatcatgaaaattgaaaatgtagataatattacaaattgaaaagtagaatcgatcattggatttcttgaattgaatggatgtcataattttgaacattcagtgagatttctgttgggaacattagttgtccaagtgaaacatcactaaaacgtttggctaacaatgttttaggagcaagaagttgctgagaaaccaacttcattgttggtcgacaatttggtttggcatttagacatgcaaaccctagcatagcaataagaacaatatcaccttcaataagtctatttcttggtggtgaggggcgattgtctattatttcactcaataaggtgtgttgaatagatgatgaagaagaagatgacattaatttggataaaagatctcccggatgcttacccattaatgtttctagcaccactacaccatcatcatattaatgctacttgatgatgatgatgattctgtgctaacaagcaaaatcaccaaaaacacaaccattttatgagaaaatgatctatccatattatatttctggcaagaataataattaagatatgtaataatgagatgatataaataaacaatctcttcaaggtcttataactatgtgtgagtgtgttatgaagacttggagaatgtaaaacaaacacggcatgaattaattacaaaattagtgtcactatcaaaacaaacttcaagtcatggtgtgtgttttatgaagtcttatatatatatgaacaggaaactctttaggtgatagtatcattttttgctttcacttataaaaatataaatacaaatatatataatgttagtaacttatattagtatttttaaaattgaatttttgtttttttaatcaaaattagagaaatctttta

SEQ ID NO: 383835 - DNA, 2602 bp, Cannabis indica
agagagagagggatcacttacttgggtacaatctcaacattgggatccaagccatgattttctgaccttgaagcgacaaaaatacaagtttcaggggaaacaaactactcataacaatgaacttagaaaaactgaaaaaaaaaaaaaaacaagtacctttgactgggtaagttaataggctttggaacaaccactttccccagtacagtcaagccacctcttttgcccgtggtagagggagcccatctgcaacaaaattgccaaaaacacacaaaaatgatgacaaattagcaagaatgaacatgatgccattgcagaacaacatgtatatttatgaacacctcaaacatagtattcatctcctagaactcaaaatttcctataatatttaattttactttcagttttatatttgctgtcaatatgaaaactggtggtgatcaactcttcctggacattcagagctcagccattaacacgagcaatgccaatttttcaaatttcttagttctcagttctcacccattaacacagataccacactagaaaataaagatccgtacataaaaaagcagaaattcaagccaccaataccaataatttgagcaagtgaagaacccaaaaggaagagaaagtcataccttcgatctccagacaacatacttgatgtcatatttcaactgtccttgcagggtcattcaaacaaatttcaggcaacctggaaagaaaaaaataaaaattaagactatggaaataggttacacaacagacacccaaccacttgaacaaaactaaaaggtgtgcccatcttatgaagacacacacataccagtattttagtacatggataaactagaaggcataaagtatatcaaagctgctttttttcattcaaagtttaaccctttcagcctcggccaaaaaaattagcaattcacattcttctactcactagtttggatgacttcccgtttccttagatactataagcaaacaacccgtcttttgttatcacctattactgagtatattccatctaatgacttctctcaactaacaaattgattcggagattattatgttcgctttattcttacttattattctaatattaacaggctcaccaaaagaaagtaggaaacaaataagaagaaaaaagataaatatattataaacaaaaacaacctagattactaactttgatcaatctgtcaaatctacaaccaaaaatttagaagcccagttcatgaggtgctaaagacataggaatgtactctttgaaatcaaaaggaggcaaataaaatcagcaatacaaaatatttgaacacataatcttaaaacaaaacagcaatagtgggtaacgatcgtttcctattggattgaaaataaaaaaaaaaaattccacaggaacccaacccaattactccaaaactgaaatgcaatcttttcttataaaataataaaagaaaatgtccttgcataaaacttcagcggcgaaatatagatatacctcgccaataaatacacttccacgaaatatatacaaattagttatagcttcctagaaaaatccaaaccacgcttaacagtaaaacaacacagaaataaagcttaaatcttgaaatacaatacaataaccctaagattatcagagaacgatcgataaacctaaccaccccgtttgcttgtgtagaaaaacaaaatcttgcagtatacataaatgaaaatacattgagttccaaatgcaaattccttttattattattattaatttgtttctgttccatatttgaaccattcacacttttctcaggaaccaatcaccgttttaataaacaaaaaaatattaaaattaataaataaatatagcttcagcggatgagattgacttgcctgagatgataatggttcgcggtttcaactttcaagcctatgatgaataaaaaaatagggagggtttttggataggaagaaaacagagaggtgaaaaagcgatcgaaaccagggggagagagaaaaagagaaggagggagataagggttggggttagagagatcgctaggaagatttaagagaaggaagatctctgttcgagttcaaaacgacgtagtttcagagttttgggtttcagatcgaagaaaaaagaaagaacgaaaaaacgagaaagagagagaaagctcccctaatagagttaaagatgtacgaattgccctccaaacactaatataggtatttttcaacatatattatttttatattattcaaaaataatgaatggataataacaaaaaaaaaaaatacaaaacaacatataatttctatgttattttttttaatttaaatttaaacccattatatatatattttttactttaaaaaatacattatacatattaaaaaatacatttttatattattattattattattattattgaaaataatctttattagacaaaaacatcctctaatacaaaggcctgaagagcgatgggagcattgctctcagtaaaacgacgacctgtccaataataagcaccacgtgtcatacagtgcgcgactttgtttgcagaccgtttaacatgatcaataaaaacattac

SEQ ID NO: 383836 - DNA, 2284 bp, Cannabis indica
aaaaaaaaaaaaaagacctttcattcatatttatttagagagagaaaaaaggaaaaatattggaaagttgtgaatctagaatttgaacttttaaaatgaaaatctaaggaagtcttcatcctggatctccacttgaaagaataagaaaaaatttacaaatgttcaagtcgtacttctatatctctccatccttaaagaagagaaatagccaagttgtcaaaatgcccagactgcataattgactttaccacactacttgatttaacaagcgaaactaaattgttaaaggctaagggttaaaaaaccaacatgtcaataacctattttccagttttcttcaaaaggcacatgcaacacaatacgaatcaggtgagtaaaaatatagagagctttgtttatacttgatctgcagtaattaacagtgttggctcgacatcatttatgtagtcaccagtggggatccttggaaggatggctgccgcctgagaagaagtttccaccaggtaagtgccaaccacagttacactaccaccacgctagtagtgcttggaaagagcaataatatgattgcattagtataaaaatacaaagacaaggcagctaactgtagagctaggaccctaacaaatacccagtatatttactaccaactaaacgggtagcaaaggagcacaaacgctacttgaagcagcttagtttcgggccaaaaaacaattttctgaaataccaaactaggaaaaaatgatcatagatagtttgtcaattgaggatatgtacatatatttttgatagtgtataaaatttttttttaattaaatagctaaaataagcatagaaactcaaattttccttttaatattggtcattggatcaaattgtaatggtttaataataaatgaaaaaactcacacaatgaataggacatgcttcttgatcacttgtggttttttcaaaataataaccatattatattattaattgttagaatagatatcaaatcagtgagtgtcaatatctatatttgtttattttagcattactgattgagcaaaaacgtattacattctccatccataaatggccctaagtgacaccatctttttttttttggtgaaatcaggggcaccatcttttgatatgcctaaaatgaagattaaaagacatactgtatccgctgcaatcaataatgttggcgtgtcatccttgttttgattatgcaaagattctaattttgatatgatggcttctgcctgagtgagtaattgatttgtaatcaaaggaaaatacttgaactcaagcacccaaaacagagaaagtagactccccataaaaaaaaaattaaataaataaataaataaataaataactagagttttaccaatcggcactaacttatcaaatcaacatgaaactatcaaacttaaaatctgaccttggcctcagcaagagccacaaccaactcttctggaatctcctttcggatactcttttcatcaatgtctgcagtctacaattagaaacacttaaagttctcagaaaattcgaaaacaaaaaaataaaaattcagaaattttaccatgattgtaaaatcgtatcccatctcagccaatattttccgacgtgctactgaagatgatcccaaaattatctgcacagcattaacgccagttacttcgaaaattcatgtggtagtagagatattgaactatcaatcaaacagaaaacttgataatctcccgatcttccaaagaagtacgtacatcattcctttcagaagtttacataggagagaaggaataaaccctaataaccaagagagaaaaacactaccttaaagggagaagcattggccgccatgattatccggaaactttgcaaatttaaacttcgagcttagaattaaacccagaaccctattaagcgcctcttctgtaaagttgtgcccttgaatttagttatttaaacttcacttttcttatttcaaacaccatttaaatcttaccgttaaataccaatggtaattgtcaatactaactgtaattaccaataccaactgtaattgccaatatgtgcaccaagtaggatatggacgggaacgattttcaatccccgaatattaaacgggacaagataacatcttcaatagtagatgttaaaaacttatatattatctaaaaatataatattttattatttttgacaatcttacttctaaaaatactttaatatatagtactttttaaaaatattataattatgaactcacacattattatttaatata

SEQ ID NO: 383837 - DNA, 3133 bp, Cannabis indica
tgattacatagtgacatcatcatgtatgtatgaggtatgaacaagtaaataaattttgtaaaattgttttttttaaaaaataaaaatgttaaaataccatgtaaaggtatgtttaaaataaatattattttccaaggccatttttctcctgtaacagccgaagcaatgggaatcgtgaggctctaagttgggtcaaggcgagacaatggatgaatgtaatacttgaaaccaattgcctcacagtaattcaagccttacgaagcccaattaacatggtttccatgtttggtcaaaattgttaaagcttgtaaggagatgtttaaagatctaaaaaatgttgttatttattttgttagacgatcagctaatatggtggctcataactttgttagagcctctatattatatcctgattgcagtttcagtttagagtttgtcccaactaattttttacctagtttagtaacagagatggtgatttaataaagttattatttccattcaaaaaaataaatattattttatgtttttttatgtaaaaattacattaaattattattagccaaaatagatatattaattaattattaataattaataattaattttcgtaatactttatttttcactatattacttgtttcaatttcaattacgtatacgaatttttcacaacataaaccatcaatacatttacatattaagatgaaaattgagactttaattagtctaaaaagaaaaccagttccctgttcttttattttatttagttgaccataataataaaattattataatatttaatgttaaaactcacacttgaaaggagtaaagattggcaagtctaacttttggaggaccattcacttgtaaccttctctccccaaactacaaactatcatatgaattatttttatatgaatgatcattaatctttcaatatatattgaatttggtacctaactatatataattatatatatatattattatatatgatagggtgaattattgttgcctctttttgaaattttgacattactttagaaaaactagcattattttagtagattctctccaaaagaaattccacccaacctataattataactattactaatactattactatatatgaatataatcaagacaatgatcaagtgagaattggccatggtaggactaggagatatacatttatattataataattataattgtaacaaccaacgatgttaattgaactatactgtactagtgatctagacatttttaattggaattttatataattagtggcaactaaagaaatattattaggtttttgtttggttggttatatatgaaatgaaaagtaatgacatataaaaagtagaaggaataatatctagtctttggtgtgtgaaagttatggtgtaataattagaattgtgtttggaaagttactctgtaatttaatttgtatgtaattggagatagttacataatttagcatatttgtttataggtaattgaggagttctaattctcatggctctcatgagaattgagtataattatactgtataattactaatttaaatagtatttttctgtataattatactaactattttgctaaatcaaatattaagaattcatatataattaatatctcatatccaaacacatatttattttaaaatatagtgtaattattaaattatatatatcatcttaataattacactgttacttccgaacatactcttttatttgaaaattataatattttgcaattatatcgaattcttataaggttatgtgaattaatgaatgtaaatgagactcttcaattaatttttttttttgtaacagtaaattttttaagttagatcaaataaatgtcattacacaaaagatgaagagattttttccatctaataactgtctatcctaagagcatgctttgccaacttttgtgccacaacattaatgttgcgactgctataagaaatttcgtgcatgaaaataatttgaaaaatcaatgaaatctaaaaatttaccttaagaagatatatgaacccgaaatttttctttgaaattaaagttcatattttacgtattttagatgtcaaaattttacatggattttttttttatttaaattatttttgaattgaaaacacgaaatttgatcgtcggaattgtatttttcgagtgggttcggggtcgcgtcagcatgacccgtatttttgtgaaacaaatcttctttggttctctcttttttgccttctttggagggttacttcggtggaaatctctgtactttttaccttttggggttttttgagtactactcatgtcgaaaatctttggttcaccagtaagtgctcaattgctacatctatttatgatttatttcatatttttggcttagtttcttctgattataaccacatgttattgttttggggtgtttagatgatatttaatgggttggattttattttatttgtagatgattctagaaagaaattttgactgttaatttttaaaatattgctatttgtaggtttaatagttcatgaatgtttggtggctaagaatattattactttgtttgatgaggtgggatttgatatttttattggattttgttataaatttttaggtttgaacttcaatctaattaatgttaaaatttaaaaataattttgtctgattttttactagctgctaatcgtaactggtttctctatgtctaatttttgtgcattaatttttaatttattcactttacgtaactagtttttatgttttgctataacgggattgtttcattctttgtagtgttttgtctactttttattttaagtttgtcttattattttttatatggtcaaagttggttttacagtttttgttatgattttgtatgagtttacaagttttgttatgatttcataggtttcattataattttgttatgattttttcatagggtcgaaattagtttcatggttcataggtacgaaactggtttctcaagttttaagggtttttgtaatgtggttgctctatttttagatgttattgtatattaatttttattttaagtttctttttattatttgtttctaggttcgaaact

SEQ ID NO: 383838 - DNA, 3014 bp, Cannabis indica
ttacaaaaaaaaaaaaaaagtcttgagagttctagctataaaatgcggaaagtaaagagagaaaataagtgagaaatctctctgcatttcattgattaggagctttatatatagctcagtcaatataaaaagtacaagctggtaataactaactactagtaactaactcactaacaacttgtttaacttcacaaactaattcaagacactcaactaatttatctaatcttgaaactccctctcaagatggatggtatatatttaccaatccaatcttgtctttaaatttcttgaactggttaggaaatagagcttcggtcaaaatatcgtaagttgttccctagttgaaatatgagcattgcactttttttcttaccaaatggcaatcaatttcaatatgctttgtccttttcatgaaagacagtctgtttagctgctatgtgttgagcagccttgctgtcatagtacatcaaagctagtctttgtgttcaatcttcaataccttaagtaaagataacaaccaaatcagctcattagtagtgtttgccataactctgtactctggtttagcaaaggatctagaaaatgtttgttgcttcttacttttcaaagatatgattaaactaccaagaaagatacaaaactcagttgtggatcttatcatgtccacacaagcagctcaatataaatctgtgtaccctttaactgaatttttaatattgtagagaagaaaattccctgaccaagagtagatttcacatattacaacattcttttagcaacttggaaatgctttcacttaggcatagataaaaattagctcaaccgcctctaaatggtataatgcaattttatacttacggtttttatcaaaaaaccgcctctaaatgtcaatttcaaaaaaacgggtattttcacactctttagcttccctttttataagtgggagtgaaaaaacagcctctaaaggccaacattgtagtagtgacttgttaactggttatgttatgtcaggccttgtaattgtcaagtattgtaactttccaattatcttcctgtacagtgtagaatcatcaagtttatcattttcatcctatgacaatttcatatttggctctataggtgtgttcactgatttgcatcctaaataacaaagatcctcaagtactgaagagcatattgtctttgagacacaaaaatacctttgctagaccttgcttgtaacaccctactagtttaggcgtgttatcataattttatattaattgtgcagctcgttgctaatcaacgagtttattaaaaatcgtgagtaattaaaattttgtttaaatacttataaataccaaaataaataacatatataaataactgggatctcgtgtataaaatatttacaactgattcaaaatatttaatacaaaagttatcgcctagtgactatacaaaatacaatcagctgtcctaaagatcgtacacttcaggtctaaccacccccgacatgatcaatcttcacccgctcgctctcacggttgctcaaccttagcttttcccttgcctacacatgcaaataataaatgtgagtcgacagactcagtaaaaaaagtataataataatcatacatgtaactgaatcacaattagacgcccatacccccaactttaatcaaatctctgcaccctaggcgctactccccgcaccctcggcaatactgagtcaagaacgttcaaacaacagcactattgatcacaatatcagcctatactcgatccgctagtcatactcttgctgtacaaatgtgatagtgtcaaatagtacttaagccaacatacattcattgatatctaatataattctaaatataataataccgctattttaatgtaatctaacaggcttaaaaaacatgtacgccaaccatgtaaacacatatgcatatcattatgctaatcttaccttatttctaaatttaggtgtgctggtcaacacaacctcaaaaaaacaaaatcaagcatcattaacaactacagaatcctaattctaaaaatcaagcacaaaacctaacttacaatttagaataaaccaagaaaattgagcttgggtgattaccttggattgaaacctacaagttcattgtggacattatcccacatagaataaatggtagagaattgagccatatataagaacatgggctactccactcattaccaattggttttgagatagaaccccatgattcttaacatggtatcaaagccatatcacttgcgggcaagtgatcctatctgatccacacctatacagatagtgaccatgtccactctgatacggttcaatatttatgagcaaaagatagccatcatcttaagggggaatattgtggacattatcccacatagaataaatggtaaagaatttagtcatatataaggacatgggctactccactcattgcaaattggttttgagattgagccctatgatttttaacaagctagaacgtcaagaattgagctaaagaaacccaacttccttactggtttattgagagatcgagagagagggttgaaggaagaaaaatgtgacttttctttctacatttgaatagatgatattgttttggtgttatctaacttaaataattgaatatattcagattataacactaagcttagtcccactaaaggacaaagaataaaatggtaaaaagataattttgcccttgcctaagccaaaaggcatccttaccacctaggggtaatttggtcaaaactaatacctcgaatattcctgacattcccaatgtatatttatatttccccactataactaaaatactaaaccgtaataaaaatgtgattccaaatgtcgcgttctaatgttgttgggcataaaacataaaaaatataaaattacatatatatagcataaataacacacctagaatttaaataaatctttataaattcataaatcatattagaaatctaatttcataattaagccctaatta

SEQ ID NO: 383839 - DNA, 3272 bp, Cannabis indica
  modified_base (3214)..(3214): a, c, t, g, unknown or other
tattattattattattcaaacaatttaatttacgcgtattattgacacgctttaatccaatagtaccaacttgcaacttaattattattgatgaaaggatgttaaaaaaaaggaaaaagaaaaataaaacttgaagcttaattattggttactttattaatgatattatctcatccatatacctttacatatagattaatcatggttaatagattaacaaccacacaatttatatgtattttattattaggattaaagctaataatatatattttagaaatcaaaaatcagacatgacaaagaatacataataagttttatatataaaaagttgtctactttcaatataaaaatattataaaaatatttatcaagctttgtttaatataaaaggactaacctccccaatttataaggaaaggtctattaatttacaatacaaggaaaaatacaaaatgttacaatctacatgtgatgatcaactagttggttatgaaagctattattattattattattattattattattattattattattatgaagatatacatatattttgtgttttctaaatgtgacaagagaaattttactttacatattttaaactatactttatattaaaatttagactctaaattaatttgcactaattaatgcattttaggctcatttggtacgttgtattaggtcgtattgtattgtattatattgaattggattatatattttatataatattatgttaaattttaatttatactaaaatattatataattaggtgctcataaaagtcaatgtcacatatagttttacataaaaatattacataaaatacaatttaatataatattatagaatacaatacgatgtaatacaatatacataaaaaataaatttctctcttcctcggcaggcttctctctccaccacccgataaacctaaatttactcaccgacccagggacagaggtagaaagtatatgtaagggaggccaaagtgcaaaaagaataatttgaaggggccattaaataaatttttaattaattaatttttagatttgtgtatattcttgaaattaattaattaaaaaaatatacttaagtttgttccataaaattaaatttttaatatttaaatgaatttttaatatatactgacaaatggcatgaattcatcataatattttgcaggtgtagagtaatgtgatgaaattgtaagaatacatacattggtttcattagatcttactccaccatataattatatatatatatatatacatacatatataaatatgtatataggatattctgatccctgtgtgtgtgcaattgatattataagaccagtgtatatgcagtactagagggatgtggagtgtgtgtgttttaactcttactctttagtccaaattaatgagaatgagttggaccatttcaaccactattcaatggtaccacaactccaataaaataaataaataacaattatctgttctctattataattaagttacttatattaagttgattttatatatgagataccaaaatgctcatacatataatatcttctttgcattattatttctgtaattgtttatggtttgctaaaaagacaagactaaaaatgttagaaaaaagagattaatagttaagtttttcaagtgctgcaactgtcccacatactttattgaaatggcatatgcactaaagagttattttgaagtatattataatatttatatatcccaattttggaattacaccaataattatttttttaaaatattttcaatgaaatatatagtatcatttctcaactaaaatatccaatctgtgaaaatatcaaccaaataagtcatcattattataagcattttagtctttacaaatatctacaaaaacatgattcatgattggtagaatatttcattttttattataaacatattcataaataaattagcaaaagctccatcaaaatagagcacactaagagcactcacatgagttttttaactctattttttgatgtatgtcattttttctatattctcttctctattttaaagaaaaactttttttaattaaaggagctaaagcattcctaataatttctcttctctatccttaaaataaattacaaaaaatcaattttatttatttcacaacatacttttacattacatcatccatcagtttctcgattcctttctttatattctatcttttaatatattttattcattttaaatatataatattaatatgtacctacacatacctcacacataaaaaataatttaattataaaaaataaactaattaataaaataagtttagaacaataaataattttattccacatgttagtagagcagcattagttattaccctaaaaatttatgtaaaatagatctattgtatgctatatttttgataaattttttttatgaaattaaaatatataagatcaatattaaattacacttatagtaatataattgagtggctattgtgaactattatttagaataaagcatgtttattaatatattatttaattaaattctattttatgcatctttacatataatttaactataagtgagatgtagttgatcacaacataaaaatgtagttgtggctaaattaaagtatataacatttaattaggccgcctaagatattatttagtcacaatttttctaatacaatatagtgggaaattggatgcagcaaaaattatattattatatataaattgcaaaaaaattgtatgatcttattattaatgactaactttttgatcaattgtattctaattttattatcatgactttataaaaataataattacaatttcttggtcataaatatattgtgttctaagttctaacttaaggtgaagttcctttttataattgcatgcttatttcatttttttctttacatcttttgccaaaaaaatatatataataatattctatcaaataaaaacttccaataaacataaaaaaaaaaaacaatctatgaagcactaacaaatgcttgtacatttataataaattttctttattatattagttccactgcaatattatatctcacatgtaatatcagaaaacatattgaaaaaatataattaataatagatatacataaaataaataacttttatattctgtacatgaattgccaatntaacttttgaactcaaactacataagacaatgaatattagacttctaacactaaaaaa

SEQ ID NO: 383840 - DNA, 2866 bp, Cannabis indica
tatatatatattgtgtgtaatgttgttttgtttatctataaaagctttacttatcatagcctaattaaatgtcgagttttaaataatttaatttaatttaataattattataaagtgtcgttaactattttcaagacaccagatcatcttaacaaaattatgataagaaagacatgagtacaaagtggagtttccaatttggatttggagtcctactcttggaagcttgtgctatagtttatgtatggataaatagaggttaaaaatcaatctaatagatgctatcccaaatgtcataaatttgaaggttggattggttgtgtggtggtggaattgagtagaaaatagcaagaaaatttcctagataaaatctggagtcaattaattcacattcacatccacactcaagttcatattttgtacatccattccttttgttttttctatataacaattttggttttttaaatgtttatacaagataaaatacaacacaatgaaccaacaacctgtcctgttattataactcaaatcagtgaaaaaccaactacaacttctgagaaatctctgtttttgtggaagatgatggtgatgatgatgtgaacgtaactgggtctgttggatggtctctcacaatcaagctcagcacttcaggtcttgcatagtgtccaaccacgtcaaaatcgaatttggctcttgcaatttctcccagatctgttactcattttgaccatttactcaagtcagaacacagaagctggtttttataaatatgtactaataataaatgtgcttgaaactgaatatacatgcaaggctgagattaaacagttactgtagatgtttcaagtattaaaaaacatccaatgatcacacaacataataatagttagtgcactgtgaatcaggattcgggaggcagtatatttcctagtgcaacgaaaaacgaatccagctaaatactgagtttgccatgaaaaatgaaggtcgatgataacactcgaggctagcaaaagtagttgagcaggtgtgcgtcggcaagtgattcaagtcccacacatgaattttatcaaatgagagtaccaaacaaaagttactcaaatagtccagaaattgcatttttacacaatgtgcaactatgtgagcaatgttctcatattaggagaaaaaccacagtttttcatgcacatttaaaaccagttgcacttttatatttcaaaaaaaaaatgcattaacaatttgttggtactttgcatccaacccgggtgttcgggaactcaaaattatgtaagtgagaattattaacagaagataaaagtaacatacctagatctgctgagattagtgcctctccatcataattaggccctcccagaacagttcctgatggagaaataatgacacttcctccagagcatacaactgactctgggttaaggtcctcttctgtgcctgaaaatacatactctggaggtggggggtagtccttcctccgacagaattgattggctgatagcacaaaacagccaccttcaactgcaatgtgtgtcattgatgcttgccacacatccctcgaatcagctgttggtgcacaatatatctcgatccctacaaccaataaagttcccataagttcgaactttattatttgtagcatagtctgaaactctacatgctagtaaactttattttgcaaatagtagacaattatctgcaagaaatcagacaccttcaattcaaatcataccagataataaataaaattattgctgcagagcataacaccaagcatcgaaacacatgaacaaggacgtaaacatgcttagcgaaacaatacagagatgttgtaagctacggagaacttaattatcaacttttacagtaaagataacagactctttatgctagttcatcctcaataattaatggccaggccctgtgaggatatttgactattagtaacccatttgttaacttagcccagcttggtttgagctgtaaacctctcacacaaaacacacacccaaccaattgttccaccttaatctcacaaacagaaagagaatttacaagaatacattgggttaaaattattgaacaccagtgtttctaacctttggcatacattgctgtccttagaagcggcatcttgttttcccaacaaatagcagcaccaatttttccaattggtgtatcgaaaacaggaattgttgatccatctccgaagccccatatgattctctccaaagctgttggcatgagtttccggtgctttcccaggtaatgaccttgagcatcaaaaaatagtacagtacaatagagtgtatacccatctctttctatcacgcccattaccaaatataccttgtacttcccagccattgcagccaatcggtcaacttcagggcctgcaatatacccaaaaaaattaaggaaaaatctacataccaacaccaagtgactagtgaaaaatttagttctcaaacattatcaagaatgacaccaactaacatataaagatcaactctagcttaaatttaatactgtcaaatgcagagcagaaaattaaaatcttggcttatctggcgacattaagagcaattaaaatccataagtaggccgagtcgctcacaagaggttaagggaaatgtttaacatgttggaaaagatgaaaatatgggcaagtatacaaattatgcagttaagatctttgcttattggaggtgtgatgtaccatgttatctcaattcagtagcaagaaaattaaagaacaatagaacagtgaagaaatgagtaaatatctctgttgagtgttattgaattaaaaggaaaatggttacaagcttagagccctataggacccctg

SEQ ID NO: 383841 - DNA, 3299 bp, Cannabis indica
gagaattcaacccttaatctaaatagattgtcgggtatttatagtgtttacatgaattatattttgtttctctttttctttctgatagagtgtttacatgaaaatacataaagtatggctcttttgtgaggcccagtccctaaaaggattgatgcgcgaactagaaagataggacacgatcaagttgtcaatactgtgtcccataattgtagccaattaattatgaattattttttttatctccattttaagtaatttctctttttagcttgatacgatcttctatccgagatttgaggagagttaattccttattctatgcgctcagataaaaagagaaacttgactagtcttccagaaacacgctatctggccttctggaatcacggtaccggaactccttctggatacgggctgtcattagcgaaagcttatctaagcatggagctacgataccttcctggaaggtcttgtctgacttgggcttgacccaagttatcttctttggacccactagtgagctttagatattgatctgaaatacaaagtctttattatatacataaattagtacaattttttttttttatgaatcaagtgaatttcattgcttaaaactatttgtacaaacaaatagcattctccgaaacaaggagaacctatacaaaaataatctttacaaggtatctaaccattcttaatggttgctttctttggccatgtacatgtaattctttttttaaaaaaaattcttttactttgctcactatactatctatgcttagtattgagttttgccacaaaatattattttagcacgccaaatgctataaataagagctgcaatgacaacagccaacatcatcttttttaccttgctaatcttggctttttggatcaacctgactatttgatgaagggtgttagtagtcatcctccaagtgagccaatctttgatatcccacagagaagggacaatcaaagaagagatgctgtattgtttcttcttcgacattgcagaaaaaacactttgtgttatagacagttttatacatctgcactctatcctttgtcttgagtctatttagcatggtgagccaaaaaatgaaactatgcttgggcaagttcattcggctccatactatagaactccactctactttgctagtgggaggccgaagaacatgaaaaccaacaaccactttgtagctgtcatttgaagcttgattcaagtcaaaaaagctttcttgctctatcctttatagctaccattttgtgctaataccatttggtagctggggttgtcttgtaagatcaccaattctcctcctttatgtacacattatgcatccacttcacccatagattatcttttttttatagcaatggcccaaacatacttgaacatggctaccaagtttcaatcataaatgtttctgaaccccaagccacctgaagatttggtgtagcagattgtgttccaagcaactgcagctgaatctgtgaatacctgatttctattccacaagaagcttcgaaaaatagattcaatttccagcactttttttttttttttttggcaaaatcattattaccaaaaattattttaaaatacaaatattcatcactttatcaaaaatttattattatatattaaaaaaaaattaacattgaattgaatttctttgatgtcttaaattttttgctgaagttgtaatacatcttgagcacatgccaaaatatattatagtatgtatagagtatgatttatagataaacacacaagttcatatacaaaaaattactttgaaatataagtatattacctttattaaaaatatattgagatgatattacctttgagacttgagtttttattcataatcacttttaggcttgtattgaaaaatcacaattctaaagagaaaatttaaatgtatgaagacaattataacatagtataaaaatcactaaactcatgtttaagaacaatcacatgcaagagtaaaaaatataatcctaaaataacaaaactaatatataaaaagatgaatatgttacatgaaaaatggaagaagatgaatatatatatgttaatggaaaagatgatgaatttgattcatgcatagataataatttatttttttaatacttttttttatgtatatataataattatagtgttattaaattatggtaatgagaatggatgatatatgtcttacatttttgctaccaggacagagggaaatattcctagcagcccactaatggctaatcttaatatctgtaacactcgaatgtccgaataggttaatcgacaggatgtttgatcaagatacagacatatatgtaccgagcaaggtgtatgagttggcaattttagagatcgatctcgtcgcttccaagacacgaagataatccctatattcgtgggattgagttaaagaataaatgcaatacaccttagtttcttattctttacattgtaattatagaattaatgtagtttcctattttatcattatgaattaacggaaactattcttcatgtattaaggtcctataaatagtggcataatctcactattgagagggacgaaagaattaatccggagaaacacactcaagagagaaaataactcagagatcaattgtaagagctctagagaggaagaacactttattctttctctcaagttagtacaaatacaaggggagtagactattaccattcttacggggtcgaaccttttttaaatttggtattctctttactttaccgttttttatttctattacttattttatctaatcgctttatcttgacttactgtcgttgttttgagagagtcattttaatccaagttactctttggtgtactattttgcaattttagtaattttggtgtgcatttggatgacataataactttattgtttatatttttaggagtagttttatctcatgtggcttgtgataaaactcagcaatatataatttgacaaaatgacttttcggttagataataaattatctggacaaaaaagaagcatgcgcttcatcgttaaatttttgggtgaatctaaccacctcttgtaaaaaaaaaatacgacttaataaataaaaattggtagtatttaaatttgtaatatattatctatcatataagaatattatttttttgacgttgatttcattgttcttgctccatctcgttggaattaatgattttttttgggtgttctcgtgttgcgtggtggttctatacgtgtgtgtggaagatggaggctataaa

SEQ ID NO: 383842 - DNA, 659 bp, Cannabis indica
tcttttttctttttcaagttgtaatgtaatgtgaatttgtgtgcgtcagtattgctctttcaattataattattccaagatatatgttccctgttttatataataccaatcgaataatgttcaaataattaacttattgtatttgtttaaaatattacatgtatatcaaatatatatagagagagaagactatataaatggaaaatacaaatttgagctatatatatatatatttttcgtcaacatcagtttgagctctatatatattaattaaacaaggaggagagatattagattcgatttgactcgactcgactctactctttccctccaatattattacattaagcttttgtaatagtgatatatattcatcattaactagttatcaagatacacattgattatatatttcagtctttcagaataagtatatatatatatataattaatatttttacgaaaaatgatcgggtgcatttgctttgtttaggcttattataatgtaggttgtaatgatttcacactacatcttaacgagaaaatttagttttagagcacgtagtaggtaatattaatatagagttagatgttttggaaaattctttatcgtttggcatctaaaaactttttttctttttcataattgtgtatgttat

SEQ ID NO: 383843 - DNA, 1733 bp, Cannabis indica
aaaaaattatacataaaaatgtaataaatatttgatatattaagttttgaaatatatttgtattatattggatttttaaattactattttctttacattaaaacgaattaattgttttttttttttatataaatatgtgtggattggatcgattatttttacatgtcaatcaacatccaattcgcacaagtgcggattttgaattttctaatctaatcaaatccatacaagtgcgaatatccgcactttacgaattagattggattgaattgtgcggattgaattagatttgatcctataaattggattggatcgtacaaattggattgaatcagctattttataaacactcctaataaaaagtaccaaatgtgtagataaccagctataggtaattgccttttatcttttctcaaactcaagttgattttaggatttgaattttgttgcaatgaatatttgttgtgtattgctttgttattagaaaactattagttgattatatgtttatgtacataaatagttaattatagttggatttcttaagacttttggattgttgtagccagagataattttagaactcttttttttagtgtagccttagtggcttgataattttagaactctgccatgtttatttatttatttttgggtaaaacgtggacttcattgaacttaaggagaccaagcttggtcattaagattatatataatatactatatataaatttagtgcgttgtgtgacttgttaggagttgaattttattatttggaaaattatgatataatactagtgagaatcaatggtaatggtaaagtaattatttttaatatttgtttacttattattgttaaaattaaaaaagaatgagaatacttcttctactaattttatataaagaatactatggattttatttatttttattttttaatattaaatatataataacaattttaccatttaaaacatgttttataaaataactaccatttaactcaaaaggatacgttagttaatattctattatgtttccaaacaaaataaacaagataaattactattattttattttcaaaaaaatttaataaacaatatattacaaatattaattctaattatttctaatttattttattatatttttaattaatttattttaattttaaatacgtgtcattaacttattaatatatacctccaaataatagatttaaaagtgcttatgtagtaactatgattagacctccactacaaatatgagacatgtttagctagctaactcaataatttcgcatattaaaatattatgcgttggttttgtttatttttatgtactaaatatataaagatcattgatattgtcatggggaaatatataggttatggttgtggttgttttatgacacttattatcgtgttcgtgtgtatttatatctataaatatatggctgtactcttaatgagtattatgcatgaatggataatattagaaaattttaaatatttaaaattaatttttctattaattaaaaaatttcacattatatacatgagattggtcgatccagcagcaaaaaaaaaaataataaaaaaaaagtttttcgataaaaaaagttgaatttgacttaaatatatttttttttctatataaatatgtttttgatatatttctttttatatccttatatattaaaaatgtctatctaacggtatttcttggttaga

SEQ ID NO: 383844 - DNA, 2242 bp, Cannabis indica
aaataaactctaacagcaatagaatttttgataacggatcttttaagtgaaatcgattgacaatgactttaatttaaatatgacttaatttgctagtgcccatcatcagttattattgtttaattttttgttctcttaatcaatcatatattaaaatttaaagtactattttatgtgtaggtttacaaaggaatggaaaaagttgcagactgaggtggattaattatttaaggccagggttaaaaagaggcacatttagccaacatgaagaagagacaatcttaacccttcatcacatgttagggaacaagtaagcaacaaaaaccttttatttttcccattttaagttttaaatggatattttagaaaaataataataaaattaaaaggctaatttctacagtttctagatgattatgtattgtaaaacagcaagtctttgtctttttaaggggaattcgaatatgaacacaggaaaaaaataaataaaaaatagttaagtaactatataataaagcaagttttaaaattagtaccattcatattaattgtccaatcaattaaaaggttgacactaaaataataaataacatgctttatttgcagtttgattaaatttaaagtattgactatgtgacaggagagctttagattttaatgctgcaattatagtttaataaattaaacccttattaaaaaaaagaatcaaaatcttgtcactataatatttttctgattaaaactatctaatttgatatgtattttctcacttatagtattataatactatactaccctacccctatgtttttttgtaataatatatatatataggctgtgacatcacaaaaatattaaaataacaaaaaaaacatttgacttgcatcagattattctttcatttagtaataatatatggataattatatttaaagcaagtagtaataattattacaagagggtaggaaggaattgatcaatttatatttttcaatgaatataggtggtctcaaattgctcaacacttgccaggaagaacagataatgagattaagaactattggcattcttatttgaagaaaaaagtggctaaagctgaagaagaattattaactgaacagagtactaaaactcaatgcaccacttcaagttcagagtcttcaccttcttcagaaaaaactaatagtaataatcgaattccaagctatgaatcattggaccaaatggtggaaaaatcattacttcatcataatgatcaatctgtattatttaataatacaaatcattatagtattgatcaacaacagccaaaaattagctcactaccaaagcttctttttgcagagtggctttcaatagaccaaattaataatagtaacaacaacaacagtattagtcataatggtccaaactcagctaatattatggtccagccaatggttcccagagaaaattttggtcacagtttgagtttccaagatggaatgggacatggtgttttgctaaatgaaggcatattggtggttgtggtgaccagttttcaaatggggtttcagattctgacttgcttcactcagaatttaaatttgatgaggatgaaatttcaggaaatggatttggtcatgacttaatctgtgggaggtacagatgatgtatgcttaaatattcatgatgatttcagtatgcatagtgatggaatttattcatttaattgataaattggagggtgtgctgttttcccaaggcaatataatatcatgcaattctatattgagaggaagaataacctctaattgtaattctgtttataacatttaagagtacgtaattataaaataaggccatttccattactcttaatttggttgggccattaggatatatatagatcatatttactagtctttgagcttaattagtggttattcttctattactctttcatcttttgattgtttgtgattaatttctctgtatatgaacaagtctatcatctattaatttgaataatttattttctctgagcttatctttttcatttttatttttatttgttttctggtcaacttttcctattagttttaataaatcattatataataacaatattggaataaaaataacaagagggttagaaatacaatagcaatacagattataaatgtatttataatttgaaatatatatatatatatatatatataatatatagattatcggtcctcatatatatatatatata

SEQ ID NO: 383845 - DNA, 1594 bp, Cannabis indica
tcatttgtagtgtggcccttttctccttggtactcgtattgcttgttttgatctcgcctgttccttctgccatttgacatgcgcaggggcttccgataatggaccatgttacacgtcgccttataaacattctcttgagtatctatcaaacttgtttactcaatgtacttcgggtcctactcctataacagtttctttactgaatcagtacagctgtgattcttacctcccctcttacccagcgaatgccccgcactagaatctggacctcggctttggattgtccgggagccataatgcacccaatttgtgccgccccatacccagagaaatgggtctgcatagggacaagatcggatgcagtagtttcgtagatagacggagagaactggggtcctgtaagggacaaagatagggcaggagtttgggatgctaaacttgtagcagctgttgttggagttggtgtaggagggactctgaaggcctgaatgtaggcatcctcaaggttaattatgccctgagccttagccataaattcacttaaggtctcgtctctctttctctgcatctctccacacagcaaggaacctataactagtctagactagagggccattagctttagatcatcactaaccttggttttggcggctgcctctatcattctttgagtgaaatatttcagacgttcgttgggttgttgcttgacattggttagggaactgacctccatatacttctcgcacgcagtgttaaattgcttgcgaaattctaactgtcaatccttcctgatgtcgatcaatcctaaggccaactgcttctactagtcttttgcgaaattggttagagtcaaggaaaagcacaaacacttagcgtcattgttgacacgggccacctgcatcatcttattatatttggctaaatttggttgcagatcagttctcccttcatactattcgatatggggcatcttaaagttttctgggagtggaattcatgtgatcctccttacacaaggttctgaatcttcatcctcagagtctgacaatgctccacttttttttaaccaacttagtcaaagcaccaatctgttcctccaatctcttggtatcacttttgggaagatcacgtcccctcatcttgtcactctgatgatttcttaggtcactcccacgtggcctcaccttctcgcttttatacctctcgtattttgcatccaactaccgatgcagatctgccatggaccaactgtcttccgaatggttgacaagaatcctcccgtcctgattgacagaatcattgggaggctctacccatctcctaggtctaggaaccgtggcggctggtcccttcagcacggtattgcgtcgacggttagaggggcatccaggctcgaaagcaccggtggccttctccgtcctcaaaggtcgtccgactgggggtgcatctctacgtgtagggttaggcatagatttccatggaggttcattcaccttgcccttacccttatccatgtgagggtttaatgttggaaattattttaccaggatcgtagatctactcacaagtatcttgattaacaccctaaatatga

SEQ ID NO: 383846 - DNA, 2971 bp, Cannabis indica
atgtatattgttatataaaaaaaatttgatattgtaactattttttttcttaattatattaactagaggtaaaaaaaaaaataataacacgagataaattctcattattgacttgtgtcttctagaaattgtcaaaataaatattgtttgtggttttagttttttaactgattagtagtgaataattaactatattaagtaaaaggtaattaatatatttaaattactaacataaatcttgaaaataattaatcaaggagtttcaaatagcaactgatctgatccaactcagcatgagatgccacgtggcataatgaggtccgcttatacaagtatacaactggctttgttttttatatttttttttttaaaaaaatcacatggtgattctaccttctagaagtcttcatcatttcacaccatatattatttatagataaataattgatatatattttttaaaaaatattttagtttttctttctatttttttttcttcataaaactaaaaaaaataaaggagattttttttaaggcaaaaaataataataggctaatttagtttttttattattgaacttttaaagtcgttaattttttttttttctaagattgttggatttaagaacttttatctacttttattatttatttttttaaaaaaaaagaagtgttatattaaaccaaggaactagtcagaccgtaaggtcattacaaattaggttcaaaggaatgtcatcagcatctagacaaccataacgattctgtgtaaaagccaacttcgctacattataagcacaaacattacatgaacgagctacattaaagttatctacttttatccaattttactaacttttttagtaaaatttggaataaaattactcaaatctaataatcttaatagttcaaaaagaatttttaacaacataaaaaagttcagagaatataatttagtacatgttaatgttcaagggacaaaaatctaaattaacctcatatatatagggagatgattttgtcctgtaattgtactttcacggaatgtattccgtgatgtacgacaatcgttagatgaggaagtaatttgatctaagggctgagattgatctaggggtaattagggttaaaaaataataatgtaccctgacactcatctaatgtaccctgagacccatctaatgtaccatgaaatacattccgtaaaagtacatcacgggacaaaatcgtcttcctatatatattgaaaattcaaacatttagagacaaatatatataataattaaaactttagatataaagtgatattctaaagtgaaagggttacatatattagaactatagcataattataattgaagtgaaattattaagaagaaaattttgatttgaaaaggttatattctcatgcatgtgctaccactttagggtggcccatgttagtaaaattgatatattgctaatcaacttttaatttaattcatttgttttattaggatttataattctaattatttatgataagattggcatccaaacatgtataaatatatatagagagattttgattttcacaaactatcaacaaaaaaaaaattatatttagaattaaatagaattttaataattggataaatattatattttgtgtaattttattaaaataaataaataaataacaaattacatgcataattcaaaattaatattttcaaattcatttttatttcatatatattttgaataacttatattatgtggtatttttctatcaactttttttcgttgttaatttgtttttaaaactatgtatttgttttgagaattgttaaaaggcactaattattagtagtgaaagcattgttatgaaatatcatattgttattgatataattaagtattaaattaacatattttaattttaagaattattataaaatatcgataactagagcggacccaaaaagtcttattagcaaagggcaaaaatttaagagaaatactaaattgtactattagtgtctagtactttttatggtgtcatactgttattggtataattaagtatcaggtcgtatataatttaagacaataactttaatttagacaatatcgtacttaaccaatcgtaaaatttcttttatagaatggatacccctgatgtccaataataataaaaatgtgctcaatattcaataacgttgcccaagtctgcattttgagactcaacattcttacgacacacaatcgtaatggtgcctaatagcaatgctataatttatcttatataattttataatgttatttaattggttaattagaatttttacccccaaactttaacatgtactaaataatgctcctaaactttgaagaccgttaaaaattctccctgaactattgagattgtatgatttaagaacttttgtttaattttagtaagaaaagtctaacatagatgaaagttcagggggcatgatttggaaaatgtcaaagttcgaggggcatgttttggtagatatcaaagtctagggagtgtaatttagtacaaaattgaatgaaatgagacaaaagtccttaaatctaacaatctcaatagttcaggggaaatttttaacagccaaaaaagttaaagggacataatttggtatatatcaaagttcaaggacaaaaatcttaattaacctatttaattttactaaatggatggatttctttggaatcattaatcaacctaattaaaaaaaacaaattgttaaactaatattaatagttgaccataataacaataatatttatataaatatatatatatactaggaaaaaactaatgtgcgaggcacgtatactaaatttatgctagttttttcttatgttatttgaaagtgatacaattaaaattaaagaaaaataattattaattattaggtgagattagtattatgtgtatctaaatattatattttataat

SEQ ID NO: 383847 - DNA, 1644 bp, Cannabis indica
atctcaaatctgaatttttttttatcgtgctagattgaagccgacgactatagtgaaaaaattagattttctcactatagccattggtttaaagggccgcataatttcaatggcagttgttaagggttgacacatattatttccattttgcgtcagtagcagatgcgtcggtcttaaaaactgacaataataataataattgattgttttaaacatttatctaatgccttttttttagtagtgatcataagtgttccatcacttttgtcgtcgcattctttatattgttgttgtttagttatttcataatttaaacgattattatctgtgcataatccacaatgtcaaaattttgcttataatagtccatggtgtctggtgattgatcttttgttgtcattgttgttccttcttcttcctcaaatagttgtattgtagtattggttgggtaaaagtcgaatttgttgttgttaaaaaaagcgaaacgagttgttgtcataattgttgtgttttcaactctgtttacacacaataaatagcttgtgatgtttaattcttttaacttcaattgcatgtaaaagttcaggcttgcatcattagtaatttttcagcgctggtatctttctttaacttaatactggattagaaagttaattgtttctctgttgcattctaattgcgaaatattttatccaataaatttgtatatttgcaactattttccagaaatttctcactcacttcatattgagtatattgcttgttttcatcccaacatacattactttgagtgattttagtaatgatgtcattgattctagcattccaactctttaattagcacaacaagatatatatatatatcctttttcaaatgatattcgaattatatgattgatgaatgcatgtaatatatacaattaataaattgtttgtggagaacaagtgtaaacaacgttgcaacaacattaaaaaaatgtaacaatatttaaacaagctaaacaaactttcttcatgatcaacatagtcatcatcaattttttaaatttttattccagtatttttctgaaagaaatgaaagagtaagtatttcgtatatcatatcacaattgaaaaacgattaaaaaaaacatccaaatagtaaacatattattacattattaataggagaataattttgatttaagaaacaaacacctaatggtcttttagttgagatatggatgttttttgaattcaaaatatgaattgaatggtttctatgatgatcgaaattgttctaaattattaaacgtattttactacagatttttgttgtcaaaattggattttgagtttttgttgcctattgttgaaaatcatagggttccatctcaaaaccaattggcaacgtgtgtagtagcccatgttcttatactatctgtaaaatttgatgagtttgtgtcatgtacaacatcaacatcatctgtctcattagaagcatccaaaatattttcccaaacttggcggtgatggacattatgaacaactctccaattacgacctctaactagatcatttacaaagaaaacttgcttagcttgactggcaagaatgtatggatcatctttgtaccatacaccactaacatttatgctagtgata

SEQ ID NO: 383848 - DNA, 694 bp, Cannabis indica
ttttgcgttaaagctagaatagcccccttctatctcctaccggtagcatacaagctgctagcagaatggtttagattttgtaaatcttggggaaaacaagctgccaccccagaagaaattttgtatttttatgaggtaaaatcccaacccatgcgaggacatcccaccaagattgggttttatcatctccagaagtataaaaatgttgaatgtcccacaagtacttcttctcgcagtatggactactgggagtactgatttttcatgactggcttccccatgaggcaagttccagcactctcgttggactttaaaattccaggtatcatccttcagtcctttgcattttcattgttttgatgatttgtactgtgattccatcgcaaaacctaactttaattcattggttgtcttcctattttgcagaacctgttcccagaatggagctcacagaagagttaaggcaaagaatcgccttctacgagattttttccaaggaagaactgcaagtcgaggggttagtcattacccaattacttcaccaatatggccttatttccaccctccagcgtattcacgatgtcaatggtaggggacaacctcaaactctcagtgaccttaaggagcaaattgctttagacctttcagtagcaataactaaggcagccaaggatgaggaacttcttgctgctgc

SEQ ID NO: 383849 - DNA, 1036 bp, Cannabis indica
atatatatatatatatagtgcatttatgaagtacggttggagttatttctactaggaatgttgaaacctactatgagatagtattttgcaattatagttagtagttttttttaataatcctgataattaattacagttagtctatagtctatgtacttcctcataatgttaagcatgtctttttaaaacttcacatttaattaaaatgagaaaatattttgtgtgatggtaggcggtagcttcaaaatgctcaaataaatatggtctggttaggtatgaattttcacatgtttctaaggactgcaatattaaattatagaaataaagtcttaataaaatcaaccacacacactagtttgcctttgttgacaatccattactcctaaaatatgtaggagatactttattcatcacacatcaatgggtactttcatagtaattaaaagttatatatattgaattgttgcaacatacctttaactttttcttctttctttataatcttgtaaaattatatatagtgtataagtacttaaatgtattaaagtataattttgttaattttttattgttagatctgttagtatgctgagtcagatgatatgtgtcatttttttactagttcaactcttaatatttttttactactttgttgaccatccatattaatactccaaaaacatctaggagatactttattcctcacatcaattcgtaccctcatagtaatgaaaagtatatattgaattgatgcaactataaatttcactttttctcctttctttataatcatgtactgttatctatatgcaatgttaattttttttaagaacctgtatccattaaaaatcagaaatgaaagttcaggatacaaattattaaagaagaaaatcagatcctttccataaagcttcctaaactagacctaaagtatacttagggtgtgtttggaaggagggagacatgagtggatggagaggaaaggagggagagggatgggggagatgaaaaatccatttgtttagcatagaggatt

SEQ ID NO: 383850 - DNA, 1522 bp, Cannabis indica
tgaggggggtaaaattgggttttaataaaatgtatcccactttacaaattatgtctactattgtattaggagtccaattttattatttattaagtatacaatttcaaatttcccttttaaatatgaaatagtatgttgacactcttacagcaactgggcaaccactgtgacatgatgatttcgttctctacatccttggaggttgggaactgagtatgaatctaacttctcgatttgagtatctcactctacaagaggttcaattcatgttacaatgtgaagaaatgaaactaaaatagctcaccacatattattaacaaattcttaagcacacttagctaatgtcaatctgaacaatggtggaagagcatctcagtccaaccacggacatcgcggctaaactcaaggtggaagaggttttcattgttcgcgaacgttgtgcttgtgattgtactagtacgcacatcttcccctcattgtctaattccctcaaatatctcttttgagaatttctcacccttcatgcaatatggggtcctcctgagatcgtggccacatgtacatcaacggtggcaaagctatacttgtgggatatgggttccctggtcctagagctagtattgtcatcgcagtttgagctggcagagtaggtaaggctgaagttgtgttctaggagcttgaaggcgacttactccttgtagagattttacagctccctgttatcccgaaatgtgattttgcagcagtagtagaatcttgtagtagcaacaaaaacaagcaccagctactatgccaacctgtggtgatacaggatatgttctttatgctactatatcttacctccaagggaagtattcagtgttgttaagactttagacattttcaaagttataggtactgaagatagacttactgcccagatttttttgatttaatctgatagcttgattgttttttctaacttgaagtagcttggagtgtgccataaagactgtgggttgcgatttcttccattaagaatcatagattatttgattcttgtattcatattcaatgtgtcatgtgttccttgtaataatgtagctcatgttttataatgcacaaaattctgcatagctaattcttgtattgaattactgcatttattcaattcctaaatgtagctcatgttttatagctaattctgaatttcacaaattgaattacacaaaattccaaactaatggttcagatcatcaaacactgatttttatcaataaagagtttaatttaagaaagaaaaaaaaactaaatttaattttttaaaatatatacatatcaaagtttaatttaattttaagataaaagggatatttgcggcataaatactatacgttttcagttttatacacttaaataccacatgttttatttcgatagattaaataccttaagttacatttccgttacttccgttactactttttagttaagtcatattcaaacatagagtatttgcggcataaatacttgatgttttaaa

SEQ ID NO: 383851 - DNA, 753 bp, Cannabis indica
aatttttacatctcccattagaggtggtctaaatacacactattataaaattaatttttctcatcggtttaactgtttttatactattttcctcaattgtgtataatacatataacaatgcactctaaaattaaattattcgagtttaaattttactgatattagatatttgtaaattaatcattatatcatttatttttaaaaatttctattaaacttttttaataattattggtgaatagctaaataataaaaaccaaactatatacaaaaatagataagtgtatatctaagtcttttgtttgtgtttatgttattgctatcctatctcttaaaaaaaactcttagcttcaattttttttatttaattgagttcattattggtgtgaattttgtcatattatatttcattcacttatttcttactatcattattattttattttgacataaaatatttattatatgttaagaatattataaatctgaattaaccctaattaattcatgagaatcaaataataggattatagaaatagcggaagcgtactgcgtccatagaatcgattttgaatgatatgatcttccaatttttcgcatcaaaattttctctctggaacttgagttttcttaatgatgggaattcaagactgatgatacgatatctgaagtgatgcaaaaaatggagattaatacctatttattaataactaaataaacagtaaattaatcatttttgactatttccaattt

SEQ ID NO: 383852 - DNA, 1829 bp, Cannabis indica
taattttttttattatttttgtcccaaaattaaatatattgaaaactatttataaaacgccaggatggtgccttttaatactcaatatatattattcaaagcagatcttttattttgcaatagccaaaactgcaaaaagcaaaaagctgcatttttgttaaatactaacaatgaaaaaaatagtaaatgatgatgtaaatttagatatacaaataacctacaagctatatggagtagagagtagaattagtatacaaaactatgattataattttataaagtagggaaaaaatataaagaaggtgacaaatgagaatgtattacattgcttgagaattttgaaaaattatagttggtagttgctagtgccgggagtcggccaagggggataatatggaccataatctctttatacatatatctttcatttatattatataatttaatacttaatcatttctttagttttggctaatcacttaattatcaatttaattttggagtcacactaacattttaggaatatgatataattataattatcattattatatacaatatacaatacaaccactggcctggccttattgatacatcatacatctcgctttctctcttaaaagtagtgtggatttgataaatatcatatagtgtgccattatagtttatatatatacattgtatcaattacaattacgtattcgtacacgtgtttcaaatgtgcccttttatatctatttatttatatttatagatatttatatgttcaggtatggtggattccaaccatagaaatcagctttttaataattgtaatatctttcactctacgttatcaaatatattcttctcctttatttatttatttatttatttatttttctctcttttcttctttccccatattgggcctcgaaatagtacagcactaactctttagttttattttttggattttttgaaatatactatctacaacaatatttgcagaaagtcatagcctacatttggtatttataacaaaaatagcaacaagtatcactacttctacttcttattcttcttctttgtttgaacaataaacaattcactgaaaaaccataatgtatgtatacagcttttttttgaaaattataagaacctttttcaaactagataataagttttcaatccaccaaagaacaatattgcacacaaaaatgatgagaaacatgacatagtttagactagtgacacttagaaaattaaaaatcaaacttatagatccattgttataaaaaatacaaagatttccataaataaatcagtcctaacactgaagtcatggttaaaatatgaaagggggcaacaataaaacaattgagaaaaaataatatacaaaaacataacacttttacataggcgcacgtctattgtttcagacttatcataaatgtaacctattttgtatttttgacatgcacatcgtaatgaatataaaacaattaggattgtagtcaatcaatgtgccaaaaatccgaaaacatatagttttgaatagggctgaatatcggtcggtttggtcagtttttttctatataaaaatccaaaatttggttttcggtctggattggtgcaatccgaaaaccgaccgaccaatccagaacctttcttaaaaccgaccgttttgaatatcggttaggtcggtttaaaccgcccaaaccgaacttctttttttaaaaaagaaaaaataatgatccaatttattctataaacacattatttcacattttacaactacaaacatacaaattaattgttcaaaaactaattatcttattcttttaact

SEQ ID NO: 383853 - DNA, 1295 bp, Cannabis indica
tggatcccatggatgcagtttggtgagtttaaagatcttatgactactatttcttctcattttcctggtttaaacaagttgcagatatctctttgggggacaagtggaatgaggatttggttatcaatgtttttggtaatgacctggggaaatgaatattggatattcctagacttccatcttcttctctagatagtattatttggaagtgcaatgcaaatgggagattttctgtcaaatcagcatattatttggaccaggaacatcgattcaacaataggcgagaaatttggagatggatttggaacccaagtattcatccccagttggctatcatgttatggcgtgtgatcagtgattgcattcccacaaaggataatctacatttcttgttagagaaggagtgcctgctttgagatgccgaagtggaatctggagtgcacatctttaaagattgccctctagtgcgggccgtttggtttacgggtccgttcccttgcctctcatctcaaatacctggcaatgatatgctcaatttcttggaaaatttggttaaagatctccccaaaagtaccagaactaatctctaaaggtagccggctgcattttcagtgaaatctggtttgtgagaaatttgatcaggacaaaaggaaaactattgaactgtagtgagatccttgcccgagtccaccacaagttcaatgagttctccccgactctacaggatacgataagtgcagctcagagcattactactgtctcagtgcctattaaccaggtttttccaaataattacatgattacagatgcttcttggtcccagaatgtggttgggttggcagccatttccatcaataggtctgaagaaagtgggaagtgaaaacaagtaaaaagaaggctattgctcctatggatgctgaaattcaagcaattttgatggctattacttgggcaaaagatcaaggttgggaggatatcaccattttttctgatgctcaagtagtagttaatgccttgaataactctttgtgtcctccggattggagaagtatgggtttatccctcaaggttttagatttgttaaagtctttttctagttttagttttatctacattagtagaaatgttatgtcttttgttgatggtttcgctaaaagtgctaggagatctagccagggtgctaaacactttcaaggggagggtgcaccccctgttgtcccattttttccttggtgttaaatgaactttttcattttcaaaaaaaaaaataaacattcataatttatttttaccct

SEQ ID NO: 383854 - DNA, 2368 bp, Cannabis indica
ataatatatattataatagtaatattaattgtaataataattacaataagaatacttatataataatatatgtataatacataacagttataatgatttcaaaaataaataaaatataagagttatgtaacgagaagacattaattatgtatggaccgactcagagtgtatgtggcagtgaggacaagtaggagagttgagacatttttagttgtaaagattttctgcagtggggatagtgttatgacaaagacgacagatgaaatgttttatcttagggggagtacaaagatcccagaaggacttccaccaagacttaaaagtgtcagcactagaagaagaaggttgggtaatgtgagtgatggtttttgcaacatgataaccagttttgacagagtagtggctagaggaagtatactactagaaaaaggagtcactgaggttgttgtcagggggaggaagagaaaggatctcactgataatgtcatttgggaagtgtctttggataaaggagatgttccgattcccattggggaggagcaagttagagacatgggtaaggtgatttgggagggaaatggggagaaatgacagttaggaatccaatggtcatcaagaatgtgagttgcagcaccattaccaattcttttacagaggccaatttttaggacaaatttccaccaatgcaagctctgccagacataggaagaggaatgacccaggaggcattcaaaaaagtggatcgaggaaagtatttggacttaaagagggtcgcaagaagagagggttggtttgtttggattctccatgcttgctttgcaagcatagctttgttgaaaggttttagagatctgaagccaagacccccctgcattcttggaagtacaaagggatcgccattttttctaatgaagttcgcgttctccattcctagctccccaccaaaaattttccatttccctcttgacaaagctacagaaagagttaaggagtttgaaaactggcatggcataaataggaatggcttggacaattgcctttagaagaacctctttccctcccttggagaggagtttaccctgccattttgaaaggtaagaccatattctatctttgaggggattgaaggagtgcttcttagatctatcaaaacattgaggtagtccaagatacttatcaaggtgattggtagaaggtatttgcatgtagtcctgaataagagtttggtaagtcaggctggtgttaggggaaaaaagatggatgatttctaaaaatttaccaattgtcctgatattttttggtactgggtaagggcctctttgatagcattgcaagcttggatatgtgaccgacagaataggatgctatcgttagcaaagagaagatgagaaatttttgggacagtccgagcaatcttcagaccaaaagcatcttcagtgagttcagaatgctttaaaatagaagagagaccctccgaatagagaaggaaaagataagggagagagggtctccttgtctaagccccctagaaggaaccacatgcccaagggaatgaccatttatgttgaacttgaaagtagcaatggtcagacatttcatgattaaagagaaaaacttaggagggaagccacctttttgcataattttgctcagaaaaattcattccactttatcaaaggctttgaccatatcaagcttaacaatcatccaactaatcatgcctttcgttctacttttgatggattgtaagatctctttggccataaggatgttgactgagatgagagggccttttagaaaagcactttgggtaggggatatgagagagttaaggaccaacttgagtctattagccaagaccttagagattattttatagacagttgtgcacaagcttatagctcagtagtccttaagggtaagaggattttttgttttaggaatgagagtgacaagagtggtattgaaatgggagatatcagaaaaaattttgaggaaattaagaaccgctttagtcactttccttccaaccacactccattttttttgataaaattgattaataaaaccatcaatgcccggggacttgtctgcggccatttgaaacaagccttttttgacctcacaaggagtgaaagcttcattcagagattgatagtgggaagagtcaaggctggggaaagagccagagagggcagtgtcgatatcagtttcttgagggcattgagaggtgaagagttcaaagtagtaggattcaatgagggagagaatcgaagcaatgtctgtaacgccccgatttcccaagacgtcacactagctactccgtttaaaaccatttaagataaagacaataaaatacttctttaat

SEQ ID NO: 383855 - DNA, 964 bp, Cannabis indica
ctagctgcaaatctttgacccagcaagcaaataactcgagtccgggctccagtccaatgtagtaactttatcatcacaatcagcgaaagttttaaccaattcaaatggaaaaaactcctttttgaagccaggtgatcgccaaatttggatcaacttacccatagcaacggcaatataagcaccgttggggctgaatttgacagcatttacagggtgcttgaaggtaatacgatgaagcacaactcgtcgccgaaggtttatgaagagacaacggcgattctcgtcgacggtgaggaggaacacaccatcgggcgaggcagcaattcgacatatattcgaagatgattgaactggcaaagttagggtttgagatttgatgaggtcaataacagaaactcggttaccaactggggagattagctcagtattgttggtgactatagcattgcctcctctataaggagctccaagaagattttggaatcgatagttcataatttttctggaagaaattataacaaaaacagaagaaaatcatcaaacctataacacagcagctaatttattcgcttaactaaaccaaatacaacaaaatgaaagcaattagctaacttaacacataacattttagttcaaaacttctcctaattttctttttcttttgatttctgatgagtactaggaagtacactacactatatagttacatatatatatgtatatgtatatagagaatatggaggcatgaaatgaagggtagaaatgatcaccagctttaatctcagtcgagaagaaaggaggctccggcgcgcgaggagtatgaagcttcgtaggtccgtcgtggtctgcgttcggcggttggggtccgagttcgcgtgagggagggctagaggagaacggcggggctgggtgggtgtgagagagagagtagggaaaggtcaggggtttatggttttaggttttt

SEQ ID NO: 383856 - DNA, 1048 bp, Cannabis indica
ttaaaaataactcaattgaaagtaaaatatttttatgataaataattattattttagtattttattatttttgttctttttatattctcaccctacaaaaaaatacaaaagtccacaaacttgtcataactcatagtcataacaaccaatattaacttcttatcaaacaaagagatttagttggtttagtaatttagaggctttgattacaagcaacaataatatgatgtgcgagttatgtgggctacatcaaattagtgatctacaaaagttatttttatatttttttgttcttaatttatgaaattattgattaaaaaaaagctaaaatatttcatattaatgttcacttttcaattttttttgttgctaacacacttgagttggaaatgttattttcaagtaaaaaggctaaaataatgaattgattttatcatttatgtgattaataatttgaatttttgttataagattatagcggtttatatgtagataaatatattttgcatgcatatacacttaaaatattattttttattgataaaatattaagagtttgaagtactatatattacactaaaaatgtgagatttaatacttaattatattaaatttagcattatacacatggttctcaaaatgcaacatttttcttttattatagaactatatgaaatttttaattttctataaatgattttagtagagtcttctttttctaaagctaattaattgaaccactttgttgtactattttttttttctatctttcttattatttagtaaccaaaaacacatgcacaaattaagtagtatttatggtatggacaatagttaaaccaaatatttagttggtcagcaaatccatatttaagacaatccaagaccatttattgttgaaaatttataattaataaagattagtatattttaatgttaatttattttgttaaagaataatatgagaaatattggcaagcatacttgacttgtactcccaataatactttcttattcttgttcaagaagaaaaagaaaaaaaaaacaa

SEQ ID NO: 383857 - DNA, 1313 bp, Cannabis indica
ttttttttttttttgtaatgagaagagtgttaagcaggtattatttaattcccctatcttaaatgtattaactttgtctttctccgtttgcattaacttgtcccagattggttttacagttatactgaaaaggacttacatactgtgactctctcaatccctaattaagcctagcctctcgtaaggatgtacggccatcctttgtccttatttatttatttttttttgttgggaacggctgtactttggaataggaaaacaaattacacctgcggtggtttttttttgtttttttttttttttttgtgcggctagagttttcaaatttatagctgaatctgaagagagaggtgaggtgagttgggtaaaattatggaatgaacaatagcagtggagtactggacccttcttgaaaaaaggttcgtaatactgatcagaatatttatgggatgtaaaaatgcatatgattcggatgttgagaaaggattgagtcaaatatatgtggtcaagaatgaaacacttgaatgtggcaagtgggacattcatgtctactgcatttaattcacatatcccttccaactgataagttgaagttctactctgttttcacatataaataaatatttgaattaatcaaataatcatttctatagttataactcctaacaagatatatatttatttagacttaaataactagagtagactttagcttatatgggacatatatacaaaattaatctgaagtggataatatttggatgcaataatgaatgagattaacttctttgaaaggagttctaacttttaatgaggaatgatgacactgtttttttttgattcgatagctaaaatctaatttcaggtattttaaggtacctaaggtcttattttgttttagtaatttccattatataactatattgaagtagaaccatattaattaaataaaatatagataagatgtatgtgatagaaaaagcagttaaaaagttgattgtttgaagtttacacacacaaggtctataactaatgaagatttagtaaagcatcattggaactttataactagtcccccactcccaatccaaccaaaactacagcatggagaaaacgtggcagcaacatagccaaaagaaaattagctagcttcacacttaataaagatctaattggtattagaatacccttttttatcgcgagtattgttactgggcactcgtcctctctaatattttttaaagatagcattttacgattcattagtgatattttctaaaagttattagataaattatatagaatttaatatt

SEQ ID NO: 383858 - DNA, 1148 bp, Cannabis indica
atataaaataattcccctaattaaatttagttgggaagttctacataaaacacttaaaattgtatttttttttctcacatatatcttttacagatataatgaacaaaaacagtctatatttttataaaaaaatttataaatccgtaattcttttgttgttattttcagatatatttacaaaattatcccatttatttatttttttgtaataaaattatccatgtagttaattaatttattgtgcgtattaattaaaagcaagattattatatttataatattacccgttgttgcgagtggcaggaaaaccagaagggcagaaatggatgacgaaatcagaagactgacatgtgcttccgctactcttatcataaacagaagcttgagcttgagggcaccatttcttgaacaattccgagttactattagaattacaattccccgctcccgacgcgccgccgcacgcgctcttaatagccaacgtagtagtatcgttaccggtaccggtacttgacgacgtaactcggagctccttcggaaaatactccgaattcgagtccatgacgcatccaactgtcccgcaatttccggttccggcggccccaccttggggcaccaccatcaacggcaggttgtaaccgtcggccaggcttataagatacttagcgggtccggcgccgtcggttaaagcgaactccactgtggttgccgggggagataagtttccgccgccgcactccacggaggatgtggcgcagtctccggtgaggcatgtgaattttccgttgatatcggcggcgcagtgggttcgcccccataaacggcccgaccaattaggcggtaccgggatggcctcggaatcggtggggccgagggcgaagccggtcggagtaatcagaggggaaccggagtttgatagaatggccggccatacgttgtagttacaattgtttgtgattgtgaacgtggcagaatgagtcccttcatgcatgtaaaaattaataagtttaaaaagaaactacacaatttattgatcatatactatttaaaactatatatatatatctatgtatatatatacctgataaaaattgaagaagaagaagaagagatatgagaagtgtagtagtagtagtgaaagccatatt

SEQ ID NO: 383859 - DNA, 3885 bp, Cannabis indica
tgccacaaatcaaacaaccaaaccacaataaatgggcctcagtatgaaaaagtaacacaaaggacacataagaaccacttcataataacattacaaataatatataccaggactcaaacaaacagctggctcagttgtttcctcgaaaccggaacagatagccttcaaaacagcacttttctccaactttcctgcaaacaaatacataattagaaaatgatggaagcacagagccagatattcaacagaatgaagcacaaagaccaacctctgtactgtcgattattgacaacaagagtaggtaatatggtcacgtcacctcttgatcctttcccaacctacatggcgctcccatcattagacatacataacatttattatcaaccaagcaattgcaaaaggtggctaaattacgaaatcattccagcaaaaggaaaattcaaataaataactcgaaataaaaataaaaaacaaagtgtagtaagtataaaattgatagatagatagatagatagatagatagatagatagatagatcgatagatagatagatagatcgatagatagatagatagatagatcgatagatagatacctgagcatcttgctcttctttcagaacacggttttctgagtctgcagaagggtctcccatgcactggtcaacacttttaacatccagtcctatcatatattacatgaacattcaaattccatccaacggctatgccggaaattagaaacgattaaatggaatggaaatttatataccaagattttgaatgacagcaacagcacaatccttgttatactttttctccttcataggacatctaatttggaaatctgtcacatagtcccaccagacccaaggctttttggtttcatttgccactttaaaaacacagagctgcctcaggttttccaaaaccacatctttcccttcataaccagtggtgaaatcctgctcaggatcaggagcacagtatcttccatgattaatacactgggacttgcactgtttgctcaaggtgaatgcctcaggacagtaccaagttatgtaatgaggcgtgaattgagtataaccacctttctcaagaatttgagctgcacccttaaaatctttcacaaattccatcagcatgtcacacttaactccgcattcatcattgctgttggtccatagttcatattccactcgatcgtctgggtgtggaacagcttctctccaatcaagattcacgttgaccatgtccccagaatggattgatttctttaatacttccccaaagtttttatcaatgagtgctgatgggatggtgatgttctcaatgtacttggcagatgaaccgtcttcttcaggagaatccattgtaattagaggttcctccttgtcatcagctaccagaactgcagaagctcctgccttctgggcattccacaccttcaaagcaaagaaacaatctgaaaagaaaaataaagagtggtgagaacagtttctatgtaagcagtgtccaataactatccaatcatccagtccccagatcatgaaggtaaaaaaaattaataaaatcttcctttcttttacagcaaaccattatgcataaaaatgtaactctgagatctaatcaaccataatctcgtgcattgaaagatctatttaaaagaaaaggcttagcttagccagctattcgtgttcaaaagatcatccaaatgtatgtagagtaaagcatgtaaacaacaggaaaatgattttccttttagccaatagctacacaatctataagtgacgaacttcaatttttgtatttcatgactgaactgaaaatccacaaacttgaccaaagttaaaggaaagttattgacaaataaaagacaaatgaccaacagaaacctcaacctaaaataaaaataaaaaggcatgacaaacacagaaacaagcaaatcaaaacaatgaaaaccaaataaaaaggtttggattggaattagccaatccagataatgaaaatgcaatctaccaaaggtacaaataatagctgtagataaaacccaagttaatcaattagtagtttgaataaggttccaaaattaactgcttgaacagccattaatttccatttaaaaaatgataagagggagagaaagaggaagagcagtagaaacatcacagcataaaatggataaacgaaatttgattaccaaaagtataatacaataacaaacttaaatcccaataaaaaaacatggtaataattagttaaaaaaaatgaaagtaccattaacatgatctataagggatcatctttactcaatccgaaaagataaaaatattttaaaaaataaaagcatttcagtgaagaaagtgacagaaaagaaatcaatgtaactaaagtaacacaaagaacttaaagaaaactgcaagtataattcaaagagtatatttcactactaaggagcaccgatcttctatcaaagccaaaacaaatacaacctaactgtaaacatttcgaatttcaagtttacagaaatagtttatgaaacaataagcgtacggataacatcaaatatgggataaagcataactatcgggtccaattaaaatgaagaaactaaatccaatatttgatcaaaactagaagaagggtgtcgatacaaaaactggaatcgacttaagaacctcacaaaatcaattggaaacctaagcgaacatattttcttgattgacaaaaattaacaaaagaatatatcatcagtaataaatagaccaaaccatgcaatagcaatcaaattaacaaaaatatgagaagattacctccacgatccagcaaaacgaaggtgggaagagctccgggcttggattggaacgaaatcccaacgtcggaaaactccttgcagcccttttgattatcttttgggtacaaaacatttccagccatgctgccaccatattgaggtatcccaaagtttccaatggcagtgtcatgggttcccctgattcggtcgggtgatgttaccctcaagctgttcttctccaccacgaatcttccatgaattgagaagaaaggtgcgaaagacagtagcagaaaccctaagaagagcctcatcatcgctgatctctgaaactccgttcacggagattgatttgaaggagaaaatacaatatgagtcgatttgagtgtttaaattaacaaaatggctaacattgaattcacactgtgcgatcaatcatatcataatcgtcgcttttattgtcgagtgtaatttttatgaaaattctgaaagtgactatttttatctaaaaaaaaaacgtttaggaaacaaaccgggttttaagtgtgctattatgtttagtaataattaattaattttaataattttattagttaagaattaaatttgtaggatttaaaattttatgaaatctataaagatcattcataataatatgaaacctaacatcattgatacataaaaattaaaaaaaattaagttatattaactccagatacacaattaattaccattttttaacttgtgttgtaattaacaaaatgataaattggatcataaacttttaaaatagtataaaatagagtaaatattattttagatcttgtattttgtaaaaattatagattggattttctattctgttaaataacaaaatagattttgtattttttaaaatggtacaaataggacgttgaactgatttttttgtcaaaacataacttaataataatccaacttaaaaaaataaaaaaataataatccaaccttaggacaaaactaattaaattttttgcatcttttcacgttaggaattattttcaagttgattatattaaaaaaaaattatcgaaaattgagttcagcgtcttattt

SEQ ID NO: 383860 - DNA, 2683 bp, Cannabis indica
  modified_base (52)..(52): a, c, t, g, unknown or other
gtgatcctagtagtcaaatacatattactacaaaaatagtttactccctaanaatttttaaacagtcgtttaaagtatttatatcaattttttatcactgtttgctctataactgtcgcaaaattggtaaaatagacgacgattaaaaatcgtcgcacatataaattttctgacggtttaaaaccgttgcttataacagagtataaacaataattttaaaccgtatcttatactatacacgacggttttccaaaacaaatatttacattagaagtactaaaagaaaatgtcagatagatcgaattagagagtaatagtttttttttcgcaaggtgttgtagttacaatattccacgtgcattaacaataatgtatatatatctagaaggagaagggatcattcatttttgtctttgatggagtattattctacaattagattgggtaatgaacaattaattattactcattattcttcattatcaactcagagctcacagtaggttaaaaatagatctgaaaagatcttatatagtaaataaaattaggtagataagaagaagaatcgaggagcactaattatattttcaacttaattattttattctatatacaaacaatgatatatatatatatatatattgtgttaacggtgggggcactcacgccaaactttggttaaaataattgactagaagatttgtatatttacaaattgcattgaatatatactcttgtctctttacacgtatatatttaatttttgttctgttaacttgtgttatggaagaaaccagaaaaatcatttcgactatttcaataaaataataaaataatgtgtacaatttaatatttaggggcttcagtatcacatatgcgcatgttccctttcatttaatagagctattgcgacaatttaaaattgctgagatcatagacattaaagaaactttgagttagattgcgactcatccttgagacattgtagttagaaacggatagtttggtatgtgtccaagcagtccaaagtaaatggcctcccaacttgatcttatagttaaatgtatttaaattttacttttatatttttgttgagttatgttttattaaacgatctgcaaacaagttggctcattgtttggcaagaaactcttgtttctctacaggttgtgtacgtgcttcagttggaggattgttcctctgaagtgtgttctattattttgagcgagtttattatttaataaatctcttgattaattcagaaaaaaatataaagctattaaaaattaaaattaaaatactcatgaattcctcatcaataaaaattatttaccttaattattattattattattattattattattattattattattatgtgttttttaaaaaatataatagctttattaagaaaaaagattcagcaataacaatagaaagcagagcattgtccaaactgaaaattcaacctctagaaagataagagctatgtgcaagtgtgcaacacacggctttgattaacaattattatgttagttatttattgggataattatggcaaaatctttaaaaatttaaaattgatgtagattagtctctaacttaaaaaattagtagtaataattctaaggttacatgttttctaagtccgtagtctctaacttaattgatctgtttatttattttaaaaatattacgtgttgatatattattggtccaaatcataattttaattaaaaataaaaaatcattattaaaaattaaaaacattatttttttttccttttctttttcctgtttctctcgtctttctcactacccaaccactcaccatcctaacctgcacccgtccctatccccattacccctccacacacagtggttcaagcttgtacttacaagccctgtgattatgaaaaccccaacccagaaaatctcgacccccctctcagtctctctctttctcctcatctctttctctctctttgtatctcattggccgacgttgacgatagctagactcatcgtacctgaaaccccaacccagagatcctaagccatgcgttgccatcctccagttgcaagccaatcgtcggagttgaaacttcgcgactctgttatggccgctttgagtttcatttagccaaataattttcaaaaatgagatttactcttagagatcttccaaatctcgtggttgaattctatatgcgctgtcgatgatgataaatgactaccgtgcacagtggagcttaagtgagcttaggcagtagccattataagggttctagtattgtttatagcccttaaaatcactgttagagtaggtttgaactagcagatctggggatgggtgggtgaaagtcggggtggttttgaaatcactgctgggtgggtgaaggtcagggaagacgaagaagaaaaataaatataaaaaaaatggaaaaaaaaaagataaaaaaaaaataaatttataatatttaaaatataattttagttttttttattttaatttacaattattattttgaccaataaaaattagacacgtggtattttatttaggtttgacatatcagttaagttaaggaccaacggacttacagaaaatgtgaccttggggacgtattaccgtcaattttgaaagttgaagactaatctgcatcaaccgtaaattttt

SEQ ID NO: 383861 - DNA, 2724 bp, Cannabis indica
agagaacatttgttggggtcgatttctttagcgtaattcaagaggtataccttcgatcgaatgaccctcgtgtctccaacattgtaaagttctctgacttcattggtgagctcaaagtagaggtatttaaatgtctaaatctttctctcaatctttcataattcttgttaattaaggctgttgatacttttattctaattttacaggcaatagcttctatcaaagatggaaaaagaatactttttcagtttgacagagcagcttttcgtttaagtttttgccatttaagtttccttatccagtcccatttagacttctaggagatgaagcgaagggatggctagataccacatatctttcaccatctgggaaccttcgtatctcaagaggaaacaaggtaaaaatggaagctatttctctcataatttgatcgaatctcgaattcggagaagctaagactctatgaacatatctctgtagtgcagggaaccacatttgtgttacaaaagaagacagaaatcaggcaaaagttgctctctgctatatccacagataagggagttttagaggtgattttgctgctaagtaagcttttttctagttgtggtaaagaatggtaatttgctaaattatcatcatcataatctgagtaataaatttgcttgtgcaggcaatagacgagcttatctcgacgtataaggaaaagggtattggtgaaattgagcttcaagagggagaatggcaaatgttatggagttcacaggtaatttcaagctgattttggattcatcatagaagctaatgttgattcaaatatacatcaatgagacagtgatgtactaattaggattaatagctgaatggctaagaaattgaagaacttctccctcaaatctctatcggcattcactttgttataagttatgaagagaagtataatgaataattgtaaaactatgtaacagataaagcaataatgtggtaattggttacaagttattattctcttagttaagttagttgccagctggtgaatttaattaagctcgggattgggttatttattttcaggtaggattcgagatgcctagtatcctataaatagctttctttgtcccttgtatacttatctaattcacattgtaaaacagagagagattgaatggaagttctaaacactagtgagagaagttagtcttgaagctcattttagtattcttgagttagagcgtcctgtaattctctgtaactgttatggatgttgctcaaccgagatgtagaacattgctcatagctcgaactcgttaaattccttgtgttatctctcttattttcttgcattgttcttatcactactctaagactgtttgaagttaggtttgtttgtgtgaactttgttgaagctgttcgtgattgaatcacaacaaataagtataaagcatatcatcagttaaatttataggagtgatcttgctactagttagactctctactagtccttgaataagaatcaagaagatttgaatgaacgtcccatttcatattatttaacaagttcttgtgccaaatatgacaaaattttcacactttaatgttgcaggtagaaactgatagttggttagagaatgctgccaatggactaatgggaaagcaggtatatatatatagataaatataaatatatatatatatataaaaggtggaactttgtcaatagttaagttaatactaattttccttcctaaagaaaatcttatggtgatgtgattagattatcaagaagaacaacggtcaaataaagtatttggttgacatcttgcttggacttaaattttccatggttggcacctttgtgtaagtcttctattattatgtaattttaatcagtcaataaaatcattttttcgttcctaaattgtctcacattttggtttgcagtaagtctgatacaaacacatacgacgttactatggatgatgcagccatagtggccggtggatttgggtatccattagagcttggaagcaagtttgtcctcgagctattgtaagaccactctattattattatcatcacaaatatatgaaaattattaagtagggcattacttgaatattttaattttttagtaatttgtcaatgtatatgatgatgcagatatagcgatgacaagatcagaatcactcgaggatacaacaaaatcgttttgttcatttacgcacagatggaaccaaccaaaaatagtgatgagcttgagaggtataacaagttaattatatgatgaaaagtaagttaattgggtacataaaatgtattatcatatattaacaccattctcattctaatgatgatattgacaaagtagtcatttcaaaccacaatatcaatctttttcttttctttgtttggaaagtcatattacaatttacaaggccttattcttataggtgtttaaagaccttcctctggtccagggactgggtaaggtaaggtataagggtaagctttctttagacattttctaccactaatattgcagaattcgaataatagtttttccaaaaatagacataaaggaaactttctcacttttaaaaattataaggaaaaaataaaatgtgattcaacttttggaaccaaagtatatctttctttatatatattataacttgagaaagaaggttacaaaagtgttctgttttatattatttttattatatttta

SEQ ID NO: 383862 - DNA, 1747 bp, Cannabis indica
aatttaatgactttaaccaatcaggaattttcatataacaatttacttaacatttaatacctaagtaactacaaaagttctagaattataatttagttattattactgccaaaaattaaatttagatatttatttacaattagaaattaaatttaagtatttatgccgcaaattactccaaaaaaaattcttatatgcattttatgaggtgtgttgtgttcaattctttgatagcaaattgtttgtaatattatttaaaacgtcctttttattaaatatgctgctacattaatatccaatcaaacttaataatagaaactaaaatgctgaatatgttgatgttataatataatataaagaatattttattttattataaagtataataatttagtataatttttagtattgtaattagaatgaaaaataaatataacactatatttatagtgttagtgtaacaccaatttaatgctatggatcatgattggagattgtcttacaatttataatttctagacgtgtaaccttgcaattgattactagtacttttcaaaaactattatattaaattatataggacctaatgttaataacattgtaaaatctgaatttagccctaattaattcatgagaatcaaacaataaattagaaagtagcggaagcgtactggagtctatagaatcgatctttaaatggtatgattttccaatatttgcatcaaagttctctctggaacttgagttttcttgatgatggggattcaagaataagatacgatatttgaagcgatgcaaaaatagggaccaatacctgtttattaatacctgaaaaaacagtaattaattctttttgactgtttctaatttagcccctcatcaaactagaaattgtccttatggcatccacatattaaaatcatgacaatcatgcccttaagtcataaactttattctaacacctaatacttaattacacaatataacaactgttatatatatgcccatatttcgagtaatataaacactatacatgtaaaaagagatggatagtaacctgtttgcagttcaaagaatgtggaatattggttagctcgccttggaaaatagtagttacagacgtgtttaaatctttccttaattaattaagggtgagtaaaaagtgccaactgctaaaccagtgagattaaatcattaacaggaaatgtccatctcgaaaaataccgaatacaaaatgattaaaacgagatgatatgtgagttaagcaagataatataaaggttcctaacctaaggagctagcataaaagatactatcttaagaatctatttcaaagattgtatacaaaaattattcaaaatctcattctagataatcaacggaaggaaaaatgaataaatcatccattcctcaagaaagaatttgaggaatatgaatacgtacgtatttaacaatgtcaattgtgagcagccctaaagtcatgaatagaagaatagcttgatgaaacaaccgttttggataaggataaaggtagttaccaacgattaattcatttattccccatgaagtaaatatgaaacgtgtagattgtccacgtttcatgagtaattatctagataatgttgggttttgtgccctaaataaaactcattttaatatatcaaatttactaattaataaagatcgaaaatcgcattttatgttgtatggttcacatgattgatttcatgattatgtttaatgtata

SEQ ID NO: 383863 - DNA, 3671 bp, Cannabis indica
tgatttgcaaagagtagattggaatctcagtatttgaggctggatgtttcaattgggagggatgcgttgcctagattcaagtggatttaacaatattcgttgttggtcaccaatccttatcgttcaactcatccaatcagacttaatctcaaattcaaagaggcgacaagggtttctccaaaggaaaagatgagttctttatagatacctctccgaatcgtttcttattagcattactcactttcgatatagagatctaggagaaatatcacatataattgcattaatatcacatgtatgctttttttttaattattttctaatgtgtttgttagctttatggggtcctttaaacttttaaatctaattcattgcacttttcaaagctctaagtttagacttgttgggtggctggtgctcgatgattaattgaattgataaaatttattttttatgatcttggagagaggttgatttggggttttgtattagttggttaatttgagtagatgtttatgaatctttaagattgtttgtagttgattatgtgtggctttattttggttttattttgagttagtaaaaggtctcttggttttagtacttttgcttgaatgtatgcaatagttttgatggagtgtttttgagttaaaattttagttttgattctgagtgacttcggtcttttagattttttgtttattgctgaaatggtggttagttgattttatcttgttgtttgtttgttattgtttttgttctatattagtaggtagttaaaatgggatttactgtaaagtttgtatgaatgttttgttttttaagatctttgtttgtaattggtgggggacaaattttgagctgtttggtgatagaattttttggtatacattcatacttcttgtttgtgattgtatgtcatagttgttttaggtagtaggtatgtaaagatagcaatttttaaagaattcaggttgaggtggagatagctttcctgaggcagttatgatgtgtccttggttaaagcaacgaaagtgctagtttgatgggtgagttgtgccattgtttatggctttggtgcctttcaaggctatggcgcctattatacatgattggcccttaattatttagggtaagttggttaaaatatcacattatcatgtatttatagtatataaaattttaaagttgcactgttcaaattttactttttggtataaaagagtaattttggtttatgtatgatttaaggaaagatttaaagtgaattagatattatttaagaggaataaagcttatagggtaatagctttgtttgactaatatttaattagaaaaatagctatataaacattttaaaggaaaattaagcttaacactcaaattagatggtgattatattagtgaattctttctaatttaattttggaaatttatattgacaattaatatgtgtttcactatatatataatataatatcgttttggtatataaatataaacgtggagattttgtaattaataggaggtgggaacactaatagtcaattggaatatattgattttatttttggaaagataccaatatctttgggcagtaaagtttatggagtattgagtttttttttcttacttgtataggaagataccaatataaataatttttatagtaaattgattggttatattaattaggaggttttccgttacatttatatgagaaatgctaaatggcactagtagtgccaagcaccctcctacgtgtcaatatcgctattggtctaattaagtatcgggttccatatagtttaatataatagcttttagggagtatcgctagccaatcgcaagacgacacgtcttaagggtgctaagcactactggtgcccaatagcaatgctccatctatatagatcataagtaaaaaataattaagtcataataaacgtggggatccagtaattaatggtaggtgggaacactaatagtcaattgagaatatattgagtttattttattattggaaagatacgaacatatttgggcaataaagtttatggagtattggattttggatttctagttgtataggaagatatcaatataaatagttttatgataaattgaatggctatattaattaggaggttttctaacccatctttatagaaaacaaataaggaataattaagtcataataaccgaattggactattttaatattttaattcagtcttgattgactataataaggttttaccataaataaatatataaaataatattgctttgttgtgcaaagtataaatgtgatgattttgtaatcattgggagatggagacattaataatgaattggaaatttttatttattctattcttgggaagattatgaaataaatgggccattaatgcttaatgcgcatgagtttttttttttgtcttcattgtattgaaagacactaatatgaatatctatatacaatactgtgatggtactaaggtatatactattatcttcctctgatatttttctatcttaatactattggtagtatattatattttaattgaaaatacagaccactccaatagaattaaatactagtgtgtatcctttaggtaatgtcgaggagaaaaacttagattattctaaggttgtttttggtagatccttatcaaacaaggcagttaataaaagtggtcttaagaggtttttttgaagcaaaatggcagaacaatgctggagtcaaagtggaggattatactgatggtatcttcatactaacctttgaacgacaaagtgtgaagagtagagttttacgaggacaaccttggtatttttcaggtaactatttagtacttattgattcgaaatgtttaaatcaaattactgtggaaaattttaaacatgtgcctatatggattcaaattttttgaattcctcttcctcggattaacaagcctttgggtattaaaatagctagtcgtctggtgaattcttagaatttcacaacaagagaacatttatgagaattaggattttgtgaaataaatcatgtgaaccatgcaacacaaaatgatttatgatcttttatttattagtaaatctaattatattgaaatgagttttatttagggcacaaaatgcaacagattggcttgggtgactcactcccgaatgtcccgggacaggaattcaccttgttagctggccagagtgcacttctagggtgctggctggccatgggttggacaataggggcgttgttgtgctagagactcttggttgcccccccaaagcaataactaccagagtctggctgctctcaccatagaatctttgtggcaaggcttgtcctccttcaggttgggaaaggttatcccaattcttgaggaacttggttggatagtttgtttgtagaccctccctgatgtgtcgattagtctcccttggagaggatctttgatgagatcctgacctcttctggcagttctttcattgaacagccttattaagtcgttagcttttctgttacggtgctctaattacgcctgatgagattagaggatgtacacttggtcatccatccatctcaagaattcgcatctctattgtgcgagtgcatcgcagtcaacagcacatggttcttcagtttggccaacttgaca

SEQ ID NO: 383864 - DNA, 978 bp, Cannabis indica
ttttataaaaaatagtatttttgtaaaaaaaatcgtgtgctaataaaattataaaattttaccaaaatctaatattttttgtgaacaccccaaatataatttgagagccattattgctactattgtttgatggttactttcttaatttttatattatcattgaagtttctttggcctagttccctttctaataagttgtcaaaaatgcaattatatgtctgaaattcaaaattaattaaaacattagatgagaaatcaaatgtccttttgtaaaataaaaaaataaaaatcaatgaaatgtcaataatctgtttgggtaggatgataaaccagtttgaaccacagccaagtaacctgagtaataattaagctggtggtcaaaaacatgaataatatatattttatattagttagtgtaacccatattataataatttatttatttgatgaaatcaagcattaaaaataaataaattgatagactaaactcctttggtcaaatcaaaattagtaaatatttgtccacttttattataattaaatcacattgactctttcaataatgaagttcattttttatgcatttgtttattagtttggaatgaggatttcagtccatggagtgttgcctttaaagtctaggtttttttttcttactttttttcaataaccaaatttaaaaatataacaaaatattatttataaatatatttttcagtcataaattaaatggaattaaaatacttaaatcaatgtagagaaatatacaattgatgaataaaatgcacacatctatttattttagagagttttatttacatcccataaaataataaatacaccatattattaaaaaaaaaatacaaacttaaataatttttttaaaattttttcttcaaattattttatgttaatttcatacttgttttgagtttgttttcataatttttttctaactcatgtatatatatttttatt

SEQ ID NO: 383865 - DNA, 3699 bp, Cannabis indica
ggatcagaagccgggtttagcgctaaggtcgtgaggtggggatttgggtccaggtctggttgtaattcaaaagattgattaagaaaaaaaactgtttaaaaaattttgaaagtgatttttttttttaattttgatttctaattataaaattgaaaagtaaaaacagttttatagaacatgtttttaaaaaatactttcacttttccacttttaaaaacagaaaactgatacgcttattctgtcttgtcctggtgacatggttagtattttagtctgttagtattgtttatgtactgttatttctatggctactttcaatcacacacacacaaatatggaggatcattatgcttcaatgaccctggaggaagaagaaattggtggactgcaatatgggggggacgatgataatctttcagagattgatgataggtggtgccttgtgggtagatttatcacggatagagaaatcgattttttagccatgcaacataaaatggcttcattgtggcgtcctggccgtggattatatgttaaagaattggaaccaaacctctacctttttcagttttaccatgaagttgatattgggagggtgattgagggcagtccttggacatttgacagaattcaactggtttttcaaagactgcaaaggggggagaatcctagatcagttgtattgaataaacttgatttctgggttcagttacatggtatgtctactgaattcatgtcccaacgagttgtaagggatattggcaattatatagacagctttgttgaggccgatccgaacaattttatgggaatttggagatactatctccgggtgcgagtctcggttcgtgtggatcaacctttgaagaggaaaatgaagctagaaaaagtgggaagaccgatctgctaggcgatctttaaatacgaaggcctaccaaccatttgcttcatctgtggcatcattggtcatgcttagaaattctgtgagaaactctttgatacccctgcacatctattaccaaaaccgtatagcctggagatgaaagcgactcctcggagacgtaatcacactataggctcgcgttggttaagaagcggccctagttccaggtccttaggtgaatcgtccaatggaacgtacgggtgcagtccggagcaagttcgaaggccatcgggaggggaaggagatgcggccgttgagtctgaacagaatccgatgagtgatggaggaaatcatgggtttcaaaatagcaatcccattaatcaaggccatcaattgttgattgtgaaagcccttgcccagtctacgggtgttatggctccaataatgtcttaattttgatggaaaaggaaagaatcaagttggagggaattctacaataacggtttcatttcaaaaaaattatatccctactaaagagacaaagaggaaaagaatgacttttgattatactagtcggcctataattactaaaaatgggccgaacctatcttccttggaagacttaggcccacagggtggtgtagtgatgtgttcacaagcaaggcttgaagatggtgatgatatcctcatgattccaaataatgaggtattttcaaaaaacgagtttggggcgggttctggttcttaggcctgccaagcattatgaatattttaagctggaattgccgtgggcttgggaacccacggactattcaattcctaaaagaggttatttctcaaaagaaacccaatatggtatttttaagtgaaacaaagtgtgccaaggagagagttgaatgggtgggtagacatttgggcttggagggtgtgttcactggtggacgaccaaaggagaagtgggggtctggcccttttgtggaaagttagtggggagggcaaggtagtgggcttttctcaatatcacattacctttaatggaaaacccggatgacgtttgactgggatttatggtgaacccagacgacaccttcgacaatcaacctgggatcttatacgaactttgcaatgttcctcaagcttgccgtggtgcatcatcggcgatcttaacaacgtcgtctcgcaacaagataaacggggtggacaaccttatccccgtgtgttaattcaaggattccagcaggtcatgtgtgactgcgatttgtcggatatggagctcaggggatccccgttcacctgggaaagaggccatggcacttccaactgggtagaagttcgtctggacagagcactcatctcttcgaactggtttcagctcttccctcaatccaagctaagtaatcttgaaacatcaccttctgatcactctcatatttttcttgaacctgaaattgcaatttctaatctcctgtaccgtaagtttcggtttgaaaatgcttggctcaaggagcctctttgtgttgaattgattaaaacttgctgggactctatgccgaatgtatctattgataagaaaatccaagtgtgtgcagaaaaattagccgtgtggggtaaaagagattacaggctcgtttaaggagagaattaagaagtgtaaggcagagttgggtgtgttacggggcaagagagatgctgcttctgtgcaacgatttggtgaattaaaaaataaactcttgcaaattatggatcaacgggaaactttttgtaaacaaagagccaaacaattttggctcaaggaaggggataaaaacagcaggtatttccatatggctgctactacaagaaggggtaataatgttattggaagacttagagatggaagtggccaatgggttgattgggaaaatggtctttcagacatgattgtgggctactactcttctttgttttcaacatcgggggcttcctgttctgaagtagtaaaagaagtcgaatgctccattactgaattagtgaacaagaatcaactccttcctattacagaagaagaagtgcgcaaagctctctttcagatgcatccttcgaaaagtcctgggccagatggaatgacacccggattttatcagaaatgttggaatatagttcggactgatgtggttcaggtggtgcaacaatttttccaaagtagatttcttgatatgaacacaagcaaggccaatgtagtcctgatccctaagaagaaaaatcctgagttggttactgatcttcgacctattgctttgtgcaactttctttacaaaattaatcatcaccaaggtgatggaaaacagaatgaaaccgttcatggaaaaagttgtgtcagttaatcagagcgcttttatacatggtcgcttgatctcggacaatattttagtctcgtttgaagtgcttcactatcttaagatgaaacgccaaggcaaagatggctacatggctctcaagttagacatgagtaaagcctatgatcgtattgagtggagttttttgaaggctgtgttgctcaaactgggattcgatagagcctgggtgaacctttttctaacatgtgttacctcggctagctacactattcatggaggaagggaaatgggtcctatcagtccaactgggggtataagacaaggatgccctctttcaccatatttgtatatcctgtgtgcggagggtctctcagcattaatcaagaagtatgagacccgcggttggcttcacggttgccaagttgccaatggggccccgagaatctctcatatgctttttgcggacgacagctacctcta

SEQ ID NO: 383866 - DNA, 721 bp, Cannabis indica
aaaaaaattacagatgaaatatattttctaatattgagacaataaaattaaaatgaaatatatataatacttttagaagaaaaacaaatatatattattttttttaaaatgtgaaaacatcataacaaaattattgagaaattaatacaagcatacacaaaagaaaaattataaaaattaatcatagttaattttttaatattagggtgcataatacataattggcacacgtaatgttgtttaggccatttttgatgcaaaatttatacagctctttgagatttctttagtaaatcgataaaaaattaaaataacaaagatatattctatacaaaaaaacacaacgttttcttctattttaaaaaatttattgtctattttaaggacatgcaaaaatatcctaataaaactttaatatcaatttactattgaataaaaattaaaatgattattggcaaattctatgtaaaatattaaattattattttgaaaaactctatgtaacactagcaaaaatcacacttacctcaaaggtggctgttgagtgaagcaattccattaagttgataataaattcatatttatttgtaatctttattagttcaacgtattttgaacaattaatatcttatttaaatctcattatatatacataaataaatttaggaataattacataagataccattttttgtaaaatatttacatttttgcgtttaaa

SEQ ID NO: 383867 - DNA, 1531 bp, Cannabis indica
cataacctgtggtacttctctatgttataacttcatacccaattggacccttcatttattcgacaaatggctgtttaactcacttatcttaagtggtcctagaaatagaagctatattctactttgtattatacttgggttgcttcactatgattcatgacagacatggaaaggttacgctgatacaaaaccctcaagtcaaaagtattgtctttcggttactttgcttcgaatacaatacaaatactagtctctcagtatatcattcccaatcttgtatttttattcattacagctcaactacgatactttaatattataaaccataattattgtacgtggatatgcacaaaatatacatatacatacacatggaaacaaagtatggaagatatgaaaatacaaacttactattaaaaaagttgcatgaaagatggagtaacgaggtgatacttggcgatgggtgcaaggtttccatcaaagctatttgtatgagtcccccttatcatctgttttatatcacaacaaataagtctgcaatgaagttatctaattgccacgtgtcttttttagacttatccaacattctttttgttggggatgctttgaagtttaagcttggtaggtcatgattatatctgtgataataaagctttcttaggctctcttagcctttctaatgagattacacctttttgtttgataggtatgttcaacataattccccaccacccttttgaggtactttaatttgatcacaaataaataagcattaaaagtaggaaattggtcaaatcatcttgtaatattggattgtgatattaaaatgaaagaaagattgttacattttttttagagtgcttattacagatttttatttaacttttgcgcttaaaattatatccaaatatttttttttgaattttttttcatagtgatatttactataattacaatatttcaataaatttttgaaatttttgaaataatttataataccaaaaacataatttctaatattttagtttaaataacttcaaacctattttcaatatttaaatttttttaaaaatttgtacgaataatgttatgactataacgaacattgccgtgagaaaaaatttaaaaataaatatttcagcatgtatttttaggcacaaaaattgactaagaaataataataaaaggttgattgtagcaatttttttttttccggtaagatagttacatttttgtaactcgtgtttttgtaattacttctctttgaggagaggagccactcttgattatattgttgttagagcattgctattggctatcagtggttctagcaattctagacatattgtcttgtgattgactagcgatactctctaaaatttattacattaaattatatgagacccaatatttaatttgactaatagcgataataatatataagagagggaataggttttaatggttacatttttattgtaaccatcatggttacattttttttaagccattggattactattaaatggtt

SEQ ID NO: 383868 - DNA, 6533 bp, Cannabis indica
ggaacaaagcaaactaggcatgtgcttcccacaatactaatgtaggttctggtatccatcatttgcttttgtctttctgtcttgggtttttttttttttaattattattaaatgaatgtgttttttttttatggttatggaccgtactttctttttttttttggtaaaattaagattgcactaacactccttatctcataagaaagcaggggaacataagttagtttttttagcactactttgttaagttattaaataacaataaaacaaagccatgccacaaaatctatttatttatttattttttttttgaatggataagtttacatttttttttttataatttcttaaaaagttttaagaattttatagataccaaaataattattaattcaaataatttattgtactcccatatgtatatatacatatatggaacattttattactcattaatagttgttaaataaatttaattataaatactaatttaaaaatattaaataatttaattttgatccaataacgaataataaaagaaattttttaatttttatgctgaatattgctacttaattaaaataaatataaaaaaaaaaatctatttttacactatatcaaaaatatatttatataaaaactatttaactcaagttttttttttgccgatttctttttgtaatcttttttagtgaatggaataacctcaatgcatataatgtaatttttttttttctaattagataaaaatattaagtataaaaattcaaattttccaacccattaacataaatatacataatgtgaacaataactatagttagtgactgaaagcaattactatccaataacttttcattcaacattattattatatttataatatgaattgcttattaattatatttgtgaaaaacctttccatttttttcttaacaaacttagtattgtttttttaattagaaatttcattcaactagactaattcggtctcaacaataacaataacatcaaatgagagattagatccttaaaaaatacaatcaacgtataaacgagaatttctagccacaaggtgagcaattcaattagcagatcttttgacaaaaattaaaaaaacatcactaaaagaacgtaaaagttatttacaatcctcaacaacaccaccaaaaatggagttcattacatttggactacagacaacttgcaccaacaccagacagttgaatccgacagtatttataccttggaatgacaacacttcttttagtgccacaatttttacaatttctgtcagaactcgcccctgccgcagccttaaaacccaggcacaacacgacctcgatgatcccaaatgaccccaccaaagtcatgccttccctccttatcatttagagtagcgtcaatattcaccttattttttgaaatctaattttgaccaaagctcagccctattcgagagatatcaagtatcaaacgaagaaaacaaacctttcttgagctttcctccattgttaaagagtgattctagccatatcaacatcatactccacttgatttttcttaacttttcacaagagcttatttcgcatgaaccaaatagcctaagccaacataaacacctaaccactttgttcttcacccagccaagagaataggtgaaaaaaaccagtccccaaacgaccatgcattaactggaaccatagccagaccagtcacccgccaacaattttgagcaaaatcacaagaaaccaaataatgcaaaattgattcacttgccacatgacaaactgaatacaataaagatacatccacatgtttagttttcaattgaactctagttggaatgcacccattaaggaccctccacacaaaattcttagcctttggaggaagccttaacttctaaaacttcttccaaaatgccactgtacaccctcatccacactaccatctcaagctaccagtaaaagtttaaaagcattcttaattgaatactcgccagaagagtcaaaagcccaatacctataataagattgaattagagagaggaataccaagaatacaggttgcctatcattaaatagatctttaataaaatcaacatcccaaactttctctcccaccacaaaaagtctactaaccttctcattagccaaacccgaataaaagctaaagagactcagattttaaccattacgaagccacaattcatgaaataaaagagtctatccccattactaatccctttccttgcccccttacgaaccaactcctgaacaatgagacttctccaaatataacttggattgtttccaaactgcgccgaagaaagttctcattttgaaataacgagccttgtacactctaaaaatcaatgaccaaattgtgccgaagaaagttctcattttgaaataacgagccttgtacactctaaaaatcaatgactcaaacttagtaagaaagtgccaagcttgtttgccgaacatggcaagattaaagtctcgaagagaacaaaaacccattcccccaacttccttgctacgttacatcttctcccaactcatccaagaaataccatgataggaatcattgacgatttccaccaaaaattagtcataagctactcaagatcatgacacgtccccaaaggtaaaaagaagacagccgtggaatatgttggaagactttgagccacatttcaaactaaaacctccttaccaacacgaggcaaaagtttaccatcccaactttgtatacgatttctcatcttctctttcaaaaaaacccaaaacaatagatttatttcttccaattgtgctaggaagacccaaatacatgttactctcatcaacttaatttatatacataataacacaaacaacctcttgagtagcaccgctaacatttttactaaagaaagtggtagatttagtcaaactaatcttgtgtcctgacatcttctcaaaactatagagaatctccatcaccctttgagccccacccaaattagcttggacaaaaaggaagctatcgttgacaaatagcatatgagaaattcaaggagcacccctagccacacgacaccccttgataagttgattccactcatatttttgaatttacgtcgaaaagcctttagcaaaaattaaaaacaaataaggagatagagaatctccttagcctaatcccatgagatggaacaataggcccaattcgattaccaccatgaacaatctgatatttcaccgaggaaaaataaccagaaactaattgcacctaatgttttgaaaagccaagtttctcaagcatagttctgagataactccactccacccgatcataacttttactcatgtcaagatttaaagtcatgatcccctccttcctaaaaaccttacacttcaaatagtgcataatctcgaaagacatcatgatattatcagaaatcaaatgacctggaataaaggcactttaagtatcaaaaatcacctttggcaacaccactttgaacaggttgtctagaaccttagaagcaatcttgtagacaaaattacaaaggaaataggccttaagtcacccatgttcacatgattcttattttttagaatacaaataatattaatatcattaatacgaatgtggaaatcactcgaagagaaaacttgttgggccaactccacatcgttttcccccacaatgtgccataatttctaataaaagcccaaattcattccatcagggcccgaagccttatcaggatgcatttgaaataatgtcgaaccagatcattattttgagctacagagaccgaatattgaatatcatcaagaagattgccccactcgacgccagaagcagtaaaaagattctgaaaatagtcttttattaattgagagagaccatcatcctaagtgaaccaagctccactatcatcttgaaacttggaaatatgatttttctatttacaagcactagccaccgcatgaaaataatgactatttttatcaccatctttcaaccaaaattggttagcccgttgtttccaaaaaaacttccttttgagtcaaaatctcataaaaattatgctgatcttcctcatacaacttttgggaataacatcagttttataacaaaacttctttaaccttctcttactttgcattagtcgctccttaaaatagccaatgatattctttccccaaacagccaatatcgccccacacttagaaattttctcaaaaaaatagcctcaatattaccctcccaaacacttttcaccagttgctcacatatgggctcccataaccaagagtattcaaatttagattgcttgatagagggaataaatacctaaaggaacagttccaaaaaaattagaaaatgatttgatgcagacaactcaagattaacaagatgagctttcttaaaaatattgagccaagattgcgtaataagagctttattaagatgagcctcaaaccatgcactagtgcatcgtccatgttcccatgtaaaaggatacccactaagctcaaaattaagcaaaccacagtcatttaacctgccttgaaaccatccagcaataggttaggatacgccctcccccctctctttttgtcattgctctccacattattcagatggccaataatacaccaaggaagagaagaatgattctttagagtatgaaccaagttccaattattatgtcaaaatctcttattctgctcaccatataagcctgttaacctccaaattgccattctcccaattgagacaaccacatcaatgtggttttttgaataaccaagtaacttagcttcatcagcagctttccaaaactttgcaatgccaccactatgaccttgagcgtcaacaaaaaaaaagcctcttataaccaatacgtgccctaaactttccacaacttctttactacaaatagtttcaacgtgaaaaaataaaattggatttcttttgggtaatgagatccataaggaattgggccaactataggttcccaagcccacgaaaattcctacttaacgtactcattgcgtccggtgggcctgctccataggtctcgccccaagaacattttttcagagcctaatagtatcgaggttcattacttcaccattggctatgtttgacctgccatctttttcgccaactaatttttttttcatctccactaaatcaatatctccctcctgtgatgagattatttccttatttatctcaaaaaaatcacctaaaacatctccattatattcacgctagcattaaaagtattagattttccattcaaattcaaatcactgacaaccacgatcttctctttatttcttacaatactttcaaaatatcccacgtttttagcacttaccctagctggtaccaccgtcccttccatgtttagagccactctccctcaacaccgctggcgctaaacgtagccacctagcccatatcatattagaaggtctctgcgatgtagcacgtataaaatttccatatgactgcaccaaaaaatgacttggagtagtataaatttgaggacacttcttctccgcattacccatgataccacaaataaaatagaaggtatggaccttctcctatttgaagttttcctagaaagtttcaccaccttccctctttaatctcatcctccgctttaaaggtttattcacatcaatggatactcgaacccaaagataattgtgccacacccctttaatgttctttcaatcagattcaacatacgaactaatatagtttgcagtggcttgcagcaccctatcggatcgtgaccccaattgtaagtcatgcacttaaaccaataaatccatcatattcaactttgcatcctacggtttctctccctctttcaaacgttgcaaaattagatgcatacaatcgaaagtccaaggactcccctcaattacactagagatatcaatttcatgatagaattggaaaaggaacaagttatggcttaattcctttacgaacatatcttgccctacctaccataacaaagtcatcacattctgaaacacattaaatttgaaacccttcctataagcaaacgtcccactagataccaccttgtatcaaagatttcctcatccttgtcagctcctcctagtacaaaaacctcatcatcctcgtcttcaatcgaatatcatcccaactctccacattatcattaacagaagaactccccaactccagacttaccaacacagatcagactaacaaacaaaagcgacaagaaacaaatgaacagaaaagcaagaaaacaaaagaacgaaaacaccaaggggctatttagcatcataacttaaaaactttttttagtttttaaaaatagaaaataacttttaaaaactaatagatatcgtttggccaaattttttaaaaataatttcttaaaaacaagaaaacaaattacattaaaatattgttttctattttcaaaaatatatattttttgtctaacatattatattttatattttttgctc

SEQ ID NO: 383869 - DNA, 2534 bp, Cannabis indica
tatatatacatacaaaaaaattagtgacgacatggatcttcagtgacaacaatgtaatcattaatatttttttatcaaaaaaagaaattgactgttaagtttggatggcaatttcccttgcaacatatcagtgaggattttatcgtcactgatagattgtaaagtcgtcactgatactattaacagtgactacaaagtccttactgatgtttttcattaataaaaataactcagaccctatgtcatcctctcattcttgatattctcctttctcatcacctagcattggcttctcaagcatttaccttatcgaagcaccaccagtcggcctcaccttcgccgagcaccacccactagcctctacttcatctctgctggtatttctttcaacacctctctttctatatttgtatatatttctctttcgctctttctctatctctctatctctctatctctttttctttctctatataaatataaatattaaaaatttatcaatagtacatacacaggcctatgagagtgacatgtggggatgtggactaacacaagatcttcaacctgtgtaagaacaagaaaaaaatcatgttggaaagaaagagtcattgggtgcaaataaatttacaaaaagaagagaggtgcagatggaaaagtcaaaatttataaaactagatttgttacaaaggattatactcagagagaaagtgtgaactatgagaaaacatttcgtacagtagccatactcaaattcattcacatacctaatgataatagctgctctcaattatgagatttaacaagtggacattaagatagatttctttaacggaatgttagacgaaactatgtatatgtgttacttgtgtttccagacgagagacacgtggcataaaagggaagatacaattttaacatctcattaattaaccccccaattaaatgaagccatggagaagctccgcggattcgggaataggtgaagaccgagagatatacagagatccatactaccttatttcaacttctagaacaaagaagacttactaccactctaagatctggagtggccctcgctcaaaggtcgcccaaccgatacccagaagggtactcgaaggtcctatcatggatgctaattgcccaaaaagaatgtgaatgtctaccttcgaaatgaacacggctcgcccaagggcagttatgctttttctgatacggcatcggatcttgttccctttgtcaggccatggtagtatgcacacctcctacacatttttgctagaacgttattccaggaaattacttttcaaggtaaaaccttttggcaacatgcatcttgtacagatggtggtcccctattgtccaactacttcaacgcatgagtacaaattcatccaaggggcccaatagtgaactctctttgtatatattttacccttaatgggcttgttgtggaaaccctaggtaggtcataggcatgttcatgttcaacctttagcctataagtacccttctatttttatacgaagggggggggggggatcaaaaccatgatagccaaagctctgctaaaattgctctaagctttcttcttcttcaagagaaataaagagtacaaagttagggcttcttgcataaacattgtaaaaacctcaaatacgccctttgaggctaatagactgacttgtggactagggctcgttaatgcctgaaccacgtaaaaatctccatcttctttatattgcattttattatttcttaagctctcaatatattagtttctgaaaatcttggtaaatattttggtgctttcattgagagctgaaggaagacctaaaaccacagtgttgctatagccatggtttttcctaaaaaatagttaccaaaactactcctcaaggcagtctcaatgctgttatagaagatgtaaaccctctttctccagagcatgctcaaccaagtaatgtgagggaaggggatatatcaaaagctgacgaccaagaacgtgaccccaacaagcaacctaaacgtgtcaacaataaccaaaacgttggagagaagaaagaagatgacgatggagagcgcgtcaaagacaggtactacaaggatgggtaatattatgagcaagaccctgaggttgatcgagtgtttaagaagttgctcgagacccaatagaagttggcccatcaagaaaagatttctcagagaattgtgagaatgatgtctctcctccaagataagtttagagatctaaatgaagaatattttgacgatgacccttcgatggaatgggtcaagggaaacaacagggaaaaccttgctgatgttggaacctctaattctgtacaggacaagggaaagacaaaaatgggtgaccctcaaagccgtacagctctcgtgcctcctcaaaaaagcacaaatctagctagtagatctactcaggcacacaaggccaccgatgcctctgagctcaaatgttgggttttgtaccctaaatttatttcatgattatatattctattaggtccagaacatat

SEQ ID NO: 383870 - DNA, 3931 bp, Cannabis indica
gacaagggcttcatggttttagatggtgaagtctttgatgtacctatcaggaaggacattattcatcgagttgtactatggcaacttgcgaaacgacaacaggtgctgataaaactgtaatgatgcttgaagcatgttgtgagaagtattattggtatcaatactaccatattatatgtatatccaagatttaaagctacaagaaattttgaaatgtacaacattagctttctttttaacaacccacatgctgcaaagtgttctttatataactagtctgcattccagcagaaggaatggactgattggtgctgacaagattgtaagtaaaatctttaagttcttttggattgaatgatatgcagggaacgcattcaacaaaaactatcagtgaggtcagtggaactgggagaaagccatggagacaaaagggtactggtcgtgcaagacatggaacattgcgtggcccccaggtacattgttaaagaatttttatattattgttcctttatgactttttcaaacacagtgatgacattgtaaatgggtaacagtttcggggaggtgctataatgcatgggcctaagccacgaagtcacgctattaagttgaacaagaaggtccgaaggctagggctaaagattgctctcactgcccgtgcagcagagggaaaggtgactctctatctctatctctctcttttctcaatgtaaaacaattagcttctgtcttcctctgtttataatgtgttctgaagtttacttgtgtccatatgtaagcaataaaacaaggctagtagaactctggactgcaggtggtctgattttgttcaattaatgcattttgttttcaatttgttttcaatggcaagggagatttgaacttgagaccttttcattgtaagaaattgtgaagagaggtgtgatacctttaggctgaacctatgaccactcaaataatgcatgtaattagtgcctttgttatttcttagcatgagtgatattctggatttgcggtgaattttgtattcttggaggaatattttatagctgataaactataagtctcaatggggctgaatttatgaacaacatcctaagtaaatatctttcacacatgtttgtaagtaatttcgttttaaacaaatattttatttgtatatacgtttatatataaatgttgcaagtcataaacaaaatttttagtgtgcatgtattgtcatttctcaatcttggcacctattatacatgtatgttctgcaatttgtaagttgaatttgatcatgttatatgacaattgatgatgaaataatgatagagtttctagtttagccaaacttatgaagacagaaagaagagatgcctaattagcaaaacttccaaatgtacagcttctggtttttgaggacttggaggttcctactcataaaaccaagaatattgtgaactatgttcaacaaatggagaacgccaagaaatttctgctggtggatggggatgtaataggtgaaaagttgaaattggctactcaaaatctgcattatgtgaacgttctgccctcagttgtaagtagtgcatgtctaacccttgaacaagatgtgtatttgcttggcgaaattacttactagaactgacattttttatgaaatagattttcatttggattgcctgatggaaactgctactatttaaacttgttaaataatttacctatcctcatgtttaccataatcttaatggtttaggtaattccccataacattctacttaatccattttcttcttacatgttttacagggtctcaatgtctacagcattctgcaacacgacatgctcgtaatgtctcgtgctgcaatcaacagaattgtagagcgaatgaacacaccaattaaccgttgatggcattctaatgttctcttgctctactttagttgcagttctttttttctgttttcttttcattcataggaagaaagagatccctaaaaaataatgaggcttgttataaattactcgaacgacatgtcaattttccttgcaaagaatcttgtaattcaatgtcaatgtgagggagttttatgacacatgattggtaaagaacctatgaaggtttgaatgggaagttacctgatttcttaagttgtcataggttgactacgcagcttgggtgcaatctttgctcgtacttgcagtgatttctgttcgcaaatgtgtaataatactttgtgttaacttgaaagggaaaaagaattacagatgtgttgtaagaagttttatgggagcttttataaacatgatttctaatagtttattttttgggatggaaagtttttaatagttaatatggaatattttttaatgatggttattaaaaaaaattgaatataaatattaattttaaaattaaattattaaattttgatccaatagttaagtttttatatttaacttaactaaattaaaaaaataaatataaaagtcaaaattaccttttttttaatatttttatttttgctgaataatttttttcttttttcgattaatttttttctaatgaaactttaactcatataatctaaaaataagaaatttattttaattagattaaaaaagtaagcatatacttaaattttcttaataatattcattaggagtaatatcaattaagaatgcaccacatttatatttatatattagttatatgtatgtgcataaacattgtataataatgttttagtgatgttatactaattattagtaattttttacatagaatatagtaattgtattagcattttttggaatgtgacacgtgtaaggttcaactttttgtttccgcttatagatccattcataaggcccaagtaggttaataacttggtctaagaatagaactagatcaaggtctatattcaactaagattgccctgcgtttaaagccggacagatgaatctggaagggtagcataaccaaatcattgaacaccagaagaggtgtagacagatatcctcaggggtatcctgaaagagtagtaaaagggatattaaaaattgtcaaccgttcggggctaatctgacgtggcatccctttgacaccagatcccacaaaactaggggtttgtcacctgtgttagacttgggaaaggcgcacaacacaaaaagcaaactaccttttgtccaacgttcactattgatggtagaatctcgtcaactaaatgttaacccaagatatgtttcgaagaggaggtgagttgaaaatttaaaataatttcggtaatttataccttaatacacaaaactatacaattaattaattaaatacaaataatatggaaatcaaatatatagaacaaatatttaagcttgtaaagtaaagagtttaagggtaagaaattgcaaactctcaatttttacaaggttttagaactgccacctacgttcttggtcttcaaagctttggacctagctttgagttccactatcgagccaagttaacaggcttgactaacccttacaactgggaatttttcaccaaggtttcaaatctcttacgatagttttcaccgccaaggactattaacctcaaactcgatttttgtagtgccaatctcactctaactgagttgtttacaataccggtgccaacttcacctcaacaaaatatgaaaatgtgtttatgactacaagaaaattcactctagaaatgtaaagatacaatgaagaacctagagtgattagcaagcacacttagaagatgtaaataaaaatttgagcttaagtgtgtgaaaattgtttaattagattgaacacgaggtgttatctcaaattttgtctacttgacgtggcatgtccatgtaagcaaagatagagtacaggtggagcacagccttgccaatagcaagacatagtctccatacaaggtatgacaaaa

SEQ ID NO: 383871 - DNA, 2138 bp, Cannabis indica
ggcagaagtacagagtggacattgccttctttggacatgttcataactatgaaaggatttgcccaatttaccaggtatgcacatttagaatagagatgttaagttaactaacttaaatattatgttgagggggtgttgagaatcatggggtggacatggtggtcactatctgtatatggctctgataccatgttgagaattatgtgattccatttcaaactcaatttacaatgagtggagtagttcatgttcttatagctcaattttctactatttattctatgtgggacaatgtccacaacaagggacatgttaagagtatattacacactaatatacaatgaaaaacaaatggtaaatagaaatgttaaaagagtcttaagatggtatcctagtttctcatcattggtttcgttttttcctcataaaatgttgtgaatgaaatttgattctttaagaattttacattaagttccagaagaagaagagtataatatggtacatacattatttgagtcttaattagtactaattaatcatgattatgtttgtggtactggtgcagagccaatgtgtaaacacagaaaaatctcagtattcaggggttcaaaatggaacaatccatgtggtggttggtgggggaggtaggagtttatcagactacagctcactcatcccagtttggagtgtgtacagagaccatgattttggctttgtcaaactcactgcattcaatcactcctcacttctatttgagtacaagaaaagccgtgatggtgaagtctatgactctttcactatttatagggagtataaggatgtcttggcttgtgtccatgatagttgtgagcctaccactttagctaattagatcagttttatttactatgaattatggtgtaagttgttgctgtgtattattgtctcatcaaggatcatatcaatatatatgtatgaacaaagtgtgatcttaaggatgtacaagttcataatatgtaataaacacttgctagcaacaacaagaaaaaaaaatgttgggaaaaagacaattttcaatagcggcatagatctcttctagtgggtttggtaaatgagcaaataatcccactagaagatatctattttaattgtaacttcaatattacatatatgctactcactctcactgtctcacacctttactcttcaaaaatcactcatacaattgtttgggggaaaaaatggagaagaacatgaaggcccaattaggtatatgaaaagatacaaaagtccaatcggacatacccctaatgttaaagcccaacaattaggtaaaaagcaaagtcgcccactactagataaaataccaaaaagcccaagaagttgcaagaagacaaaataaagcataaaacgacaaaatatgaaaggacaaaataggagtccataactcggaataataactaacagcggacttaaaacacgaccagaacaaataagtgacaatggtagatttaaagacattccaaagagatgaggcccaatttgaggagtcttagatttgagagttgttgagagacatctattgatgagatagctggcagtttgcaaatcttctccccaaaacttcttgtctaggccaacacctcttagcatacatctcacccttttaagcaaagttctattcattcttttggcaatccaattctgttgtggagtctcgatcactgtcttgtgtcttgctatgccattgttttggcaaaactttgtgaactaatttgagcaaaactctataccattatttgttcatagcttcttaattctcctaccagtttggttttctatcattcttttccaagtgataaaggttttgaaggcttcatcttttgttttgagtagaaacacagaaacccttctggtgtagtcatcaataatgctcatgaaatagctagcaccctcaatgatcttagtccttgaagtaccccagagatctgagtgcacataatccagtttgcccttggttgtgtgtaaacctggagtgaacttcactctgttgcacttaccatacacacactcttcacagaatcccaatttctttccaagtttgcctttgataatgtcctatttctccaattcatagagacctctctcactagcatgac

SEQ ID NO: 383872 - DNA, 883 bp, Cannabis indica
ttctatattctatatttggaaaaaaaaaatatacaatgataattctaatatcaattgattatatagtattatgccattttttcatataaggaaagaaaaggaaaccactaaaaaagtacatgtatttaagtacatatttatcaattgaaataacctcaaattcaaaattgttaaactaaatcaaattcttgtttgttaatgttaagagattcatttgatggtatggacaacatatgattagattagattttttttttcttttcatttgggttacttatttttgtttgatattgaaaggtcatatagtcctatttgggcaattttgtattgtacaagtcaagtagtagtccccatttgggtgtagatgtccttattaatagaattggattttagggttattgaatggcaaattagatgataaaaatagattgttgtgtatagtgcaatggtcccctaaaggggttttttttttgttgtgatgataccatgacgacgacgtttaggaccaaagtgactcaagaagaaattcttccaatatggtaatcctaatatagataacactttatctgagtgagacaaaatatgaaaggcaaaaaaaaaatctttttgttaaggttcacaggtggaaaaagagctttaagaatcaagaccatttatcccaaatgatcaaatttcattgtgatttagtttatttttgagataattaaaaaaaaaaaaaagaattactttatatatatttttaattatgttttttttttacaattttacagtttgaattttttctgttagatttttgtttgcgatttaaattattttagttgttgtgagttgttatgtgaattttcataaaatataaattattttaaaaatgtaaaaataaaaa

SEQ ID NO: 383873 - DNA, 1742 bp, Cannabis indica
aaaataccaaaagatatactagatcatcatctttcaatattttttatcatatatatagtcaatttttttgaattaattttttcttaagaaaattgatttgttgctttaaaacaattaatattttttttgatggatacaaatgtgagaattctcttaattaactctatcaaattgagagagttcgatagagtttggttaactctatcgaattgaaaaaaataagtacatcaaagagcaacttaatcgatgtaaaagcatcgtgatcaacaagaatttggcatgcattattagcctatgatacgctatgcatatgaccacttatcgcataaatttaatcatcagagttatcatataataatcaatataattattaatttttaataaagaaacaaaaataataaatttgatattaatttttatttttgaaatgaaataattccattaagagtcacaaagccaaataaaagtcgagtacaaaaaaacttaaaaacttgaacaactatatccgtaagaaggcccgaccaccagacacgtgattcatctagaccaagagtcattggctcttagctaaagaatgagcaataagattcttacaccttttacaatgagataaagaaatactagtaaaagacttccaaacttgagcaatatcattaagtataatactaaacttattgaaatgagtgtcatgactattaactgcaagaaacaagcaattcaaaaaattagtgacagacttataacctagttgtaggcaaagggagagaccgtgagcaaagccttggcctccgccacgtgaggctcaagagaccccatactcaaaaatacactagagaagaaaacatgcccattaggactagacgccacaacctccatccccactttgcaatcatcaatacgaatcccagcattcacaaataagttcacatcacttaaaactagatctgttttcgtgggcatacccatcgtcccctgcacaaaaatcatgagacaaaagtcgacccacgttagccttctcatatctccaaaggtaattatttgcccaagaactgatcatatcattagcaagaagtttgtcgtcatgaacaaaagtattacgcttttgccaaattctccaactaagggtaatgaactcctccaattcttgtttacttaaaatatccatacagccaagcaataattcataaaaagaagaagcattctttatggagttgagcccttttagggtccaccctaaccaaatagacttaagcgaaggaaaaagccaaagagtatgaatagtaatttaattatcttagaaatggatagggcaaaccttagacacttttatactatggcgaatcaaattagcataagccggtagaaaatttagacttaccttgcttctaaacaaaattttttatctttgccggaaggttaagacgccaaagaatcttccaccagcaagacgtccctgtagagcttacaaattgaccccaccctaaactcgaaactgtgctacaataaccactcttcaccgaacaaatctcgttatttgaaaagtgccaaataagcttatcctatcaaggaatcaccgaacatgaaatagacaaaatagcactagcttcaaccgcatcaaacaacccttgaattaaaaaggcgttccaacatacagcaggataaatattttactatagtattgatgtaatttttttggattgtacttgagttggatttgtttgagaactccagttcaacttttt

SEQ ID NO: 383874 - DNA, 4825 bp, Cannabis indica
agattctctcttcaatgcctctagacgaatcaaatgaatatcgacgacgaagaagaggaagaaaaagaagacggaaaagacatagcttgaaatcgacaatgggagaggcttttttttcatctcacgtaagtcgccgatgggtctggttcgtcgattggtttgattcgtcatggggtctagttcgttggtttatggttcatacaaggatgtgataaacgagacttataatcgtttattggggtagttttgaacatattttagtagttttttattttttattatttgagtttatgcttattttcttcttattccaggttttaatggtaaagtacatcatatgagttaaaataagagaaaaacatgatcaaaatatgaatatggcggatttaacatggaatttgggggttgtacgaaatattgagctgaaaatttaaattttggatgctcaacacactccgtctgtgtttgaaaattaagtttgaagtttcaagtcaagttttcactattatctgttcactttaaggaaaaacattttgaataaaagttctagatttatctttcagctttctgaaacatcttgaatcatccaattccaaacaatatccagagaattatggccaaaatgttaagagtatagaatgaatcctaactgtattgagttcattactctatttgttagttatttccagtttttctgttgtaattagttatgttagttggtggacattatggtcatttcaatgacagtgtttgtacctatataatgtgtattcctaccatcctttgattaatgagaaaccattttataataattcacttctttaacatggtatcagagcaggttattgctctcactctctttgaaactcgttgatgcatattcgtttgtcttcttcctcgtttcttcttcatggaatcgtcaccaacactttctactgcaaccagccagaacagagctactgactctggtggttcatcgttcgtccctattgtcttttctcacaaattgtccaccaagcttgatcatgataactatctcctatggaaaccacaagttctttcagccattagaggacacaagcttcaacaatacatctccgatacctttactccaccaatcctgagatcaccaatcctgcctttatggactgggatcaacaagatcaacttctatattcatggttgttgtcttctatgtcagaaccgatccttactcgcattgtaaattgcgaaacctcagccaagttgtggtctgttcttactacgtattttgcttcataaactgaggccaaaatcgaccaattcacaaaagaaaggtgctcatactctcaatgagtatcttcttaaggtacgttctttaatcgacaaattgaattcctttggacacaaagcttcaccaaaagaacatattgctgctatctttcctggttttccttctccagattatgataccttcatcatctctgtaaattcgagggctgaacctcttgaagtcactgctcttgaagctctccttttggctcaagaacatcgcatagagtgcaagaacaaagaccttgattcagcctccatcaattttgccaactccagtttcagatctcgaaacagcaatcagtcagggaacaatcattggaactcctatcccaataatcgatctggtagcagcatgtcaaatgttccaccttacagaccacctatatcgaatggcagaggcaactcattcaattcatttggatcagctgggaatccaaacaatttagttcaaggaacaagtaaaaacaacaacaagattatctgtcagatttgctctcgtactggtcatattgcatccaaatgctaccaaagattcaacccattattccctggctatggttctcaaagtcaggaacaccctactgctatgcttgccactgcataaacgatttgtgatgattcttggcacccaaattcaggggcaacacatcactgcacaactaatgaagataatcttgctcaaaagactgagtgtcaagctaatgagcaggtgtttatgggcaatggcagtggcctaccaattcaaaacataggtaaaactcaaatcttggcctcagataagtctactttacttactctaaataatttgttgcatgtgccacaaattaccaagaatttgattagtgtatcacaattctctgctgacaatggtgtttattttgagtttcatcctaacttttgtcttgttaaggatcagattactcagaaggtgttgctacggggttcacttgatgctggtctctatgtttttcaatctctgaatctgcctaacattcctgacagaaatcagccttgcaacttacatgttcctctaaatgcatcttgcaataatgttcaatccttgcatgttcacaacctttgtaacactgttcacaatgtaacatcttcaaacaatgagtcattgtttcatttatggcattctaggcttggtcacccagctgccaagactgtcaaacatgtattgaacagttgtaacattcataatatcaataaagatttctctaatttttgctcagcctgctgcctaggtaaaattcataaattcccctttcctaactcagacactatctatactcaacctttacaattaatccacactgatttatggggactctctcctatggtttcatctaatggttatttttactgtgttcattttactaatgccttctcaagattcacttgggtttatttacttaaaaataaatctaatgcaattcagacattcatcaattttaaaactcaagttgaaaaggaattaggtttgccaattaaaaaccttcaatccgattggggaggtgaatttcaagctttcacttcataccttgttgaacatggcattcaccatagactttcttgcccaaccacacatgaacaaaatggtgtggctgaaagaaaacataggcacctcataaaaacttccttgacccttcttgctcatacctctctcccattaaaattctgggatgaagcagtaagagcatcaactttcctaataaataggctaccttcatctgtgcttaaaggtgacactcctcttcacaaactacacaacctacaacctgattatagcatgttaagagtctgtgggtattcttgtttcccaaacaccagaccttacaataggcataaactcaatttcagatccgaggagtgcacatttctagggtatagcataaagcacaaaggctacaaatgtctttatgctagtggaaggatatacatctcgagagatgtcatattcaatgaacacaaattcccctttgctgtcattcccacaccagtagcacaacaccttctcactctcatctcaacacaccaacaacctcagttcctgtcataccacccactcaaactccttcctgtagacaacatgacacaaatgatccctcacttgtgtctgctcaattacccttgtctcactctgattctatgttacaacagacagattctgcatcatctcctgtgaaccctgcaacaacatctcagcccccaatgaacactcatcctatgattacaagagctaaagctggggtatacaaacctaaggtatatatcagctcaaaaacaccattaacagtacaagaagcattgaaagatcccaagtggaatggagcaatgaatgttgaaatagtggctctaaaaagaaatggaacttacactattgtgccattaccacaaggaaggaaggctataggatgcaaatgggtatataaaataaaagaaaatgcagatgggagtgtctctaagctcaaagaaagattagtagccaagtgttttcaccaagaatatggctttgactactcggaaacctttagtcctgttgttaaatcaccaactatctgaatcatcatcaccattgctctctacaaccattgggacatcaaacaacttgatgtgaacaatgcgtttttaaatggtgatctcattgaagaagtatacatgcaacagcccccaagctttgaggaacaaggtccaaatatggtgtgcaaattacataaagccatttatggcttgaagcaggccccccgtgcctggttcgacaaattaaggaactcactcttgcattgtggctttcacagttcgaaggcagatgcctctctctttattcagttcttgaacaatcatacaacttatgttctcgtctatgtagttgacattttaaacactgggagggattcaactgagatttcatcactgattgtccagctaaataataaatttcctctcaaggacctcaggaacattaactacttcctaggaattcaagtaacagcaactgatcatggactgcacctttcacaaacgaaatacatcacagacattctttgcaaagccaaactagagtgtgccaacagccttccaactcccatgacaagtggggaaaaactatattgcattggcagtgaccctatcaaaaatcctcagcagtacaggagcttagttggcgctcttcaatacgcaaccttaaccagacctgaaattacttttgcagtaaacaaagtttgccaattcatgcactctccacttgaatctcactggaaaacagtaaaacgaattctaagatatctaaaaggaacccttgattatggtcttgacatgtctcgacctacatctctacacctggttggcttttgtgatgcagattgggcatctcacattgatgatagacgctctaccactagcttatgtgtctacctaggttccaatgtcatctactggtcctcaaagaagcaacatactgttgggttttatgccctaaataaaactctttacaatctgattagttatc

SEQ ID NO: 383875 - DNA, 3171 bp, Cannabis indica
ctaattgaagttactctgaaccaggagtttccaaaatacactagattttgaagataaacatggaatgaatactcaagtaggagttaaatatgaatggaaacctcttagttgctctcactgttttggtatggaacattcaacaattgagtgcaagaagagtacaaaaggtaaacaagaataggtgtcaaggaggacaagaggaatacagttactacaggccaacataaaacaaataaataagttgatgttgatggatttcaaattgtgactaatggaaggaagcctaaagagattgaaaaggcggctaatacgcatactgagaatttattccaagctctagatgatgtaactattatgcaagatgagcctgaaaatgtagagccaatatcaagcaagctagaaagggataaaaaaaagagagagggggagatccctctcttactcatggataagtttttatgctggaacgtccgaggagtcaacaaccaacaaaaatagggcctagttaagacatttattatgtcccaaggtgttggtcttgttggtcttcttgagataagggtcaaggcccagaagttaggggtcttgtattcgaatgtgtttataggttggtgtttctcatctaacatagcatggaactcaggaggaagaattattttagcatggaatccttttagtttcaatgttagcatattaggtgtacgagttaaataatgtacatgtttatgtctattgtggatggaacttttaaaagttttgttacaatagtctatgcattcaatgatgagatggaaggaaggcattatcgaaggacttacaagaatttgcagctttagaggcttagttagtaatgggaaatttttgctgatataatagcaaaagaggagagaaatggccaaagagctaaattccatactgatagagatttcttggactgtgtagagtactgtcaacttgaagatgtcaaggctagtggaagtttttttcctagagtaataagcagcatggggaagataggatttatccaaagattgataggattatgactaatcaatcttggataaacaaattcataaatgcaaagccatttttcttaatgagggaatatttgatcatacattaggggtgctaactctatatccaaaattacctagtgggagaaagatatttaagtactttatgggaggaggcttcttatatggaactatggactgtgtggttgtgtagactgtttcaggagtttttgttaggagagtgaagcatgtaagctttttctccttctcccttaagttttgtggcgtaggaggattgtcgaatttcccctttttgccatttccccagccagagccattgttgttacattttcctccattattttgactattagagggctggtgacattgcctgtgtggcaagtgtgttgggtagaactgaaagttgtctgccattttgggtctgtttggcacctgcctgtctcccagtttgggcttgtcagacaacttcttcaagcttaataaaaccttctaccccattgaggaaatcaatcatgttttgtgttgagtgtcgatggatatcttttcatagaacacccaaaggcagtatgccactcattacgactgtgtacctatctttctctgccagattcttgacttttgtagcctcaatcatgaatctttggaggtagtcttttagagattccctaggtctttatttgacttcaactaagtcttctagcctataaggtgtttgccgggaagatgagaattgggtgtagaactctattgtgaaagagtcccacgaatcgaatctcccaacaattagtttgaagaaccaatactgtgcggttttcaatagggttgctgggaaaatcttggaatgggtatcgtctaccacattttgcaaatccatctgtatttcaaaatatttgatgtgagccaatgaatcctctttacccatataccatgcagattacaggctgaaaccttggaattgttagttatggatctctttagtgttacaataatgagaatgcgtgttacaaatggaaagtatgaggacacttatgaggtgatgagaagaaaagaaagagttgaaagccttagtgcttctaagctctaagtgcatgtgtagaatgaatgaatcgagatctctcacgtagggttaaggccctttatatagtgtcagggaattacaggttattattcaaaatacataacagataaaaaatatccctagaaaataaggtagttacattatggtgaagcttttctattttcatggactgttcaagtcgtttcgaagttgtaggggcgattaaaggtcttctaaaaggcccatgaaagaaactattgcccaattaggatgtcaagatgtaagttgtgagttgggcggctaaccttgtttggaagttgcacggtttgtctgaagttctcccttggtcgaccagctaatggtccgatcaaggtcttgtcatatcctatctctagcttgtgctatatattattccttgaaaccttgaggcttagcagtcaaggaggttcccgactctatgctggccggttcttagtggtttatctgtacgtgtgtgattggtcttgatgacatgcacgtcattgtacaaaaaaattgagataacattatgtatactagatattaataatatacaatacatgtttacttagaattgtattaaagctgctattacctagttattagtttaaataataccaatttaattatatttctcaaatatataaaatttaatataattaacacttcttaatggaagaaaattccattttgttattcatattgacgtatcatataataaagtatcaatgtcaacacactacaacaaataccattaataagggcggaacagtccgctggtaataatcctggaatccgccagtattgcccattagcggcggggatccgccggtaataatccgtcggtaataacccgtcgctattaatcattaatagcggcagactgacacatccgccgctattaatgattaataccggcggaccaatagcggcggggtccgccggtaaatacgcgttagaacagtcaaatctgaaccattattaccggcgggtatccgccggtaataatggtttttttaaaaaaaataaaaaatgtaataatattattaataaatattataa

SEQ ID NO: 383876 - DNA, 2254 bp, Cannabis indica
agtaacagttttttgtagtggtttcccctatatatactgccttaagatgataaaaaatgatacaaaatatacaactgcattaccaacaaaaaaatcctctaatcttcacgaattatccaattttatattacgtatattaattttgtacatcagctagaattaatggatataatgtttctatgatatagataggccaaagtgatactccaaaaactttttatttttaatttgttcatgtcccttagtaattgcttttacttgttgtgccccattgtgccatcaatgaataggcgctgcccttgaacttaattagaccatgaaccttttcaagctgcccatgaactttatcaatgacatttataggatgtgtgttagattttggtgtgaaggatcagatgtactgaagaacaaaatacattggtgtacttgagaccgtctttgcaagcacaaaaatgatggtagaatagactttcgtaatcttcacctttttaaccaagctctattagtcaaacaagcgggacacctttataactttcccaactcacttgcaatcaaaggactttatcatcgtacaaaagactatggagaagttgtttcaccaaaaacaggttcctatgtttggaaaaatattttgtggggtaaaaaactatttgacctttggtttctctcgcgagttggtgatggcaattcaatatcaatttttaaagacaaaatggcttcctttgcctttaggtaccattatgactcctctagacatgattaatgaaaacgccttagttctgctctttgtcattccaatggtggctggaatatttctcgaatacttctcacctgaagaagcaagggcaattctctcaattccttagcaattccgcaatgttcctaataaacttatttggcggtttgagaaacatggtttttactctgttaacagtggttattggcttggaaaccaagacaagaacgaacctcatgcttcattctctaatgctagttccccttggtggcaaacactttggcacttgaatcttcctcccaaggtaaaaaatttacttggagctaactggattcctgctaaggtcattctccacagacatggtcttcttaacgatgatttatgtccaatttgtaactgtgaattgcaaactacttgtcatgcgttgtggggatgtagtaagcttgcctcaactcaaaagttatgtgcttttgaactcgataacccaaatatgattgtaaatgatatctataattttcatctgcatcttctacaacttcctcacatagaaattgaattggttcttgttacttggtggcgtatttggttccatcgtaataaacaagttcatgaaaatttaccattttgcctgaatttattggtccttgggcggttaactttttgagttcttatcatttagaaaccaaaaggaattctaattcccttgatcgtactacaacaagtgatccacctcattagaaatatatgccctccttcaggcacgctcaaggccaacactgacgcagcttttggctctagttcgcacttggtatggtgatcagagaccatgatggcaaggtcactgcttctgtagcgtggaaagctcacggcagtcctcctccagagtgagtcgaagctctcgcaatctgtcattccctctcccagtgcatctcttttggcatcacaatatccagattaaatctgattgtcaaagtctgatccataaactcaacaactctctctttttggactcttttttgtgtttacttcttgatgatattagagatttatgttttaattttactattgtattttttacttattgccctagaactgccaatggagcagcgaatgctcttgctcattatactttccgggctacttctagcactgtttggtagcttgattatcgtttttgtattcaaaatattattttggctgatgtcaatcatcaataaatcttttagtctcggtcccttggagttcttctcattgatgatgtttttctaaggatattctctaaaaaaaaaatatttaaatagataaatttaaatttaaatttatactttctataaatatttataaaaaattaagccaccaaataagggtgcactacaagaaaattagtctttgtcgtcataattttgcaccaatagggctcgtttggaacgccgtattaggtcgtattgtattgtattgtattatattgaattggattatatatcatatttttatataatactatgttaaactttaatt

SEQ ID NO: 383877 - DNA, 1921 bp, Cannabis indica
agtactttgcatgtagtatttacaatttaatatatatttctttttttttttccaatttacaccttgatatataaataaataaagaaaataaaacctacataatctctataaatttaaaccaatccttaacaatgtgtacatatacttatgcatggcataatatatatattttttttcaaggtaatgagttgaagatattcttaaatattatattttatgtcaaccaaataaataaataaaatgatgaattcatatattcttcatgttgtaactttttttatatttattggactaaaatttatatgttatattttttctgtatatatatatttttggactatatgcatgtacgtgcgtttagacccaattattttccatgcatgtccatataataagctaatgttgtaacaaatatcatattattaataagtaaattttaactttttttaaaaaaaaaataagtaaattttaaagagggtcatattgatcaaatttttgagttaatatctttatatgttactatgtccacggttatgaattgaactgtatatagttaattttcataaatatttttagattgtataaatatatagtttactagggttttgcttaattaggttacgttcagttgttcgaactcttataacgctattttattttcattcttagtacttttcagtaaaagttaagttaagtagatacaatgagtacatatatagttcgtaatataaataaagcatgagataaaaacttttattcgtagttccctaaaataaaaaataattcttaatagaatggaaaaataacatggtcacccccaattttttttattattttttttatttatttttactaaggtaaacagagggagagagccaaagtagagggaatttcgaagagagtttcctatgacaagaaaatggtgagctatattaatatatataatacaaactatatatatatagatatgtaggtgtgaccatatatattatatgtattgatgatatataatacataaacttaggatgctcttcttctccaaacgtccaatcattcatcgacatttgcagcttcctatcctaagagaggaggaccatatattacatatgtatatatagcacaattgagatttttattccatgccacgtagtaaccctaatgagatttttgagtaatattaatattttaccttatcttctataggttcttttgtctcttttgatacataaatgctacttaattaattaatttaattcgtatatataccaacacattattaattatcaaaaaataactaaatttttcagttataatatattttttttcagtaaatataattttttgatcacaacaataaatatttatgattaaaatataatatttaaatataagttgtgactaatttaattttaattataataagtcttataactaaaaatatatttaattcacaataattataatttttgtgattaatacttaattaattagcaagagacattttaatcacaatataaaaagataatttataattagtcacaaaaacttttaccaaaagtaaaaaaattatagtaaatagtgttagttttttctttctatcatattattattaagaacaatattataagttatattagtggtatttagtactacctaaaaaacatcttatgattagttaaggatattttttaaaaactattacattaaattgtatgagactcgacgtttaaacatacctaaagatgtgccatattttaaaggattctaaatactagttacttttagcatttctccattattaaaactatataattatttaatattatatataatatggaggtagagtatttgaatatatacatagtctaatgcaggcccggccctgggcataggcgggttaggcatgtgcctagggcccacc

SEQ ID NO: 383878 - DNA, 1597 bp, Cannabis indica
gggaatccaccagacctttagttttctaggacatggatacaggtagtgactttacatggatccagtgtgatgcaccatgcagtagctagtgaccaaggtaaagcctaattctctctgacttttatatataatcagttatgcaatagtataaaccaaatgtgttaagctgtattgaaaggagaaaggtttgtttttttttaatcaatgattgtccattatgcagggaccaaatccattatataagcctaccagagataatatactaccttctaaagactcattgtgtacagagattcagagaaatcagaaaactggacaatgtgaaacatgtcaacagtgtgactatgagattcaatatgctgacagtagctcatctttgggtgttcttgcaaaagatgaccttcatttaacaatgaaaaatggttctttgaccaatgtgaatattgttttcgggtacttttctctacaagtttgagaatttctgtttttcgttttagttttttatttcttacattactgactggagaaatgtctttttgcctttaagttgtggatatgatcagcaaggcatacttttgaactctcttgcaaagactgatggaatcctaggtttaagccgagctaaagttagtttatcgtcccaattagcaagcaagggtgtcattaagaatgtggtaggccattgtctttccattgacgggggtggtggtgggtatatgttcttaggtgaagattatgtaccacattggggaatgtcttggatacctatgcttgacaccccatctgtgtaagtaatattatcttttcatcagttttgttagcattatttccttttaacatgttcttaatggttggtgatttttctctatacccggagactttggcaggaaacatatttagacgattctgtttggaggcaacaatatttcgatccatgaagtactcattcttttatagaatttatttgtcaaaatcgcttttgatacatgagaaaatccacattcaaatgtttaactctcttcatgtagtttgtgttgcctcatggttttgcttctatagcccaaatttgtacctagaacatgttttctttcggtaatttgcattaaacacagagctttctttgaatgcttatgtgctccattcagttcttagttttcatgatctcataaagactatccttttcttttttgcaacgcgtatatgaatatgattttgctctctctcctcagggatttctatcattcagagatagttagaataaattatggaaacaggcaactgaaactagggtcatggagcagcagagcagaacaagtggtgtttgacagtggtagttcttatacatacttctcaaaagagccatactcggatctggttgcttctgtaagtactcaacccacttcattttaaaaacaacaatgaatttcatgagaaacaaagtcatatgtttgtaaatggtacagcttgaagacctttcagtagtaggactagtccgagatttttccgatccttcattgcctatttgttggcaagctaaaatgcctctcaggtatggcaaaggctgatgcatatcgaattacatttacggagttttttt

SEQ ID NO: 383879 - DNA, 2434 bp, Cannabis indica
aaaaaaaaaaaaaaagaagaaaaaagatcgatcagatcatcagacaagagatcgagatcgaaagattagcctttttttttttttcctatctttttactttagttaattgtggtgtatgtatgatatatatgtatatattcaaagtttggccgcaagggaaaaagaacacttatcacggccaccgactcataatatatcaaatattcaaacgcatggaacatagtttataaacgtgagttcacatgaccctttatagatgcttctatatatactttgtccttttttatacttatggtcttattaaagatctcttgatcacgtatatatatatatatatatatcatatgtatatacatacatacaaaaaattaatgttagatatatatagtaatattgtcataaataataagtatatatcctaattattaattaattaagaatccacccaatttaactaataattatgggaccccattatatcccattatgttaactatatgtatattattattttggttacatattccaatcttatcacatctttgaagtagtcaaaattataaaaaataattaatactatgtgtacgtagtgtacacactagacactaaatagccggagagctagctatagctaattaaaattttaaattatgaaataataaacaagtgttcaaaagactaaagaggtcctggcctggaaaaagtgtgatgatctatcgatcgttaaattattaatacatataattactaagcaactatatatattaatattttagctaccttaatttgttaaatgaaacctagctatatataagatcggcacaaaacattcccttttatgttgtctcttttttcttttggtttgaaagtgattcttctgcttactatatatgatcatcatcatcatacatatataaaatatggctaaatatatatatagtgcactaagagataagaaagtaatgtagaaagagaataaagaaataaacaagagagacaaatacgtaacccaatatttttcagataaaggaaaaaatgaaagtaaaatatcttcagatgattcatctcttcatcacacgtacgagccttttcttttgttgccgtaactttcccacgtgccatggaaccccgttcacactacatgtatatataaagtgtatatattatatatactattaatttacatgggttttgaaaaatgaagtggtcaaaactatacgtatgaaagtgtctagtcgagtcgagtcgaccactttgtcggaactctaaaccaaaaaaaccatgcatttaaaatatttttgattcaatatttgcaaccggctttgttttcgtccgtacaaaacccttgacctacaataaccagtcaaccttttctttctattcatatatgccttccttctcatttctctcatttcttccaaacccagagaatatataataaaccactatcgatcccatactctctctctctttctttttcaaggctagtacttaagggacgttgatgaaagattattatatatggagatgaagaggaagatgatgatgacaaaagatagcagcaacatgatgatgatgcagggatcttctaataattcatcatcactttctgatattatctcatcaaacggttctaattattttccaatgtttgagtcggctactgctgatcagttttttggaggtgaaaataataagagttccaacttagggtttatggagcttctgggtgtccatgactacttcactactactaatattcctcctgctccttcgccattctttgattttccagctttattagcttctaccaatactgttccaacttcaaccactactaatattactagtactgatcatgatccttttattgctattcctaaaaaagaggtggtcatcaattcggatgcgtgcttgaatagtactagtaatattaataataacattaataatcaacctgcaacgccaaacacttcctccatttcttcggcttcaagtaccgatgctctcaatgaagaacagactaataataataaagctgcagacccagaatatcaagaagaggaagaagaagatgatgacgaagaagaaggagaagaccaaccaccaaagaccaccaccaataaacagtcagtatatatatatatatttatagtttttatcagatttttttttctttttgaagctttcatattaaattagatcaaaataaaagtgggtttctagctcttatcttcctttttaggggatttaatttaatttaaaacttatatgatcaattgaaaagttaatagtattgagtattgattaatgttcgttgaatatatataataaggttgaaagcgaagaaacaaatcaaaagaaacagagagacccagatttgcgttcatgactaagagtgaggttgatcatttggaagatggctacagatgga

SEQ ID NO: 383880 - DNA, 894 bp, Cannabis indica
aaaccagttataaataatataaatgaaatatgatataaaaattcataaatataataaacaactagaaaaaaaaaaaagaataaccatctaactaaaaaagtgacaaccaaaacaactagttctaacgataaaataacaatgagaatcagatcaaaaactgaaaaataaaacaattatacagaaaatttaaaagaaaccagttctaattatcaacttatactcacattctaatattactcttccttttaaaatgcaaaaatagaacaaataatatttgtgatcaaatatggggactaacaaactttgttaagttgataaaaatcgaaataaaatgcaacaataatgacatagacatatcataccgaatttcactgggaacaatgccaatgaaactactgcgtgacaattcatgttctacattgagctttgaaagacacatgctcgagtaactatgcaatgccctattgcttaggaacactacattgattttctacttactatgcagtcccttattaatcaaagagtttctggaaaatcatgtcaaatttaaacttttaaattaaacttttataaatatatattcatacaaaaatttgggatccgtctttaaaatttatattcatattcaaaatacacttatacacatgtcgcattacgactataaaatataggcccaagtcatcccgagactgaactcttcaagtttaaccatctttatatgtgcaatcatcacaatatctttgagttgaaagactcaacaaaaaaagtatataatatataacatattaccaacttgtctttaggcgcccatatacttatttataacttttggccaactatgattgaagattcaaaggcctatgtataaaagtgtgacaagtgccaaaggttctc
